United States Patent Application Publication US 2011/0183924 A1 - sequence listing, part 65

SEQ ID NO: 225457 - DNA, 578 bp, Homo sapiens
tctcgttcttcttcatcacacttcttatgctgtgtagtcttacaaaagaaatcacaaaggcccttgttagcaatttttagttaagatatttatcatgctgtatgttttgtgataccagctttcaaccttaagatgtcccttgaaaaagaatctactccctctcactcctcccattatagctaaaaagaggaagcaggcttcaacttggccaaatcaattttgattagctttgtccttgtctaatcagcctccatgtagtatattttccttttcacagattcatttggcactcttgaatagcatgtgtattctgaaagttattgacgaaagaggaaaatttaaccatatcttttaaggtacattttaaaagaagaagggacatccatttgcaatctaccagaagatacctgtggtttgtgaaagcacatggtagagtcggagatatcattttagtcactaaaaatgtttaaaaacaattggtaaaataggatccagattataacttatcaaatactgtcattaccttttcttcaaacactgaaataaaaataaagttataagtaacactacaaaaaaaa

SEQ ID NO: 225458 - DNA, 496 bp, Homo sapiens
gcaacgcactttgcagatttaaggagcagagggcgtacaggggagagtgagggagccagggcagagcggggaccaggaaccagcccggtggcgtcagacttgactgggaatgtaggggctgtccttaaggccttgtgtttaataaccattgagtcacaaaagcagctgctgggcagtgtgaaaaacagcacggagacaagcaaagtgctgggattacacatttgagtcacctcaccctgttctgtcatttaaggttctaaagtacttggagaggaagcaagagcagaaccacagcttcagccgtagcagaagaaagagacgggaagtgagacaaatcttgtcttttttgagcagagtttccttagacactggtctaaagtttagagcaagacctgggcttggtggcgctgatggcaggcgtgcctgccgagggctccagtttcaagaagctcacaggcagcgcgtccagaaaattacagttacttgtaaagattta

SEQ ID NO: 225459 - DNA, 552 bp, Homo sapiens
tcatgcagagtactgcactccgcctgggcgacagagcgagattctgtctcaaaacaaacaaacaaacaaatcagttgacagtatacatagaattctatttctggactctcctgtgttttctttatgattctaccctttaagtttatttgttttaacactatgctgtcttgattactatagctttaaaataaagcagctttcaaacaaattgagtctttgatttaggatcttgtagtgctttggagcggctgtttaatttgttcagccaataagtatctatcattttggatctgtgacagatattatttttattacgtggtgccataaatgcagatataagaaattaggaaaagcctagattgggccctgtagttttcctttcagaatttctattatgaaccttacattttaaaattattagtctttttcatctcttactgatgtgatgaaagaggattgcaacaaccatgacttaacgtaagtgtctgtttaccagctatcagtcatgtttgtggaaaagggtgggatataagaataaactatctaaatgtg

SEQ ID NO: 225460 - DNA, 394 bp, Homo sapiens
agctaaaggtgatgggcttccattattcctgtaggctgaaagggctctctcctgaaaaccatctacacagaaaacggaagaggtatgaacccttgctgagtgtttgtgcatgtttgtaaaaggtcttttaaaacaatgtgtatttagggttttattttctcatcttgattcatgagcctcagatatgcaacatttaaaaattattgatacataatatttgtgtgtatttatgaggtacatgtggtattttgttacatgcctagaattacaatgattgtgccagggtatttggggtgtctgtcgcctaagcatttatcatttctatgtgtacagaacatttcaagtcttctcttatagctattttgaaatgtataatacactgttgttaattgta

SEQ ID NO: 225461 - DNA, 580 bp, Homo sapiens
acacagaaaaaaccacacacaaaacaagacaaaaaaaagaaatcccagtgatagctgacattcggcctgacagcaggagaggggaagaagttcccttttacaaacttctgtaacctgaagatagttttcaggctggagtgagatggtgcaatcgtggctcaccgcaacctctgcctccccggttcaagcgagacatcctgtgtctcacgctcccgcagtaactgggaacaaagggtgtgttgtcagcacaaactgggttaattttggaattttaagtagagacgggactttgccgtattagccaggctggtttcaaactcctgtcctcaggtaatccaccccgcgttggctccccaagtgcggtgaaccttgggaaaaaggtagaccctgggggcttcgcttcatttcccctttttataacacagaagatagtatatctatatgtactatattacacattgggccttttccacttaacggtgtacccgggaaataactctgcatcagttgaccgagatattcctcattctttttttcacagctgcatagtactctgtcatgtgtgtgtaccctagtttat

SEQ ID NO: 225462 - DNA, 329 bp, Homo sapiens
acacagaaaaaaccacacacaaaacaagacaaaaaaaagaaatcccagtgatagctgacattcggcctgacagcaggagaggggaagaagttcccttttacaaacttctgtaacctgaagatagttttcaggctggagtgagatggtgcaatcgtggctcaccgcaacctctgcctccccggttcaagcaattctcctgcctcaacttcctgagtagctgggattacaggcatgtgccactacgcccagcctatctgtgataccgagattgtgttttcacatactgtcttttctgaaagctgctttttgttttgttttgatttggatgg

SEQ ID NO: 225463 - DNA, 496 bp, Homo sapiens
ctaaagtgatctggtggtggggaaggaagggaggaacaagttttatagacttctatcgtccaatcattgtgtaaaccaggaggaagtgttacagaattctcaaacatttccattgaggaaacactgaaatccatcagaaagagatgtctaaaaaggcatgtgagatccatagaaacactgaacagaaatctacctctgggccgagcacagtggctcatgcctgtaatcctagcactttgggagggacagcaggggcttcactagcactggccatgtttatttttttaagtagagtgatagctttatggctgttcattttattgtcactctttggaggttatgtatgtatcatatatacttcatacatatcaatgattacatgataaaagaagagaaaagccaccctactgactcatgccacatcttccgttcaaatgctcggctccttttgaactaactcccctttcaggctctcccttctattcaccatacacag

SEQ ID NO: 225464 - DNA, 196 bp, Homo sapiens
aatctgtcaaaggtaaattaaaagggaaatttaaaaatatcttgacacaaatataaatatacatttatcatcccaaaacttatgggacatagaaaatgccaatttaatagggaagtttatagtaataaatgtctacatcaaaaaagaaaaaatgttctcaaataaacaacctaattttatatctcaaggaactaga

SEQ ID NO: 225465 - DNA, 186 bp, Homo sapiens
tcccagctatttgcatggttgagttgggaggatcacttgagcctgagaggttgaggctacagtgagccggcccgggtgacagatcgagaccctgtctcaaaaaaaaaaggcatttgaaaataatttagtaaaaatcatacttaatacttgaaaatagtagttctcaaccttttttcctcaggaccc

SEQ ID NO: 225466 - DNA, 311 bp, Homo sapiens
cataaaaataaaaaatgaaaacaatgtaaattccaaaataaggatgaattacataaattcttacagtattattaaatgggttaccatgcaactgttaaaataacaaggttggggaatagctaattacatggaaaatatttatggaatgttattaagtttaaaagcagatcaaaaaagtctatacatacaatccattttgcagtatatataaatgtatcctaaatgtatctataagcatagaaaagagactgataggataaacagaaaactgtgagtggttatttctgagtagtaaaatttcaagtgactct

SEQ ID NO: 225467 - DNA, 467 bp, Homo sapiens
atattgtgaatagacttgaatacctagctctgaaatgtgaacttccagagacagtgaacaaccataacgttgttttatagttgcctggaaaatgaaggggcacaaattttagaaaatataatctgacagtggtgcacaaaattcactggtggctggagagggaggaggtggataattggtttccttgtggtagtagtctgtatgtgaagaaggtaccatggcattgttgcattccacatggtagaaatggctataatttgcccagacctgagcctcccgtttcccatgtgaagcctggaactgtggggccaatcagagacaaattattgctctttgtgcatgtctaaattcttgttcatggcaaacaaacacagtcatcattggtttctagccttatactgtccaagccagaaagcttatcatccccatttagaattttagactagtgaataaaaattttaactttc

SEQ ID NO: 225468 - DNA, 458 bp, Homo sapiens
gcgtgggtgagaggtagaagagggtagagaaaggaagtcgaagtatcttcaaatttaccataaaatttaccataaaaacctatcttcaaatttaccataaaaacctgtaaggtttttaacaaaactgtcaatgataatgtagctgacaagttgtcatgaagctttatgtgtttaaactagtttagaattggaggatttgttatttcatgtgacacatttttctattagggttttatttttatattatatgaacgacatattttagaacaacagaaaaggtaaacattaagacaggtagtgaaataacatttgtcaaaatggagagtctgaggacatttgacaaaatgtctatattgtaattccaaagcaagtagaaaagtaatagcttaaaaaacagactgtttcattttcttgtgacaagtccaccttatcctctacttaaaaattatattcataac

SEQ ID NO: 225469 - DNA, 514 bp, Homo sapiens
tctctttgccaaccaaccaagtaaccataccagacctgggccgttccacagcaaagtgaccctgtcagatgccatcctaccctcagcccagtgtgctgagaggatccgctccagcccgctgctggtcctcctcctggtcctggctgccggcttctggctggtccaactgcttcgctcagtctgcaacctcttcagctactgggacatccaggtgttttacagggaggccctgcacatccccccggtgagctgggtggctgtgtctgtgcagagggtgccgtgagagggtgggcagaggagaggggaagaagtgggactgtacaggtggaagggccaactggaaagagggcagaaagagcgaggtcttattgacacctgccctaggcccagaataatgtcaggagggggctaccaccacctagagagcatggcccttaccctaagggagtttagtttatttagatggctcatataagatgacatatagttacatgtttgtgctaaaaacattgat

SEQ ID NO: 225470 - DNA, 346 bp, Homo sapiens
caatagcaaaactctgtctcaaaaaaaaaaagaaagaaagaaagaaaagaaagcaaaagcaaaaattttaacattagtggagtttacaatgcatgtaaatgtaatagaaaacatctataatataaagagggaaaggtaaaaatacctatccagctgtaagatttctaccttccacttaagtggtaatatgttcattctgtgaaaaattaagtgcattgtaatccctagagtcaccatttaaaaaactattcaaagagatatattcaaaaccaatatatgaattaaaacagaacgctaaaaatcatttaaataaccaaaaaggaggcgaaaagtggtaagcagaagg

SEQ ID NO: 225471 - DNA, 166 bp, Homo sapiens
agatacgaatcgagccggtacccaggtcttttcccctcaaaaggaaatcagtctttaaaatggcacagaagttatgcatggtctctcctctccagcttctctgacctctcctgatcatctcaaccttgttcagtttgctccagccacagctgcgtttcacttccga

SEQ ID NO: 225472 - DNA, 321 bp, Homo sapiens
tcacctgagttcaattcatccttcaaggtcccggctcaaattccaccttcaccaaagagcttcccagttttctccagtaaaaaatagtttccctcccttgtgttcccaagggggaagggaggaaaaaggataaacaagcattaagcacttgatccattttaggcacttcgcatgtgtcacttgtatgaggtaggtattgccattttacttaatgataaaagagttggagagggtaagctgtctgtaaaaggtcaaggtcatataactagtaagtggtggtgctggggatttgaactcagtctaacttcagaatataacttt

SEQ ID NO: 225473 - DNA, 596 bp, Homo sapiens
tgatgctctgccatctaggaaatggagcttaatttttctcctcttgagtgtgggctggactcagcaacttgcttctaacaagtagaatgtggaaaggcaaaaacagtgacttcacagtggaaaaatctggcagacaccaccttaaccaaatgaaggctggcaccaccagtcaaaagtcttgttgatatcacagcctctgaaatgatgtggtgagaagggcacttggcctgagtggcattcttcccccaaatccgtaacgtcagcctaatcatgagaagacccattctacaaaagatctgaccagcactcttcaaatgtgtccaggtcacgaaagacaaggaaaggacaagaaacggtctcaggttggaggagactaaggagacgtggctgaaggatacacaggatctccctgtactgtccatgtaactcttcaataaatctacaattatttcaaaatagcaaaaaatacgattgctggccgggcacagtggctcacgcttgtaatcccagcactttgggaggccaagaagggcagattacttgaggtcaggagtttgagatcagcctggccaacatggtgaaaccctgtctctact

SEQ ID NO: 225474 - DNA, 554 bp, Homo sapiens
tgagacgagtctcgctctgttgccaggctgaagtgcagtggcacaatctaggttcactgcaacttctgcctcctgggtttaagcaattctcctctctcagcctcctgagtagctgggactacaggcagacgccaccacgcccagctaatttttgtatttttagtagagacggggtttcactatgttgaccaggatggtctcgatctcttgaccttgtgatccatccccttcggccgcccaaagtgctgggattacaggcatgagccaccatgcctggctgtatcttaagtcatatattttatttatttatgtttcttttgaaaaatgcaatattaatcaattaatttacccatttatgactcttttctaactaaattgcaagttcatttacaactctgatgttatttacttcagatagcttttcatatctccagtataattcacacataattagcaattagtatttgctgaatgaatttgagactcattttagctattacaagatagtgtccaagaatggtaacatgggaaaaatatattgcatgttactgata

SEQ ID NO: 225475 - DNA, 524 bp, Homo sapiens
cgttctgtgggaagcagggaaaagacagacctggccctgagacaggctggtgtgactgccgttcggagcccagggttaatggtgctggttagtcagccagtgtcgggggcagatgcccatcgtcagtggctcccctgtggaccctcccacccagcctaacgcgaatgaaaatcattgtttgcataaggtcatagctctggctagcagcgttttgagaccaaggccagtgtagggacctgtctttgctaacatggactcctgggctctgagggtgttgggaaggtggctcacgggagggagctgaggggcctgagctcacagctgtgaaaccaccgtggcccttggttgtctgaaggagcagcggtgtggggcagccacaggcctcgtggtttttctctgctgtcagttggggttagtcagtgtggacagaaagaattgctcatcttagcggattgaagactatggttagcaagcagttgtagatctcctgattgaaaaaagtgattattgatgtgctttgatat

SEQ ID NO: 225476 - DNA, 687 bp, Homo sapiens
taacttttaaacatctagccatgttctcatcaaagcattcagctttagtagagatataggtttatttttataatattctaacattagcttaaatgtttcctaattttatcatgtggaattaccccctatcaatcacacgttttgagcatcttcatttgtgatcctttgagaagggagtgtgtatatgtttatatatacacatatcaatacatatcatttacctaaattggtagattgagttgtcagagagagtttgatcaaaatatggcaggttgtttcaaagatatggttgttgtgtggaccagatcattgctgagataatgtagccaaatcacagactggtaagctagactttttcaatcacatagagtctgtaaaatacttcagaatttaaataaaactccattgctcatgcaaaactcatcagataagttcaaggagtcaatgacattgatatttcaaaaactcaacattggcttcacttgcgttattgacaagcatgtttcttggatctctgggaatttgtaggtttgccctgtggattttgactgttttcaaagttctaatgatttctcagtcgttcttcttaacttcagaaaaaaaaatgcattgttttctcatctttcctatgcaaaaccaaaataaaaaattgattctttgttttatgatttttgcaaatcacaatga

SEQ ID NO: 225477 - DNA, 361 bp, Homo sapiens
gcttagaggtcagtgacaggctttggcaactggcttcctgccatcctcagagatgtgacctctcttctcacctctccagaattcgagttactcccccaaaagatggttctcctggtattaaactgtagctatctaaagcatttctgtccaaagggtcttctcccaaagcctctaggccctttctagtctaactcctctacattttagttaatgtaaccaggaatctcccgtaagaaatgtggagtgaagccaggtgtgatggctcatacgtgtaatcccaacactctgaagcaggtggatcacttgagcccaggagttcgagaccagcctgggcaacacagtgagaccccgtctctacaaa

SEQ ID NO: 225478 - DNA, 431 bp, Homo sapiens
gcatttcaaaattccctaaggtgtcattggccaagcagaccaggagctttgtctctatgccccaggaaaagaaaggggcagagacaggaagaaactagctgaagtcatcgggctcatgcctgtaatcccagcactttgagaggccgaggcaagcagatcacttgaggtcaggagtttgagaccagcctggtcaacatggtgaaagcccatctctactaaaaatacaaaaattagccaggcgtcgtggtgcactcctgtagtcccagctactcaggaggctgagtcaggagaatcgctcgaacctgggaggcagaggttacagtgagccgagattgcaccactacacttcagcctgggtgacagagcaagactctgtctccaaaaagacaaggaaccggaaagaaagaaagaaagaaagaaagaaagaaaga

SEQ ID NO: 225479 - DNA, 430 bp, Homo sapiens
ctatatgtcagataaactaactcttgcagatgcaaggatgaataagcacaatctaataggaaatatatgtaaaccatgttttgaacaactccattttcaggcgggctattagaaaatcagtgagtttttctttgctgaatacaaagacataatctacatataagaagtaatgtagacttaaaaattttagttacctgagtatatacttactgtacaggttgctgaatttcctagctaggcagtcagctacagtggcttatcagcttagtgactgatccatacttgctcacatcagagtgggtgggattgatgccctgactgtctcccctggagatgaggagcattggtggggtttgactcaggaatgaatgcaaatgtttgttctgcacattactcagtgattttaagcttaaagttttcttagactgca

SEQ ID NO: 225480 - DNA, 261 bp, Homo sapiens
gaaagtaacaaaagaattaagagctggaaggaatgatttacctggaacatttttaaaaacagatagtcatctgatatcacgaaatgttatttataaaccttaatatctacatttgtctcatgtatgtgctaattgtggtgagcttaaccctacttgttaacagaatatgcaggcatataaacagtatattttaaaaggttttactgtcttaaaatatcttctaccatatgactgaaattcccaccattaatgtgatccctt

SEQ ID NO: 225481 - DNA, 405 bp, Homo sapiens
aaatgtatatacagaatttctaggactgtttggtggaaatgaaatcagaatttcagaagagattcacacatattgacaagtatttgtcattatttcattttctctggctgcattttgaatacaaaaactgaggatttctcttaattattagtctacctcactttcacacgagacgtcaaactgaaaacgaactattatcaccaagaagacacattatttctagactttggagataagtgtatgtgattttcagaactattcttcactatctaggctgccaaactctgaatggtgctgtaaaaatgcattatcaatacctaaataaccaatgtaggggaatggctaaattaattgagctgtaagtttttaataatgtaaaataataagttagattaatttggactt

SEQ ID NO: 225482 - DNA, 451 bp, Homo sapiens
tggcgccatctcagctcactgcaacctccgcctcccaggttcaagcgattatcccgattcagcctcccgagtggctgggactacagctgcccgccaccacacccagctaatttttgtatttttagtagagatggggtatcaccatgttggccagaatggtctcaatctcttaacttacgatctgtccaccttggctcccaaagtgctgggattacaggcgtgagccactgtgcccggcccatcgtaatcacttttaagtgtatagttcagtgacattaaatgcattcatattgctgtgcagccattaccaccatccatctccaaaactcctttcagcttcccaaactgaaactatacccattagacattgatgccctattcctccggtggcctaataaccactgttgtattttttgtctctctgaatctggctactctaggcttgccatgt

SEQ ID NO: 225483 - DNA, 461 bp, Homo sapiens
taaaagctcctttttttctgttagacattatttttctctttatggaaagctttaaaagagctgcttgaatataaataaaaaagaaatatactttttaatttctgaaaggtgtaagtcagaaaatttccaagaagagcattttttacattttttttttaaagccgggcatggaccgggcacagtggctcacacctgtaatcccagcactttgggaggcgaggcaggcagatcacctgaagtcaggagtttgagcccatcctggccaacacggtgaaaccccatctctactaaaaatacaaaaaattagctgggtgtggtgatgcacgcctgtagtcccagctacttaggaagctgaggtaggagaatcacttgaacctaggaggcagaggttgcaacaagccaagattgggccactgcactccagcctgggtgacagagcaagactctgtctcaaaaaaaaa

SEQ ID NO: 225484 - DNA, 252 bp, Homo sapiens
atcacagtgtgggtgttgcctatagaacacggctccatgaatattgctatggttcctgggatatctggaggcgacgagtttgcctgtgtgtagggctggatcctgtgggcctcccccaaagccagagtgccctgcacatacctcgggctttcgtgtgaacacaccctgaggttccccgagcttttctgtgcagaacagtaatggagaggtagagaaggaataaaagaactcacttgaaactttggcaaagta

SEQ ID NO: 225485 - DNA, 358 bp, Homo sapiens
tttcataaaagtgagttttttaatgtaaaaaaattaatgtataatttagaatgtgttgtcattttttctctatttaataagtatgtaatttagggagaatatttatcatttcattcctttgtttaattcatagaattattacagcacattagctatcacaacttatggatttacatcatttgtttataataaaaaagtgttcagaaaatattcgtcttcataacataggtcaagttatggggtgcaagtgttggctaaaagtggaggatacaagatgagcaggtatgttttctgctttcaataactcattttctgctgcagagatagccttgtaagcaagcaatggaaaactctgaca

SEQ ID NO: 225486 - DNA, 433 bp, Homo sapiens
aaactccacctttgagagttacttactgctaaatataaaggcttttttgttttgggtttttttttttctttgcaatttcttaaccttttagacatttccatgtagcatttgatagtgtggaaactctcaccctgctttgttctctgttatgacaatttggcctcacttctctaacaattctttccttctttgtacaagtccttcttcttcctttcatttcccaaatactgacatttcagtccctgtattcatgctcctgtccctagccctctatgttctactacggcctatgtttttcagcctgggtcattcttttcccaagcccagagtgtaggagagtctgctgaaagtgaaggcagaggttacacagggcatatcttcttagcttatcaggtttacttgatacttggggaggagaaaacattttgtttaa

SEQ ID NO: 225487 - DNA, 316 bp, Homo sapiens
gcacgaggatgaattggggtcaggcagcttttttagcaatttagaaaataattaaaccagtcgagcgaggtggctcacacctgtaatcccagcactttgggaggccaaagcgggtggatcacttgaggtcaggagttccagaccagcctggccaacctggtgaaacaccgtctctactatggcgcgcgcctgtaatcccagctactggggaggctgaggcaggagaattgcttgaacttgggaggcggaggttgcagcgagccgagattgcaccactgcactccagcctgggtgacagagcaagactatgctttga

SEQ ID NO: 225488 - DNA, 550 bp, Homo sapiens
gctcgacttagaggatccctcgaatcgacggtttctcttcttcttctgccccaccacccctcacaccaggccctgtcactccttgactgcacaaacagtctccttttccacagggaggctcttggcttgtctgggtatagagacacagaagggacctccagcagaacaaaggggctctgaacacactcacccaatgtctcagtaaaacctggatgaaagtggaatggggagtggcagtgcacaagaaaatcaaaggcgagactaggctctaatcattccccttaaagcagaaagtccaaggttctccaactcttgacctcaggtgatccactcgtctcggccttccaaagtgctgggattacaggtgtgagccggatgtttttgaataccttatctgggcattcaatcctggtaagattgtgcacagcacaatctgagtgtcatgtagcctgatctgcagcagggctggagatgccatgggttagggcacagtgagattttgctaagataccagatggagaaccttggactttctgctttaaggggaatg

SEQ ID NO: 225489 - DNA, 463 bp, Homo sapiens
tactcctgttcactgaccttctcctctgcatgaggcagggtgtgaggcacagtgggagatgcatagatgacagccccatcctggaaatgagtgcagtgagaggcctgcaggcagagcagcctgtgaagtgtgtgctgaacttgtttgagagcagcaaatcctacattactacagatttggggatttgaggcatttgtccaacaggcttctgagccttgaatctgtttcccttttccactccccatcaagagatctgcttgctcagctagttcccatcagctctggttctgcggttctggtccaggctgagtggccttggagttaggtaagaggtggtgggaagggagggatggaggagagctgagagctatggcccgttatgtgccagggtcaagcctgtcacccaagatcgtgccactgcattccagcctgtatgacagagtgtgactccatctcaagaaaa

SEQ ID NO: 225490 - DNA, 825 bp, Homo sapiens
tactcctgttcactgaccttctcctctgcatgaggcagggtgtgaggcacagtgggagatgcatagatgacagccccatcctggaaatgagtgcagtgagaggcctgcaggcagagcagcctgtgaagtgtgtgctgaacttgtttgagagcagcaaatcctacattactacagatttggggatttgaggcatttgtccaacaggcttctgagccttgaatctgtttcccttttccactccccatcaagagatctgcttgctcagctagttcccatcagctctggttctgcggttctggtccaggctgagtggccttggagttaggtaagaggtggtgggaagggagggatggaggagagctgagagctatggcccgttatgtgccagggtcaagcctgtcacccaggctggagtgcattggtgcgatcttggctcactgcaacctccgcttcctgggttcaagcaattctctgcctcagcctaccaagtagctgggattacaggtgcccgccaccatgaccagctaatttttgtatttttagtagagatgggttttcaccatgttggccaggctggtctccaactcttgacctcaggtgatccactcgtctcggccttccaaagtgctgggattacaggtgtgagccggatgtttttgaataccttatctgggcattcaatcctggtaagattgtgcacagcacaatctgagtgtcatgtagcctgatctgcagcagggctggagatgccatgggttagggcacagtgagattttgctaagataccagatggagaaccttggactttctgctttaaggggaatg

SEQ ID NO: 225491 - DNA, 512 bp, Homo sapiens
atatatgtttactgaaagacctgtgtgtacacacatgctcatggtagcttcattcacagcaactgaaaccctggaaacaagacaaatgtccatcagcaagtggccagattgttgtatgtgcaaataatgggatacttctgagcaacaaaaagaataaagtaccaccataaaaacaaggatgaatctcatcaacattctgctcagttaaagcagccagaaaccaagagtacatattacataattccatttatatgaaaatccagaaaagacaaatctaatctatagtgacagaaagcagatcagtggttgccgggggctgggggaagggtggggaactacggggaagaggcacaggggagctttttgggatgatgcaaatgccctatatcttcattgtagtggtagttatatgtgtctataaatttgtcaaaactcatcaaactgaacacttaaaatgtgtacattttattgtatgtaaattatacttcaataaagttgaaaaaagaaaccaa

SEQ ID NO: 225492 - DNA, 561 bp, Homo sapiens
tagcttctaattttggttgtgctagtaactcacagcgggactttgggacttggttctttttctcagccctagttccctgggctgtctgagacataaagtgcataagatcacctcgaagttcttttcaagcagtaacagtctatgaagtcataattaaaatgtcctaggagaacgctctctacttaaaagattttttttttgttaaatcaaactgtgcaaagctaattatcactccttaattcgtctattttataatttccattttttctacttaagttttctttttttggtgtaaaagtgaacatttatttaaaatatgaaaagaaaacacaaaacaccaactgaacaagcgccaaataccacaaacatccccaaacccagaacgatgacattgtattttttacaaaataacttcctaacacatctctataagaactttcatcttcctacagtttttctttttcttttttttggcttcatatgctgtagtcatctcttcatatattgcaattttataatatttttcatataaaaaattaaaaagataagccaaccttttct

SEQ ID NO: 225493 - DNA, 628 bp, Homo sapiens
tgtgtttttgacagtctttgaatagtaatttcatttcttatagaatattcacttttttgtaggggtaattgtttaacagtaaagaagcagatttgaatcttccacttgatcttagatttttttccttttatttcattttgccaattcccctttcaaggatatgaaactttcctttacctacttccagaagccagccttttcttttagaaggaatgttttaaattgtattagaagaaactttcctgataaaagataaattttgtaaatgtgcagtttaaagtcactgtgtatgaaaagtgtgtaaaatagatcagctttcagttgctaaaacccagagggttactatttcaggcattctagcagcattttcttgtttctaatctctaacagttatttctagtatagtctcattataatgttcttaatgactgacaaatagataagctaaagcagagtctcatggtggatatattcctttgctctggacagaaaaattgactgtctgggcagggaaaatagaggatgtgtcctataacacttaaaaatattactctgggtactgttgggaagatgccatatacaaagtgccaaatgaatagtagagtagtacaggcaagtgctataggtg

SEQ ID NO: 225494 - DNA, 206 bp, Homo sapiens
tcaggaagtttcctttaaccctcactgccttcattaggggcctccctcaagctatcaaagtagccagagcatacctctagcagtagtattgtaattgttttcttgttgcttgtcctcaatttttattctgttcttatctgaccacattttgtacattgaagcaacttatggcaagaacaaatctaataaaatgatggtaaaatata

SEQ ID NO: 225495 - DNA, 517 bp, Homo sapiens
ctctgttcgccaagttctatgcacaacaaccctggaaggtattagtaaatctattttagagatttaaaatagtaagtcctactaaagttaagtaagctgggcttcaaacagaattctctgtaaacctgaagcctctgtttgttcatctttatcacgtggtctctcaacggcctccacatcctgagtgttctgaccatcactttctccactggtatgctggtaaatgtttctcagctgttactggaaagtggtcctgatccagagcccaagagttcttagatctcgagcaggaaagaatttaggatgagtccatagagtaaagtgaaagcaagtttattagagaagtaaagaaacaaaagaatggccactccataggcagagcagcaccgagggctgctagatggctatttttatgattatttcttgatcatatgctaaacaaggggtgggttattcatgaattttccaggaaacaggcaggcagttcccagaagtgagggttccttccctttttaga

SEQ ID NO: 225496 - DNA, 810 bp, Homo sapiens
agtgttagaagcccctccgttatttacccctcttccaattcttcagtctcacctcttcctcctactgccctgtgtgacattccacgtctgccaaaccggactctgtttgggcccagatcggccctgttcctactccgctgcccatcacttctccctcctagagcccattcccgctctttaccatcccaggctgtagatccattttaagcctcacctctcccagaaagttcccccagacctgagcagagggagcctacttcctcctcagaatctacaactgtactctctcactctaggtggaaatgtcaaaattggtccaaccttttaaaaaataatttggcaactcacatcaagggctataaaaatgttcataccccctttcgtgcataattatcccaattctgggaatctttcccaaaggaaataaacctaaatccagaaaaaaactttggcttaaagatgtttattgcagcaatgaaaaaaaagggggtgggtgggtggctggttaacaacccaaatctccaacatttaaggaacagttaagtaaattacagtgaatccaattgttgaaatattattaggatcatcaaaacaaatattcatgaagagtgtataaagatgtggggaaatgcttgacaatggtaagtaaaaaagggtataaaattacaccgttacaaaaaaaataaaaataaataattttaaaaaatatttttaaaaactacatagttatctgtattgtctaattctacaataagcatgtctacaggcatgcaccaccatgcctggctaatttttaaattttttgtacag

SEQ ID NO: 225497 - DNA, 826 bp, Homo sapiens
tcactcatgaaattacggcgtgtaagaaataccactttcctttacaccatttcttttttcgttgaaattaagttctagctctgaactgtgatctctatctccctgggttgagagaaataacaggcattactgggaatccaggactacatgccccagctccctctctttcctgaccttacctcaatgtgaggtcctgtacagtctagtattctcagacaggctatgcattcttcatgcttcagtcaccgctgctcactgctgatgtgatcattgtctatgcttgcaagagctcttaagacaggtactccaggggttctgtgcttgccttggatataggcttccttgtctatgccctccaggctcccatgcccttgaggacctgatgtctgcagggctattgtgaaagaacaggctacctacccagctacctgtggagctgcacactgcctgccacttcaatcttgaggaatttttttctctgccctccatcaccatttttgcttacctaccatcttcagaatcacacctcttgtctccctctctagcatatctccctcaatcagtgttggcttatgagttttaacagttctgaaaatacatttactttaaacaacttctattttggcttgtattacaactctaccaagaataaggcaacaaaaggccaggaaactcttaggtggtggtgtaggtctaagggcaggggtaggcagggttgtgtttatgcaaagaagagaaaaagatttgtcacatttagtatcattaatacatataatcatttataattatgtatattaataaattacttataattaataaaaataaa

SEQ ID NO: 225498 - DNA, 402 bp, Homo sapiens
tggggctccaggggcatctgaggggtaattagtgacttctttgatgatcacctaccgcctgccagcaccttactgagcactcaggattcatcatctcgtgggacgctcagccaaccgcgtggggtgagctgtgccgtttgctgcatctgcagagaggagactggtcccaataggctggacactgccgcaggcagacagcaggaggtggccgagcgggaccagaagccatgggacctccctggtgcctgagtgccccagcacagggctgagacgcaataggtaggtgctggtatccattgtcactcgaacccaggagcatccccacctgaattcatcttactctggtttagaagcttccttgggtttaaacaaactcttcgtgggttacatgtgttttgtcta

SEQ ID NO: 225499 - DNA, 343 bp, Homo sapiens
atgggggtcttactgtgttgcccaggctggggcttgcagtcgtttaaaccatgcaatacacagattaagatggtggtgccatctcaacagtggcctgccacttcccagggagtcttccttcctcagtgcagtccaccctcctcctggctactttcctggggtttggttgcaagtgggtcttccaccacctgcatccaacactcgggcgcatgaggaaaaccaactctttaatttgcttatctgtgataacttgaagccctggatagtgtcttgcatatggacatgttttccacaattatagctactccagtaaagtcacatttcagagactgacagcttggga

SEQ ID NO: 225500 - DNA, 247 bp, Homo sapiens
caaatagcggccagtcaaacagtgctttctaagctgtcagtctctgaaatgtgactttcctggggtttggttgcaagtgggtcttccaccacctgcatccaacactcgggcgcatgaggaaaaccaactctttaatttgcttatctgtgataacttgaagccctggatagtgtcttgcatatggacatgttttccacaattatagctactccagtaaagtcacatttcagagactgacagcttggga

SEQ ID NO: 225501 - DNA, 453 bp, Homo sapiens
  misc_feature (420)..(421): n is a, c, g, or t
  misc_feature (424)..(424): n is a, c, g, or t
ctcttggagaccgctatggccccggtttcggaatcgggctcgggaccccagggggcccaaataaaaaaaggaaaaaaaaaaaagcactccggcctagactgccatgtcatgctgttcatgagacttgagggctccaaattggctgacactcttctttcccccatgttcattttactacgaaactggaagtttttccttcaccacaaggccacttgtcacctacttttttgtacactcacttccagcaaactagttccaacccaggccacagccttcagcttccttcttcctgcatatgacaccagcttagctttccagacttccttctgtcatttcacccttcagccctccaaattggctgacactcttctttcccccatgttcattttactacgaaactggaagtttttccttcaccannagnccactgtcacctactttttttgtcacctc

SEQ ID NO: 225502 - DNA, 701 bp, Homo sapiens
ctcttggagaccgctatggccccggtttcggaatcgggctcgggaccccagggggcccaaataaaaaaaggaaaaaaaaaaaagcactccggcctagactgccatgtcatgctgttcatgagacttgagggctccaaattggctgacactcttctttcccccatgttcattttactacgaaactggaagtttttccttcaccacaaggccacttgtcacctacttttttgtacactcacttccagcaaactagttccaacccaggccacagccttcagcttccttcttcctgcatatgacaccagcttagctttccagacttccttctgtcatttcacccttcagccctcaatggttcacacacatgatcaaatctggatgcctaagtcttcctaggaccttcttgctgcctcatttgacaagcttcagtgctgcctttgagcctccctgcctccatggacctcccttcttcccttcagtcttgtccatcatcccactgggaagccaagcacctagacattctctgcactagcagtgaagaaatgaggtactgaatgcagaggtgtacaaaccctgttgtgccctcaatgtgatgcaatgtgatgaaatccttcctggaccttctttgtacaaggtctaaattatctccttgacttccattttattttaattattttgattaaaaacaaaaacttggctgg

SEQ ID NO: 225503 - DNA, 705 bp, Homo sapiens
gctcttctactaatgggtttttgctttattaggttatgaacctctgtttctacctatcctttttttccagttttggaggcagcagtttgccctgtaacctcatttctctcacagactttagaagacttgttgatatttcagttttttcagctttttattttattttttttaggactgagtggcgacttctgatatctttacacgctgggctagaaactggaagtctgtattagctttttatagtttcatagcctagccatcttcctgagttccatatctatctttctgcctggtgtccatctgtacttgtatattcaaatgaaataataatcataggctctaattatattaagtatatctgcttaagtataacctatttttctatataacctactgttcttctttatatttacttctgcccagaagataatcttccgtattagttagacaaaatcttaaaccttggttatctttaacatttattttccatttacatctttaaataatcattttctctaaatcctttcaccctgcttccagtttcttcattctgttctccatgctctatatcagctccttgtttcttttcagctaaattagttagaataatttctttaaatgataacatccatattcattctcagtgcatcttgttcactgaatctagctttgtcctatttcttctagcactctcttgtctttttc

SEQ ID NO: 225504 - DNA, 417 bp, Homo sapiens
acagagtgagaccctgtcccaaaaataaaaaataaacaatttttaaaatgtacttcctgtgtatggtaggattaagaaatgagtaaaatatattgaaaatgttgtttcatcctattagagaagggaattataagtggaaagagggaaaattagaatgatattgaattggaaatggaggtattaatatgaactcatcattttaaatatagttagaaacagatgtagttatatgtatatgaatttcttgatccaccaaaagggcttagaaaagataccccaatagcactgagtacccctgcttctaagatttggtttctaaataccattcattcttcactggagccacttttccttgaagggtatttctaggtctggaggaggaaaagtacctcatgagcatggaatatcttatgtcat

SEQ ID NO: 225505 - DNA, 473 bp, Homo sapiens
ggggctgtttgtggggaagtggtttccacagcaacaggaggtgagatattggtgttaccccagaccacacttagctacttccttctcactaaagctctgtagtcatattttccctggcagagcagaaacttctatgttatcccacagctgttctaacggcgtagacttgacttatgcaatgatgccaggagtcctgagcagcacagcccaacttcaatcacacacagatggacagagctgtattagcaaagcctgagctactgagcgatgagagtacagccaggctttcagacatctgttcattcaagagagatatgcgctaagccaaggacctaaagatgtgtttaatatgggtgctaatatgcataaggaaccttgaaataaatgttcttagcctttggccaagagggtccatgtctaggaatctattctccatagaaataaattcaaatatggaaaaaatgaacaatgca

SEQ ID NO: 225506 - DNA, 498 bp, Homo sapiens
aaagtggcaaaaataaatctcaattttatccccctaaaataaaatgacagaaaaatgtagggacccagtttaaactggcatttggattctctgaaatagggattctttctattgggattgagcactagcagagagctcacactcaaatgtctggatgaaagtgtaaaattgagaagttcagtttcaaaaaaaaatagcattcctgcattttttcagaacttatggcattgtgtttcatatactttgtattttccgatgcctattttggagcttccattattttgtttctattgctttgcatgagagcccttatataagtgagattgagtagtaggcagattctatctatagctttgtcctcttctaaatattacagaatttgtttgtttgtttgtttgtttttttgagatgggagtctcgctctgttgccagactggagtgcagtggcaccatcttggctcactggaacctctgactcctgggttcaagcgattcccc

SEQ ID NO: 225507 - DNA, 488 bp, Homo sapiens
ttgcccacccagaaaacacatttggcttcagacaccaaggatgcaggggacagagaaagagacctcaggaagcttccatcatgggggaaggcaaaggagactcaggcacatctcatggctaaagcaggagcaagagaatgagaagggaggtgcaacacacttttaaatgaccagatctctcaagaactcactcactattgcaagaacagtaccaaggagatggtactaaaccattccattcatgagaactccacccatgatccagtcacctcccaccaggcctcacctccaaaacttgggattacaattgaacatggaatttggatggggacacagttccaagccatatgaacattagagctagatcaggcttcaaagccagccttggccacttatttgctgtgtggccttggatgatttgcttgacctctctgtggctcagtttcttcgtctataaaataaaagtagtactcacgtctaccttgcga

SEQ ID NO: 225508 - DNA, 591 bp, Homo sapiens
  misc_feature (11)..(12): n is a, c, g, or t
aaggatccccnngcagaatcacactcaaacacacactgtttacttgagatagatccacctggctcttcttacagaattgttttcctcagaagttggctaggtctgcagggttagcaagaagggctttaagctgaggtcagagctgggtctgctacaaaccagctgtggagcaaccctccaagccctagttttctcatcagtgtgaccatgagaaaagattccgtgtgccaagagcacagcgcagggtgcagcttttatgaagtgcttgataaagggtagcagtagttcaatgttgctaaagaaagataacacagacattaggtatgactcaccccatgctgttaatttttaaaagatgggtaagaatattcagaaaagcatctgaaggaataaatgataaactgttaagaggagttatcactgattatgggggtccatttgctatattgttggaactcactatatcaaacaaacatcagcaggagaaaatgcatccctccttctcggggcagctttttcagaatttaacacatgtatgggtatatattcacggcagttgagcaaattctggctttttgagtgtgattctgg

SEQ ID NO: 225509 - DNA, 286 bp, Homo sapiens
gacagatacgaatcgagctcgtacccaggtcttttcccctcaaatcctgaactcaggtgatccggcctcccaaagtgctgagattacaggtgtgagccaccatgcccagccaaaatgtgctttttaaacgttgctgctaagatattacatttgatagcttggtttttctcagtggcctgaaaatagttgatgtaattaaagtaacgagagttcaattggaacctcagtctctctttttatttaaagaaacaagatttgagattctggcagctgcgttgcctcttca

SEQ ID NO: 225510 - DNA, 363 bp, Homo sapiens
gacgggatttcatcatgttggtcaggctgctgtcgaactccggaccttaggtggtccgcccacctcggcctcccaaagtgctgggattataggcgtgagccaccacatccagtcaagagtttatttaattagacatcttcccctgaagctctcagtgcttcaagtagcccagcccagcatttgtcttgtttcaaggatggtgagattgaccttcctttcctgtctgagattgcaggagaatatatagagaatcctggtagccccatgttgaaaatagaactgatagagaaagagggaggtcaactatgacaagaagcattctttccatccaccactaccagctttcatgtctgaaatcatcag

SEQ ID NO: 225511 - DNA, 547 bp, Homo sapiens
tgggtatcacaaggctgaagaccaaaaaacaaaagcaaaaccaaaaacaatcctgtatacaaacaccatactctagttggtaaatctataagagtatggattagtaattcagtaactattttatgtgtataataggattgaaggaataaatgaatgtgtgatagataatgagagtcaggtttcccatggtcagaaatagaaatataaaaataaggaaaaggggaaggctgcaatgaatattgtgctgattgacagtatcattatgaactcaaattatttaacataaatgcatacagatatagaaatagagatatatgtatgagtcagtacacatgcatatgtttcttatctgtacatgttcagaaagcataggggcaatggcaccacagaaaagtaagcctagcattcaaatatttgtttccaaatactattattctccagtaagaggaactagggattctctagttgaatgcatgactgggccagggaatatgcaagatgagcctgtaccattttgtggtagcagaaaaaaaatgaagtgattaag

SEQ ID NO: 225512 - DNA, 260 bp, Homo sapiens
gaagtcctagtgtaacacattccaaggaacacctctgattcattactctttggagactggctcccattagcaattactggaaataatggctgtccacagagcatggccgggagtgtggcatgcagggaggatatcataaggtgggccactgatgtgtggaaattaacccaggagcccacaaaggcaacagctatgggcctggtaggatctgaagatttcttctccagtggctcctggaggcccctatgcttattcaatgg

SEQ ID NO: 225513 - DNA, 204 bp, Homo sapiens
atcaaacctggcctatactttccatatccagcttttgacgcttttgaaagatacgaagagcattctgttacaagcaaataaaggagagcttcaatcttcttaccagaagaacaccccaagaaggattccttctaatcagcctaagacccaaaagctattagctaaaaagaaagggaaaaggaaagaaattaaagactgtgaact

SEQ ID NO: 225514 - DNA, 450 bp, Homo sapiens
tatatatgacttaaaatttcccagacaccgaggaatgaaatgtcagaatcgtctttgacttttccatctccctgcaaatccagttgtttacttaggcctggctgatggaactcaaaaaatgttttgctaaatcctgccttgcagggcagaaacattttgctaaattctgcctcacgatttctctgtgacattttattaagaagtgagtgcatatagctggtacactgaaaactaggtttgtgttgggagttgggaagccaggactggctgcctctctgcctctagcacccaagagtgaccttgttcagctactaaaactctgagttgcttgggtggttatggctcaacatgcttcaagccatcaaggaacaagcatggagtccctccaaagagacgacaaagactacagcataagatttttaaaaataattaaaataattaaaaccccta

SEQ ID NO: 225515 - DNA, 516 bp, Homo sapiens
aaacacgtttccctccctgaggcctgcagtatccacattctgcaaagcctcgactacaggggagtggctgaggctggaagtccctgagactcacaccttgtccatgtccctgctgattaccaccaagaggctggaactgccccagcctgagaaagcaagaagcagctctcaggatggcagagttgggtgtgggcctttaaacctattggcccataagagggaagtgccccaaattactttttccagtgctcacagtgctggatggtttaacaggacacagaagttgtgcatgaggtttttttttcttatattttcaatgaatgtttttagtataattattatgaaaatttataatatatttgtctttaattagacatttactattaatattataataataattcaataattcaattcagaagaaaatgtttaacatttggaactttatggttcctaaaaataatgtattgaaatttctatttggctgcaaataaatattacagagttaatataaaa

SEQ ID NO: 225516 - DNA, 338 bp, Homo sapiens
acaaaaacaaaaaattctttttctcagaatagctacattcatctcatcattatataaaagacttactaaaaattaaagccttggatttgactctaggtaaagtgcatggagaataaacatgaatcattatttgttttagtatactattagtataataattgaaacagactactcatattcctgcttatgtgacatacttgtttttgttttgttttgtttttttgagacagcttcttgctctgtcacccaggctggagtgtagtggcatgatcatggctcactgcaacctctacctcctgggcttaagcagtcctcccatttcagcccctcaagtatgt

SEQ ID NO: 225517 - DNA, 436 bp, Homo sapiens
cacataaacatacatctatgtaacctcttgccaggagtagccacgatcagaatcatgttaaagaccctctttgttcacctttataaaggagaatgttataaaaatttagaatcataaaggaactcttaagagagtatctaagctgggcatggtagctcaggcctgtaatcccaacacttggtgaggctgagggcgtgtggatcacttgaggtcaggaattcaagaccagcctgccagcctggccaacatggtgaaaccctgtctctactaaaaaaaatacaaaaattagccaggcctggtggtgggtgtgtaatcctagctactcagaggctgaggcaagagcaatagcttgaacccaggaagtggaggttgcattgagctgagattgtgccgctgcactccagcctgggtgacagagtgagactctgtctcagca

SEQ ID NO: 225518 - DNA, 375 bp, Homo sapiens
ttgatgtgacatggcagccccatttttcagtcttcctgctctgttacagtcttttccagttttaaatatagcttatcatgtaataaggactagcttagaaaatcttcagaactgtaattttatatttttggccacgttaatagtcctttggtagctatcatattagcttataacaagaaaagcatatttgtttcagaagaacattttttaatctgatgttattgatgttaggcatttttgccaaatatttggtaaatttgataattatttaagatcaaccttatagcaaaaagattgcattttacagtttttaagaacagcattatcatttgtttttatgttccttgaaatttatttaatcatttttatgaagct

SEQ ID NO: 225519 - DNA, 275 bp, Homo sapiens
gtctgatattttgttatgacagattgagccacatagttagccttctaaatgtctgtgcacatatggatatatatatatatatatacatatatataaacaaaacctgaatgagataattcttagatagtacatcatagattatagcataggtgttggctgggtgtggtggctcacacctgtaatcccagcactttgggaggccaaggcagatggattgcttgagtccaggagttttagatcagcctgggaaacatggtgagatcccatctctgcaa

SEQ ID NO: 225520 - DNA, 338 bp, Homo sapiens
agataatgttttaaagtttaatacaataattcattaaaggactttgctcaggcatggcacatagaaaggcatcggtatgggcctggcacggtggctcacgcctgtaatcccagcactttgggaggccgaggtgggcagatcacaaggtcaggagattgagaccatcctggctaacacggtgaaaccccgtctctactaaaaatacaaaaaattcgcccggcgtggtggcatacgcctgtagtcccggctacttgggaggctgaggcaggagaatggcgtgaacccaggaggtggagcttgcagtgagcggagatcttgccgctgcactccagcctgga

SEQ ID NO: 225521 - DNA, 427 bp, Homo sapiens
gggtgcggtgtctcatgcctgtaatcccagcacttcgagaggccaaggcgggcagatttcttgaggccaggagtttgagaccaccctgggcagcatggtgaaatcccatctctactaaaaatacaaataaaaaattggccaggcatggtggcaagtgcctgtagtcccagctactcgggagactgacacatgagaactgcttgaacccaggaagcagaggttgcagtgagccaagatcaagccactgtgctccagcctggacgacagagcaagaccgtgtctcagaaagaaaaaaaaaaaaaaaaaaaagaatgcaactcagcaccctgcacttagcagacactcagtcaagtggcagttgtaattaagtcatcacatccctcccctgcagctccccacagaccaggaagcctgctccctttaacag

SEQ ID NO: 225522 - DNA, 466 bp, Homo sapiens
tccacgaggatccatgccatcatggcactttgggaggcctgtcacgagttacacaggcctaggctgcccacaccccagctcagcagaaaaagagaactgcaatccaagtcagacagatcctgcctggactctccgcagagagcctggagagtctgaccagcaaagaaacagcaatcttcctacctaccccactctcaatcccccaccccaatccaggctcccgaagaagaaaaacaaacaacaacagagcaggcaattgcacaagagctgcagagtgaaggcgaggtggacggcaacggcttctcggctgtgccccgtatctcttcccagaacactgatgacaaagctggagacgttactcacatgctgagccagtcagcccctcacccagggctggtgctgagaagtctgactagaaaccggcagtcaacgctgacacactcatttataataaaaggtgtatatt

SEQ ID NO: 225523 - DNA, 908 bp, Homo sapiens
gtatagaagaaacaaaacgagagtttaaaaagttagagtgagtaaagatacgaatagaatactgatgaaattaaaatttaagtcatgaaattagcagtttttcactggaagtatgattttaattaaatattgaaagaagtttaaatttgcagtcaatacttaagtgttttggggaaatttaatttcacttttaaagtttttatttgagtaaatgggatgtaaatattttgagaatgttggtttaatatttaaaggaatgttaattgtttatgacattcataagatagatttgcaaactggatttttaaaaagctttatttagaattaaagagaaaggactcataatttaaggtgattaaagttttctacggtcagatgtaaaaatccataaggctgtgtttcctttagccctaaagctttgtaacttattggaaatttggaatggtttaactgcataacaaattgctttgctattagttaaaaaggattggttgtgaaaagacagtataggcaataatgtatggttttcctaattggctagtatttataggcagtggaaatgcaccattaagtatttatgttatttgctaccactttttcttgacaaccttagaacttccttagatataaataagttagtaaaaatttagaactggaatatgtttctttaattggcttcagtatactagatgaacattatattgctttgttttcaaaatgaggttgtaatagaaacattcagtaatagaattcaagttgactcattaagtattttataacaacaaagggaaatgagaaactatttccatttcatattttcagactaatcttatggttgtcttggatttggctactgtactaattacatgagcagtatctaataaatccagcattgttggtaaatatga

SEQ ID NO: 225524 - DNA, 505 bp, Homo sapiens
tgagtatcttataggtcctggagtttagcttctaaatttgttctgtatgcctttaaaaaatacttaagaagatgaagcagaagtgttataagctgctccagaaagcaaaactaggggagaactttctaatacccagagttatctaacattggagaaaactgtttcaagagattacgacctgcctttcagaggggtgtggtgggaaacatgtaattctccatctaataatttatgctttgctaaccctatagcatgaaggttcttcccatgggaaacctttgaaaacacattcctttttctttgctaaaagacaaatctctgttgacgtcaaagttatatgtcagtgatttaagcacaagcaaatgttatgaatggttcttttgctttagttgttacaggcttcttcccttaaaaaaacagaagagctttagaatcttttaacaaatgcctgccgtgcaactaccatattctaagatctgacataagtgccacgtatcgtctatta

SEQ ID NO: 225525 - DNA, 409 bp, Homo sapiens
gacagggtcttgctctgttgcctaggctggagtgcagtggcgcaatctcagctcactgcaacctccacctcctgggttcaagcgattctcccaccacagcctcccaagtactcaggactacagccatgagccaccacgcccagctaatttttgtattttttggcagagatggggtttcacatgttgaccagcctggtttcgaactcctgacctcaggtgatccacctgcctcaaccttccaaaatgctcggattacaggcgtgagccaccacacccagcctgaagttgaccaatcttatttgtctattctaatgaacacaaacgaacctcaccaagtctatccttaccttcccactgcctactagatctaacagttatgcacccagcctcatggcttcctcacatgcca

SEQ ID NO: 225526 - DNA, 548 bp, Homo sapiens
agcgcctactgtgtgccaggtgctgtctatctccttaggagactgtggggagtggaccacagtctggttcctcacatgcctgtcttcctgcccctgcttctatcttgcagctcagggcctggccgacctcaggttctgccagcagacctgggctggttgcccctaactaggcacacatggtcagagaaggaaacaatgccttcctgtggcccaaggactggttcgcttggtttatagcagtgacagccgttcatgcacagctgcttcccaacccagtcctctgagagagcagcagagaaagcttatgttccaatccatcatttaccctttttcttctttcttccaagcttttttcatacacacactcacatgctcactcatactcacccagcccagaagggagctgagacagaaagtccaggctttcgtgtctgataaccacactaattcatctgcttccaggttacagctccgtctagcagcaaggttgaaaaggttaaaaaggcaagagctggaaagcatttaccgccctagtgttcgttccattt

SEQ ID NO: 225527 - DNA, 203 bp, Homo sapiens
gcacgaggtgcagctaaccaccatggcacatggatacctatgtaacaaacctgcacgttctgcacatgtatcccagaacttaaaactataataaaaaaaaatgccatcatcagcttacatcagccactgatacaaacagtgcaacatcagacactgatcatgacactgagatgctgagactaaatgctcctctagcagcttcc

SEQ ID NO: 225528 - DNA, 414 bp, Homo sapiens
cttggagatagtaatacattatttggtattagcattctagctcattcatatactttcccccgagtccattctgtatccctttgaggtaagttttattattgagcccattttacagataacaaaacaagctcagagaaaataagtaacagtttaaggtcttgcactcagtgagtggtttctaatcctataggtgcaatatcgttgctaattccaccaagaaaatcctcacctgtttgtgtagggctcatgccaatcccagcttaacatggtagaaaaagcactgagggtcatcctgaggacctattatgtaccagccactatgctaggccctgaggatacaaccctgtgacccatggagcttacaattgagtaggaaagacagctagaaaattatatatgtgatatctgctgaca

SEQ ID NO: 225529 - DNA, 603 bp, Homo sapiens
gctacttctctcagacatgttgcttcaatttctcacctgaactactacattagcctcctacctggctctgctttcattcctgcctccctgcagttcattcttacagagaatctagaaaaagctcttcaaaagcaacaatcagatgtcactctcctactttctaaaaacttttaaagaggacctcttcttctgccagtataacagactttgtactccaaaggatatctctgttgcattttagaactcctaggaagtaatgaaaatatctaagaaaaaaaatacaagtagctaagtgcatatatgtcaacagtaaacaagccagaaaaggcagaattggccatcccttgtgtttgtgtgtgacggtcatgtgggggtgcaaatggggaccgtactgcaactcccagtttaagcctgggattctagaagggagataaaatagcccaggttggtagtaccactaaattccagataaagcaaatgtaatttaggcttctagttttttttcacagattgggatcttgagctttcaaaaaagattatcaaacaaggaaacaaaccaccgtgagtgaaaatcagcaaaactagcgttaatatattaattac

SEQ ID NO: 225530 - DNA, 447 bp, Homo sapiens
caaaatatggtattcataagagtttataaataatatatatatattagatcagatgaatgctctatgaagtttttactctgccacctacagtgaatatataaacttaaaagattaattgaatattctctaaccatgaataagcaaattcccattacttaatactacaatatagatttccaaagtaattaacactttgcatttctgttccgtgaaattctgtctgtagcatattaagtatacttttgtactgaaaggagtttcttcatgaccaaaaatactcttcaggggcaaagtaagaattttgtacactaaaccgtcaccaaatgattctatagggtctaacacaatcactttgttttctaagtattgctaccttatttctggaaatgctttacccctctgggagacacagtctaaccagtttgattaaagtcatttggaacaatg

SEQ ID NO: 225531 - DNA, 502 bp, Homo sapiens
tgaactgttggatgttagtggttttgctcataattttacagaagagtgagtttatttagttcttaattatccagtccagaaacaaaattattccatcaagggagttcatttttattgtgaaattttattttcacttgataaagatcttgtcagtcaacctataagtaaattaaaattaatagtatcttattgctattgaaatggctttttcttatttctaaaattagtactgttacagagggaaaataaatcaaattttaaaatttaagtttaagaaattgaaaatagaaaataaaattataatttcaaaggaactaaattattacttggcctccatcattgcaaaattttaaaatttttggtttatttgagaaacaccatgcgttatttaagtgttaaatattagttgagctaagctatgtgttttcatattttccatagcctatattatataaaataataaattatgacttactagatatatgggaaattattttcaaaa

SEQ ID NO: 225532 - DNA, 479 bp, Homo sapiens
ggcaacaacaatcatttcttctgcttacaaacagaaatttggttagaacttagccaggaccacacagtctcagcggtggtagctcagaggctggaatcactacagccagggctacagtcatttcaaagtttgctcagttatatgtctggcagttggtcctagcagttgactgagtcattggggttaccaaccagaacaactacatgggagctcctatgtatctgcttggttcctctcagtgtgttggatgggcatacaactgagtattgcaagagccgggaaactgccagtttcttaagacctgggctaggaaataagcacagcatcatttcagtcatgttcttttggacaggcagtcacagcatctacacttaagggaagaggaaataaaatttacctcttggtggaaagagtgtcaaagaattttggggtcatacttaaaagctaccacaatattgtaactttttaattgtataagc

SEQ ID NO: 225533 - DNA, 471 bp, Homo sapiens
gaaacaaaggtggaaggtgcattcttgagcatcatctactcagtgctgcctgcagctgtgcttgggagacagctcctgctgagatgtctgaaagctttggtggcattgagtatcctgtaaattatctgcttgagcagttggattccacccttcaccctccagccttccaggaggctatggaagcctccaatgatttcctgcattaaaccgagaatacctagattgacttctgttttcctgaagcagtcacccttcacatgaccccaaactgatcgttgtaaactcaactctcttcatactgtcatttctctcatccccagtatcatagcttccagtcacaatcaatcatgggcttcccctggagagtttttcccactccctggaggggtttagtgaccagctcagtgcctggcatcaggaaaacactcaatggatgtatggtaataaaataaatatatgcatgaatcttta

SEQ ID NO: 225534 - DNA, 141 bp, Homo sapiens
tccaggaaaattcctttgtaacaactatcaccacattaatttgatctttgtatgctactcagccttcactattttttgttttcagaattctagttttctttactatgatctttattgattctcattgattttacctgttct

SEQ ID NO: 225535 - DNA, 730 bp, Homo sapiens
  misc_feature (24)..(24): n is a, c, g, or t
gaagaagtgcgtttcaccctctgncatgattatgaaacctccccagccatgtggaactgtggggtctccctatgttgcccaggctgaactccaactcctgggctcaagcaatgctcccatctcagtctcccaaagtgctgagattacagtctcgctctgttgcccagtctggagtacaggtatgatcttggcttactgcaagctccgcctcccaggttcaagcaattcttctgcctcagtctcccaagcagctgggattataggcccgagaaggcaagggagggagcaggaaccagaaccagaggaggttttgcaggacttgcctatatccaggcgtcagagtgagcccagggaaggttggccatgatttggggtcttcagagagagccagatggaaataggagaggaagctgctgtcacaggggtcacacttggctcaccagagaaagtcgcttggcatcagcagctggtatgatggatttaccatgcctgccttgcccacagtggagtcccaaaaggtggccatcatcaaatgactgcacccatagtcttctgtgcttcaccctcttctgtgggcttccctggcctagcatgctccctacaccgctggactcttctccatctaagtcatgtcatggaaacccctccagagctgcagacagacagatctggctctgagtctctctactatcccttcttagatgtggggcaggaaactagcctctgagat

SEQ ID NO: 225536 - DNA, 343 bp, Homo sapiens
cagacaaccaccaggcaagtgagtgagacatcctagaccagtctgctgtcagctgcttgcagacatgcccgagaaggcaagggagggagcaggaaccagaaccagaggaggaagaagacagcaggagagatgttcttcagggtgtctgatgtgatgcctggaactgcagcagccattttgcaactgtgagggaagccagtggagtcaaaactgacctactgtggatggaaatacaaatagacagaaagaattaggttcttgataacttcatggagcttctctaagagcctgtcctacatccaggttttttttttaatgaaataataaagattcttgttgtttg

SEQ ID NO: 225537 - DNA, 540 bp, Homo sapiens
  misc_feature (24)..(24): n is a, c, g, or t
gaagaagtgcgtttcaccctctgncatgattatgaaacctccccagccatgtggaactgtggggtctccctatgttgcccaggctgaactccaactcctgggctcaagcaatgctcccatctcagtctcccaaagtgctgagattacagtctcgctctgttgcccagtctggagtacaggtatgatcttggcttactgcaagctccgcctcccaggttcaagcaattcttctgcctcagtctcccaagcagctgggattataggcccgagaaggcaagggagggagcaggaaccagaaccagaggaggaagaagacagcaggagagatgttcttcagggtgtctgatgtgatgcctggaactgcagcagccattttgcaactgtgagggaagccagtggagtcaaaactgacctactgtggatggaaatacaaatagacagaaagaattaggttcttgataacttcatggagcttctctaagagcctgtcctacatccaggttttttttttaatgaaataataaagattcttgttgtttg

SEQ ID NO: 225538 - DNA, 342 bp, Homo sapiens
gcgagtgaggtcgcatacccgaggtcacccagcaagcagtattccaacccaattctccatccgaagctctcagcagcattccggaaacagcgccaggccccctggaggagccggtctgctgctggctgcggggctggaaggggcttgcggttccctagcctccctcagagctgctgggttcctggaggagaggcttgtgctgcccccaggggagggagggcaaaattggcctaagaccaaggcagccgcaggaggggccagcctcttgcaaatgaaatattcatgggggttattgaatcaagttttattggaataaaaatacacttgctgaatacatttatt

SEQ ID NO: 225539 - DNA, 615 bp, Homo sapiens
ccatgggatttttaaaggcttcaaaattaaatatttaattgtgtggtgatgtttaaatatagtaatattctttacaattctatgagaataaaggagggaagatggaaggctcattcatttccttgaaataatgtattcgtaggataaaatatggtatttctttcttaactgtatatggaaggattgtgattccccaaatacactggactctttcaacaaaagtaaatataactgtgcattaaaacatacaaatgatcaacaaactatattacaagaacatgcatatgtgaattcctattaatattgaaagcactgaaccattttcttcactcaaagttcagggtaggtttgctagaattctgtaagaaagaatctgtaaggagagaatctttccctttttttttcagagaaaagtgggggagcaaggaagacattttaagttggccaggtccctagtggcttcacatttttgtcttctttgaaattgagaaaatgaacaaatgtcttgtattccgtgtactgatattgcatgcagtcagtttgatgagtcattagatttcatgattaattttaagaaatctttcgacctcttcctccattggagttctcactgcc

SEQ ID NO: 225540 - DNA, 370 bp, Homo sapiens
caaggctgttgtgaagattatgtgaactaaaatatgtaaggtggttggaatgggctctagcacacagctgttctgtgtttagctctatgacggtggggcagaaattttggtagttgggcccagcactttaaatacttggagcgttttagacaaggtgggaagggacttggacctgtttcttggactctgtttcttagtggaggaagaaacttgagtcaaaagaaaagggatggctgggtgcggtcgctcacgcctctaatcccagtactttgggaggcctaggccggaggatcgcttgagcccaggagtttaagatcagcctgggccacatagtgagacccccgtctctgcaaaagaaaacaagaaaaag

SEQ ID NO: 225541 - DNA, 435 bp, Homo sapiens
aagtaataaatacattattgttgagttcattttggagttatttactgtactaaaccagcctcacaatgactttgcagatttgtgatattactcttggcttttagagagagaaggacacacagtaaataatccctaaattcaaggaattgacttaatgagaatagttgaatttttaagctctttggattctgagttagtatttagatttatttgatttaagatgattgttgaagttacatgaaaataagtctttccaaaatgaaaatctttttagtaatcaaatgaggattttctgatagcaacagggtgcattggaaatgagattttctgatcagcagcagcatgcattgcactgtattggggaattgaggtaaagtaatatttaaaagttcatattattggccgggcaccttggtcatcaagagtgagtgagtc

SEQ ID NO: 225542 - DNA, 385 bp, Homo sapiens
taggctcctcctgttccccaggcttggggagctttgcacaaggagactgcccccagcctagtggcacctacctcatgggctctggggcaggtaggggaagggccagtccagctctggtaatgttggggggaggcataccaaagaatccaggggcagggagtggggagggtgacttccgagctggcctctccccttcctctacccagactggggctgggatcctctcctcccgctgtaaccatttctacctcattttgctgcgtgttgtacatggacgtatttatctcctgtctgacgatgctctgcagttgtggtctgtctacctcagaagagactgtattttaaaagaaagtattacacagtattaaagcgatgacatgtggtt

SEQ ID NO: 225543 - DNA, 510 bp, Homo sapiens
tatgaataggcctaaaacatgttaagagattaagttggaattcaaagacttcctacagagaaaaggcctcacccagatggcttcactggctaattctgctaaaggtttaaaaagaaataatatcaaaacttcataagttatttcaaaaataaagaagagcagggaacacttcctaattgattacatgaggctcatcctaccctgataaaggaccctgataaaagaaccaaagacatcacaagaaaagaaaaccatagaccaatatctcttataaatataaatacaaaattcttcaacaaaaatacaagaaaatcaaatctggcaatccagcaaaaagattatacctgatggccaagtagaatttatcccagaaatgcaaggttggttcaacataaaaaaaaatcaattgatgtaatataccatattaataaaataaaggatgaaaaccacatgatgatctcaatagacatgaaaaaaagcattcagcaaaattcagcacactttcataaa

SEQ ID NO: 225544 - DNA, 439 bp, Homo sapiens
tcattaagtaagctgctgctgcttataatttttaaattttttgtcatttggttaatatattaaaggacatgacaaggtgaagtttgccttatctgatctttaagtatcactagttaacatatagatattggagcatttcctttgtattcatgatcatctgtaaattcagattcttctaatgcttggtgaagcatttcttgacattagtgcacacctgtgtccctcccaaagtgctgggattacaggcatgggccaccatgcccgtcctcagaagactttttttttaagtggaatatttgaaaatagaaaagggccaagcgcagtggctcatgcgtctaatcccagcactttgggaggcagaggcaggaggatcacttgagctcaggagttcaggaccagcctgggtcacaaagtgagagcctgtctctacaaaaaattt

SEQ ID NO: 225545 - DNA, 542 bp, Homo sapiens
tctgaggcagaaaagtcaaataagtcaaaggctgggcagaggtttatttctcagtcacacctgcagggaagtccagggataaaatgaacaatcctgtacatttcccagttataggtatgaggcaacacttcctatatgttgggtctcagtatatgactcacaatttcaacagtggactggatccacgcatgacagcctcagtccctcctgcagactgtgtacccttagtgaagtcacagcctcacagctgtgctgaatcttggtctgagagtcaccaacccacctgtggacaggattcacctatgagaggcaattttccaacttttgtcagcttcctaatgtgagattcagagcctcagtggtgggttgtgttactgttaaagaatgacaatctttactgtcatctgggtgtgcaacagtcacaatatcacctctgtgccatatttcattaggtgtcaacatttagcatgaaaattataaaactataaacccagctcaaggcagaataatctttttgtgatttttaataaatgagacattta

SEQ ID NO: 225546 - DNA, 369 bp, Homo sapiens
cataaaaattaaaacacatttttaagtattttagccaatctgattaaacatagcacatacatacattgttttcattcaaataaattaaaagagaaatgaatgaaaagaaatttcatgtacagtaagaagacacgatgattaagaatgctgatttcctttcttccatacatggttattagcattttgccctgtgctagatttggaggaacacatatgacttaggagtttaggttaatcttctgggataacagatcttggaagaatagtgtttttgaaagaatcactgcataactacacctcctatgtacgtctatttttaactttattaagtactatatttgaatgaaatatctaacaaatgaaaataaa

SEQ ID NO: 225547 - DNA, 497 bp, Homo sapiens
catgctgacccagcatccctcctgatggtcctatgtagaaaaagatacataatgtttgacatatttatggggtccctgtgatgttttattagatgtacagagtatgtaatgatcacggcagagtgtttgtggtgtctgtcactttggtattcctcattttcctgtgttcagaacagttcaggtcctctcttctgactactttgaaatacacaaggctgggcacggtgcctcaggcctataatcccagcactttgggaggctgaggtgggaggatggcctgagttcaggggttcaagaccagtttgagcaacatagcattaccctgtgtctattaaaacccaaaaaaaattagctgggcatggtggtgcatacctgtagtcccagctactcaggaggctgaggtgggagggtcacttgagcccaggagatggaggctgtggtgagctatgatcacaccactgcactccagcctgggccacagagcaagacactgtctc

SEQ ID NO: 225548 - DNA, 539 bp, Homo sapiens
acgaatgcagacatttacatacactgtgatttgtgagtttcagggtgggatagatctagcaaaaattatgtttaatgcttagattttatgtaaaactactgtgatattgaatgccgtatgttttgattagagtacagcctgtgcagccccattatttgggttcaattttagttgtacatttatttgttgggtaactttggtcaaatttagttaacctttctatactttcaatttgtaaagtagaaatcataggaatgactacctcagaggtgttctggaaagtaagtgatttaatagagatacagtacttaggacagggggagtaaggcattcttagaagtcgctttcatcctgaccttgcctattattcaaggctgactgctaagagactagttaagcaattagatccagatcttgatagttgccctatttttccccttcaaggccatatgtgttactttcctctaatacatttgcctaaagccaaagaacaatccatctaccacttaagaatacatttattgcttttaacttaaaaa

SEQ ID NO: 225549 - DNA, 475 bp, Homo sapiens
ggaagtatcttttcagcctattatgctgtgtggtggaggtatagtagcacatcttagcacacggagttctggagtatcctctcacactgtcaaagtttagactcctctcttgttccagtggatgagaagagaggaaagaaactgtagaaatatggaggtctggtagaataagaggagtcagctaagtgaactgaaggacttaagagtgaaccccagatttctcatttgtaaagggagagataataaaagtactacattatggagttgtgaggattaaataattcatgctagattattaaaacctggcatttatgtaatattcagtgaatttagcaattatgattctatttttattataatcagtacattaataagatctgggaaagaaagggtagtgctcaatacatacttggctgatcaattgattcttaaaacaaacaaacaaaattatccttattccttcccatttgccagt

SEQ ID NO: 225550 - DNA, 379 bp, Homo sapiens
gaattagtttttgtgtttagattccccttaagtttgattaggaagtgtataaaagttcaatcttttgtaatgacagcccaccactggaaaaaaaacgaaaaacctagtgtaatatataacatgctgtttttcaaacactagattttacctagagtccttatgtgtaatacgtgggttggttaacagtccctacgtaaagcgtacagatggcctggagagaaaaactttttcagagattggagagaaatgttactacaaactcatggtaaggtcagtgaactcaatttagaagccagtgcagctagttgcatgttaacttctttatatcatcattgcctgaacttgttaaaggttccaacattttacctgtgctgcagga

SEQ ID NO: 225551 - DNA, 761 bp, Homo sapiens
gatgtctctgagaagccatcaaggcaaaagagaactttaagttcctgttccagcccgtgagtttgggaaagaacacgacacacgtgaacgacacgacacgacacacacagaacagacggacacggaacggacacacgaaatgaaaaacgaaacgataacgaaacgaacacgcaccgacagatgacagacacgaaagacgaaacgaacgacacacgaaagaaagaaagaaagaaaagaaagaaagaaagaaagaaagaaagaatccctgtttgaaaatattacctagtaagggatagaggactctgtattacacaatgaaaagtgaaaaatgccagagaaaaaattaaatgaatatgctattcccctatgacacaggacagagccagagatgggaagtgaagggcaaatgagggtgatgagccactccttccgagccaactcgtcctatcgcacttgctctgagcagagtgttccaaacactttatcaaaaataatacgttattgaagttcagagaaagaataacctcttatcagatatagcaaagaaggattcttggaaaggagacatctaaagttcgactttgaaagattggtaagatttaaacatgaaggtttcaggcagaagaagccaccttagtcaaaggagtgaggcagaaaattacaaagtaagtcaaggaaaggagaaaaagttgatgttcacataagtgaagggaagatattacataaagtggcagatggctttaaaatgcctggctcacgag

SEQ ID NO: 225552 - DNA, 232 bp, Homo sapiens
ctgaccttttccatgaatgtatatttgctacttgttcattcgttctgtcatctgctggcacttgctctctagaaatgtgaaaggtcatgagctcatccaggacttgctatcctccctgcatttagacagttcctacccacctgatgctggcctgtctgatgatgatgagcctcccaatgccagcctgccccccgacccgccactcctcactgtgccccagatgcacagtgtt

SEQ ID NO: 225553 - DNA, 531 bp, Homo sapiens
ctagggaggcccacctgcccagttccgtgctgctgacttagagcacggctttgctgatgatatccttggctccttctctgcgtcaagccgcaggtgttctctgccttctgtgattctgctcccctccctaggtggtgtcatgaagtgcatggtatttctgctggctcctaggcttttcccctgaccttgcacatacagttgcctgctccacttccccacctgcccagtcagggcatcacacccccttatccatccagtcttccttgaattttacccacctcagtgagggcagctcttcccagtcactcaggccaagaacctgtgtctttcttaacttcttttacacccctcttctggtcaataaggaacttcttggtgcttctttctgaatatataccaaatctggccatttatttcctccattatgcccaccataatgcaagccattgtcatctttagactgaactatagtaggcctcccctgccctcccctcccctgccacttagtgtcagtgttccacgaaaaaaaaa

SEQ ID NO: 225554 - DNA, 616 bp, Homo sapiens
acaaatggaatcccttcttatctgttttattctcacaatgactttttaaaacttgtaagtactgaattatacttttgcaagacatcactaagtcttagaaaacattaaagtataaatggaaatggtgcttgcattcaagaaatagatattttgtttcagattcttaaggtacaatttagaccatgaagctaatccagatgatactggtcgttagaagccctaactatttggaggatcatactaattacagtgaaactgattactttttgaaaagagaaaaactgcttgttgttgtaaaagacagtaatgaactgtaagggctacatgctgtgcaggaatattaagcatgactgctttatatctcctactgctaagcagcattggaactgaattgatgtaaacaagcctgtgtattcttgttcattattgcttttagattgcaccatttgaggattgtggtagatttggagtgagaagtactagttgttattaggagaaaattatgttttaacatttgagaaaattatttcaagtacattaaagttctgtattctacagaagctgtgtttttctgcttttgcttttagataacttggattccttaatggaatggggt

SEQ ID NO: 225555 - DNA, 467 bp, Homo sapiens
  misc_feature (2)..(2): n is a, c, g, or t
  misc_feature (104)..(104): n is a, c, g, or t
  misc_feature (125)..(125): n is a, c, g, or t
  misc_feature (135)..(135): n is a, c, g, or t
  misc_feature (154)..(154): n is a, c, g, or t
tnaaaacccccttccttttttttttttgtttggggaaaagaaagaaaaaaaaggggaaaggggcaaaaaacaaaaaaagaacccccttcggggccttctttggnttttggggttttggggttaanaaaaaaaggnacccatgttaaaattgtanacctggtgaaagaggggctacatgctgtgcaggaatattaagcatgactgctttatatctcctactgctaagcagcattggaactgaattgatgtaaacaagcctgtgtattcttgttcattattgcttttagattgcaccatttgaggattgtggtagatttggagtgagaagtactagttgttattaggagaaaattatgttttaacatttgagaaaattatttcaagtacattaaagttctgtattctacagaagctgtgtttttctgcttttgcttttagataacttggattccttaatggaatggggt

SEQ ID NO: 225556 - DNA, 178 bp, Homo sapiens
ctttaactacattagttgagtgtagttgatacatctgtggccttgtgtctataaagagcacactagattgtacccagcacttttggatatgacatgctaattagatgtatttaactattcataggaaagtgtatgataaatgactgtaatatttctaataaatatattttgtttctaa

SEQ ID NO: 225557 - DNA, 204 bp, Homo sapiens
gaatgatctacagtgatctttaacatactcagaaatatgaaaaatgtttgaatatgatctttagggacttctaatgaaaagggtatatgaaatgggaacaataaattctgtacatgtatacagtccatatacacattaagtgtttgtcatttggacaaattgaaaacttttaataaagccattttcttctttgttaaaatgcca

SEQ ID NO: 225558 - DNA, 416 bp, Homo sapiens
ggagttaaactcctgcgttccagcgattcttgatctccaaaaggactaggattataggaatgagccactgcacccaggtagttctcaggattttattagctatgtggggtcttttgtagttccatatggattttagaatttttttttctatttttataaaaaaaagtcattggtattttgagagggattgcattgaatctgtagattgctttgggtagtatgaacatttaaacaatattaattcttccaatccatgaatatgggatatcttttcatatgtttgtgttctatttaatttctttccaataatttcctttgtggagatccttccacttctttggttaaagttgttcctaggtattttattttatttttcgtagctattaacaatgggatagttttcttgatttcttttt

SEQ ID NO: 225559 - DNA, 385 bp, Homo sapiens
aatgttcatttaatcaagctatgtttttaaaagcatattaacagcatttggaatgacctggatgagattagagactattattctaagtgaagtaactcaggaatggaaatccaaacatcatatgttctcactgatatgtgggagctaagctatgaggacacaaaggcataagaatgataaaatagactttagggacttggggggaagagtgggaggaggcaagggacaaaagacaacaaatatggtgcagtgtacactgctcgggtgatgggtgcaccaggatgtcacaaatctccactaaagagcttactcatgtaaccaaataccacctgtaccccaataacttatggaaaaataaaatttttcaaaaagcaaaaaaaaaaaa

SEQ ID NO: 225560 - DNA, 395 bp, Homo sapiens
agacgttgtggggaagatctccacatttggaaagctgaagatctgcagattaggggtgacactcaaattccttaaggggttgggcagataaattgtgtaaaatggtaaggcattagaaagtggaccagactgcagaggactggagaggcacagcccacctaaagacattcaaatttggtacagatgcttcttggcttaccatggggctactgtgtcccaataaacccacctaagtgaaaaaatgcatttagtacacctaacctaccaaacatcacagcctagcctagcctaccttacacatgctcagaacacttacatgagcctacaattgggctacatcatctgacacaatgcctgttttataataaagtgtagaatatctcatgtaatttatt

SEQ ID NO: 225561 - DNA, 384 bp, Homo sapiens
acaaggatcctgtttaccaaaggactgctaagccagataaccttcagttagtttgtggcttttggttcttaatataatgaagtttaggggttaaatttaataaattagtaattacttttttttttttttttgacacagggtcttgctttatcacccaggctggactacagtggcatgatcatggctcactgcagcctcaacctcctgggctcaattgatcctcctgctgcagcctcttgagtaattgggaccacaggcattcaccaccacccccagctaatttattttatattttgttttttgtttttttttttgagacggagtttcattcttattgcccaggctggagtgcaatggcgcgatgttggctcactgcaacctcca

SEQ ID NO: 225562 - DNA, 386 bp, Homo sapiens
agactgacggagaaatggagtgagtgaacctctctaaccataggtatttttcttcataggatttaatctactcaatgaacaattttgaccgctctggaaataaacaaatgctatcctaactcctctttgctgtagcttaatctgcctgagaagagagtaaacaggaaatggtctgggagtccccagatacttttccccagttttgaggttgacatctgcagtgcaatgaaggcattgcagacaccctcagtagaaagtagggtgtaacagtacattgatagcaattttttgacacttacaaaacgttagtatacatagaaatgctgactcccactaaagagctagcagtggtccagttttgttactttttggaacttaatgataaa

SEQ ID NO: 225563 - DNA, 462 bp, Homo sapiens
gactgagtaaatgaatgagtggggttaattaactaattaattatattaatagaacaggggggaaaaaacttaaaacctaactcatagatacatgaacaaatgcagcaacctccaacgctagactgtatgccatgacccatagtgtgtggcctgctgtgtatactcaaagcctacaccctttgctcattggagtggatggatgttgtagtcatgttacttttcaaaatgaattgacttggattttgatcacaacttcgtgcacaataggcctccaatgtcagacatgcacaaggagaagagagtggtgctccccagttcttgcaaaataactaccatgttctaggttaatcttaaattgttatggggggggaagcccttaaagctctttttctagaaacagtttttaaattattcttattttgcactgtaaatttaaaattttgcagggaatatttggttagt

SEQ ID NO: 225564 - DNA, 397 bp, Homo sapiens
tagtctatggtattttgttatggcagctcaagctaagacatccagtgagccacagagatatgtgagaaagaagaacttccgttagagaggccttcaagggaattcgtggagtaggaaaaagccaacttgcattgcagtaaagcatggaattattttgaaaacagaatgctgatgagtatgggggagagtttattcacaatataacaagaataaaagaatgaatatttgaaaaattttcacggtaaattctgtatcctttttcttttgcctgaggggctttatgattttggtgaagatcatttagttttctaaagagatatagtttgggtaatcattctcctgcagtttccccgtgctatgcaggataaaataaaagccgtatgccttttcttctgtt

SEQ ID NO: 225565 - DNA, 402 bp, Homo sapiens
tgaggactgagatgtgggaggatgattaaggagcatggtaccttaggcagtatttgtagtgagtgaaaaaggatgtagctttatgattaagctacaatttttgccaccctgctattcaaagtgttgaatagaggccggaagtggtggctcacacctgttaccccagcactttgggaggctgaggcgggtggatcccgaggtcaggagatcaaaaccatcctggccaacgtagtgaaaccccatctttactaaaaaaaattagctgggtgtggggcatctatagtcccagctacttgggaggctgaggcagtggaattgcttgaacctgggaggcggaggttgcagtgagccaagatcatgccaatgcattccagcctggcgacagagcgagattccgtttca

SEQ ID NO: 225566 - DNA, 503 bp, Homo sapiens
tgctgggattacaggtgtgagccactgtgcctggcccattagtgttcttaacctgcaacatctgtccatctttcagaaagagaagctaaagctgaggattaagctttcagattattttttcagtaattaaactgtaggacagggctgagttatcacacataaccatggtcaacattttgacatacagcccagggaagtttcacatgcaaacagatacaaaactgtggataaacactgctgcttgcaaagagcttgtgacagcagtataggtgtccagttgagtgtgtggacaagggcctgcactggactgtatcttccttccatcaaggaaagcacattattaaacatcatggaagagagaaggactaacactatttccattaaataagagaagtggacattgaagaatacaattcttcaaggtttccactagtggattcaggaataggtctagactgtccagcctccttcaacagagccctagctccctcttgcagtgagga

SEQ ID NO: 225567 - DNA, 469 bp, Homo sapiens
aagcccttaagaaagggaatgctgtatttctactttttgccatcttttactgctttgctgtaaacaattagatgcaattaacttagtgaaaaaaaaaaacaagaatcagaagatttaaatatgagcctcagctttcccggtgactgtgacactacaggtaaattgccaaagttgacaaccttaagaaagctaaagaagctctttctggctacttgttaagtcacaccaagaaattagctttataccattaaactaaactcattaacctttcttggcaacaattctgtctcgcaaatttcctgtcttactgttaataaatttctcctgatgcagtttagcccattctgcctggtactaatgatagactaaaagatagtttacatcagatctcatcccttctctgctcagaaccctccaatggcttctcatctcactgaaagtaaaatccaaactccttgcagtggcctac

SEQ ID NO: 225568 - DNA, 232 bp, Homo sapiens
gcctggcaagttgagaacacagtctgagagttcaatgcctatgggctctgagccttgcccaggccacttcaccaacagggaaatgcctgccaggaggacccaacacttgggcctggcaggccaccatctccctggctctgctcccgtgggcctcaccgcagtgtgcctcagtgacatccccttttcaccgatctttggcatccaatgaacacatcttttcttcacctccagc

SEQ ID NO: 225569 - DNA, 457 bp, Homo sapiens
actgtggtgccatgttgactcactgcaacctccacctccagggctcaaaccgtccttctccctcagcctcccaaataggtgggactagaggtatgtaccaccacacttggctaatatgtgtgtgtgtatatgtatatatttttagtagacaccgggttttgccatgtcacccaggctggtcttgaactcctgtcctcaagcagttctttgcctcccagagtcctaggattataggcgtgagtccattacgccccaccgaggatgttttaattaatgtatgtgataataagcaacatgctgtaatatattctggactcatttatgacttctcattactaatgctgaaattggattcccctaagcagtggcagtttgttttataggaagaaagtagttactttctatatcagatcagttctccctcctggttccacagagctttatgtgagaactccaa

SEQ ID NO: 225570 - DNA, 386 bp, Homo sapiens
tctaattttcctataaagtaaggggaataaaatagatttacagaacacttgtgatggtctagctgatggatcactttaaaaagagagaaagaggcaaagtatgggtagtttattttcacaaatcagttttagtttttttctatgaaattaatgaacaagaagcccattaaaatgattgttacaattcttctttttaattgtttactctattaaggtgacaatacttgacagcttgatatatgaacagtgttcacttgcccaacataaacatcaattataacatgaaaatgcgatggtccttcaacccttcattcactcatccaggttaaatgcagaatttggaaagaaaccaaaattaaagttaattttacctagacttccccaga

SEQ ID NO: 225571 - DNA, 421 bp, Homo sapiens
gagtgcagtggcgcgatctcagtcatcactgcaagctctgcctcccgggttcacgccattctcctgcctcggcctcccaagtagctgggactacaggcgcccgccaccacacctggctaatttttttgtatttttagtagagacggggtttcatcgtgttagccagggtggtctcaatctcctgacctcatgatccgcccacctcggcctcccaaggtgctgggattacaggtgcaagccaccgcgcccagccgggtatttcctttttgttcactatggctaacaatactctcaaaaacatccctgaacctacagacttgctgatttgcccagccattgtccttatacattcttaaagcagaatttctgggtcaaaaaggaggcccattatatatgttcttaatgcccgttgccaaattgc

SEQ ID NO: 225572 - DNA, 451 bp, Homo sapiens
gtaattcatacagaactctggtgagcctgaattttgggtcctctttattctttttgcctttaaggtggaggattaggattgtcataaaagaactgggataggtacaaccaaaaacaaaaaaggaggagggggaaagacagtggaattcagctaaaataacagataggattatttttaaatggcttcagaggcaagacagtgctactgaaatagcgaaaatgtgactgacatctttttacagcacatactcaatgaaaatgaaagagagggttggggaaagctataaaaatgagaattcaaatgtaactatagaggatataggtttactctgatttgcctttacactaggattcagtgtctttcataaatttggaaatttaccatagacattacttcccttatgttgcgtctgacaacttcagtttttcatggattttatatttcaacttgt

SEQ ID NO: 225573 - DNA, 472 bp, Homo sapiens
agagccctcgccaatcagctcagctgaacacctaggtctgtcccttgctgcatggcacaggaagaaagaactctccgtgtgttaaatgtagacaggacctgcttactgcagcccatggagggtgtcctgaggacagctaatgctttgtgctggacacaggcctcttttgaaagaacagataaggctgggcgcagtgactcacgcctgtaatcccagcactttgagaggacgaggtgggtggatcacaaggtcaggagtttgagaccagcctggccagcatggtgaaacccccgtctctactaaaaatacaaaaaattagccgggcatggtggcacgcacctgtagtcccagctactcgggaggctgaggcaggagaattgcttgaacccagcaggtggaggttgctgtcagccaagatcacgccactgcactccagactgggcgacatagtgagactctgtctcaaaaaaaa

SEQ ID NO: 225574 - DNA, 396 bp, Homo sapiens
gggaggatgaggcaggaggatcacttgagcccaagagttcaacaccagcctgggcaacatacagaggccccatctctacccaaaaaaaaaaaaatttaaattagccagacatcatggtgtgcacctgtggtcccatctactcaggaggctgagatgggaggattccttgagcctgggaggacaaggttgcagtgagctgagatcacaccactgcactccagcctgggcggcagagcaagaccctgtctctaaaaaaataaaatcagtggaaacggacagtccaaacccatgttgttcaagggtcagttgtattttatttatttcatttaacatgtgatcactactaaaattgttgagatattttaccctgttttgtactaagtcttcgaaattcag

SEQ ID NO: 225575 - DNA, 502 bp, Homo sapiens
cattgtgtttgcagctgaagccccagtgggtgtgtgttacagggtattcttttagtttgctgtctataggcggcttgtgttaaccagctcaattagaccctctagcttgtctcaaggatggagggctttctgtattccgggttcttgccttggtgtaccagaagaatccgatcacccgtgggctaggagaatgagtgcaacgttttattgagtggaagtagctctcatctgatggtggaatcagcagggagatggttttcccctggagttgggcttctaggtggccccgtctcttctctgactgccctggccaaactccaccttgtcctgccggtcaatggcctgccagcatgccagtgcctctcggtgtgctgttctgctggcgtgctcctcttgacgaccagctgcttgggtcttccaccgaagtgttcctcacaatgtccagccgctcgtgtgtctgcccactagggtctcgggtttttataggcccaggattggggca

SEQ ID NO: 225576 - DNA, 552 bp, Homo sapiens
gtatgttgatatctatagagactatgacttcatttgaatgaagtatatatacacacatgtgtatgcgtgtattactgaagcataacttacagtaataagcacatatgttaagtgtgtgatttgatgagttttgacaaatgtatagcctatataatcaacactcatatgaagacatagaacgtttttcaccccagaaatttctctcatctcttttccagtcagttccaccaacatctcccagaggcagccactctttgaatctctatagcctgcgttacttctgccttttcttgaacttcctttaagcagaatcctatagcttatgttcctttgtatctgccggttttttgcttcacatggtgtttttgagattaatttatgctgttgtgtatttcagtggctcattcctttttatcactgagcaagagcccatgggatgaatgaattatcaccgtttcaggtcacttacttgttaacatttgaatagatctttggaatgttagaggggttttgactgtcacgaataaagttgctgtcagcattcttatccat

SEQ ID NO: 225577 - DNA, 179 bp, Homo sapiens
gaattgttgtcatatgtaatatacttttaaaattcagtagtttgcttttggaggttatgaacattgacaaatagagctatggcagaaaggatatattctatccaccttcagcccagttgagaatattatcaacaacctttttactttcctaagctgtccttatcaaatctatttcctag

SEQ ID NO: 225578 - DNA, 245 bp, Homo sapiens
cagttgttttatttgtccatagttagcttccttttccataccctggaaggtatttccagtattgttttcttatccattagacatcatatggcctctcattttacgaataaaatagagactttcatacttgactcctgcttatgtccttcccccagctggcatctgttagacttcttgctgaaattaaagtgaccttgacttctgtggcatttcacctttgattgctcccttctttcgaggttgtg

SEQ ID NO: 225579 - DNA, 506 bp, Homo sapiens
tgtcttcatcttccaaacagtgataataccaagcacttcataaagttgtgatgagagtgaaagatgatggtccatggaattcgaatttgccagaatacatctttgtacaaatgctttgactttcaatgacgctacagcctcttgtgagattgcaaatccaggggacctaaccctgtcttggtgagtcataaaaggcatcctaaaaataactactttttctgttaaaagttaaaggatgattaatgtttatttaaataaaggaaaagggaaaaagagacacaagtgagcttgaaagagggaaaagccattgtgaagacagagcggtgaaagaaagctaacacaagaaaagaacagagagagagagagaaaaaagttcaatgaagtaaaagaaatcacataaactggaggggaagggacccatgggggagaatggagacagccctgcccagatcgtgcagaagagatttttttaaaaattctaattttaaagcatattggatgtcaaa

SEQ ID NO: 225580 - DNA, 546 bp, Homo sapiens
taactaccacattacgtctccatgctagtaacatgttccatctccagtctgttgctaagcttgggtatatagagtataatataattcactgttactttgactcatgattccttgctcatcagctatattaaaccactttccatatgtttattggccacttagttttgctttttggtgaattattcatactgcttacctatcattctttgaattggttgtcttttcattatcaatgtgtaagtgctttttattaaggagactaagcctgtgttatctgtgctacttaaacattttctcagtctattaatcttctactgacctagtttttgatgtatcttgcattttttttctactttatgttgtccaccctatctttcctttcttaccgagctactaggtttctggtcttcattaaggaggtctcttatgcaattatattggtaatatagctttccaattgctcatgatattttagtttgtttataatatcagaatcctttctggaacttatttttatatgtgatgtaaaataaaaatccaaataca

SEQ ID NO: 225581 - DNA, 627 bp, Homo sapiens
ccacctgggcctcccaaagtgctgggattagaggcgtgagctaccacaagcggccaagaaacttaataggggaaaaaacccaacttcacctgaagagtcctgacagacacgccctttatcaagtgaatatccccaggaatgggatgcagagactgcgtcaccgggcaggacgcagggagaagagcacagcctcactccaggaaaaggcacagcctcaatcaaactgtggacaaacagcagaaaaacccaagcaggcagtctacaagtaactaggctgcacccctcaaaaagacaaggacagaggcctgttccagacccaagaggacaaatacaataatgagcgcaatgtgtggccctgggttgggttatggatcagaaaacaagaatgttattgggacaatcggtgacatctgagtgtgggctgcggagtagatagcaccaggacatcagtgtaaaatccccgattttgatcactgtgctgggagtacgcaagagaatatccttgttcacatgtttagtgataaagggttacggtgtctgcaacttagtttcaaaacgctcaaaagtcatcatcatctgtatgagtttagagggaataataaagtaagccagacaaaatgttaataa

SEQ ID NO: 225582 - DNA, 297 bp, Homo sapiens
aaaaaaaaaaggtatttaagtagttgggcatggtggtgtggtagcgcacacctgtggtcccaactacttgggaggctgcaccaggaggaacgctggagccagagaggtagaggctgcagtgagctatgatcacactgctgtgctccagcccgggcaacagagcaagaccttgtctcaaaaaaaaaaaattaattttgatgttaaatgaaaaagtaaaacaaatgcaatgtgcgtgtatacatgtagtatatatgaaaatgcatgtactcccagttgcacagccactgaacaattcga

SEQ ID NO: 225583 - DNA, 609 bp, Homo sapiens
attgaagtcaagcagagaaaaatgataattgtatagaaaagtcccagagacttcaaggattaccacatttagtacttaggtaaaggggttggtctcaagtagaaggctaatgatagtgggttggtagatacgtaagtgaaactatgacatgctttgagtccgtctgattgtcacaataactctataatgtaggtcttactgttttacagaccaataaattgagttttaaagatgttaggtgaagaacaattaaattctagaaaactttggtgagatggggtccagcatttgtacagttgaagcaaataaggtatttatatgttatagatgaaatgatttcaaactgccaggagttatttggtacagattgtcagtaagcacagtacagtgaacatgcatgaatttgcagaaagtagatgaggggaaattgccagaaataatcctagtcaaaatggaccttacctaacttacttcagttttctctatttcttgttttgacccccaaattgaacatcggttatttgtaagcctgtaaaaatactcatttctgggtcttcagtgtctctcattaaatgttgttagatgtgtagacatatacctgacttcaca

SEQ ID NO: 225584 - DNA, 496 bp, Homo sapiens
catacagtgtagctgggagtggtggcgggcacccataatcccagctactctggaggctgaagcaggagaatcacttgaacccaggagacggaggttgcagtgagccgagatcatgccattgcattccagcctgggtgacagagcgagaccctgtctcaaaataaaataaaaaagatgagggagtttccaagaggatgagactgagatcctcctagattcattttatagactgttgttctctaccagattctgtgttctgctgctgatggtgatatttgcttaatacttcttatataccaagcacatttataaactcttattctcgtaacaactcttttactgaactgctctttcaaaagaggaaattgaggtatggggtgatgatctaaggatacacagttaaatggtggagctggaatttaaacccagagagcctgactccagagctcactgtggtaagctacctgcaaaaaaaaaaaagatagctcctggtctt

SEQ ID NO: 225585 - DNA, 432 bp, Homo sapiens
  misc_feature (325)..(325): n is a, c, g, or t
tccaaacagggcaggtcttcagctgattagaggttttgattctacagagaaagtcaggacttccccggggcctgagctgagtcagccttagtcatccccaggcgggacaaacactccaaatcctttttattggcagcctccctggtgtgccactttttccgatggtttccttgtttttatcaaggtgaagataccctaggacttgtgaagaatcagttatcaggtttttaggggatgagaaatccagctttatcaaaaggaaaagatagcaaagggaaccagataacagccagttctactgtgaaaatggtagtctaggccaggncacggtggctcacgcctgtaatcctagcccttttggaggctgaggcaggtggatcatgaggtcaggagttcaagaccagcctggccaagattgtgaaacccccatct

SEQ ID NO: 225586 - DNA, 461 bp, Homo sapiens
tgttctttggctttataatgtagaaaatatatctgactcagaaggcaaattgggatttgactgcaactctgacacccgagttcccaatctgtgaggcttagttctcgaggctgcaaaacgaaggtagcattggacccaagaagaatatgagaacctaatgaacgtgctctaatatcccccatggaaaggcacaatggtattttttttaaataatcatgattataataacagaggtactttacaattggcacaaaagttaaagctggaacaaagcaggcaagattaacatggccactctgtaagaataatatgcaaatctataaggtattttctatagtgatgaacaatgatttgctccttaatctacattttcactgccctttatctataccttgatgatagttctcattatactgtgtcataattgtgattacatatgacaacacttctagaaagtgagt

SEQ ID NO: 225587 - DNA, 202 bp, Homo sapiens
ggaacccatctaggataccacacttacatttagttttcaggtcttcttattcttctcttggctgtgatgatttctctgataatctttattttttatgttcttgacaatttagaggagtactggtgagggatattgtagaatgtccctcttttgtgatttgtccaatgtttttctcatgattagactcatgggtttttttcct

SEQ ID NO: 225588 - DNA, 773 bp, Homo sapiens
gcagctcagcaccgtgaggccagagcatgggggaagggcataggctcagtgagctgcaaggaacacctgcctcagacaagggtccatgaggtgactgactgtccctgcatgtgtggggtctccttccacagtgcctaggacagagtccccagatactaggtgtggtgccagtctccagcacggtcaccggcgatccccaccagcgatcccagcctttgtgttggtgcctcccacattaactatagatgatctatgtgaccaaaagaataaagaggaagtgatgatgtcgaattctaaggctaggccacaaaaagaactgaagtttccatcttgctgtcctatgttgttcactctgggggaagccatggggagacctgcacagccctgtggagaaactcacagagagagaaaccgaggcctctcaccaacaactggcaccaaccagccaggcgtgtaaactggaagcagattctcatacccagtcaacaccctgcctacatttccaaattcctgacccaaagaaacagaaaaataataaactattactgttgttttaacccactacatctgagaataatttgttatacaacaacacatagctaataaactggacaagagggaaaagagctgcttcacagcattgtttccagaagtgtgacgtatccatagaagaaccaaacctggtgtcagggccagaggccaccaaaggccctgactaagcccctaaggtcttagaacactatatgagaaaaaacaatgaccttcacggccca

SEQ ID NO: 225589 - DNA, 494 bp, Homo sapiens
gtgagatgggattgccagagctcttagggtgtttagttctccccaggtacttttccagaacattcactgtgcaaactttgatagccttaccacattgcactgtcctgacaggattttatgtacgtctccctcaatagataagctgcttgagaacaatgaccaagacttatttatgttttacatttaggaccataaattttatataaatgaatgaaagaatgatctcctggggcgggtgggggtggtctgcattatgataattagcaaactgttttgttactgtggattttgctaacagttccatttttaaagtacttcttatcttcatacaattttgattatttgtgaatacttttatagaaatcattaaggaaaattgacttggggaaaagtatatttctcagactgtcttgacattagtgacttttgattgtggaaaaactattgaacacaagatggcagtataccgttaactctgaaaacaagacaaggaa

SEQ ID NO: 225590 - DNA, 594 bp, Homo sapiens
agggactgtggagccaatttgtattagagatagtagcctggattttgttctttctttgactttacaagctcttcttgctctgtgggtattgttttccttatctggaatgtgggatctgatgatttaaaccacactattgttgctgccttatcttcctataagaaacctgaaccattttcttctttagatggctaaaatgtctgttttcaaataggacatggccagtagaataaatcttccatttatttcttctgaggataaagcagacagaataagttagagcattatcatgtgcaattatggttaacctacttttatttcttcttgaattcataaagtatgtctttatgtcacaaagctgggaggaaaataacagctccttagacattccattgaacagtgactttattatcttttcctctctgtttctcttcctctctttttttgcctgtgtaaaacataatgtttatacattttgtaacctttctaaagctttttgtgtggagggaagcatgtttattccataaaacatattcataggtgcttgatatcaagatatgataatctcagcatttaataaatattttagtgata

SEQ ID NO: 225591 - DNA, 395 bp, Homo sapiens
taaaaaaaaaaaaaaaaaaaaaagaagaagaaaacaaaaacaaaaaatcttggtctgtcttaggcaacaagcaattaaaaaaaaagtagaaaataaagcaaaagggccgggcgcagtggctcacgcctgtaattccagcactttgggagactgaggcgagtggatcacctgaggtcaggagtttgagaccagcctcgccaacatggtgaaaccccatctctactaaatacaaaaattagctgggcgtggtggcgggcacctgcaatcccagctacttgggaggctgaggcaggagaattgcttaaatccaggaggcaaaggttgcagtgagccaaaatcatgccactgcactccagcctgggcaacagagcataactccatctcaaaaaaaaaaa

SEQ ID NO: 225592 - DNA, 508 bp, Homo sapiens
atgggagaataatttctaaatttctaactgttcatcaatggatttggatatatttagatatagacaaatatatgcacactgcaagtttgcacatgtgtatataaatttatatgagatacccataacgtgtgggttgtataatcttttaattaattctcaattttacatgtggaaaacttgattaagtgtttaccctcatcaaatactcagtttgaagtactatactcaatttgatgtaaagccagcaaaatctctgccaacattcatttcaattaatccaataatgttaactgttgataacttcattctccttgtcccctgttaacagctgaaagttgattctcaccctaattcagcaatcagggtgtcatcctcaagagactatcaccttgctttggattgtgacctctgactccaccactttcatcctatagcagtcctacctttgtgtatttaatcaactttgtacatggttaaaaaaataaaagtgcagtgaaatgtcaggcca

SEQ ID NO: 225593 - DNA, 482 bp, Homo sapiens
cactccaacttgagaagcactcctttcccctctaactacgaacagaactggagagctactttctggctgggtgacttggggaaatttgtaaacctcttgagatgcatcagtaagatgggcataatgacaggaaatcagcagctccaagagggcagaaactgtgctcctgtttgctagccctgacctcatacctggtattcagtatgcaggaagaaggtttagtaaggcctaaaattccccaaggaaagaaagcatgcctcaagactgtgaatgccctccagacatttacaactcatactgatgatttagctccctttcagtagggtctttcctatattatttattatttatgtgctggggcagagacatgaagaaaatggagctgtttagaacaggagtttgcaaactgcaatggccagtgaaccaaatccagctcaccgctcactgcctgtttttctaaataaagttgtattggaacacaa

SEQ ID NO: 225594 - DNA, 664 bp, Homo sapiens
gagaaaccctgtgaatgtaagaaatgtgggaaagcgttccataatttctcttctttgcaaatacatgaaaggatgcacagaggagagaagctctgtgaatgtaagcattgtgggaaagcattcatacctgccaagatcctttgaatacatgcaagaacacacaatggagagaaaccctatgaatgtaaagaatgcagaaaagcattcagcttgcctacttcctttcatagacatgaaaagacattggaaggaaaccctatgaaggcaagcaatgtggcaaagctttcacttcttccagttcttttcaatatcatgaaagaattcacactggggagaaaccctatcagtgtaagcaatgtgcgaaagcctttatttcttccacttcttttcaatatcatgaaaggactcacatgggagagaaaccctatgagtgtatgccatgtgggaaagccttcatttttctagttgctttcgatgtcatgaaaggactcacactggagagaagccctatgaatgtaagcaatgcaggaaagccttcagatcagcctcacaccttcaaatgtatggaaggactcacactggagagaaaccctatgaatgtaagcagtatgggaaagcattcagacctgacaagattctttgaatacagataatgaatgtaaac

SEQ ID NO: 225595 - DNA, 170 bp, Homo sapiens
gagactgagcacccaagagttttaaactgtcaagtttgtctacactgagtctcaacaattcatgaattattacatgtttgtatgttgctaaaaatactggcttcatctgtggtcctctgaacctgggctttagtttctagaattgagaataaattgtgattatctgtctt

SEQ ID NO: 225596 - DNA, 500 bp, Homo sapiens
gcctatttctaacctttatcctaacacgaattttatccttgtcccaatttaaaaaactttttctcttaatttaaaaaaaacaattaatagctttattttttagagtagttttaggtttacagaaaacttgagcaagagtacagggtttcaatgtactgtcatccaccccagtttcctcattattaacatcttacatttgttgcaattgatgaacgaatattagtatattattattaattagtggtttatattagggttcactttttgtgttgcaaaattctatgcattttcttctcctgattttttttttaaaggcaggatctcagtctcccaggctggagtgcagtgatgcgatcacagctccctgcaacctccacatcctgggctcatgtgatcctcctacctcagtctcctgagtagctgggaccacaggcacacaactatgtcaggctaattttttttttttttgagacagagtttgtctcttgttgccgaggctg

SEQ ID NO: 225597 - DNA, 223 bp, Homo sapiens
tctggttaacatatggcatattccttcaagaatcttctctctctcagctctagcagcatggggctgactcaccaagtttctacatcttggccagcattcaggtagggagtgaggtaacaggcttttcacttgaagatcttcatagtctctatgactgctttattttgcagggaggagaaggtagcttaccctcatttgtattctgggtaagggtgagaaggca

SEQ ID NO: 225598 - DNA, 434 bp, Homo sapiens
gaggctaatggactggcacaggtgtgtgaacatcaagaacactgtgacatgccactgccacatagggaggagcagcaggtgaggagaggccttccctgttctctgatacccaacaaacatgcaagctctcaacgcctcgctccatgatgcccgctgctcagcttctctgcatgggcagtttctgaatttcacctcaggcccttgaaggggtcagtctgagtcctttccaagaaccctacaactgccttccactcatgaagacgctcatggccctgaaagcatggtagccacccagaatcagacacctgtagttatctcctgcctggggctctggcaggtggtggtgggtgtcaggctgactggtggatactgggatgtgctggcgtattccctctgtttttaatatgtttggaaaatttcattaagcaaaaaaa

SEQ ID NO: 225599 - DNA, 212 bp, Homo sapiens
ggggtatactggcatcaacaaatgatcggggaaatgcacttcctcttctgttttctaaagtaacttcagattaaaattaattctctttaaaatgcttgataaaatttcctagtgaaactatctgagtctctagttttcttcgtgcattgtattggctattttttattagacatagggttagataggttttgtattaatatctttagggaggg

SEQ ID NO: 225600 - DNA, 347 bp, Homo sapiens
gtaaataggataattaacccctatagacccattcctcaaattgaacaatttcattgttttgattttcatcacacttgctggatctaaccattctttatctctttctctttccgtgcctttctctctttgttttcttagttcgtcatttaaggcgtatctttgacaccatgtcacttcacctcaaaatatttatgcctttgtttttttaaattgcttttaaaattttttatttcaggtttgggggtacatgtgaaggtttgttgtataggtaaactcgtgtcatgagggttcgtcgtacagattatttcatcactcaggtattaaatctagtacccaatagttatttt

SEQ ID NO: 225601 - DNA, 501 bp, Homo sapiens
cagtgatgcttagaatggtggatggagttctagctgcgtttttgctgcttcacccctggggaggccacgcctctgagaaagaggctgggaggcccttccgcaacaggtgttcaggtatgagtgaaagaatctaaggagtgagcttggagcactgcacccacagacaggaccatcattaggagcacattctcagtgcgtgttgaatgttacgaaaaggtttgatttatacatttttgacctaaatagaatttaatcaaaatgtctagagaatttttacgggttactagcccctcactttttctgaagtactaaaagcagaatcaggaattcaagattatcatgttgagtataaagcactctagtcttcctaaaggaatcagtgtcagactgggctggtggttcacacctgtaatcccagcacttaggcaggctgaggcaggaggaccacttgagcctgggaatttgaggccagcctgggcaacagagtgcgaagtccctacg

SEQ ID NO: 225602 - DNA, 314 bp, Homo sapiens
ctactagtgtctaataaatatgtgcatgtaagattatactcataaatttgcataatttgctctacatgtgtgttctatttttatatattgatttagtgagctgagcagacacatcttactgtgaggaaaaatccttttccctgaccaccaatgtgtccctaagtagtgtgatgtgaggggacagtacttttaagggtatggaggagggaagtggttttactcaagattcttgaataaatcatgcagtcactgctaagaattgatgagaaatagacgtcgacgcggccgcgaatttagtggtagtagtagtaggc

SEQ ID NO: 225603 - DNA, 423 bp, Homo sapiens
atcactggcatgtagaaatagttgatatttacatattgattttaaatacaaccaccttgctaaactcttattaataacttactcatgtacgtagtcataccatctgtgagtcaattcagttttgtatttctattatttatacttaacgtgtttatataattgttttaatgtgctgtttaggacaccattataatgtttactgtaacataatgtttcctttctgtgggaaaactttcagtatttcatagttaagtatcatgtttgctgttaagatttttatagataacctctatcagactaagtaatttccctttaattcctagttttttttattgtgaatggatgttaagtttttaatgttgttttttctgtatttattgaaatgatttatgatttttttttcctttaatctgttaacatggc

SEQ ID NO: 225604 - DNA, 388 bp, Homo sapiens
atgaaattcaaatttcagtgtccatagagttttactggaacatagccatggttgtttcttttgtattgtcttattttctgcctctccaagaaagcttgctgactcctggcataggccaagtggactaggggcaggtgctttagtcagctggaccttggagaactgggcaatctcctccactccacagctctatacatggtggctgcccttcttttcctactggccctcccctggggttccagagtaccttttgttcaagccagccccacttgacccagggcactgggatctagatttctgaacaatgagccaaatcattgcagaatcatagggggaatcaggacaaggctgttttgagattaaaatgaaataaaatatgtgaaagtac

SEQ ID NO: 225605 - DNA, 627 bp, Homo sapiens
caaacttttacaagatgagatggagatactattttttaaatatttgttttaatggcatagacatcataaacatttttaatcaaaggaatttcttaatgaaaacaacgtggattcaattcaattgctttgtgatggagatctaggtgtgacactctgtgatgcagcaatgtagagttccaagttcggtttatgggtacttggtatttagggttgaagtggttggaaagagggtcatagtagtcacctggggtgtggttcttgttaatgatagtggatgtaaatccatttctcaaatagccttcttgatgattttgattcttttgggtggacttcttgtcagctctgcagtcatcattgtgttactcttgtgatttagctgacgaagagcttaagctaagtagaagcattagcttttccaatttttaaattgtctgcttttgcttaggtggttatggtctttgtaggaacccttgaatgtcattttaaagtccattttgtgtgttgaaaataaatgagatcattcatgaacacagtccactgagtaccttaacctccaattcacaggcacaaacacagggtgtattagtccgttttcacgctgctggtaaggacatacccgagactggg

SEQ ID NO: 225606 - DNA, 520 bp, Homo sapiens
actcagaaactgacaaatgaaagagatgtctaggaaaaggaacagttgtgggtgaaggtaatcctggaaatagctatatttaaagaaattcccccattctttgtgttctcaaagaacagcttagtgaagagaaacgtgcttcccattatgactttgtggatgttcccccccccccccttttttttaacctatcacaaagacggacacagattacaaattcctatttttaaaaatgaacaaccattctgtaatttagtcttcagtggtcaaaacagagtacttgttaacaaaactttgcttgttccccttcttccctcagcccctgaactttgactcacccacagcctcagagaacctacaacccatatttatacatatccctcctaagaacaggctgacttcaagatgaaacattatcttatctgggatctgattttgctaccctccatcctgtgcttcctttccaaccttctttgtaaacttattttctcctccctatgaaataaaacccttttccacc

SEQ ID NO: 225607 - DNA, 302 bp, Homo sapiens
gttgctataaggggaagttttcctgcacaagctctctctttacctgcagccatccacataagatgtgacttgctcctcctcgccttccgccatgattgtgaggcccccccaccagccatatggaactataagtccaattaaacctctttcttttgtaaattgcccagtcgcgagtacgtctttatcagcagtgtgaaaacagactaatacagtaagtcatttttgcctgagattagatattacagaaagtcacacagaagtgttccatgaagtttagaaataaaaattctagaagacataca

SEQ ID NO: 225608 - DNA, 559 bp, Homo sapiens
catcagactggcacaaattaaaggtacacacaacacattctgtggcaattctgtggaaacaggcaatctcatacaccgttagtgtgaaagcaaaatacaggagaattgttaatatctcacaaaactacataggcattaaccttcaacacagtaatcgcacttctaggaatttatctcaaagatacacctctaacaatattcactactaccattacaaagtattggaaaccacgtaaatatataaacatgagaaactgaatgaataaactatcatatatacacacaatggggtattacatggaggtaaaaaaaaaaatgaagagctttatgaattgatatggagtgatttctaggagagatgctgaagcgaaaagagcaaagtgcaaaagagcatatataggctattacctttaaaaaacgggaaaggggaaatatatatatttatgtacagtcacatgtcacttaatgacagggatatgttctgaaatatgtgtcattaggtgattctgtgatgctgcgaacatcagagtggacttatacaaacctagacggtataact

SEQ ID NO: 225609 - DNA, 499 bp, Homo sapiens
cgcatcctgatcagaggcacagctgagacccagctgcactcctctgccctgtccttttagcccaagtgctgacatcaatggctgatccaggaccagaaaaaggctgagcggagagccgtgctgcctggcccctcctcaccgcccttccccgcacctcttggctgtaccgggagcctctgagcaccggaaatgaagggttttccaggcctggctcttcactccatccttcaggggaactttgaagccatggagacatctggctttggagccatggcgattcccctgccactctccttgctgggataaagccagggcgtggcatcctgggatgatgttccctgctgctgagtgtgcacacaacctgagctcatcctgtgtacgtcagctacacatgctcgcatctaattttctcaacaacctagccagtactattgcttctcctcctcttacagatggggagatgatgacatatagaggttaacttatcagagaccacaca

SEQ ID NO: 225610 - DNA, 397 bp, Homo sapiens
cgcatcctgatcagaggcacagctgagacccagctgcactcctctgccctgtccttttagcccaagtgctgacatcaatggctgatccaggaccagaaaaaggctgagcggagagccgtgctgcctggcccctcctcaccgcccttccccgcacctcttggctgtaccgggagcctctgagcaccggaaatgaagggttttccaggcctggctcttcactccatccttcaggggaactttgaagccatggagacatctggctttggagccatggcgattcccctgccactctccttgctgggataaagccagggcgtggcatctgggattagtggcacccaccaccacgcctggctatttttttttattattgtttttagtagagacagggttttgc

SEQ ID NO: 225611 - DNA, 503 bp, Homo sapiens
atagtgttcggccataaagagcttccacacgggagctggagcccactgaggcctgcggagctgctgtactgccctcggtgggaatgggtctgttcctactggactgtggaacaagggtgcagagagcaaaggggaccctcttctgctcttcatcctcctgtctcctcacccatgtcagccttggcaaggacacagggcctgtggggtcggggaggggcagtgagatgcagggaggtgtttgttagtcacttctgagcccccaggctgccttaaagaccctcccctacccttggggcccagaatgaggacagggtggtgatcctgggccagggccctcaggaaccagagagctatgggcaggggtgggcctgctcttctctgtgactccacctagtgtccctggtcagcagtcttcctcacctcatgccggggagagtaggggcgaggagagaaggggggcccccagcacactctgctctcccagggaggtggggaggcggccg

SEQ ID NO: 225612 - DNA, 372 bp, Homo sapiens
ggacaaagaagggaatccatgtgtggttctctttctggacccatgtttgattaaatccaaagttccctctcctgtctctctctgctccctgtccattctggaaagcagatagacagacaagcagagagacagtaggatgaaagaagctcgaggcatcctctatcccagcagctattaactacagtagtctctcagtatcaaagaggaactggttccaggaagctccagacaccaaaacccacggatgctaagtcccttacattaaaatggtatagtacatacgtatctgcatataatctatatgcattctcctgtataatttgaatcatctctagattacttattatagtagtatacaataagttgttgtag

SEQ ID NO: 225613 - DNA, 248 bp, Homo sapiens
gtttgaggtgggaagattgttcgagcctggaaggttgaggctgaagtgagctgtgatcatgccactgccctccagaccgggctacagagtgagaatttgtctccaaaaataaataaattcatagactactcaagtgataaatattaaaccagagactgctttaaacattttaaagccttattatactgtcatactgtgattgtactgacatatttattcatttaacaaatacttactgagagctattt

SEQ ID NO: 225614 - DNA, 1869 bp, Homo sapiens
tgacttggatgtagacctcgaccttcacaggactcttcattgctggttggcaatgatgtatcggccagatgtggtgagggctaggaaaagagtttgttgggaaccctgggttatcggcctcgtcatcttcatatccctgattgtcctggcagtgtgcattggactcactgttcattatgtgagatataatcaaaagaagacctacaattactatagcacattgtcatttacaactgacaaactatatgctgagtttggcagagaggcttctaacaattttacagaaatgagccagagacttgaatcaatggtgaaaaatgcattttataaatctccattaagggaagaatttgtcaagtctcaggttatcaagttcagtcaacagaagcatggagtgttggctcatatgctgttgatttgtagatttcactctactgaggatcctgaaactgtagataaaattgttcaacttgttttacatgaaaagctgcaagatgctgtaggaccccctaaagtagatcctcactcagttaaaattaaaaaaatcaacaagacagaaacagacagctatctaaaccattgctgcggaacacgaagaagtaaaactctaggtcagagtctcaggatcgttggtgggacagaagtagaagagggtgaatggccctggcaggctagcctgcagtgggatgggagtcatcgctgtggagcaaccttaattaatgccacatggcttgtgagtgctgctcactgttttacaacatataagaaccctgccagatggactgcttcctttggagtaacaataaaaccttcgaaaatgaaacggggtctccggagaataattgtccatgaaaaatacaaacacccatcacatgactatgatatttctcttgcagagctttctagccctgttccctacacaaatgcagtacatagagtttgtctccctgatgcatcctatgagtttcaaccaggtgatgtgatgtttgtgacaggatttggagcactgaaaaatgatggttacagtcaaaatcatcttcgacaagcacaggtgactctcatagacgctacaacttgcaatgaacctcaagcttacaatgacgccataactcctagaatgttatgtgctggctccttagaaggaaaaacagatgcatgccagggtgactctggaggaccactggttagttcagatgctagagatatctggtaccttgctggaatagtgagctggggagatgaatgtgcgaaacccaacaagcctggtgtttatactagagttacggccttgcgggactggattacttcaaaaactggtatctaagagagaaaagcctcatggaacagataacatttttttttgttttttgggtgtggaggccatttttagagatacagaattggagaagacttgcaaaacagctagatttgactgatctcaataaactgtttgcttgatgcatgtattttcttcccagctctgttccgcacgtaagcatcctgcttctgccagatcaactctgtcatctgtgagcaatagttgaaactttatgtacatagagaaatagataatacaatattacattacagcctgtattcatttgttctctagaagttttgtcagaattttgacttgttgacataaatttgtaatgcatatatacaatcttgaagcactccttttcttcagttcctcagctcctctcatttcagcaaatatccattttcaaggtgcagaacaaggagtgaaagaaaatataagaagaaaaaaatcccctacattttattggcacagaaaagtattaggtgtttttcttagtggaatattagaaatgatcatattcttaaggaagggcaagcaaagacagc

SEQ ID NO: 225615 - DNA, 1705 bp, Homo sapiens
tgacttggatgtagacctcgaccttcacaggactcttcattgctggttggcaatgatgtatcggccagatgtggtgagggctaggaaaagagtttgttgggaaccctgggttatcggcctcgtcatcttcatatccctgattgtcctggcagtgtgcattggactcactgttcattatgtgagatataatcaaaagaagacctacaattactatagcacattgtcatttacaactgacaaactatatgctgagtttggcagagaggcttctaacaattttacagaaatgagccagagacttgaatcaatggtgaaaaatgcattttataaatctccattaagggaagaatttgtcaagtctcaggttatcaagttcagaaatcaacaagacagaaacagacagctatctaaaccattgctgcggaacacgaagaagtaaaactctaggtcagagtctcaggatcgttggtgggacagaagtagaagagggtgaatggccctggcaggctagcctgcagtgggatgggagtcatcgctgtggagcaaccttaattaatgccacatggcttgtgagtgctgctcactgttttacaacatataagaaccctgccagatggactgcttcctttggagtaacaataaaaccttcgaaaatgaaacggggtctccggagaataattgtccatgaaaaatacaaacacccatcacatgactatgatatttctcttgcagagctttctagccctgttccctacacaaatgcagtacatagagtttgtctccctgatgcatcctatgagtttcaaccaggtgatgtgatgtttgtgacaggatttggagcactgaaaaatgatggttacagtcaaaatcatcttcgacaagcacaggtgactctcatagacgctacaacttgcaatgaacctcaagcttacaatgacgccataactcctagaatgttatgtgctggctccttagaaggaaaaacagatgcatgccagggtgactctggaggaccactggttagttcagatgctagagatatctggtaccttgctggaatagtgagctggggagatgaatgtgcgaaacccaacaagcctggtgtttatactagagttacggccttgcgggactggattacttcaaaaactggtatctaagagagaaaagcctcatggaacagataacatttttttttgttttttgggtgtggaggccatttttagagatacagaattggagaagacttgcaaaacagctagatttgactgatctcaataaactgtttgcttgatgcatgtattttcttcccagctctgttccgcacgtaagcatcctgcttctgccagatcaactctgtcatctgtgagcaatagttgaaactttatgtacatagagaaatagataatacaatattacattacagcctgtattcatttgttctctagaagttttgtcagaattttgacttgttgacataaatttgtaatgcatatatacaatcttgaagcactccttttcttcagttcctcagctcctctcatttcagcaaatatccattttcaaggtgcagaacaaggagtgaaagaaaatataagaagaaaaaaatcccctacattttattggcacagaaaagtattaggtgtttttcttagtggaatattagaaatgatcatattcttaaggaagggcaagcaaagacagc

SEQ ID NO: 225616 - DNA, 287 bp, Homo sapiens
gcatggtggtgcatacctgtaatcccagccactcaggaggctgaagtgggagaattgcttgaacccaggagatggaagttgcagtgagccaagatctcaactctgcactccagtctgggcaacagtgagactccatctaaaaaaaaaggaaaaaaattcaaatttccaagagctgtttcttgttttctgattgtttcctttttcatttaatactatgcttatctctggatgcctttgatttatcctctgaaaataatagttttattaaaaactactttttatttaac

SEQ ID NO: 225617 - DNA, 1053 bp, Homo sapiens
cctttttaaggtttgtgctgcaaattttggtgatatttgtcatgctgttggacaagaagccactgagaaatttttgatcccaaagttctttgagctctgctctgatgctgtttggggcatgcggaaagcctgtgcagaatgcttcacggctgtgtcgcacagctcctcccctggggtccgcagaacccagctcttcccgctcttcatcagacttgtcagcgacccctgccgatgggtgcaccaggctgccttccagtcccttggccccttcacttccacctttgcaaacccctccagggctggcctttatcttcgagaggatggcgccctgagcatctggccactcacccaggatttggactctggttttgcctctggctcccctgctcccagcagtggtggtaacacttcccctgccaggtatgctctggctagggtcaccaccaggaccctcgatgtaccttaagcacccacctaaaatttcagcaattatcttgtctcgagttttagtagtgaccttctgggcaagatggaatattagagctttaattatgtaaagaatcaaaaagtaattgcaataatgattttgaaacatgactactgggttataaataatgaagctactatgtctcctaaatttagataaaatattcattgagattagtgattaaataacctataaagaacattttctcttactttttgatgaatgaagttctctgggtaatttacttagggaaaaatgtgaagtctcccaaatgtacttttttggaggttgggttacatgtacataaaggcgacactcctgaccaacagcggtagaccctccagtgtttgctaatatggcgctggatcttggctttgtcatgtctttcctctgaggctgatgcgtatacaccagccatcctatttgaggtcgtttgtaaatgtctctccattgtcgctagcgtgcaggcatgtgagagtgggtaactgatgcctcacagaatacaaatccttccgaggttggcccatcctccctccatcccacttccatcagagttcattgagctc

SEQ ID NO: 225618 - DNA, 437 bp, Homo sapiens
gcagagagtcagtatacagcagtatttaaagaagaaactggcatgaagagaaaaaaaacaagagcctgaaaataagatctggcagggacgtgattaagaggtggaaaatcaccggactcggtcggcgtgtgactgtctgatcgtggcatgatgaccagctcagcatgtagtcgacagctaccaatttaaatgagctgggtttatggatggctgcagaaatcctctttactcaaacccagtatctatccatcagccactgcgcagcactttactgtggaggcagcggggggacagctcatcagaatcgccccagtggaatgttacgataggaaaaaagaggaatggattacatatttatgtggtctttgaaaatgcagtgggacaggaagattgcttgtaacgtatgcagttacattaaatgactattaaccttcact

SEQ ID NO: 225619 - DNA, 576 bp, Homo sapiens
agtttaagtaactgaccaagtcaaaaccaagaagaaataatagagctgggatttaagctttactttgccttcagatccatatggccaactatatggataagtagcaaacttatgacccttaggccaattctggcccttggctgtttttgcacagccagccagacaactacaaatgttttttacatttttaaaaggttgtaaaaaaataaggaaaaaatcaaattgtattagacagtgtatgtggcccataaggcctgaaatatttactatttgaccttttgcagaagaagtttctcaacatctctattatgcttttactacgaaaacatttttctttagtagaaagttgagaaacagtaatctttacagataaaagacatgtctggtcataaaatcagttagttgtagaatgagaacagtgtactcacagttacttctgtggcacaataatttttttttattgttgccagtttaaaattaagaactgtgtttaaagttacttgagaagatatggataaaaggcagctgggctagtgctgttatttaactgtgatgccctcattaagaaaattgatt

SEQ ID NO: 225620 - DNA, 595 bp, Homo sapiens
cagctctttcaggaacacattcccagtgggaattttgggtgggattcaggaggcaccgatctgccagtgagggatttctaggaacacaaggttagtcaggacgtggatccccacagtggacacgactgccccaccccgccgaggtcggaggtggccttgaggagctgggccgtcgcttgctgtctgagcttccatccacgaatggtgtgggagttcgggatcttcccagacattctttcttcacctttgggaagatggagggggacggtggtggcatcccttgcagtctgtgctgcgctgacactttggagaagtgtctcccatctgtagagcagaatcctctttggagaaatgcagctgtccttgaccttgaggcagaaggcgtctccatcctgggcatctgtctgcccctccccatctggatgcctcatcttgctgtgtcattaatggtaatcttattctaacagcctcccatgcatcaactctatcagtccccgaatattatctttaaattttgtcagatcgctttgtgggtttctggctttttctcttttctatcaagctattcaaagcaaaaactgaaagtgaatttaga

SEQ ID NO: 225621 - DNA, 163 bp, Homo sapiens
tatttctccaccttcactggctgctctcctctagctccacagtctctacaacccaggtctacactaacacacaagacaatgtaaactgttaagggcttcacaacttatttctgacatggattgctgtgttaagataatatgaaagaaaactcagtgaatataa

SEQ ID NO: 225622 - DNA, 532 bp, Homo sapiens
gaaaatgtggaggtttctaatttttgctactgtaaatagcactaataaataccttgagcatgaaaccttttccattatggattaattttataggatagttgtacaaaaatggaattttactaattatgagggtgtgactttttatgattctagttatatattgccaatttatgtctatttttaagtttcattacacccttacttccattggatatagtcattaaaatagagaaaaaaaacttcaataactaaaggcaccttattgctatttaatttacattcctttattattattttttaaattattattttttgaggcggagttttactcgtcacccaggctggagtgtaatggcgcgatcttggcttactgcaacctccgcctcccaggttcaagagattctcctgcctcagcctcccaagtagctgggattacaggcgcctgccactacgccctgctaatttttgtatttttagtagagatggggtttcaccatgttggccaggctggtctcaaactcctgacctcagg

SEQ ID NO: 225623 - DNA, 373 bp, Homo sapiens
aatgatccctgaaagaggtggtgtctcccggggaggtggaaaacatgaagggttcacctacgatgacgacaggggacccgaaagaggccagtccaatcagggaaagcaaatcctcctagagacatcatgacctcgagaagccactgaggatttaaaggggccgttcagggcaatagctgggtctccttctaactcgaaggacagtcctctaagcccctggcagcggagggagggcgggcattgtggctgcgtgggcctgctgaggcggccagccaggcagctcttacaggattagcttgctgctttcaggaaaggtgccaggtgaggctaagatgcccagccagatggaggggggcccagaaggaagggggtg

SEQ ID NO: 225624 - DNA, 631 bp, Homo sapiens
aggagtgtgggcccctggccaaaggaagagcaggctgaagagataaaaatggagagaggcaggcagcagacagtctcagaagggcattctcttcctgggcagtgtttgtccccttttttaaagcagcaagatcctttcttctcacccacagcactgagacagggctgctctggctgaagcagatgaagggggtctgagccctgattgctgggacatgagagctaagagagaggggaaagagtccaaggcctgggccctcagactggacagcaccaattatgaggaaaggggaggtggaaaacatgaagggttcacctacgatgacgacaggggacccgaaagaggccagtccaatcagggaaagcaaatcctcctagagacatcatgacctcgagaagccactgaggatttaaaggggccgttcagggcaatagctgggtctccttctaactcgaaggacagtcctctaagcccctggcagcggagggagggcgggcattgtggctgcgtgggcctgctgaggcggccagccaggcagctcttacaggattagcttgctgctttcaggaaaggtgccaggtgaggctaagatgcccagccagatggaggggggcccagaaggaagggggtg

SEQ ID NO: 225625 - DNA, 527 bp, Homo sapiens
ccatgaactttaatattttaaagagatgttttaaattgaatttatacatgtataataacccattctactaaaaatgaagttcataatttttttcaagaaacattgtgtctgtgtggatgcaaaaagagtaactcacttatgttgaggttggtgagtaagctcatgtgccctgttagcgtttaatgtttatatatatatttttaaattactgaatttcaaaatatatgttctttgttatcttaataaaaagacctttgtaaaatcagagatatttgttcctcctaatgtagaacacataatttctctttaaattggccttttgggatcagtcatatgataaaacatggctgcttttctagctgtctgggcttttggcagactggtttccagacccagagactgagtagtaaccaatggctggcatgattatggtatttaacttgagtctgagtgtgggtaacctgaacttctttggagttctcttttcacacttgctgatatgtacaatgaccttttatacttagcat

SEQ ID NO: 225626 - DNA, 507 bp, Homo sapiens
ctccacagcctgccctttgctctcctgctcacactgaccaagaatgccgcgtgcttggcctactgaggtgaaaggacaattgaatgacaggtgggcaagggagaacttccccttcttggtgcgaggaaagtcacaaatttaaaaatgttgcttccagcccagatcctaaatgctagttctcagcagctgcgtggcttaccgttcgccatttccaccaccgccagctgccagcaccgctacagatcacagagatgtgaacagacaatggaaagcactcttagccttgcagtggtctacattttttaggaaccaatatttcagcattctttattacccggcacgctgtgtcctttgcagagttcaagtttatgttactgccagggtcagacagtcatttgctgctgctgctgctgctgctgcttctcgaactggatgcattaggaagctgctgtctgagtgtaggaatgtcttgctaagaaagcaatgtcttccttcatccttttcttt

SEQ ID NO: 225627 - DNA, 519 bp, Homo sapiens
ctgattcactagactggagttgtctgattgtggagcctgtgttgtattataaatatatgtttagtgcctaggatattgccagccacataagagaaagaatgaataaaaaagagaacaagtatatgggctgtatttacttggggctgtattaatacttctgatagtaatagtctccaatataggatggctttacacaaacttgcttctttcttaagatattctgtaataatttgtagttatcaattttgggaagaatcacacctgtaatcccagtacttcgggaggccaaggcaggtggatctttagcccaagagttcaagaccagcctgggcaacatagcgaaaccccatctctacagaaaaatacaaaaattagttgggtgtagtggtgaacacctaagtcccaactactggggaggctgaggagggagaatcagttgagcccaggaggttgaggctgcagtgagccatgatcataccactacagtccagcctgggagacaaagtgagtccctgtcta

SEQ ID NO: 225628 - DNA, 528 bp, Homo sapiens
gggaatgcttatacgcttttggtggaaatgtgataaattagttcagcccctgtgaaaagcagttatggagatttctgaaagagtagaaaataaaagcaccaattgacaggaatcccatcaatgggtatatacccagaggaaaataaataactctaccaaaaaagacacctgcattcatttgtttattgcagcattatccacaattgcaaagacatagaaatagcctagtttgcatcaacaatggactggatgaagagaatgtggtatatatacaccacagaatattatgcagccataacaaaataacaaaatcatgtcctttgctacaacactgatgcagctggaggccattatcttaagcacattaatgcagaaacagaacaccaagtatcacattttctcatttataaatgggagctaaactcccataaaatttataatagagtgagataatctaaaatatgtttaatgttcattcaataaaaatataacagaattataaaatgaattaaaagcagataatagaaa

SEQ ID NO: 225629 - DNA, 407 bp, Homo sapiens
tgcaggtaccttgatgtgtcaaacacatttgcattcatagtaggtttaaagtactttccttgtctcgaaagtatgcatctaataaagtttaacaggatagtcaagaaagtagaagaaataaaaatttcccataattctactggttgtagcagcttttaaattgttgacgtgtatgtctttccaacttttccttatttttatttaaaagaaagacttctaggatcatctgacttggcgtgtaccgactatggcttgtgcttactctacctgtctgaatgcaaaaattgtgacttgcatcaggcctgtcactgcaggagaatcgcttgtacccaggaggcagaggttgcattgagctgagacagtgccattgcactccagcctgggcaagaagagcaaaacttcatctc

SEQ ID NO: 225630 - DNA, 421 bp, Homo sapiens
ctggcacagaacaattacttgggaatattccatccatggagtgagggagctggggtatttatccaccagctcccatcagtcattggttgagggctgctcccagggagcattaaccccctggcaccttctgcttgacagagaaggctcaagtggtcagaaacaggctccaggcacagggatacaggtgctggcagctgtgtgcacagaaatggtaagcacaaggtgacatgggtgaggcatcaatagtgtctactgcacatgtgactgaaaggggacaaagaggatatggacctgtggcctccataaagacaccaggacaaagtttccaaaacactcatcggaagatccttggggttcaaaatgctgagagccggggctggggaagtagtacatcatttcaaataaaaggaacattgtgaac

SEQ ID NO: 225631 - DNA, 755 bp, Homo sapiens
gaggttgcagtgagtcaagattgcaccgttgcactccagcctgggtgacagagtgagactctgcctcaaaataaaattaaaaagatcttttgaagggcagaaagtaagagagggattgggctatttatcttgcgaagttgggaagttgatgaggtgacagaaaacaactctaactcctgttgaatgattttcagatgggaaacaatgggaaagataaagccacctttagataagacaaggtcaggcctaagaccgtttattcctttctagtaatgtctggtttacctctagcactacccttatcccagaggaagtggtatatgtaagttggttgtatccaaacttgcatctaactttgtatcagttctgaagtagtggaacctaaataatgaaatttgctttatcaagatcagtggtccccagcctttttggcaccagggactggttttgtggaagacagtttttcaatggaccagggttagggaggatagttttgggatgagtcaagtgcactacatttattgtgcactttatttctattattattactctgtaatgtataatgaaattattatataactcaccataatgtagaaccagtggtatccctgagcttgttttcctgcaactggaccatcacatctgggggtgatggtcgacagtgacagatcatcaggccttagattctcataaagaatgcgcaaccttggctaggcgcggtggctcatgcctgtaatccgagcactttgggaggc

SEQ ID NO: 225632 - DNA, 428 bp, Homo sapiens
catctgtacactttaaaaggctgaattttatggtaggtgaatcacaacgcactttgttaaaatgcagtccaccgggataaaaataactaagaggatgggcgtcccgtgaaggcttctgagttggggaacactgctgagaagctcgagacatcacaccggctcagtcagcagtggggacgcaaggcagagctctgggcccggcgtcctctgcaccctctttattctcagccctttccccagcagcctaagctcgcaggtgtacggccacaccctcagtcctggtgagaggggacagaccaaggggctcgaggtgctgcagagtgccgtctctccccagcctgcctgcagtgccggacggctcacacgggtggcaccaggctccgcaagctccggggacaggcgcctcctgggagtcggggcccagctag

SEQ ID NO: 225633 - DNA, 441 bp, Homo sapiens
tatcaaatgctttctcagcattcattgaaatgattatgtggtttttatcctttattttgttgtatgatttatcacattgattgatgtgtgtatgttgaacccttctcacatcccacttgggcatgatgaatggtttttctaatctattgttgaattctgttttatagtattttgttgaggatttttacatcaataatcatcagagattttggcttgtagtttttttttaatatgcctttatctggttttggtatcagggtaattaatattggcctcatagaaggagtttagaagtgttcccttctcctttacttttcaaaatagtttgaataggattggtattagtagttatttaaatgtttggtagaattccatggcacaggtttacctatgtaacaaacccatacatcctgcacatgtagcctgaaacttaaaattaaa

SEQ ID NO: 225634 - DNA, 612 bp, Homo sapiens
gagcaggaaaatctgatttgctaaattttcttttgttcaaatggcaaggtcaacaaaatttccaaaactttacgatttgaaccacttctgtattggaatgtcaaagtggcaaatacaagagagccagtttttgtgttttaataatattttctaactaataaaataggtccaattaatttcactcacattcattttctgaaaaagtgtttatttaatttccctgaaaaatatacaatacttacgcttaactcggaggtgggcactagatttaacattggcagcttggaaatccaccccacccgtctggtccaggcgacagttgtgcaaaacaagggagtgtattttgccttcttccttaatttcacaatcctgtaccaacaaaacagaaaaactttcatagaaaataattttctttgaaattttgttctaaggatagattatcttaattaaaggaatgcaacaaataaatggtgatgaaactttatataactttgagctctttttttaggaagtaaagcttacaagtactaagaggaaagccacatttattttagctgtataattctgagccaactagcagcatcacagagtatctacaaccttatactcact

SEQ ID NO: 225635 - DNA, 508 bp, Homo sapiens
caggcattccaatatctggatccctcactcagggtctagccaggagcccaggagtcctaggaccatctgggctctggagctcttcagccagccaccagtgcctcgttcccccttcacgaatctcctacacaccctgtctccagggccaatgtcccctcagaacacagaccctctcctccgcccccacccactcactgaagggccgtgagcagcttggcagactgtccctcagtgtcacagtacaaaaacctcgggcgtagtggtacaggcaggagaatcttgcatgtagcagcttctcaataagtatttattgatttgtgatgcagtaaaggtcttagctcaccattttcctctggagttagtctgggtccttctattccttctgcttcctattctcctccttgtccttgcccataccaggtattggttcacattccttgaacgctgggttttacactctcatgttgagctaagaactggggccttttggttacacaaacttgccaga

SEQ ID NO: 225636 - DNA, 984 bp, Homo sapiens
ctcagacaatgtgacacttccctacaactagcctacatatcaacttttaaactttttttttaagttcccaggtaattctgatgtgcaaaaggatataagccactgttaatacacacagttttaaaattctgagatgttagacatgtccttttccttgggcatatgattcaagaactatgtcactcaacaggtgagcgcttgactcacagaataagaactgtcgtgactattaactaagaataaattaaccaatttaatcctagatcttgatttctaactcatgggatgatagtgccatgcttttttttatatattttattaatgtttttaaaaaactatttccgccaggcacggtggctcacgcctgtaatcccagcactctgggaggccgaggcgggcaaatcacctgaggatgggagctcaagatcagcctgaccaacatggagaaacctcctctctgctaaaagtacaaaactaacggggcgtggtggcgcatgcctgtaatcccagctactcaggaggctgaggcaggagaatcgcttaaacccgggtggcggaggttgcagtgagccgagatcacaccattgcactccagcctgggcaacaagagtgaaactccatctcaaaaaaaaaaaaaaaaaaagaaagaaacctatttcaagtttacactcaaagacaatttatactatctgcaaagattactcttcctcaacagaacacaagctcagttctagcattgcctaagtacagatgctctttaacctgtgaccgagttacgtcccaatgaaacaatcgtaaagttgaaaaatcttaaaccatcataaatctggaccatttatacttgctttattcacaaggtaccacagtgcagcaggcaaaaactgacattgctggatctagcataagacattctgaaatgatgttcaaaatccaaccaaggagaactgttgaagactcagcacttcaagaacaaacagtttgaca

SEQ ID NO: 225637 - DNA, 413 bp, Homo sapiens
tagcctgggcaatggagtgagacactgtttcaggaaaaaagaaagaaagaaagaaaatttgggatggaggaagggcaaaatggagatttggaaaggaagagtttagaaagtaatgcatttaggctggacacagtggctcacgcctataatcctagcactttgggaggccaagttgggtgggtcacctcaggtcaggatttagagaccagcctgggcaacatggtgaagtctcatctgtactaaaaatacaaaaattagccaggtgtggtggtgggcacctgtaatcccagctaatggggaggctgaggcaggagaataacttgaatctgggagacggaggttgcagtgaactgagatggagccgttgcactccatcctgggcgacaagagcaaaactttgtctcaaaaaaaaa

SEQ ID NO: 225638 - DNA, 378 bp, Homo sapiens
aggacttttttttttttcaattgtggaagaaaacataagatctatccatttaacacatttttaagtacatgatacagtattattaactacaggcatcatgttggacagcagatctctagaacttactcataattgtgtaactgaaactttataccccttctacaagcaactgcccatttcgccctgtccgcagcccccaacaacctacattctattctgtttctataaatctgatgttaggtatctcacagacgttttatattcctttttagactttagcatactgccacatattttcctatctgaattatcattgtttcactttgaacttttagtcatatattgagtcattaattcaacatagtattggaaattcag

SEQ ID NO: 225639 - DNA, 127 bp, Homo sapiens
taatgatttttcaggtagtattactttaacttcagggcttttttggcatttatggacatgaccatgtggtcctccccactgccacccttttttctgagacaggatctcactttgtcacccaagctgg

SEQ ID NO: 225640 - DNA, 374 bp, Homo sapiens
tgagatggagtcttgccctattgccaggctggagtgcaatggcacaatcttggcttaatgcaccctccacctcctaggttcaagcgattctcctgcttcagcctcccaagtagttgagacaacaggagcacaccaccatgcccagctaattttttttatttttagtaaagatggggtttcaccatgttaaccaagatggtctcgatcttttgaactcatcatccgcctgcctcagcatcccaaagtgctgcgattctttctgtttatttcttgtcattgaaagatttaaatcatttacatttaaagtaaatgctaatagggaataacttacttttgctattttttgtttgtttggtgcatgtctttcagttttg

SEQ ID NO: 225641 - DNA, 474 bp, Homo sapiens
gtccttgaagttgacactcatacttttatctctttcttgaacctctcagatatgcttagaactgaagaagcccgaagttgattgattctgttttttcacctcagccagcaccttcttcttctcctttccaggagaatctgtatttctctgtatttccagaattctctgtatttccagtgaatctgtcagacacaaactaaagaccttttagcactgacaccacccttggagctcccagcacatcagcatcagcctgggatcacattctcatcaaaagctggaaagaaggaaaactcgaaccggcttgggaaggacactatctagtgcttctaactacagaaattgctgtccgcacagctgaaaggggatggacaccccacacacaagtgaaaggagtgattttcacagcgagagaaaaatgggccgtcaccccagggcccacccgcaccaaattaaaaagggctgaataatcat

SEQ ID NO: 225642 - DNA, 461 bp, Homo sapiens
actccccactgaactattacctaggttatctaaatataggctatttacttgattggcatttgctcctgtcagtttcataaactgtaagtaatgatttttgctgatgttagagcattgtggtactgtgtttctaatttaaatcaatgtctacattaatctgggaacatttgatgttactacctgattgtacattctggatgtaattagagtcattatacagaaataagtgtcatcctcttattctctaaatgagaaaagagagcattcttctcttctgaaataatttttctgggtcatgcccccaaaaccatttgtcaaatcaatagcagattctaatcacaaacttttttgactttttaacctttaaaagtcatcttagtgacttataaagaccaagattgtgcagtagaatgtgggcctattaagttatttcttatcaaaataaattatgtacaacatat

SEQ ID NO: 225643 - DNA, 509 bp, Homo sapiens
agggttagaactcaggcttttttaaacccgtggggcccattcctttaaatatcaagacgaagttgcattcccaaaggatccaaatgctgtttttttctgtttatggttcattcttccccaaggaaaggttgccatcagagtcaactccttcactcctggtgatgaccgcaaaccttgggcccaacctcacccttccactataattaaaagaccaccacaggaaacaatctttgttgtgccgaagtagttttcttcattagaaatgcctcccaaatacttttcaacatttgttagtgtaaacacattttattctttaatttgtgcctgtaatcatttatgctggtagattttgtgactttcagcaatatctggcaaataacctggtcagccacggtgtgttattgttttgaagcactgttcagttccaagagttgatatttttgtttaggatttctgcatctatatttgaaagcaaaagtaaactgtattttttgttgtgtttcctagat

SEQ ID NO: 225644 - DNA, 615 bp, Homo sapiens
tctacaaatgttcaacacagacacaaccatcctatttctttttcctgattattatctatccaagtttggttgcatccatgatgtggagcccacagatatagagagccaactgctattagagaggtacccattgtccagagagccaatttagggtacaggaagtgaaaggcagagacaaccatgcacttgctcactgcctctagatgcaagagcattctctgttgggtactataatcagtgaacacaagacctagtctcagatttatgaatgggcagtgtagcctgatgaaaatgttcagagactatgttagaatgtcagttttgcaagatgagagttctggagattggttgcacaacgatgggaatgtacttaacactactgaaccgtatacttaaaaaatggttaagatggtaaattttatgtgtattttatcacaattatttaaaaattttaactcctttgtcatctaagggcttaggagaaaaacaggatggaacctaacaccctttggcaagatgaaagtaaaagttgctgatcaacaaaccctcacatggcatttagagaggtatttaaaaacaaatcattaaagttttaaggacattacttttcagact

SEQ ID NO: 225645 - DNA, 544 bp, Homo sapiens
gaagcaggtacttggactttggataacagccctggtctacaacctgaatctgacactttctggttctgcaacttgggatcagttatctcattttcagagccttgttttcctcatctgtaaaacaagaattatggaggtaccgacttcatagagttacggtcttcacagtattaaaaaataacaaccgccaacatttactaagcccttaactgtgccattatggtgcttgtgtaattctctacaaaatttgcaaaattcagccacatgtgatgtctctcgcctgtaatcccagcactttgggaggccgatgtgggaggatcgcttgagcccaagagttcaagaccagtgtgagcaacatggcaaaactctgtttctacaaaaaaaatacaaaaatcagccgggcatggcagcacatgcctatagtcccagctcctcaggaggctgagatgggagggatctcttgagctcgggaggcagaggttgcagtgaactgtgattgtactactgcactccagcctgggtgacagagtgagactctccaaaa

SEQ ID NO: 225646 - DNA, 185 bp, Homo sapiens
ctggtgtgtggctatttatagtcgtaatttatcctactttatctgaatattcatgtcttgctgcagaaatattaaagttttaactgcagtactgccctagacctcaaaaggagtgttggcatcatttactttttaaaaccccaaatcttctgaactgagaaacacaatccagattctaggtcaag

SEQ ID NO: 225647 - DNA, 217 bp, Homo sapiens
acccgaagttttgacaactatcttcctggtttagcctagagaaacagaagcaatgggaagaaatcacatttgtagtagacccatgaccaggactcagattttaaaacttaaaatgtttccattaccttgaatttcccttcgttgggttttttaaaaagctaaaatgaaatgccattaatgacatagcatggcattacatatagaaggtctttatata

SEQ ID NO: 225648 - DNA, 1287 bp, Homo sapiens
atttggggacaggtggaaaagggctttatcatctattcgtactgatttactttgcagatacaaactgtataaataactttgaatcatttttaccattctttctcatttgtttgccctttctgttgttcattcctgtccagtccattctttacatgatagccggaaatgatttttccatagtagggctttgatcatttatttcctcatcctcccaaagcaaaaaaatatttttcatttaccgtttcctaccaaattgcaaagaatactccagtctgactccattctagtcacactttatttcccacaatagatttcatttcccctactctgcactaaactaaaattctcaatcttcccaaattttttcaaccttttgtttatttcattatccagcttgtatcagcctatttggaataccaccctacttttaaaccttgtttttaatctcttaaaggtaaataatttttcttttcattgaatgcaaagcttttttatgtgtacttgtctcgaagcactctatttgtattacaattatgcatgtacatgactcatctccctttacattgttaagatttttgaggggcttttcagaccatgttttgttctattttgaatcctctacaacattgcttttcaaagtatggtttgttggaccagccattgattggcttcaacagttttgttactggtctgggacaagatagtgagctggcatcagaatataaatcagatgtgtcactaaacacactgcttggttcagctgacttttttttatacaagaagacattggtaaagaagaaaactgtgtgttggtttacattctggcacaagcttcttattttgtagcagattggcaccttaaggagcattacttttaatatccaagaaaaaagtagattcctagtaaattactaatgaatgagttgtaggatatttgttcctgtcaactattatataagtggagtaaatacatatttttcttttgttaaaattcacccattggtactttggcctagaaagggtattatactaaatcttaagaggcagtacacttgtctttattcaacccaaagggatggatggaatttctaagaaaaagcctggggcagtgtcctgaatttatcccattagagttcagatttgggttttcttcaaaaagtgtcctgggctggcacagtggctcacacctgtaatcccaacactttgggagcctgaggtgggaggattgcttgagcctaggagtctgagaccatcctggacagtgtagtcagaccccatctttaaaaa

SEQ ID NO: 225649 - DNA, 787 bp, Homo sapiens
ctttgtttttttgctgtcttgtagctggttgcaaacattgacactccacccttaaattcttcagcttattctccccaagaataaggatattattttacattgccacaatattaagaaatatacctaagaaaaatatcaataattccataaaattgaatatacagccccattcaaatctctttaattgcccctcaaatgttttttattgtagttttaaaattaatccaagattaggtttaagtgttttattatgtctctcttattttcatctacgctggttcctttgacaaattttggtttgtttttttgtttttcctgtcattttttttgaagagtctaagccttgatcaaagtctgttttatacagtgtccaacattctgcattcatctaattggtttcctcacaattcactttagcctaaacattttttggcaataatactttattagttgacatgcatttgttactgcatcacattccataacatcagattgtgcttctcttggtattgccatgtttgatcatgtacttaagttgatgaccaccagatgatttcattgtacacatacatttttccatctgtaattactgtgtaatctggtgagttcaatctcacgtttggattaaaatttttatcgttaagaagtgtctttttaatctagaaaaaaaaacaggttatttaatagcctatgtcacattttgtttttgtctcctttatgtgacatgatgaaaccatagagctaaaaatacaacctttgctgatttctgttcgcctttaaaaaatga

SEQ ID NO: 225650 - DNA, 404 bp, Homo sapiens
gaatgaaagagtaatgcctgataagtattggatgcttagtaatttagttggtcaaatgttttgagtacaggcatttctgttattagacattatgtgcatttcttaaaaacttaacgttttttaaaattttggacttaaaaatgacagtttatgggaaaaatgggactgaaggagattactcaaaacctgtacaacttattagccatggcattaacagtattaataaaaatactagtacaggccaggcgcagtggctcatgcctgtaatccagcactctgggaggcctaggcgagcagagcacctgaggtcaggagttcaagaccagcctggccaacatggcaaaaccctgtctctactaaaaatacaaaaattaactaggcttgttggtgcgctcccgtcatcc

SEQ ID NO: 225651 - DNA, 133 bp, Homo sapiens
ccgcccgcgcgggcacacccgggctttgacccctttgtgatcgaggacacggacgggtttctctccaacaaaagggggccataaattacaaacggaagcagagtgtgtagggaagaacaggaaagcacgtgcg

SEQ ID NO: 225652 - DNA, 475 bp, Homo sapiens
caggctggtacagtgccataaatttgggatggggcccagtccactccccacagttggctccgtcatgaccactgcacattccgacatgctgctgctgaagacatgatccccagcaactaggctgtcagaggaccctcccagctgttcacccactgacgaccaccctgagagagaatgcaccatgtccatctactgttggctttctggaagagctcccccagctcccacctacccaggcacaggtgggaacgaggtctgtgtttctgacagaacacaatctcttaaattcattcctttcctgttctggagaatattcctgtcctttcccttttggcataggctttctttcacaaagccctgtctggatgggaacttttgtaagtaccttgaaacttcaatttattaccctgaaattcacaaaattattaaaaatggagtgtgactcttgctaaggactcaaaaactccaaacataa

SEQ ID NO: 225653 - DNA, 438 bp, Homo sapiens
cagtatagttaggctgagaattttccaaatcatcaagtcctggttcctttttgcttaacaattctgaggcaggagaatagggaattcaggccatcaagggttaaggcagaaacaaaagaacagcaggtgcagccaggtctaggcaaaactgggcagcacacaggccacatccttgctcctgtgataatgagacagaagtttccacatcagcctctgattgtgtgccaagcctccacgtcagcctctggtcacaggccaatccttcatgggctgtggccaattggagtcctctaaagggcactgaggggagttgcttggttcctttagcttaataaaaaccccagttgaagaggctcttgaaccacttgctcaagcctgctcccaccctgtgaattgtacttcggcttcttcaataaatctgtgccttcattagcccgt

SEQ ID NO: 225654 - DNA, 414 bp, Homo sapiens
cttaaaaacaggtggattgctgtctcaaatgaatcaaacaatatgggttgaagagggtgggccttcccaggaccagagacagacctgcaggaataataacagtcagaactattaggttgtgtaagactttgatttggaaggcaatgctgcaatgaacatggtatcttgagaaagcgcagttagcagaagcagcagtgccagaagccctaatagatgccttgcaggcctgaacaggtggtgcaagctgtgaggcccatgccagctgctgcagcaggaagaatctgcaggagaatctggtgatgggatttgagaagcctttctggcttcatggcttccaagctggattccccagccttcctagggattctggtcctcagcatcccttaataaacggctgttgtgcttaaaccaaca

SEQ ID NO: 225655 - DNA, 399 bp, Homo sapiens
ggttatttgaatgtcaaataattttggattatatcctggacattttgaatcttatgctatgagatctgggtcttgtttaaatcctattaaaacataatacttgttggctgggtgtggtggctcacacctataatcccagcactttgagaggccgaggcgggcagatcacctgaggtcaagaattcaagaccagcctaaccaacatggagaaaccctgtctctactaaaaatacaaaattagctgggcatggtggcacatgcttgtaatcacagctactcaggaggctgaggcaggagaatcgctttaacctgggaggtggaggttgcggtgagcagagatagtgccattgcactccagactgggcaacaagaatgaaactccatctcaaaaaaataaaa

SEQ ID NO: 225656 - DNA, 474 bp, Homo sapiens
acttggaccattcacatttaaagtgactattgatatcattggattaatatgtaccatatgtgtaactgtttctattttttgactttcttcattgtttccttttgtgtcttttactctttttctaccttctctggctataattgaacatgttatatgatcccatttttttcttctctcttacaatacaaattccatttcttaaaagaaaaattgtgtttttgttttcaccctattgcttgccatatatacttacaaataatctaagtcaacttaaagtaatgttatgatgcttcatgggtcatgcaggtaccttaaaaacaaaattcctaattcctttcttaccaccttttaaaacattactctcattcatttgatgtattaataacatataatcatccaatcaattattgctgtttttcttattttgacagacggttatatgaattaagaataaacataataaaatattttatt

SEQ ID NO: 225657 - DNA, 517 bp, Homo sapiens
gagtggaccatcataacttctgtgagccaataaactgtcactgtaattgaagatgctggccgtcttcttgctctggatttcccaatggaggtctaccagcccaatagtcttttcctttttatcttcttataagagcattgcattaaattttacttatttatttatttttgagacatggtcttgctctgtcacccaggctggagtacagtggtgcaatctcagctcactctaacctctgcttcctgggatcaagcaatcctcccacctcagcctcctgcatagctgggactgcaggcacacaccagcacaccaggctaatttttgtatttttagcagagacagggtttcgccatgatgcccaggctggtcttgaactcctgggctcaagctatcctcctgcctcagcctcccgcagtggggggatttcaagcatgagccactgcgctcatctaaaccattctaaaaggagtgactaaggatggaaaataatacattaaaagtaaaatctgttggtaat

SEQ ID NO: 225658 - DNA, 592 bp, Homo sapiens
tagctctatatgaggagaaggatttatataggaacaggaggttgagggaattatttgaaagcttgatctttcactgcgaaaaatcagatgagcatgatggtgggaattggaatggagagatgtatgacaagggtagagaaggcttaaaatagcaattttggattatgagaggaaacaggctgctccagtaaatgtaataggattgctggtcaatctgaaagtttcattcagagatagtggccattaatttataatactctatcctgctgcttttgtggatttttccctgcagtggcaatttgtagcccactttccacagatagcagattgacattcagattcatttagtttttgtaatttgccaggtccacttcctatggagtggacactccaaaggtcaagggaatacttgaaagagaatttaaaaatacgtcaagtagaaagattaaaaagaatgatccatgaaccttaaattgagtaattaatatggaagtgataaagagcccactaagtagaaatgaaaaagaatataggctggtagtggtaatagtagacatttcggtagcataatggccttaaactttcaaggaac

SEQ ID NO: 225659 - DNA, 333 bp, Homo sapiens
ctggtcccaagcactttggattagggatactcaacctgtatctcattagtgagtatgggaagaatgaactgagcacaactcagctcttcctccttttttctctttcaaatgtgcctgcccttaagaagcacgattttttgccctcttcctccatgttctattaatacatttcccacagtctagccctcccagagaggactatgattggtcaggcacagtggctcacgcttgtaatcccagcactttgggagactgaggtgggcggatcatttgaggtcaggagttcaagaccagcctagccaacatgatgaaaccccatctctactaaaaata

SEQ ID NO: 225660 - DNA, 447 bp, Homo sapiens
cccccccatcatccctagccccgtggaaaggtggggaactaaacggaaagcataatcttaagtgggtggggggcgcatgggggaatcccaggtttctagcgtcttagcgttaatgcaagaccaggcgatcccgggacttctgcatgctgggctcttccccctttctctccacgaattaaaaagtacgcctcttcggcttgttagtggggtcagggggggagtggaggctcagggcaggccagccccctctcggccaggcggacctctggcaaaagaatcccggctcccagtcggcatcatctctcggaagtttggggtctggaaacttgccccttaagtttgtgttccacttgatctgagtattctgcagccaagggctgcagtcaactggatgggtatacggatttagggttttaaatgtaagtaaactctctggaaggcttctgt

SEQ ID NO: 225661 - DNA, 531 bp, Homo sapiens
atttgctttgaaatgattgagaaaagatgtgtgtgtctctggtcagggataagttccagtgagacccactccaacttgcaaaacattgatattattgggaagcttcagagcagacagtcagacagacttagacccaaattctaggtcatctggttagtagtgaccttgacaaatgactacagttgagcctcagttttctcatctgtaaaataggggcaatgaaatgtttccaatagagcagtgacaattaaagataatatatgaaaagtagtgagcacaatgcctgatacatttctattcaaatacctaattctttgaagaaaagtttctaacagaaacttttgatgttgacagaaaacagtcaaaccacaacagcaagagaggaagaaaggaacagaggatccacaaaataaccaggaaaccattaaaaaaatggcagtagtgagtccttacttatcaataattactttgaatgtaaatgaattaattctcctatcaaaaggctaacgtggctgaatggtttaaaaaaaa

SEQ ID NO: 225662 - DNA, 454 bp, Homo sapiens
ggaagatgactttcagcaacatgagagtcagaaggaagacaattcagaggctgagaccagagggcattattcagggcaagagataagctgagtggcagtagggatgtacaggagttccaattcatgagactgtcatgaggcagaagtgatgggatttggtaatcaattacattatgaaaaggcagggaagaagcagataactcccaagattccagtttgggaggctgggaagttggtgaagtcactaaccaagatcgaaaacacaaaggtggaggaggaacaacagcaggagaaataagttctgcttcaaatgtattgttcatggagcctgcacagcatgttcaggctgcactaacaacataccatgaactgggtaacttataaggaacagaagttgatttctcacagttttgaagactgagaagtctgcgattaggatgccagcatgattggg

SEQ ID NO: 225663 - DNA, 435 bp, Homo sapiens
aacacacgtgtgagctgtcaggcagctcagggcattgcatgaaggtaactagaaacacaatttccacctctttttaaactagtgtagttcaaaccttccctcatttttaagttcttttttattgaggtgtaacttacattcagtaatgtgccaagtcctatgtgttcaggtcaataaatttttacaaacacacacacatgtgcacaaccccctatagccaccacccagatcaaacacccagggggcttcctcaggccacctcttatcaatttcccacaaaggtaaccattattctggcctttaacaccaaaagttcattttcaagccttcactattaaaaaacaacatcaacaacaaaaaacaagcaactaatggcatgggatcgtaggctggataaggaagggcagccaagagtgttttaatcaattttattta

SEQ ID NO: 225664 - DNA, 521 bp, Homo sapiens
agactgcacatgcgtcgcctgcgaagtcccctgtgccgccgccgttttggtgagccatcttctctccctccctccccgccagtcctcaggagtagcccctagttcttctccttcctttgccagggctttccctgtgttttgccgcctgttgaagacttgccgccattcccaattggctcattcaagacattttgcctaataagattctccttcttagaaaaattcttctgtggccaggcatagtggcttatgcctgtaatcccagcactttgggaggctgaggcaggcggatcgcttgagcctaggagttggagaccaacctggccaacatggcaaaacccggtctctgcttaaaatacaaaagttagtctggcgtggtggtgggtgcctgtagtcccagctactagggaggctgaggcaggagaatcgcttgaaccctagaggcagaggtttcagtgagccgagatcgcgccactgcacttcatccagcctgagtgacagagtgaaactgtctcaaaaaa

SEQ ID NO: 225665 - DNA, 249 bp, Homo sapiens
caaggaataagatctaatgttcactagcatgatagggcaactatagttatctctaatttattgtatattttgaaataactgaaagagtggaatttggaatgttcaaaggcttgagctgatggatacctcaattaccctgatatgattatcatacattgtacacatatcaaaatatcacatgtatccaataaataagtacaactattatgtatcaataacaaaattaaaaatgttaaaatctatgttgca

SEQ ID NO: 225666 - DNA, 797 bp, Homo sapiens
ggtgggctccatccttgtttcatgcctgtaccttccgctatgcctgacatagttcatggttgacagcaactgaatgtctgtggctgaatgaatagaagaacctcgttgctaggaactgttatcggggctgtttcaggttcacatgtggagaggtcagtattagggcaaaggtgaggaagcctcatttcagtggtgttgtcctgagttgagacatgaaacatgaattttaactcaaattctttggccccttctttaattcagagccataggccaatcaccgtactttcttcatttacaagatgagtatagcattggtggtttgtactgggagaatttggaattctggatgttggtgagatgctccatatgggatctcatgccggcagctagcatggcattgtgatcgcgacacccagggtgagtcccagctttgccagtaggtacccctgttctacctggatgctacccacctatgtctggcaggtcaaatcagaaaggcaaagcctccagcacataacatggcaaggcttccagatacaaaatagcaaaactattttgccacaggggagatgatagggaatctgaactgtcccctccaagggacacagagcctcaggcagggccacaggtgcacctgttttgtgcagagggctcaagcagccctggagacagtaacaccctccagctgccagctctgccaccttcagcatgaccttaccaagccacctcgcctcgccttcttcagtggtaaaatgaggataactgtaaccaatttatcaaggcaaacatgtattaga

SEQ ID NO: 225667 - DNA, 471 bp, Homo sapiens
ggtgggctccatccttgtttcatgcctgtaccttccgctatgcctgacatagttcatggttgacagcaactgaatgtctgtggctgaatgaatagaagaacctcgttgctaggaactgttatcggggctgtttcaggttcacatgtggagaggtcagtattagggcaaaggtgaggaagcctcatttcagtggtgttgtcctgagttgagacatgaaacatgaattttaactcaaattctttggccccttctttaattcagagccataggccaatcaccgtactttcttcatttacaagatgagtatagcattggtggtttgtactgggagaatttggaattctggatgttggtgagatgctccatatgggatctcatgccggcagctagcatggcattgtgatcgcgacacccaggggtacctactggcaaagctgggctcactgagaattcagtggactagtagtagta

SEQ ID NO: 225668 - DNA, 1282 bp, Homo sapiens
  misc_feature (939)..(939): n is a, c, g, or t
  misc_feature (946)..(946): n is a, c, g, or t
  misc_feature (951)..(951): n is a, c, g, or t
  misc_feature (959)..(959): n is a, c, g, or t
  misc_feature (962)..(962): n is a, c, g, or t
  misc_feature (968)..(968): n is a, c, g, or t
  misc_feature (974)..(974): n is a, c, g, or t
  misc_feature (987)..(987): n is a, c, g, or t
gggaccctctgcgactggtctatcttcctgagtgtctgaaacaagcaatgcccagaagatcgatagagagatcagtgctatcttgaagtatctgaaacaacagtgtcatgcccagaaaattggcatcgcgggattctgcttggggtggaactgctgtccatcatttgatgatgaaatactcagaattcagggcaggggtgtccgtctatggcattgtcaaggattctgaagacatttacaatttaaagaaccccactttgttcatttttgctgaaaatgatgttgtgattccactcaaggacgtatctttgctgactcagaagttgaaagaacactgcaaagttgaatatcaaattaaaacattttctgggcagactcatgggttcgtgcatcggaagagagaagattgctcacctgcagacaagccctacattgacgaggccagaaggaatttaattgagtggctgaacaagtacatgtagcaagaatcaagggcaagccttcctagaatagctttcatcccaaaatttgcttggaaatagttagatcatttgatttaattttcacttttataaaataagtgtaggaatcctaaaattgattatttcatttgaaacacaaattcagtaggacgtaatgcatgaaataatttaatttttgacatgtacatcgaatcataatttaaaaacaaggtctgaccaggtgtagtgcctcatgcctgtaattccagcactttgggaggccaaagtgggtggatcacctgaggtcaggagtttgagaccagcctggccaacatggtgagaccccatctctacaaaaaatacaaaaattagcctggtgtggtggtgcacgcctgtagtcccagctacttgggaggctgaggcacaagaatcaatagaacccaggaggtggagactgcagtgagccggtaccgaggcnctactgnactcnagcctggncancagagngagacnctgtctcaaaaanaaataagtaaataaataaataaataaaataaaaaccaggtcagtacctggagaatttgaatgatagagaatgatagagtaataccctaattattagttaaaacctacaggccgggtgtggtggctcacgcctgtaatcccagcactttgggaggccgaggtgggtggatcacttgaggtccaggagttcaagaccagctggccaacatggtgaaaacccatctctactaaaaatattaaaatcaggcgggcatggtggcattgtgctgtaatcccaggctactcaggagtcctga

SEQ ID NO: 225669 - DNA, 967 bp, Homo sapiens
  misc_feature (638)..(638): n is a, c, g, or t
  misc_feature (645)..(645): n is a, c, g, or t
  misc_feature (650)..(650): n is a, c, g, or t
  misc_feature (658)..(658): n is a, c, g, or t
  misc_feature (661)..(661): n is a, c, g, or t
  misc_feature (667)..(667): n is a, c, g, or t
  misc_feature (673)..(673): n is a, c, g, or t
  misc_feature (686)..(686): n is a, c, g, or t
  misc_feature (698)..(698): n is a, c, g, or t
gggaccctctgcgactggtctatcttcctgagtgtctgaaacaagcaatgcccagaagatcgatagagagatcagtgctatcttgaagtatctgaaacaacagtgtcatgcccagaaaattggcatcgcgggattctgcttggggtggaactgctgtccatcatttgatgatgaaatactcagaattcagggcaggggtgtccgtctatggcattgtcaaggattctgaagacatttacaatttaaagaaccccactttgttcatttttgctgaaaatgatgttgtgattccactcaaggacgtatctttgctgactcagaagttgaaagaacactgcaaagttgaatatcaaattaaaacattttctgggcagactcatgggttcgtgcatcggaagagagaagattgctcacctgcagacaagccctacattgacgaggccagaaggaatttaattgagtggctgaacaagtacatgtagcaagaatcaagggcaagccttcctagaatagctttcatcccaaagtgctgggattacaggcgtgagccaccaggcccggccagtgtttttgtttttgtttttgcgatggagattcgctcgtcacccaggcggaggttgcagtgagtcgaggttgcnctactgnactcnagcctggncancagagngagacnctgtctcaaaaanaaaaaaaacctncagctgttcaaggaccagctgacaggtcaagtgtggccttttctggtctttgaacacatcatagaaagtgacaaatgctgcaaagccatgaagaacatgaactataaacgggtagactaactgcccagcttagacacttatctatgccacaaaacagctgaatttgtcacatttatatattgcaatatgggaagtattgagatcaaaacaggattccattgacctaattatattaagctaataaactaattttttgaatttttgaaaaa

SEQ ID NO: 225670 - DNA, 444 bp, Homo sapiens
cctcagaaaatacctcagaaatgaacggaagagatgataccagacagcagcctggtgaggcaggcaagtgtgctgattttttgctgccccaggcctctctccaggtggccttgggaacacatcatcaccctgaagaaggccctggtgatccctcttcctttctctcctcactgggttcctgaattcgacatcagtccttcagatagcagcaacatcctgaatgaatccagctctgttttcttgctctccatctttagatgtggacatttggaaatatgttcgttttcttttttaagtagagcactgttaatcaagatgggaagaagcagtgtttctgctttttttccaagtgagaattagagaaaagctcagaaatcccaatttacttcagaaagacttgaaaaattatacgtaatagacagtacaacagtaaagaaaattctg

SEQ ID NO: 225671 - DNA, 234 bp, Homo sapiens
atgggacaaactgatgtcttgtaccggatggtatgatgaaccgaggacacaacatcacatcagtggcaattctaccaatttagacaaacgccagttgtgggctgtcctacaacataactcagctgcagtcttcaaaaatgtcacagtcaaataaaaaagaaaagctgagattaaagattccaggttaaagaagactaaggagatacaacaagtaaatgcaatgtatgatcatac

SEQ ID NO: 225672 - DNA, 401 bp, Homo sapiens
ggttataatagcaaaagattggaaacaatcattctagactattaaaaatgacaatagtgtaaattacatcaatatctggacttgtgtttatcataccatattaaatgaaaagagtaaaacacaaaatatgtgctcttcaatgacaccaacgtaaaacatgcacacttacactaatcatagctagacaaatttaatttgcaataaagcaaattacatttcatttcatatttttgttgcaatattttctctgtaacatcaaaaagttgacaaaagaaaagagattggaacttgcttgcactgtggagggaaaactggttctgtacatgttttaatttgtctgaggaaacagagaaaagacttaaatatcctgaaataaaggtggcaaagcttctcctattcag

SEQ ID NO: 225673 - DNA, 467 bp, Homo sapiens
tatgtgtgtggcaaatattttcacctcttctgtggcttgtcttttgagctccattttcagtatctttggccttacagaagtttttaatttttatgagatcgtattcgtcagtccttttctttatgcttttatgttccatgcctcacttaaaaaggccctctttcccccaaggtcataaatatattctatacccttttcaatatttttatggttttagtttttatgtttagcacctaactccatctggaatctatttttgggaatcgagtggtatgtagatagatttcatgtctgacaatatatatttttgagcactcaaatttttaaaaagtatgtatgactttggtaagcagaaagagccaagaggagtttgaagagacactcagaaagtggatgtccattctgggtgggcccaggagtttgcaattttagcagatacctccagagaaaagagaaagtgatgagaa

SEQ ID NO: 225674 - DNA, 509 bp, Homo sapiens
atcctccaaccaagtttaaggatcttgaggcatgtcaactgtcatctattttgtggcacagacttatttcccatctctggtgcttgcatcaggacaagcttatttttccagtaactcaactggttacaccgatgagaggggaattttttttttttttaagaaaatctagaagagtttaggtatagagatatgccttagtatacttcacagctcttaacaagaatgcaggccaggcgtggtggcacacgcctgtaatcccagcactttgggaggcagaggtgggtggatcacctgaggtgaggaatttgaggccagcctggccaacatggtgaaacctcatctctactaaaaatacaaaacttagccaggcatggtggcaggcgcctgtaatcacagctactcgggagactgaggcagaagaatcacttgaacctgggaggcagaggctggagtgagccgagatcgcaccactgcactccagcctgggtgacagagcaaggctccatctc

SEQ ID NO: 225675 - DNA, 344 bp, Homo sapiens
gttatgtatttattcaattaaataatccatctatttgccatctctttaatactaatatagactcatgaattctgttgttaaacaatttattattccttgctatccttaattatttggagattaaattatctcagattttacagtgagagctccttcaagatatcccctgtgaccttttgataaactcctataattttttcaacatttattatctgacatcaaaagtttctccaggcttaccttggactcttgttgccccagttctgtaatcagccatttcttggtggaaccctgggtccattcactggggaatggtatttaaaaaaaaaacaggattcagggca

SEQ ID NO: 225676 - DNA, 448 bp, Homo sapiens
aagattgacgtaacacaggagactacatttgttcagaaaagcaaacaatcagtgtggcctacatttgttcagaaaagcaaacaatcagtgtggcctagactagtgaggggcaagtttggaactaacatggcaggatgtagaggattgggagagtgagtgggagggaggtgatcccaggagcctagaacaaccctcatgaaggcccagggtttttcatgggcaggagggttcagggcctgaagtgactgtagtagaaacactgaatgggccaaacagccaagatgagcaggatggcagctccttttgtggggacttgaaagtcagacagaattgggagatagtttggttttcttcacagcatattaatgctctgaaattaaaattgccttttaatacagcatatacttagttataatcctgcttcatgagaagaaaatgctcatttgta

SEQ ID NO: 225677 - DNA, 242 bp, Homo sapiens
caaattctaaccaagcagtttgttctttgtgatccaggcttagttgctgccctgttggccatttttcctttgggtgaatttaggattcagttcctcatcctcaaaagccctaactgaaaaggaactgatgacacattctccatggtaaacccttcttgggaaactctcacgaggacttgggcactgtgtatccagctcctgtcgacgcggccgcgaatttagtagtagtagtaggcggccgc

SEQ ID NO: 225678 - DNA, 347 bp, Homo sapiens
aggtgagtgttgtggtcctgccctgctgggagctgtgtgtgcagtgcggctaccctgccctgttagtgtgagctgggggtgtccgtgggctgtgctcatgccttccatgccctgtaggttagtctcatccagcctccaggttcttctgtttgtatttcataaagaggaaacttgcctgtctttgtataggcagggaaaaaatgtcctttttgttagagatttttgtcctcttttgcagcattgagtgtgcaccgtaaatgtcgggtacacataggtttgtgatgggaatgaatctttgaggcagtctacaagatttagattgttcttttttttgagacaaagtcttg

SEQ ID NO: 225679 - DNA, 344 bp, Homo sapiens
taagtcatggcttatatgatggtggtcccataagatttataatggagctgaagaattcgtatcatttagtatttactatgctatttttttttattattgctttggaatgtactcctacttaattttttaaaaagttaaccttaggcgggtccttgaggaggtattctaaaagaagatcttattatcataggagatgacatctctatgcatgttactgcccctggagaccttctaatgagacaagatgtggaggtggaagacagtgagattgatgatcttgacgctgtataggcctgggctaatgtgtgtttgtgtttcagtatttaacaaaacaatttaaaaag

SEQ ID NO: 225680 - DNA, 269 bp, Homo sapiens
aggttgatttacaattctaacgattgaagctttagggtaacttgatgttattactcctctgctgattttttttttcctttccttcttgctggtaagagcgggtactcaaaggatgggaatcgtgactgcagggtcatcaagatggctgagtccagctcctgcatctgttgtttgaagctcctttcccacatgccaaatgcctacttcaaaccaatgacactggcacatgggagttcacctttgcaagagctgccttctctccaaggatg

SEQ ID NO: 225681 - DNA, 588 bp, Homo sapiens
aatactgaatgtttcagtggatatttagaatctctttaattagatgaatgtcattgtgcaggtggtctactggaagaagggaaataaaagtttgttaatacagacatctgtgaggaacactgactgttctttgagggagtaacctggaaaatttgaaaatgaaacccctcccagtagcctggtctcggctctatgaagactgatttaccaacatgtacagtggacctctgaggaaagaagcagccatttcagagcccttaatgtgaatgcataggctgtgattattaggaagtgttaaaagcactggctggcagcttagataaacaagaatttgaaccatcacaaataaccagggggaagtggcatttgttagtattctggaagatgttaaatccatagcaaatgaaagtcttagcattgactgtttcaggcaacttagccgtaacctcaatgctaaaaaacagaacacatagaggagcgttaccaatatttatcaagcttcccctttatgtctgacattttcaagtggattgactcattttatcatatgaagtagttgtattaaagcattcttcagccccaccccgc

SEQ ID NO: 225682 - DNA, 747 bp, Homo sapiens
ctgcgtggagctgcaggcttcagctgccttcaactggaacaaccagcgctgcaaaacccgaaaccgttacatctgccagtttgcccaggagcacatctcccggtggggcccagggtcctgaggcctgaccacatggctccctcgcctgccctgggagcaccggctctgcttacctgtccgcccacctgtctggaacaagggccaggttaagaccacatgcctcatgtccaaagaggtctcagaccttgcacaatgccagaagttgggcagagagaggcagggaggccagtgagggccagggagtgagtgttagaagaagctggggcccttcgcctgcttttgattgggaagatgggcttcaattagatggcaaaggagaggacaccgccagtggtccaaaaaggctgctctcttccacctggcccagaccctgtggggcagcggagcttccctgtggcatgaaccccacagggtattaaattatgaatcagctgaacctgtgcatgctcatttcaaagggaaattcagatgatccaggatgaccctggagagaccagagggggcctgaggcttcactgcagcggcctccacccacctattccctttcctggtcaccttcatggtccaggacactctctggaagttctgggtctccccaagaagaggaagaccagactctgcctcagtgaggggcagttctcatggctggggcccaggcaggcagggtattaatagaagttgctctga

SEQ ID NO: 225683 - DNA, 474 bp, Homo sapiens
gagttggaagcgtcatatttgaaaccatgggcgagtgtgagaaatgactgtcaagactcatttgaagaccccacttgaagagacacacggacccagaggaagtaaaatgcctcttactgtacatgttgtctcatcaaagccaaacaaatctgcatgcatattagtgcaagtgcagaggagagaaatcctacaacatttcaagcaaggggttgaaaatttaaattgtttgtatcgtactcatattactcttttaagatttgtaaaatgttatgaataatccttctcagagccacgtatggtcaggcaggttgtgctctgcagtggggcgcctgtccaattggggctgtaaccacccagagaaagagatgccttttaaattccaaacagagaagttgtatggcctaacagccaccttgaatgtattatctttattgctttaactttgtgaacaacaaaacaaattctatgactttt

SEQ ID NO: 225684 - DNA, 411 bp, Homo sapiens
taagtgggtgctaaatgatgagaacatatagacacatagaggggaacaacacacacagaggcctttcagaggatggagggtggaaggagggagaggatcaggaaaaaataactaatggatactaggcttaatacctgggtgataaaataatctgtacaacaaacctccatgacacaagtttacctgtgtaacaaacctacacttgtacccctgaacttaaaataaaagttaaaaaaaggaaaataaatttaaaaagaatattatgtggtctgaacacttatttctgttaatcaaatttctttgtaatcatataattatttagtaccacccacttgtacaacatttattgcatacatcagtgtttataatcatttctaacaaataaacttttttattaaacattgggtagaa

SEQ ID NO: 225685 - DNA, 728 bp, Homo sapiens
gcagtttgcatgagaagtgattgacttttttccttctccctccccagccaaggacagccagggcttgctgctaggccacaagccccagaggccacactttcttgtaatgggcctgtttgctggagggggtgggtcctgagctgggacttgagatccttttgctcatcagagattttccgcagacacctggagcgctggagcaaagaggagctcagcagtgcctggctcggtcctcatgtgtgttggcacgtccacatccctggggaggagacccgcacggtggcccggaacagtccatggcagagcagagaggcagaagtttgtttgacctcttttctctgtcctactgcccagcctcccttttccatcctgcacactttggccaggtctccctctggtgcttcttccaaagtatggggtaaatctactgcccaagtgttggccaagtatcctttttttcttttaggaagcaggggaggatggtctgtcaaagttaacctaaatctgtgctcctctgtcagccctgaacagatgctcactgtgttttaacaatctattagaaatactataattattttaattgttcacttcagtcctggctgttggaatccttcacgtgatctatgtgattgtttctttcataagtttggacatttttattttgtttttgtttgttttaatgttaagggcctgccttggttttctgcatcactcctgagtatgcttca

SEQ ID NO: 225686 - DNA, 960 bp, Homo sapiens
gtaaatggggaggaaatgctggggaggtgggggcagatcacatcaacatcctggcattgggctgggtcggcgtggagccccagaaatgttcccaagcccattcttaccaagaaccaatgagtaaaatcaggggcctcccacctgaggtcagggaaccaggccctggagtggaacttggggtggaaaatggccttctttgtcaactgattcattctccagaattcaatttgttctccaactcggtggtgtttgaaagcaactttatccagacccatgtacctgaggctgatttccaggtcactaagcccgggaactggagagatgtctgtgaagggtctgccaccgtgatcctcggggtcacctcctcggtgccctccctgccactccccaatgtcctcctgatggccaatgttacctggccccagggtccatttaccacctggagcacacctggtgacgccccagtcatcaacctcagcagcctgaaaacagcctcctgtcatccccccagcccagcgagcccctcgtgctgctggcggctgagcagaccagtggcagtttctcacagctctcaggaaagccccagctcacagcagacaggaacaatgacactgccattgaaatagacaactgcagcagctacaagataccctctccagtggcatctccaatcaatttgaatatacccatgagagctgccttgagccacagcctctgggaacaagaggactggaatgagcaccttctacaagttcatatagccagttacctaggagagcacttcttgggagcctgacacctaggcaaaacatgctcttccttgcatacgtgtacttgctaccacctcttataatgctccttttccactgtgagccaagtgaccttgggagaggtaagatggtgtttccaacaaggtgcttctctacttccaccaataaacttccaagtgagtccctaaaa

SEQ ID NO: 225687 - DNA, 1183 bp, Homo sapiens
gtaaatggggaggaaatgctggggaggtgggggcagatcacatcaacatcctggcattgggctgggtcggcgtggagccccagaaatgttcccaagcccattcttaccaagaaccaatgagtaaaatcaggggcctcccacctgaggtcagggaaccaggccctggagtggaacttggggtggaaaatggccttctttgtcaactgattcattctccagaattcaatttgttctccaactcggtggtgtttgaaagcaactttatccaggtcactaagcccgggaactggagagatgtctgtgaagggtctgccaccgtgatcctcggggtcacctcctcggtgccctccctgccactccccaatgtcctcctgatggccaatgttacctggccccagggtccatttaccacctggagcacacctggtgacgccccagtcatcaacctcagcaggcttctccccctgaagtacgtggagctacgaatctacgaccggctccagcgcatcctgagggttaggacagtgaccgaaaagatctactatctgaagctccacgaaaaacacccagagattgtgtttcaattctgggtccgcttggtgaaaattctgcagaaaggcctgtccatcaccaccaaagacccgagaatcaaattcactcactgcctggtgcccaagatgcccaccaactccacagaaacaacacctgaaaacagcctcctgtcatccccccagcccagcgagcccctcgtgctgctggcggctgagcagaccagtggcagtttctcacagctctcaggaaagccccagctcacagcagacaggaacaatgacactgccattgaaatagacaactgcagcagctacaagataccctctccagtggcatctccaatcaatttgaatatacccatgagagctgccttgagccacagcctctgggaacaagaggactggaatgagcaccttctacaagttcatatagccagttacctaggagagcacttcttgggagcctgacacctaggcaaaacatgctcttccttgcatacgtgtacttgctaccacctcttataatgctccttttccactgtgagccaagtgaccttgggagaggtaagatggtgtttccaacaaggtgcttctctacttccaccaataaacttccaagtgagtccctaaaa

SEQ ID NO: 225688 - DNA, 1210 bp, Homo sapiens
gtaaatggggaggaaatgctggggaggtgggggcagatcacatcaacatcctggcattgggctgggtcggcgtggagccccagaaatgttcccaagcccattcttaccaagaaccaatgagtaaaatcaggggcctcccacctgaggtcagggaaccaggccctggagtggaacttggggtggaaaatggccttctttgtcaactgattcattctccagaattcaatttgttctccaactcggtggtgtttgaaagcaactttatccagacccatgtacctgaggctgatttccaggtcactaagcccgggaactggagagatgtctgtgaagggtctgccaccgtgatcctcggggtcacctcctcggtgccctccctgccactccccaatgtcctcctgatggccaatgttacctggccccagggtccatttaccacctggagcacacctggtgacgccccagtcatcaacctcagcaggcttctccccctgaagtacgtggagctacgaatctacgaccggctccagcgcatcctgagggttaggacagtgaccgaaaagatctactatctgaagctccacgaaaaacacccagagattgtgtttcaattctgggtccgcttggtgaaaattctgcagaaaggcctgtccatcaccaccaaagacccgagaatcaaattcactcactgcctggtgcccaagatgcccaccaactccacagaaacaacacctgaaaacagcctcctgtcatccccccagcccagcgagcccctcgtgctgctggcggctgagcagaccagtggcagtttctcacagctctcaggaaagccccagctcacagcagacaggaacaatgacactgccattgaaatagacaactgcagcagctacaagataccctctccagtggcatctccaatcaatttgaatatacccatgagagctgccttgagccacagcctctgggaacaagaggactggaatgagcaccttctacaagttcatatagccagttacctaggagagcacttcttgggagcctgacacctaggcaaaacatgctcttccttgcatacgtgtacttgctaccacctcttataatgctccttttccactgtgagccaagtgaccttgggagaggtaagatggtgtttccaacaaggtgcttctctacttccaccaataaacttccaagtgagtccctaaaa

SEQ ID NO: 225689 - DNA, 827 bp, Homo sapiens
gtaaatggggaggaaatgctggggaggtgggggcagatcacatcaacatcctggcattgggctgggtcggcgtggagccccagaaatgttcccaagcccattcttaccaagaaccaatgagtaaaatcaggggcctcccacctgaggtcagggaaccaggccctggagtggaacttggggtggaaaatggccttctttgtcaactgattcattctccagaattcaatttgttctccaactcggtggtgtttgaaagcaactttatccaggtcactaagcccgggaactggagagatgtctgtgaagggtctgccaccgtgatcctcggggtcacctcctcggtgccctccctgccactccccaatgtcctcctgatggccaatgttacctggccccagggtccatttaccacctggagcacacctggtgacgccccagtcatcaacctcagcaggcttctccccctgaagtacgtggagctacgaatctacgaccggctccagcgcatcctgagggttaggacagtgaccgaaaagatctactatctgaagctccacgaaaaacacccagagattgtgtttcaattctgggtccgcttggtgaaaattctgcagaaaggcctgtccatcaccaccaaagacccgagaatcaaattcactcactgcctggtgcccaagatgcccaccaactccacagaaacaacagtaagtgggcctccttccgggacctgtcgagaaataagtatatataagtatatatagccatgccctgtcacccaggctggagtgcaatggcgcgatctcggctcactgcagcttccacctccc

SEQ ID NO: 225690 - DNA, 510 bp, Homo sapiens
tgcattcctaacatgagtacatgagagttccggttcctccacatccttaccaactcactgtgtatctcactgtggtttcaatttgcatttccatactgactaataatatttagcattttgtaatgtgcttatatgccatctgtatatattctttggtgaagtatctgtacaaatctttcgtccattctggacactagtcttttgtcaaatatatgctttgtggccaggtgccatggcccaagcgtgtaattcctgcactttttgtaggccaaggtgggtggattgcttgagtctaggagctggagaccagcctgggcaacgcggtgacaccctttctccacccagaatacaaaaaattgtcggatgtggtggtgtgtgcctgtggtcccagctacttgggaggctgaggtgggaggattgcttgagcctggaaggtggagcttgcagtgggtggtgatcatgccacggtactccagcctgggcaacagagcaggaccctgttgcaaaaaa

SEQ ID NO: 225691 - DNA, 577 bp, Homo sapiens
cgtggtggatggtaaagtcccagatacactcaggaagtgtttctcagagggtgaaaaggtaaactatgaaaagtttagaaattggctttttctaaacaaagatgcttttactttctctcgatggcttctatctggaggtgtgtatgttaccctcactgatgatagtgatactcctactttctaccaaactctggctggagtcacacattgtaagtaatgacatttcattgttttctgtttgcctttttttatatatataattggctggtaatatgagaatatgcttataaaggagaaatttatttaaattctgtcccaggctggagtgcagtggcaccatcgtggcttacggcagtctcaacttcctgggctcaagcagtcctctcacctcatcctgcctcagcctcccgagtagctgggactacaggcgcccaccaccatgcctggctaatttttttgtatttttagtagagtcagggtttcaccatgttagccaggatggtctcgatttcctgacctcgtgatccacacgcctcggcctcccgaagtgctggaattataggcgtgagccaccatg

SEQ ID NO: 225692 - DNA, 432 bp, Homo sapiens
cgtggtggatggtaaagtcccagatacactcaggaagtgtttctcagagggtgaaaaggtaaactatgaaaagtttagaaattggctttttctaaacaaagatgcttttactttctctcgatggcttctatctggaggtgtgtatgttaccctcactgatgatagtgatactcctactttctaccaaactctggctggagtcacacatttggaggaatcagacatcattgatcttgagaaacgctattggttattgaaggctcaatcccggactggacgatttgatttagagacatttggcccattggtttcaccacctattcgtccatctctaagtgaaggtttgtttaatgcttttgatgaaaatcgtgacaatcacatagattttaaggagatatcctgtgggttatcagcctgttgcaggggacccct

SEQ ID NO: 225693 - DNA, 715 bp, Homo sapiens
  misc_feature (595)..(595): n is a, c, g, or t
  misc_feature (604)..(604): n is a, c, g, or t
  misc_feature (627)..(627): n is a, c, g, or t
  misc_feature (630)..(631): n is a, c, g, or t
  misc_feature (654)..(654): n is a, c, g, or t
  misc_feature (661)..(661): n is a, c, g, or t
  misc_feature (672)..(672): n is a, c, g, or t
  misc_feature (689)..(689): n is a, c, g, or t
  misc_feature (694)..(694): n is a, c, g, or t
  misc_feature (703)..(704): n is a, c, g, or t
  misc_feature (710)..(710): n is a, c, g, or t
tctcagctaccaactctgcccgaaatctagatcccagacctgctcctgggaagctctaggatgtgactttaagctggaaagactctcaggagctaggtttgatatggcacaatctcaaggcatcgctaagtctgaagttcttccagcaggtctgtaaaccacaaaggacaagcagctcagagattagcgaatgcgtctcagctgtcctagaaaagtgctgtcagcaagtctgaagagtttcccagaagccctgaaaggacgcaatagcatcatttagcagaaagaaacagccctggattaatgttcttttgggattcatcttctggctttgtgattttgggcaagttacttatcttcctccatttattcacatatataatgagaggagtagtacctaccttacaaacttttctgtgagaagcaaaaaaaataaaaataaaaaataaaagataaaattgttaaatatttgctatgtgtaaaatgcttattcctttaaagttttcatgtcagttaaaacatgttattggcttgaatcctgactcaagaacggaaatagtaattgtgtctgccattcagggtgacacagttatttccnctggttcanggtggtggggtgggagctactanatnnaacaggtggggcaattcttgatncattttngtgttttttgntactactatccaccaantctgntttcactcnnaagcanataaa

SEQ ID NO: 225694 - DNA, 719 bp, Homo sapiens
  misc_feature (599)..(599): n is a, c, g, or t
  misc_feature (608)..(608): n is a, c, g, or t
  misc_feature (631)..(631): n is a, c, g, or t
  misc_feature (634)..(635): n is a, c, g, or t
  misc_feature (658)..(658): n is a, c, g, or t
  misc_feature (665)..(665): n is a, c, g, or t
  misc_feature (676)..(676): n is a, c, g, or t
  misc_feature (693)..(693): n is a, c, g, or t
  misc_feature (698)..(698): n is a, c, g, or t
  misc_feature (707)..(708): n is a, c, g, or t
  misc_feature (714)..(714): n is a, c, g, or t
ttgaggtaggtggcaggagatgaaacaagtatattgaacgagtctgctcctgggaagctctaggatgtgactttaagctggaaagactctcaggagctaggtttgatatggcacaatctcaaggcatcgctaagtctgaagttcttccagcaggtctgtaaaccacaaaggacaagcagctcagagattagcgaatgcgtctcagctgtcctagaaaagtgctgtcagcaagtctgaagagtttcccagaagccctgaaaggacgcaatagcatcatttagcagaaagaaacagccctggattaatgttcttttgggattcatcttctggctttgtgattttgggcaagttacttatcttcctccatttattcacatatataatgagaggagtagtacctaccttacaaacttttctgtgagaagcaaaaaaaataaaaataaaaaataaaagataaaattgttaaatatttgctatgtgtaaaatgcttattcctttaaagttttcatgtcagttaaaacatgttattggcttgaatcctgactcaagaacggaaatagtaattgtgtctgccattcagggtgacacagttatttccnctggttcanggtggtggggtgggagctactanatnnaacaggtggggcaattcttgatncattttngtgttttttgntactactatccaccaantctgntttcactcnnaagcanataaa

SEQ ID NO: 225695 - DNA, 1033 bp, Homo sapiens
acaaaacctgtatcaaattagcacgcatgttagttttgaattaaaaagaaactttttaaacctggcttaagtatgcttgttaacaattggacgatatacagtattaatgaattgccctggatttactagttcccctttacccacccgcctccaccaaaaaaaaaccctcagagatcaatacaaggccaagtgaatgatatgtaggtgcccaaatatggttgattctgctgcatttaaaaaaaaagaggagtgggagttaaacttctaatttttttcttcttaagttccaacatcaacagccttttcttatttagcctccatgataattttattctatgtttgtttcgacttggcgaaggtctcctgaatttgccaaattaccaatgaggatagtattggaaagatgagagaggcacaggcttggagcactgtgaggggaacagcagtaggaggcagataattcagaatacattcctgtagttataaaagaagatttatttattttcacctttttacagatccagacccaacaatgagttattcagtttgaaacccacgtagtggaggcagtctctgtatacctgctgaatgttgagttacaatagagaagcctgggttaccacagggagaggaggatgaggaagtaaaaatatgtgttcaaagagggcatttcaacactgtgagctaactttacaacgggaagtgaaaatcatgaaaaaaaggggaaaatttgttgtgagagactaaaaagagcaaaataaagcaagcccatttttcgggaatagaaaaaaaaaaaaaacagtagcaataaccaaataactgatcagggagatttatttccgtgatatctttttaaaacaaaaagggaattgtcgtatcactgctcttaattaaatggcaacaaacacacttataatgggaactaaatagctaattagagggtgcttggggaataaatagcagagttttaaaatctcctatatggaaaacatgtccaacaattggaatgaaaggattaaaaagagagaaaagg

SEQ ID NO: 225696 - DNA, 444 bp, Homo sapiens
  misc_feature (9)..(9): n is a, c, g, or t
  misc_feature (11)..(11): n is a, c, g, or t
  misc_feature (16)..(16): n is a, c, g, or t
ccttccaananctcanttctccctgggttaccacagggagaggaggatgaggaagtaaaaatatgtgttcaaagagggcatttcaacactgtgagctaactttacaacgggaagtgaaaatcatgaaaaaaaggggaaaatttgttgtgagagactaaaaagagcaaaataaagcaagcccatttttcgggaatagaaaaaaaaaaaaaacagtagcaataaccaaataactgatcagggagatttatttccgtgatatctttttaaaacaaaaagggaattgtcgtatcactgctcttaattaaatggcaacaaacacacttataatgggaactaaatagctaattagagggtgcttggggaataaatagcagagttttaaaatctcctatatggaaaacatgtccaacaattggaatgaaaggattaaaaagagagaaaagg

SEQ ID NO: 225697 - DNA, 438 bp, Homo sapiens
ttaacggtggttaaaatggtgaattttatgtgatgtctattggactagtccgttctcacactgctataaagaaatacctgaaactgggtaatctataacgaaaagaggtttaattggctcacagttccgcaggctgtacaggaagcatggctggagaggcctcaggaaacttttaattatggtggaagaggaagcaggtatgtcttacatgcctggagcaggaggatgagagagaacagggaggcgctacacacttttaaacaactggatgtggtgagaactcactcctatgacgagaccagcgagggggaactccgccccctcccaccaggcccctcttccaacattggggattacaatttgacatgagatttgttcagggacacagacccaaaccatactgtgtatttcaaaaagtaagtttacaatgttctgaaa

SEQ ID NO: 225698 - DNA, 475 bp, Homo sapiens
tttgagagtcaaactataaattacttcccaaggttagttctacctatgcccaggaatgaacaaggacagcttaaaggttagaagcaagatggagtcatttgggtctgatctctttcactgtcataatttcctcagttacaatttttgtaaaggtggtttcaaatgctttgctgacctcccataaacaaggatgtgccaattgtaacttcagttctgcaattcaagtctgctcccaaaactaaagtccattgaattgcatactgattgataatgttcattacgagtttatcttcccatgtgcagagcaaagacaagaggagatcagccattcctccacctacccagagacgttgcattggaaaggagccgtatcttctagtatggttttgcaaatgtaaaatgtaaaatctatgcacgctcacaggaagggagaaagaaaaaaaataaaagaggaagggtaagaaaaaaagtaaaa

SEQ ID NO: 225699 - DNA, 434 bp, Homo sapiens
aatagggtcattgactccagaaattttagctaattcattggataaagcggtaagtctttgcaaggcctttgttatgctctcactgggggcagtgttgtttggaatgaaggtacaacactgggttttaatcataacacaaactccagcctgggtgacagagtgagactccgtctcaaaaaaaaaaaaaaaaagaaactcagagaaatttactgtatgttacaattcctcccttttaattttcttatgattttttctctttaaacttttttaacgtgttttggctttgctgtttgatttgatcttttaaaaggaaaagcttacttgaataaggtggaggagaactaagggaggtttcagtaaatgctgttcgtacaatcctttgtattagcctacggatgcatggtatgacacaacgcctaacaagaataagtaca

SEQ ID NO: 225700 - DNA, 508 bp, Homo sapiens
ccagagatgggaagggaggcaatattgaacgtgtgctaggataaggctttcatataaaaagtgttcagatattaagatatgtgaaatatttggggcccttcattagatagctatttcaatcagtgatgcttttaagttccaaattgtctggtaattatgtaaagatgctccagtgaaacaccatttttggcttagggaaatatttatatacttaccagatagtaagtatataattatgaatatgatagtaagtatatgaattttgaaaatatgcaatgttattacatagctaccatataaaatacaatatatgagggcagatttacatatcccatgtagaaatgtgggtatttatatataggaaaaggaaaataaacaagcattactgaagtatttatgagtttatggcatttaactcatctcaaacatttatgcagtgttttttctatactaatttaatgtttatatatgaatgcataaaaataaataacatggaaaaattaaaaaa

SEQ ID NO: 225701 - DNA, 500 bp, Homo sapiens
cttgaacctgggaggcagaggttgcagttagctgagatcgcaccattgcaccccagcctgggtgacagagcaagactccgtctcaaaaaaaaaaaaaaaaaaaaataggaaaagttatctctgtgctccagaattctctgaaacctgcttgtcagatggactagaggctttcgtagaaaagtcagttgctttttgttttctgaaaatcattttgtcccggggaaaaaaaaagcctcactgcagataatcattctctatgttaggtgttaaaatcctttacacaggagttgcatagagcccctactgcctagaatggttcttctgaaaagctgctatttgcgctgtgtgggtggttactcattgaggggcagagctgctctcggtgagcggtgggtctctttgccctgggtgtgtggctgtgtggttgtgtctaggaagtgtgaatctccagtgtagtgctgtggaagagaggggcagggaaatatgaactcaagaggcgg

SEQ ID NO: 225702 - DNA, 472 bp, Homo sapiens
actgatggccatcagtacctcgtaagacagcagggttctactaaaagccaacacccaaatcaacgggtggactgtaggaagatgccccatttgacagcagtagaagtcacaggtctgcaggagctccaccaagtccatcctgcaggcatattatgtttggcctgcccagtaatttatttttaatctgaactaatatttttattttttttaattatatattaagttctgggatacatgtgcaggacgtgcaggtttgttacatcagtaaacatgtgtcatggtggtttgctgcacccatcaacccatcacctaggtactaagccccacatgcattagctatttatcctgatgctctccctcccgcaccttcctggcaaggccccagtgcttcttgttctcctccctgtgtccatgtcgaactaacatttttaaattgggagatttcacataaaagtccaaaattccaacttct

SEQ ID NO: 225703 - DNA, 727 bp, Homo sapiens
ttccttgaacagcctagctaccagctttctctaaatcacccctacattcacctgatgtaataatcttcacaatcttcatcagtacctgagatcgtgaaagtcagctgtcccatctttcctcccctagaatgctgttagctccatgggcacagggactcttcttctgttccctgaatacaacatctggagcagtagctggtatatccttggcattcaataaatgggatgaatacaaccttaggtaccttaggtagatattattcatgcatcccaatatttttcttcgccaaaaaagtagcaaacgaactactcatatttgtaggacattctataattacaaaatccttcacatatacttttattcaaatatctcagcaattggggggtaagtatcttcattctagaaaataaaaatctgaggcccagacattccctgacatgggtagggcttccagcccagtgcccttcccactgtgcagcattcttcccaccacaattgggagccctcctcctccatctagccacaccctggccatccaccaggagctgcccctcctcctttcacttcccaggcacacaaggactttgacgcctgtgctcacattttcctgccaccttgcccccaaccccataaacactgtcaattaccaagctccagctccaggcctacctacgattttgccttcaagaaccctaactcaagtttcatcatctccaagggcaagta

SEQ ID NO: 225704 - DNA, 440 bp, Homo sapiens
acataccctttgtcatcagtcagtatttattgagcacgtgctgcgtaccctgggctgaacagcatacagggtggtgtaaggaaggacccgtgtctttaataaaataggggtctctctccacctaagtccccttgggttagatggcttttctgcaggctgcactgacgcagggatgtgtgagtgacactcaaggacaagagcaattctcagctccttaattccagtcctccctcctccctgtcctctggggcctgcccaccccaccccaccccagggcccacggggaccagagaggaacttagtacccttggagtccagctatgaagtagaaactggaatgcagtggtttcacttcatcttccaaaagtagcataagttcttgtttctaaaatttaaagtaataaacagttgaagaacatttttaaaatgaaactattaaa

SEQ ID NO: 225705 - DNA, 532 bp, Homo sapiens
tttctctaataatttaaaatttactggaaagaacattagatttgtgccactttgtttcctacttaacccatttattctttgttcttttttcctctttttctgcctgctttgaggcagtttgagtattttttatgattctgtcttatctccacaattgacttattgagtatatctcacttaaaaaaaagtagtagtttccttagggtttaagatacacatctttatcacagtctaaagagctttagaataaagttttcagaaagagctttagaataaagtaaatgcaggtacctaactgacacatagttttaacaaaatatatcttgtttgtgtagtataaattaagatattttgtatattattgacatttatgataactaaataaatttcttatattatccctacttttttttaatgcaaagactgccaagcatgttgtattccttaacccaaatatgtcaagttcttatagtggacaaatgtgaatttcggatctccccattaacaagacatttataagaagactgttttc

SEQ ID NO: 225706 - DNA, 388 bp, Homo sapiens
gctgccagagtagtgtaagcctaaaggaatctaaatccagcccatagaggcaagcctcacccttgggctctcagttcctctctctgctctacagaaatcaaagtcggccgggcacagtggttcatgcctgtaatcccaacactttaggaggccgaggtgggcggatcacctgaggtcgggagttcaagaccagcatgaccaacatggagaaaccccgtctctactaaaaatacaaaattagctgggcgtggtggcacgtgcctgtaatcccagctacccgggaggctgaggcaggagaatcccttgaacccaggaggcagaggttgtggtgagccgagatcatgccattacactccaccctgggcaaaaggagcaaaacttcgcctca

SEQ ID NO: 225707 - DNA, 685 bp, Homo sapiens
ggcactggtcccattaggaattggcattgccacaggagaacgagtgccacaatagagtgatatttaagcaactcctacaggcgaaggccctgcagttcctccagattgacagttgcagactgggcagtgtcaatgagaacctctcagtattgctgatggccaaaaagtttgaaattcctgtttgcccccatgctggtggagttggcctctgtgaactggtgcagcacctgattatatttgactacatatcagtttctgcaagccttgaaaatagggtgtgtgagtatgttgaccacctgcatgagcatttcaagtatcccgtgatgatccagcgggcttcctacatgcctcccaaggatcccggctactcaacagaaatgaaggaggaatctgtaaagaaacaccagtatccagatggtgaagtttggaagaaactccttcctgctcaagaaaattaagtgctcagccccaacaacttttttctttctgaagtgaaagggcttaaaatttcttggaaatagttttacaaaaatggatttaaaaaatcctaccgatcaagatgagttcagcatatgcacgtcagttctccctcaggatcagctcaagcttgcagacttgtagctcgctatagaggactcacccagcataacttgactgtagcgtggcagctcctctgaatgcctaa

SEQ ID NO: 225708 - DNA, 737 bp, Homo sapiens
ggcactggtcccattaggaattggcattgccacaggagaacgagtgccacaatagagtgatatttaagcaactcctacaggcgaaggccctgcagttcctccagattgacagttgcagactgggcagtgtcaatgagaacctctcagtattgctgatggccaaaaagtttgaaattcctgtttgcccccatgctggtggagttggcctctgtgaactggtgcagcacctgattatatttgactacatatcagtttctgcaagccttgaaaatagggtgtgtgagtatgttgaccacctgcatgagcatttcaagtatcccgtgatgatccagcgggcttcctacatgcctcccaaggatcccggctactcaacagaaatgaaggaggaatctgtaaagaaacaccagtatccagatggtgaagtttggaagaaactccttcctgctcaagaaaattaagtgctcagccccaacaacttttttctttctgaagtgaaagggcttaaaatttcttggaaatagttttacaaaaatggatttaaaaaatcctaccgatcaagatgagttcagctagaagtcataccaccctcaggaatcagctaaagcaaaaagaacttttacctcggcatccagcccaaccctaaagactgacaatatccttcaagctcctttgaaagcaccctaaacagccatttccattttaatagttggatgcggattgtacccttcaatctgaac

SEQ ID NO: 225709 - DNA, 618 bp, Homo sapiens
ggcactggtcccattaggaattggcattgccacaggagaacgagtgccacaatagagtgatatttaagcaactcctacaggcgaaggccctgcagttcctccagattgacagttgcagactgggcagtgtcaatgagaacctctcagtattgctgatggccaaaaagtttgaaattcctgtttgcccccatgctggtggagttggcctctgtgaactggtgcagcacctgattatatttgactacatatcagtttctgcaagccttgaaaatagggtgtgtgagtatgttgaccacctgcatgagcatttcaagtatcccgtgatgatccagcgggcttcctacatgcctcccaaggatcccggctactcaacagaaatgaaggaggaatctgtaaagaaacaccagtatccagatggtgaagtttggaagaaactccttcctgctcaagaaaattaagtgctcagccccaacaacttttttctttctgaagtgaaagggcttaaaatttcttggaaatagttttacaaaaatggatttaaaaaatcctaccgatcaagatgagttcagctagaagtcataccacccccgaaaccagacgagctgctagacagcctat

SEQ ID NO: 225710 - DNA, 270 bp, Homo sapiens
tcctgtcacacacaaacatgtatgatctcatggcaagttttagagacaggacaggtatagtcataaccactggacacatgagggaactgagtctctaagtgtcgaatgaacttttccaagttacacagctagtaagcaaagtgggggattgaacttcaggtgttacggtttggtggtggtcattgtggcctttgcagtgtgtattttgactgcaccacatgatatcaggaggtggcatagctaagaagttacaactgcaggaatctggag

SEQ ID NO: 225711 - DNA, 403 bp, Homo sapiens
cttaataatgctcaggcagtggtggggggctggcatcacccctcaggctcctgtggcttaagcggggcctctgcctggtgaggtcaggtaacacgggtgttggtgatcatgcgggcagcacagagccggagctcctgctgttctgcctcggctgcacgttttcggacacgagagttatgttctaatagaccgatcagcttggggcaaggcagagacactccaaggaagtaaaaattcccaaagctccttccttcagctcatccctgcagacctcctatacagaacgagaggtgccacttgtctttccgtgagacaggttgtattagtccattctcacattgctacaaagaactacgtgacactgtgctccagcctgggcgacagagggagacgttgtctcaaa

SEQ ID NO: 225712 - DNA, 454 bp, Homo sapiens
agagagcatgtatagggaaactctcatttttaaaaccatcagatcttttgagacatattcagtatcacgagaacagcacaagacagacccacccccatgattcagttacctcctacgtggttctttccataatatgtgaaaattgtgggagttacaattcaagatgagatttgggtggggacacggccaaagcgtatcacttactgttttattaaaacttaaatttttggctcaagttgcacctttatttacaagactcatctattgaaaagaaaacatggataaatacaaatttgtgtcaagctgtgtaataacatcatgatgctaaactactgctaacatataacacatactatccctaagcactggaatgggacttgtgtgcaattcttagccgtagagtgtacaaccatgagttaaatgaaatatattttacttggatttataggccata

SEQ ID NO: 225713 - DNA, 309 bp, Homo sapiens
ttaaaacaaatgaaaatagagacacaatataccaaagcctctgggatacagcaaagggaatgtttataccactaagtgcctacatcaagaaaacagaaaaatctcaagttaacaactaattgttggacctaaaggaactagaaaaaacagaacacactaaacccagagctagcagaagagaagaaataactaaaatcagaggagaactaaatgaaattgagaccaaaaaaaaaaaagagtcagtgaaacaaaaagttggttctttgaaaggataaacaagattgatagactactcgctagattaacaaa

SEQ ID NO: 225714 - DNA, 2479 bp, Homo sapiens
ggggactcgtcccagagtttgctgccgccgccgccgctgccattagagcggttttaattagctgcaggatttttaatgagctgaaatcaagaagagccccatctcagaagtaagcgagagccgcgcgcagggaagaactagtctgacaaaacagaaggaggtggtgctctcgggggactgggctgtaggctcccaccgatcgatcggcgacgagcagatgagttcccgaggccaggaggctgaggagggaagccagggctcagagaccagcgcccggtgcagagtccccgctgctgccaccgcggcagaaggcacggtgccggattcaaggtgacggcagtgcctggctccattctcctcaagttgccatagcagcctctctcccaacaagcagcttctccgggagccctcagccgggagggacgtcattgttctctcctgcccgtgtggtgcaaggagacccaccggacagagaactttcccgagcccggggtccgctgaccacgtgggtgcacccatgctgcctggagccaggcacagggacaggtccccacggccacagggaatcctctgggcagctgaggggagcgtccaggcccagaagcagctgcagccaagcgtgtccttggagccgtccatgcgtctgtccgcctgctgccggtcgccactggagatctcggcctgatggacgcctggtgtggacgatgagggaagaacgtgccccccacacccaagaggtgacccctgagccagccccggatgaccctgcgacctggaacaatgcggctggcctgcatgttctcttccatcctgctgttcggagctgcaggcctcctcctcttcatcagcctgcaggaccctacggagctcgccccccagcaggtgccaggaataaagttcaacatcaggccaaggcagccccaccacgacctcccaccaggcggctcccaggatggtgacttgaaggaacccacagagagggtcactcgggacttatccagtggggccccgaggggccgcaacctgccagcgcctgaccagcctcaacccccgctgcagaggggaacccgtctgcggctccgccagcgccgtcgccgtctgctcatcaagaaaatgccagctgcggcgaccatcccggccaacagctcggacgcgcccttcatccggccgggacccgggacgctggatggccgctgggtcagcctgcaccggagccagcaggagcgcaagcgggtgatgcaggaggcctgcgccaagtaccgggcgagcagcagccgccgggccgtcacgccccgccacgtgtcccgtatcttcgtggaggaccgccaccgcgtgctctactgcgaggtgcccaaggccggctgctccaattggaagcgggtgctcatggtgctggccggcctggcctcgtccactgccgacatccagcacaacaccgtccactatggcagcgctctcaagcgcctggacaccttcgaccgccagggtatcttgcaccgtctcagcacctacaccaagatgctctttgtccgcgagcccttcgagaggctggtgtccgccttccgcgacaagtttgagcaccccaacagctactatcacccggtcttcggcaaggccatcctggcccggtaccgcgccaatgcctctcgggaggccctgcggaccggctctggggtgcgttttcccgagttcgtccagtacctgctggacgtgcaccggcccgtggggatggacattcactgggaccatgtcagccggctctgcagcccctgcctcatcgactacgatttcgtaggcaagttcgagagcatggaggacgatgccaacttcttcctgagcctcatccgcgcgccgcggaacctgaccttcccccggttcaaggaccggcactcgcaggaggcgcggaccacagcgaggatcgcccaccagtacttcgcccaactctcggccctgcaaaggcagcgcacctacgacttctactacatggattacctgatgttcaactattccaagccctttgcagatctgtactgaggggcgccgcagctggccggggccgccctgccccggtcactcacctgtgctcccgggcatcctcctgtccctggctcctcatcctgggagcaacagggctctgaggacgtgaggagccatcgctgtgggaggcagcaggccccgggtggggggcagaggcgcccagccttggatggggaccccagcccctggcctgtacctgtttcctcattccttggctgagggagaggctgagaactgggcagacacccctggagctcagccgacagttttgatgagcagggaagtctgaggcccagaggacggggggcccagcggtaagggatgtcccgcactcccttagccattgccttggaccaaaccacgtggtttgcagcttttctacgagccaggggggaggttcccttggattaaggttccaaataaagcacatggtttccagagc

SEQ ID NO: 225715 - DNA, 2141 bp, Homo sapiens
  misc_feature (3)..(3): n is a, c, g, or t
  misc_feature (6)..(9): n is a, c, g, or t
ggnacnnnnccggcgcgcaagccggatccggcagtgctgcggggaggagagaggacgaggcggcggcggcagcaggaggtgggggaccgatcgcgccgggggccgaagaggaacgccgccccgcgccctctcgctccccgcacgctccggctgccggccccacgctgctcgcccacagatcgcactgggttccgcttggagcgggcggaggcaccgggcccgagctgggtcggaggtcctctccgccgcctgcgcgccccaagcagaggatccgccgcggagaaccgctcccggactggaggcgcccgcggcctcgggtgcgtccgctgcgccagatctcggcctgatggacgcctggtgtggacgatgagggaagaacgtgccccccacacccaagaggtgacccctgagccagccccggatgaccctgcgacctggaacaatgcggctggcctgcatgttctcttccatcctgctgttcggagctgcaggcctcctcctcttcatcagcctgcaggaccctacggagctcgccccccagcaggtgccaggaataaagttcaacatcaggccaaggcagccccaccacgacctcccaccaggcggctcccaggatggtgacttgaaggaacccacagagagggtcactcgggacttatccagtggggccccgaggggccgcaacctgccagcgcctgaccagcctcaacccccgctgcagaggggaacccgtctgcggctccgccagcgccgtcgccgtctgctcatcaagaaaatgccagctgcggcgaccatcccggccaacagctcggacgcgcccttcatccggccgggacccgggacgctggatggccgctgggtcagcctgcaccggagccagcaggagcgcaagcgggtgatgcaggaggcctgcgccaagtaccgggcgagcagcagccgccgggccgtcacgccccgccacgtgtcccgtatcttcgtggaggaccgccaccgcgtgctctactgcgaggtgcccaaggccggctgctccaattggaagcgggtgctcatggtgctggccggcctggcctcgtccactgccgacatccagcacaacaccgtccactatggcagcgctctcaagcgcctggacaccttcgaccgccagggtatcttgcaccgtctcagcacctacaccaagatgctctttgtccgcgagcccttcgagaggctggtgtccgccttccgcgacaagtttgagcaccccaacagctactatcacccggtcttcggcaaggccatcctggcccggtaccgcgccaatgcctctcgggaggccctgcggaccggctctggggtgcgttttcccgagttcgtccagtacctgctggacgtgcaccggcccgtggggatggacattcactgggaccatgtcagccggctctgcagcccctgcctcatcgactacgatttcgtaggcaagttcgagagcatggaggacgatgccaacttcttcctgagcctcatccgcgcgccgcggaacctgaccttcccccggttcaaggaccggcactcgcaggaggcgcggaccacagcgaggatcgcccaccagtacttcgcccaactctcggccctgcaaaggcagcgcacctacgacttctactacatggattacctgatgttcaactattccaagccctttgcagatctgtactgaggggcgccgcagctggccggggccgccctgccccggtcactcacctgtgctcccgggcatcctcctgtccctggctcctcatcctgggagcaacagggctctgaggacgtgaggagccatcgctgtgggaggcagcaggccccgggtggggggcagaggcgcccagccttggatggggaccccagcccctggcctgtacctgtttcctcattccttggctgagggagaggctgagaactgggcagacacccctggagctcagccgacagttttgatgagcagggaagtctgaggcccagaggacggggggcccagcggtaagggatgtcccgcactcccttagccattgccttggaccaaaccacgtggtttgcagcttttctacgagccaggggggaggttcccttggattaaggttccaaataaagcacatggtttccagagc

SEQ ID NO: 225716 - DNA, 705 bp, Homo sapiens
  misc_feature (3)..(3): n is a, c, g, or t
  misc_feature (6)..(9): n is a, c, g, or t
ggnacnnnnccggcgcgcaagccggatccggcagtgctgcggggaggagagaggacgaggcggcggcggcagcaggaggtgggggaccgatcgcgccgggggccgaagaggaacgccgccccgcgccctctcgctccccgcacgctccggctgccggccccacgctgctcgcccacagatcgcactgggttccgcttggagcgggcggaggcaccgggcccgagctgggtcggaggtcctctccgccgcctgcgcgccccaagcagaggatccgccgcggagaaccgctcccggactggaggcgcccgcggcctcgggtgcgtccgctgcgccagatctcggcctgatggacgcctggtgtggacgatgagggaagaacgtgccccccacacccaagaggtgacccctgagccagccccggatgaccctgcgacctggaacaatgcggctggcctgcatgttctcttccatcctgctgttcggagctgcaggcctcctcctcttcatcagcctgcaggaccctacggagctcgccccccagcaggtgccaggacagagacctctgcggtgtcttcaattaatggaagaccaccagcctgtattgcagagggtggcgtgcttctgcagcccagaagattagaggaaatctgggaattcaagactttcacaggcatcgacctacagtccccaacgcatttctcaggg

SEQ ID NO: 225717 - DNA, 522 bp, Homo sapiens
aattatttagactttgctttccttccatgggttccaatgatccctgctcagccgtttctgtcatgacctcagctgtaaagtatgccatcgcttttggctggttgacatcagacttcaggattagcttcaagaaggggacctggctggaacatcgtgtgagccccatacagtgcagaatacctcccagttgctccactgtctctgggatttaatgcttcagaggagtcagagagtggcctggtttttgcatctctatgggaagtttgtttttttcctggcctagatatttgtaagattttctccactaagtatgtcaaaattttggcaaaacctgtctaagtatgactctcttttcaccagttctgctagaatgcagaagctggctagtttgctcatatagtctgtacatttccatataaaattgttgtagttcaaaaactgtagaataatggaaattttgtatggcccaatctacagtactaggtctgtcttgagcccgcttaagtttgtttcctagtaaaa

SEQ ID NO: 225718 - DNA, 250 bp, Homo sapiens
cttttttttttcaaatcagacactctgtgtgtccccaggaagggataaatcatgtgcttatatattggcatactcttcagtggatcatagttggatgtttaatcccaataaaacttctgttctatgaccttccttttgtttgttcttttgctgaccaactcacatccttttcaagataaaaccatgttttttaagataggttatatcattctatcgaagtacaaataaattttggttccctggaaaactc

SEQ ID NO: 225719 - DNA, 264 bp, Homo sapiens
ttatcatttttctcacactgttttgcgtatggctcctattgcactcaaaatgtttttgagattcatccatgttgttttgtgtgtcaaaagtttgttcctttagccattccatggaatgaatgtatcacattcttgtattgatagatatttgaatgtatattgatagatatttgaatacaagaatgtatccattcttgtattgatagatatttgaatgtttccagtttttcctattacgaataaaactgctatggacattcttgt

SEQ ID NO: 225720 - DNA, 218 bp, Homo sapiens
gagcatatgctaaactcctcagaatgtgtgtctggaagtggacaggggaatgggagtgggatgaacagagaaaagaaggaaagacagtaagggccttgctgagagcagccaccataatgtgccctgagctaaggtacatgattaccttcttcctgtgcacctgagatctaagagaatatattaacaaatcagggatatggaatttcaaaaacactatg

SEQ ID NO: 225721 - DNA, 129 bp, Homo sapiens
gtacacaccgtcagcagcagccagggtcaggagaaaggcgagatgtgaagagaggccgggaggtatcagatgacgtttccagcactagaccagaagaggtgcacacagcctagaccccctgaggggtac

SEQ ID NO: 225722 - DNA, 532 bp, Homo sapiens
gggggcttccaggtcagaggtagataagagacaaatggttgcattattttgcatttcttattagcccttccaaagtgggcaatcagatatgctcttatctcagtgagcacagggatgagtttgagttgtttgtcctttgtccacaaggaaactccttgtgagggaggtaagtagatagcttttttttcttagtagctatctttttttaggaatagaatgggaggcagttttgccctaagcagctcccagcttgacttttccctttgacttagtgattggggggttccaaaattcattttcctttcacaactcttacagtgtggtagtgcttgaagtttcataacagtcagagcagaatctcactgcttgcttcctgctggagagaggaatctctgtccttcagtggatgatgttttctgtggtcttgttcaggaatttacaaactagaggaagccttatctcaccaagggaaaaaaagacaaataattggcctctgagaattgcggcagggagcagggagtattagtggggg

SEQ ID NO: 225723 - DNA, 248 bp, Homo sapiens
ctgcctacaagcgtttgctgcatgacatactgttcatatagatgtaatgtttcatgacaaagcaaaatgtatcctgtataaatgatctatttaagtgtgaaatagaaaacacactctccttgtttgttttaacatttgctgatggtaccacttctcctttgcctctttctactgctttcctatgtgccttttcagctttgcagcagcagcagcaacagcaacagcatctaataaaaataataacaaca

SEQ ID NO: 225724 - DNA, 403 bp, Homo sapiens
cctctgctcacccgcccatctttaggaagccagtcttagaaagacagtggctggccagaggcctccctccccaacactcctttcccccaacactcctttttcaaacttctgtggttatggaagtcaggatttgaaaagagatttagcaatgtttttctcattctgtagtggttttctttttccggttgaagaggctatcctcttggccttcatgaagtaggttttaccacagcgttgaaagtgaagtattaaaatataagctgataagagcaaggaagtttaccagaaatggtaggaaatagaagagagccttggagaagcattttcttacctgactttagttcatctctgtttatctaagaaatttcaaatattccagtctaagagatttgaaattctgtca

SEQ ID NO: 225725 - DNA, 564 bp, Homo sapiens
actgacattgttgtgaaccaactgaagccaatttgatctatcataaccagctttattttagtagaaaatgaaggtctctaatagagatagatgagagctatagatgataccccaaatttagctaccaagtttatattacaatggaagaaactttctgctctaccagacctattgtaaagttacagtagttaacatagtgcagtattagcacaaggatagacagactcttgaaacaaatagaaaacccagaaacagatccatgtgtatttggatgggcactgtgatactgacaaaggcagccttgcagatcattcctcaataaatgggtatccacatgggaaaaaaacaaaaaagataacttatccctgcctcacaccacacatgaaatcatttccaagaaaattaaagacataaatgtaagaggcaatattacaaaatgttttaggagataacattaggaaaatatatttataatctctaggtataggatttctaaagatacaaaaaggataccaagcacaaaaagattggtttatttgaatacattaaatttaagaacttctg

SEQ ID NO: 225726 - DNA, 725 bp, Homo sapiens
tcaactattgcagtggttgtctatgacattacaaacatcaattcttttaaggagacagataagtgggtagaacacgtgcgagcagaaagaggtgacgatgttgtcatcatgttgttgggtaacaagattgatttggataacaaaagacaagtcactgcagaacagggtgaagaaaaatccagaaacctcaatgtgatgtttattgagaccagtgccaaaaccggttacaacgtgaaaaagctgttccggcgtgtggcttctgcccttctttccacaaggacttcacctccaccaaaagaggggacggttgaaatcgaactggaatccttcgaggagtcaggcaacagaagctattgttgacagcttaggctttctctgcctcatttgatggatttcttacatttgggcttgccataccagttctcctccccacctcgttttatgatacatggccacttactctcttccaattcctaggcttggggtaaaaacagaacccctgaaagtgctatcattttttcctgaccgcatctcacagctactgggtggaagcttcttgcagcacctgggaattctaccttaccttctccgacagctaaaagacatctgtagagaatacagttctacagcagctgacatacttcaaaggccaatacaattcattctccactgtttgttgttgtttacctacaccctcaataaatggttctttaacctaaggctgt

SEQ ID NO: 225727 - DNA, 463 bp, Homo sapiens
agttaagaaatctgttgtgctttgagggaaattatagcaaaagcatttcttagaagttcttagacgatgtggttttgtttctgcttgatttcacactaaccttggtgatgcaaacagaaaaatacaatatttgtattgtctcgtgtgtcctttttctgaaaattgtcctttggtttaaatcatgcttctcttcaacttgaatcagcattgttttaggcaaatcatgtgtgggatagatgatgaaggaacaacggtgtgacagaatatatgtaaacatttcatttagttcgactttgtgtcacttctccacggcttcatgttttgccgccttatcttaggaatatatagcgcagtctgcatgaaaagagctttgtgtgagaattcctggccagttgaagggtcagggcctgtgcgttatctgactgccagcaagatcactggtgtgtcctcttatttttaactt

SEQ ID NO: 225728 - DNA, 848 bp, Homo sapiens
atgacttctgaatccctgcttctagcccctccaccagttaactaaatggtgtcaacctgaacctggccaaagcccacctgacggccttcagccctgcggttctgtggggaagcggcctcacgtccaccctggttccctccctgacttctccctcctctggacctcatccttcagccagtcctggcagcccccggacccaccacctgagcactcctccccacccctactgccaccagcccttcccggctgccacgccctggcccccagctcttatatccctgtggccattcgtgccctcgaacccccatctccataccacggtcaactaaaaatgcagagcataccaggccactccccaacctagaagcttctttctcagcagccctttggacgtggattctccccaggccccccgtcattgcactgggctcccagccccctccctgagttcacctccatggtcctgccccactctcttctcttggttctttgaggcatcaggtgtttgccaccactggacttctgtcatcgctgcctccaactcttcccccatctttccggagctcccccacccccatccccttcgaatctcagcttggctgtttcctccttggagagatcactcccaggaccccctctgcaggggtgccacatcacctgttctgaattcttaagagcacccctgctctcagaactccttatttatttgacttgtttgtatccctgaactagaatgtaagctccatgagggcaaggccttcctctgtctcgtttccctgctgtatccccagtgcctggaatagtgcttggtgtgtagcaggcactcaataaactgtggaaagaataaa

SEQ ID NO: 225729 - DNA, 838 bp, Homo sapiens
atgacttctgaatccctgcttctagcccctccaccagttaactaaatggtgtcaacctgaacctggccaaagcccacctgacggccttcagccctgcggttctgtggggaagcggcctcacgtccaccctggttccctccctgacttctccctcctctggacctcatccttcagccagtcctggcagcccccggacccaccacctgagcactcctccccacccctactgccaccagcccttcccggctgccacgccctggcccccagctcttatatccctgtggccattcgtgccctcgaacccccatctccataccacggtcaactaaaaatgcagagcataccaggccactccccaacctagaagcttctttctcagcagccctttggacgtggattctccccaggccccccgtcattgcactgggctcccagccccctccctgagttcacctccatggtcctgccccactctcttctcttggttctttgaggcatcaggtgtttgccaccactggacttctgtcatcgctgcctccaactcttcccccatctttccggagctcccccacccccatccccttcgaatctcagcttggctgtttcctccttggagagatcactcccaggaccccctctgcaggggtgccacatcacctgttctgaattcttaagagcacccctgctctcagaactccttatttatttgacttgtttgtatccctgaactagaatgtaagctccatgagggcaaggccttcctctgtctcgtttccctgctgtatccccagtgcctggaatagtgcttggtgtgtagggtgtatacggggtcctctaa

SEQ ID NO: 225730 - DNA, 698 bp, Homo sapiens
ccagttgtacatttaagcatataacaacatgcttaattattagatgcttacaagctttgcttggcataggtgtaccatgtattattctatgtctttccttcccactgtcctatgatagccattaccttctgaaatctcagtaaatgatgcactaccctattagcattctctcttctgttagccctccttatgagagttattctttccctcatcccactcctaaaaattcatttggcctttgtggagtatttagatcaagtcattattaaactattccccactagaattattaatagttgataaaatatggaaaatatattattcatatgtgagtgaaagaacacttaaagcataaaaaagaactacatggccatatattgcatggcaataactatattagcagcaataataattgtaatagtaataataataatggctaacactttagaagcttctgtgttaggcatttccgggtgcttttcatggtacagaagctcatttgttcctcatactaaccctcttcactactctgccactgcctctcaagccatggatatgtgcactttagagtttttacttaaagtaaaaattcctgtagaatagatggtgttgaccccatcagaccgtgatgcagttagaagtgcatcccgtcttttacgatggccatacaacatcacacaaatcaaggtaaacccttg

SEQ ID NO: 225731 - DNA, 820 bp, Homo sapiens
gggagacttgctgaggataagggtcaggagcccaagagccaggtggaaaggtaggggatcctggcttgggttcagcaggatgggagaagccaaaggcctgcctgacttcatcgggtgactcccggaaggttgctgcccctggtgctccttctccactgagcaaagcaaaagaaatgattttaaaagggaatgcaaagaattccgtggcatcttcttcctcaatgatgtctaaaactggggagagagagtgcagtctgagatgtcggagaaacgctggcaggggatggtgggaaaatccacacttaacctagaataatttcaaaacactttttaaattctctatttcttatcaccctctattaactcaactctgtgaaacaaggtggggcataggaaatggaaaaaccgggctatggaacccgttatggttcctccacaacagaggtaggtcagagcagcatgggaaggaagagaggccattcctgtctttctcacccttccgcagtgaggaggggcgggagcctgtggctgacccattcctggggtctgtgttacttgtagggccttggcaaccttcctcaactctcgcaggggcttaagggcattttatgtggttttaaaatatttttttatttgaccccttttaaataggaagctatatcacaaacataaaacaataccccaatttttttaaaaaagtcaagggatagatgaaaagtgaattaatcaaaaaagagacgttcactgattaaagaattaataaatggtacattcatgaatacttaaaactgaacctgtttaaaaaataataaatttgatc

SEQ ID NO: 225732 - DNA, 502 bp, Homo sapiens
gtaccatgttgtttttgtaagaaaggaatgttgagtcatatcgacatgtattattgtcaaaaagattatgtttttagatagagctaagcttttgatgccaagccattgattacactgattaactttggtatttgaaaaatattaggaagtagtaattatgattaacattctaaaagcagtgtcccacctcaattttaaatttatctgattattgataatttttctgtattggaaaatagtttccatggaattgttattttctatggatgtatcaaagcaacatttgacatatttttttaagtctttaggtttatcagaatgtaggttgccaggtataacttacacaaacaagttgagtatagagagttactgatggaagccagtgttggacttaatcagtttctctgcatccttcctctccccacaatccttgcacagcactaatgcttcatcctgcttaccatcaggaggcagccactcagtaggtaatagtgaaggtact

SEQ ID NO: 225733 - DNA, 411 bp, Homo sapiens
tactcgctctgatttagggcaagataacattctgtactaaaaactcaagtggaaacctacacactgaacttcagatttccagccacaattctctcccactcccaccatgccatgtatctgctcagatcccgttacactggcagccaggcatatactcccaggcaggagctaagacaatgcatcattactggcaaagtaaccagccccctcctccccgattctgtagatactggtatttggagttctcctgcgaaaaggccagggacatctagcaccacccagcgagacctactcattgacaggttccacccaggtaggcagaatttccaatgagcttttagtgcttggaacttaaatatgaataaacaaaatcatcagaaatttgagggaagctttttagcatggaaaaca

SEQ ID NO: 225734 - DNA, 543 bp, Homo sapiens
  misc_feature (508)..(508): n is a, c, g, or t
gaggactgagcccaggagtaaatccaagaccagcctgagcaacataatgtgaccctgtctctgcaaaaaataatttttaaaaatttagccaggcatggtggtgcatgtctgtagtcccagctacttgggaggctgaggtgggaggatgtttgagcctgggaagatgaggcttcagggagctgtgatcaccaactgcattccagcctgggcaacaaagtgagtccctgtctcaaacaagcaaacaaaattcaacacaaagttcagatcccgttacactggcagccaggcatatactcccaggcaggagctaagacaatgcatcattactggcaaagtaaccagccccctcctccccgattctgtagatactggtatttggagttctcctgcgaaaaggccagggacatctagcaccacccagcgagacctactcattgacaggttccacccaggtaggcagaatttccaatgagcttttagtgcttggaacttaaatatgaataaacanaatcatcagaaatttgagggaagcttttagcatgg

SEQ ID NO: 225735 - DNA, 904 bp, Homo sapiens
ccggggggagagtgtggaaagactgagtgcaggcagttcatggcaagtgtgctgctcttggtcgtgagccgctgcctgccctggtagccgtggtgtaaggtaagggacgtgaggccccaggagtacctgacctggctccctgcgcttcttcctgaccgagccttgcccttccctggtggccaaggagcttgtagccaatcagccaaggaccccagagccacctcagactgaactctgaccacttggagtctgcccaaggcctccctctcacttttctgcagctgcctagacttggtggcattcacccccaccccgccccttagctttgctctgccccttccctgggtagactttacccaccaataacatgggcggttttctcctgtcgtgtgggctagcatacccgtgatgctgacttgtgccctctacccgtctcacccgggctagggcccactctttgcacctgcactctgtctctgagcacatgcacagatctgaattcttacactggcagatggagctccgtgggctcctgtgttaccacgcaggcttcaatgtcatataaaacagagcagggagtgaaacttccagtagctctgttttgtcacccacagccctgcaagatggagcagtttacacccagctctgcaggatgtagcctccagtattcacaggctccgcagggggagggaggggcgccaccagaggcttcctgttgctgcccacagggtatcaagtgttgggttcttctgacctgtggctgtgccccttctgaagggcacaggtttgtgggtatagggatgagcacattcgggaggaagaacaagaaaccagagaaccaacagatacctttatgtaattctctaaaataagcagggtaggtggtattcttccttttgtaaaa

SEQ ID NO: 225736 - DNA, 544 bp, Homo sapiens
acatattttccagaacacatccctgtcattaagcaatgcatgactgtattttgaagggtttactaactgattaaatgtgggctaggaaaggaagagacgaagattatttcatttctgccttggtaactgaaagaatagggttattgtgaactgaaatgtaggtgactatagaaaagcagatttgagggggaaatttgaggaactcagttttggagtgttaagtttcaagatgccttttagacatccaagtagatatgtatagtaagcagttggttatgtcttgaggtcggggcagagatctggactagacatataaatttgagagccatcgacaaaaagaagatatttaaagacataagatcgaaggtcttacttagaaaatagttcacataaaaaggaggtttggagactgagtccaaggcaccccaatattaagaagttagcaaattaagagaaacctacaaaggagtcttagaagaagtggccaaagaggtgggggaaaaccatggtttgtattagtgatcttgaaaaagtagtattaatg

SEQ ID NO: 225737 - DNA, 448 bp, Homo sapiens
ggaatgctcaaacctgtaataataatcacaataatgaatatagtttcttctaagttaagtgctaaaattcggtgcaaaagaaaggtgtaaaaccatctgtaaactacctaagaatactgaatgaatgcataagttttgcagaaaatacatgaactaaaaggacagatttgggcactgcagtgtatacttgtagtccccactacccaggaggcggctgaggcaggaggattgcttgagcctaggaatgtgaggctgcagtgagctacagttacgtctgtgaacagctactacattccctcctaggcaatgtagtgaaatgccacttctaaagaaaaataaataaattaaacaataacaagttaaattatagcaccataaaagaaaattcaaatatcagttaaaatgctgtcacccatgttaaagttagacttgaggtcttaatagtaaa

SEQ ID NO: 225738 - DNA, 535 bp, Homo sapiens
ctccagctttgtgctttttgctcagtattgctttgactatttgggaggcttttgtgtttccttatgaattttaggatgaattttccatatgaatttttctgtttctgtgaagaatatcattggtattttgcatggaattgcattgaatctttatttatttatttatttatttgagacagagtctcgctgtgtcgcccaggctggagtgcagtggcacagtctcggctcactgcaacctccgcctcccgagttctagtgattctcctgcctgagcctccagagtagctgggattatagtcatgtgccaccacactcggttaattttaattaattaattaatttttttgagatggagtttcactcttattgcccaggctggagtgcaatggcgtgacctgggctcactgcaacctccacctctcgggttcaagcgattctcctgcctcagcttcccaagtagctgtgactacaggcatgagccatcacgcccagcaaattttgtatttttagtagagacggggtttctccatgttgg

SEQ ID NO: 225739 - DNA, 429 bp, Homo sapiens
aatttctattaagcacccagtctgtgccactttgttatggcagccctagcaaactaatactcatgcccagtatatgctgggcaatattctgaatgcagtgtgtgccaggactgataaaaactctccttcacaaaattctatagaaatggaaatgacttaggatttctagttcttttccatttggaggggaacccttcttgctagtgtaacctgccatccatcatgccagagctgtgcaaaccccgacagctctccaagccactgggaaggctgcctgtagggggagcagggactggcctgagggttgggggcccagctttctctgcggtgccaacatgacatcacttctcctcctgatggctttcgcctctgaacagctggactcccagaaggcacagcaagaggaataaacaagaaagctgactctac

SEQ ID NO: 225740 - DNA, 387 bp, Homo sapiens
ccaaaaatgcttcaatcagcatctttatgcatacatatatatctgtgtacatgttcaagtatttctgtagggtaaatatctggaagtggaataactgatttaaaggggtatacacaatttaaaatgtaatacatactgctaatttgtcctccaaaaatactatcaatctacattccccaccaactgtatgggagagttacctgtttcctcaccttttcaacactgcatatgttcacattttttaatttgggggagggtgggcgtgatggctcaggcctgcgatccccttacaatttgagaggccaaagcaagaggatctcttcaggccaggagttcgagaccagcctgggcaacaaacgagactcctcccaacacccatctctgtca

SEQ ID NO: 225741 - DNA, 453 bp, Homo sapiens
agtctgctgtaactttctttcatatataagtccacttcgagacacagcaaagcagctaccagtacctttgggtatatgtagtgtactttctgcttacttgctttcaaatatttgaattagaagggcttcccgactgagtgcagtggctcacacctgtaatcccagcactttgggaggctgaggcgggaggatcacttgagcccaggagttggagaccagcctgggcaacacagtgagaccctatctctacaaataattttaaacttacccaggcatggtggcatacacctgtaatcccagctgcttggaaggctaagatgggaggatcgcttgagtctgggaggtcaaggctgcagtgagctatgattgtgccactgcactccagcctgggtgacagagtgagaccctgtctccaaataaataagtaaataaataaataaaattttaaaaaga

SEQ ID NO: 225742 - DNA, 414 bp, Homo sapiens
caagaatgatataaggcaaggattgaattgtagctgctaccgaatgataactttaaaataaatccgtgcagaattctaaaaagagcagatgttgatgccacttcaaaaagaggcaacttcgattatatcagcagctgtttctctatgcctcagttattcagaaacaattctgtttcggtttctatgtcctatgattttgaagagaaggctgttgttactacattcctatcaaagcccgtatcacacaggttttccatttctttggctgtattctggattagaaactggtgctctggcatacaaatgtgcccaaagttgagctctctgtttcaacactttgggagtttgcttgcactggtttgctactacatgtttagcttttaataaattggcaaactattttccaaagtgctt

SEQ ID NO: 225743 - DNA, 395 bp, Homo sapiens
caggagaaactcttgagaacaaagattgtatcgctaacacttaaaagtacaagcaacaaaaacagacaaatgggattatattaaactaaataccttctgcgtatcagagagaacaatcaacagagtgaaaagacaacacccctcccttacaccatacacaaaaattaactcaagatgggctacagacttaaatgtgaaacccataactataaaaacgctgaagacaacctaggcaataccatccggtacgtagtgagtgggcaaagagttcatggtgaagatgccaaacgcaattgccacaaaagcaaaaattgacaaatgggatctaattaaatgaaagagcttctgcacaacaaaagaaactatcaaaaaataaacagacatttctcaaaaga

SEQ ID NO: 225744 - DNA, 845 bp, Homo sapiens
gcttagggaaggatggtaaacttctgttgcaagtcccaagcctctcggggcctacaggcaaaccctgactgcccatgaagcagccgcaggtgccaaaggacccactgccaacaaggaaatgagggcagtggatcacacaccctggtgaaactgaggaggagcagagaatgaaacaggaaactggagacagcatgacttcagaccagcaaagaaaagtcaccaccctggaaactaatgctctaccctaaacaaagaaactacacactgctttttgccaaagaggctagtggtatgagtcaggaaaggacaagaatgaccaacttctcacaccctgaaccacattcaaagtctaagccaagagagcacctctggaagtcagagtaaagaattcccttcgaaataaaatatttgctttaacatttactccacaatataacttgcttatatccaacatcctccatcaagcaggtcagtttgtctacttacttaggggtatacttcaacaacagttaataccaacagattcgtggaaacactatgttacttaaaatcaggtttttttttatcttataggtgtattgttccaattgtttaaggggcaaggtgtaaactagcaatcgttgctttggagttacaggctccaaacttagttgccatgttctatggattccaatgaagttataacattcatattagatgtcctaaagagtcccatcaaaatcaataccaaaatatctactggttactaggctggctgtgaggaagcaaatacacaacaaggaaatagactgccttaacttcaagtagcttacaaactacaacttagctttgaaaaggtaaatgtc

SEQ ID NO: 225745 - DNA, 271 bp, Homo sapiens
ccgcctcctggattcaagcaattctcctgcctcagcttcccaagtagctgggactacaggcatgtgccactacgcccagctaatttttgtatttttagtagaggtggggtttcactatatgttggccaggctggtctcgaactcctgacctcaggtgatctgccagcctcggcctcccaaagtgctgggattacaggcgtgagctacctggccatttgtttgtgattactttaatatgaactaagtcatttatcttcagatgtttcacaga

SEQ ID NO: 225746 - DNA, 444 bp, Homo sapiens
ggctgaaactattttttgtaaaattgcaagaaacctatgacgagttgtattttaaaatttattggccattagcattttagaattcaggagttattttccaacagaaacaatattaggtttcccgggcttgtatatttaaaccattgtttagttaaatactgaatatttttattgttagatcttaggttagaccttagaagacaatattgttagatcatagataattaataaacagtaaaatcaaaactaaataagagaaatgtttttagttttaatactagtatttgaaataaagcagattgacctgacaagatgatggctccgttgaagttctgtgtctcctgtctttgagcagttcctcctgtgttagcccttctctctgtcacgtgctgatacatggtgatgcttcactgtttttgtatttgttgcttatgaatgcataaa

SEQ ID NO: 225747 - DNA, 544 bp, Homo sapiens
aatcttctgaggctgggctgtgactcctcttgctttacaaatggggaaattgaggcagagagcgttttagtagcttgcccaagactacacagctaggaggaggcagagccaggatcacaaaggaaaaacttcccaactagtgtgtagcagtattctcaaggtgagtttattcaaatacaggtgattgttcagcctttgatttatattttctaactctggttttaaagaatgaatatttagattgattaaaatacagatttttttgtcctgcctttggttatattagcttgggcactatgttctcaaacccagactttgtgacaattatgggtgtgtttcagtaggtcatgggcgtcacgatgggcttttccagctttgtttgtatcagctattgatttctgtcacatcaaaacaatattagctagtcacggtggttcacatctctaatcccaacactttgggaggctgaggcaggagaatcacttaaggccagaagctggagaccagcctgggcaacatagcaagaccccatctctacagaaga

SEQ ID NO: 225748 - DNA, 371 bp, Homo sapiens
aataaatgagagtaaagtatgcggaagatgctttagcaaagaagatatattaatgtccaatatcacttgaaaatatgttcaatgttgttaacattattgtcagagaaatgcacattaaaaacacatgatacattcaaaataggtaaattaataacgaaaacatactatatatatatatcagctttttctgttatcagtaaagcttccagtcaacagtggttacctttttggaagtcgaaagttatatacagcaggtctgggcgtgatggctcacgcctgtcatctcagcagtttgggaggctgaggcaggatgattgcttgagtacaggagtttgagaccagcctggggaacatagcaagaccttgtgtta

SEQ ID NO: 225749 - DNA, 104 bp, Homo sapiens
ggaatgacgtaagtatttagattataaactttaatgtaaattctgaatcttaactaggcagactcttgcttgattaaacatgtttcatgatttagaaggttcat

SEQ ID NO: 225750 - DNA, 440 bp, Homo sapiens
attcttgtgaactttcatatttttaatccttctttattgaggcttaaaaatatttttaaaaaatagtaaaatgtatttgctacaaaactgagcactaacttttgagaagttgttctaagctttcatttgtttctggtctgaatcatcagccacgaattctgaataaggctgatcttatattattgccacgttcaggtctctagaaataaccattataggacatgacctatcattcttatggattttattgaatgatgagctcagctgcttgtacaaatcattttatttgccttctcctttaatatatttatcagcaaattaggaagcagtatttcgttttgtgttgttactcaaaataagaggattttacatttgtaaaatatgtttttatatcttagcccattatctattaaaaacaaaaccaataaaattttgtcatt

SEQ ID NO: 225751 - DNA, 485 bp, Homo sapiens
aaagagggaatggggagttattgtttaatgggtgtgaggtttcagtggctgatgatggaagggttttagagagatggatgatagtgatggttgggggatgatggaaggggttttagagacggatggtggtgacagttgggggatgatggaagggttttagagatggatggtggtgatggttgtacaacaagtagatatactgaatgccactgaactgtaaattccaaacggttaaaatggtacattttatgttatggatattttaccacaatcgaaatataataatgcccttttcttgaggtagtttcaaacactaagtgagctaatgtatgtcatcacctaccatagttggtattcatagttaaattggtgtgaaactgtaaaaagtgactgtaggcagtggtaaataaggagaatcttctaatcttgaaatatttatcatcagagacattatatgcacataagatgtagtcaaaagcatcctg

SEQ ID NO: 225752 - DNA, 439 bp, Homo sapiens
agaaaaagatcctgggcttctcccatcttgcttggcaaatgaggagtctagggtacttgtcttaaatgttctgacatatttcaattaaagcagtgaacaatattctcaaagacaaggcagcagctgatacttggtaatgtccttaaaactgcatagtaataaccttcagtgagatttgtataatttggagataagctccacttatatctgtaaagttaaagcacagagaaagttagtacagtatttgcctgaggtcagtcacgcagttggtgacaaaagccactattcttagtacttcatgagacttctgttttatataatagattacagaggccaggcacagtggctcttgcctgtaattccagcactttgggagactgagctgggaggatcatttgagcccaggagtttgagaccagcttgggcaacatagcaagac

SEQ ID NO: 225753 - DNA, 943 bp, Homo sapiens
gtgaaaatgtgacaagtcacagaagcttgaaataggctagctaattgggtgaagtggttagatagataagggtttgtttaacatggcttgtttgtacagatttccctctgcctcaacttcctgtccttgatgataagaatgatacttttcttctggtagagggaaggtagctttcacatggaaatgtcatctgcttttaagaagcagaaggaaagtcagactaggcatggtggcttatgcctgtaatcccaccactctgggaggctgaggcaggaggattgcttgagtccaagagttcaagacgagcctgggcaacctagccagaccctatttctctctctcttaaaaaaaaaaaaagggaaagccagagtgatattcttgcacctgctctcttcaagtgccttcaactcaaaatagtcaatatgccagagcagcatattttggggtaatgtgttcttaactccttcatcatgtaaatgggtttaattaacctataagaaatatgaacttgactttccaaggcccctaattaaataatgtgtgacagttttaaacgttatttggtcattaccaaaatagtcagtacaatatgacaactttaactgaggagggtaaatatttcctgggaccaaagccctccatatggtgtatggttggggagagtagcagtctaatgagattgcccaggtaggtgctgagttatcgtgatcttgagtgagtatgcctctgcctctgctgaagttcctagcacagtggaagtggagattgccctagctgaaagcgaaaaggtttatttccaggtacacatctcgttagaagctaggctccaaaaagagatatgcaagaggaggggaagtcatttcaactccatatcttctcatggcctcaggggaacagaagccaccagttattttcctatgaatggaatcctattcttaatttg

SEQ ID NO: 225754 - DNA, 298 bp, Homo sapiens
gggtgtggaagagacgagagagcgagcgagagagagagaaaacacactagctctccctgctggaataataggcttgaaatatgaggaagttgatcaactgccgctgccttccaaaaacagattaatccaccttggtagctttcctttcagagcaagcttttggctctgtcgactttctctatcagcctgaactcaaaaggacacaggccacatgccatctgagcttaagagttattttgtgtgttgatctgagaacttcacattttaaaacaatgaattcatgtttctactgtttgtt

SEQ ID NO: 225755 - DNA, 303 bp, Homo sapiens
ccaagatcaaacaggagaaagagaaattaacagctgtgcccagacagccagtgtggctgaccagaaagactgaatttagcaaaacatggttttaaaaaaattaaatgaatgaaataggtgaagaagtgatggtagcaacatgtgggcctcaattctctgactttttatttgatgatcttaggatattatgcatcagtccatgttgccccatcaaacacctactacgtgccacatatagtgcctaggccggcctgccttcctttccttccttccttccttcctcccttctttctctccctccct

SEQ ID NO: 225756 - DNA, 465 bp, Homo sapiens
tgacaatgggtgggccctgccttcaagttccacactgtctgtttgtgtcattacaacactactggaagtaggtgcagttatagacccgctgttcaaggtcagctgaaatgaaagtcaggtcacacgagtccaaactgtggggccacttaaccaccaactccaagcaggaaggtggacgatcccagactcggtcgaagacaagcatgtctggtttgcttgtcttccttctcaacctgaatggcacgaacatggagaaatgcatacttaccctgccagctggagaaaactggagacgaaggagggagccaggagtttctactttgccttccaccagttgctgacactttctgaaccccgtctgtaaaatgaagtcatgctgcccatcactcaaagttgtgtgaattgagagagtgctcatagtgctctgtgaattgcataacatccattttgctgttgaagatcatt

SEQ ID NO: 225757 - DNA, 239 bp, Homo sapiens
gagattgtgccactgtgctccaacctgggtgacaaagcaagactgtctcaaaaacaaaaaacaaacaaaaatctagcaacctggatgctaagtgaaaaaataaaaacagaatgagatataaattcaaaatatacaaataatacagatcttgtaaaaaacaaatagtattaattagataaacacgaaagaatgattgccttatgagctgggaggaaaatgggagaaaggcaagtgtatag

SEQ ID NO: 225758 - DNA, 386 bp, Homo sapiens
aagagattataggagtggttaatggtatggactaaatatctatgtccttcaaaaatttatatgttgaagccctaaccctcagtgtgactgtatttggagatggagctcttaggaggtaattaggattaggcaaggtcatgagggtagggccttggtttgatgggacaaacccttataacaggaggcactagagaacgcttctctctcctctgtctctctctctctctctgtctttctctactatgtgaagacacagcaagagagtggccaactgcaagccaggaagaaaccttcagcagatcccaaccatgctagtaccctgatccagacattcagccttcagaactgtaaaaagtagaataaaattctgttgtttaagccatcca

SEQ ID NO: 225759 - DNA, 290 bp, Homo sapiens
ccagtccccagcagagacttcctgaagaaggtgacatcagagctgagttttaaagcagggctgggagttacccaggcatcgcaaagccacaagggcacggcaggaagaggggacagccgcagccatggtgtggaagtggaaaacagttcggggtgtgcgtttttccagataactcctgaacatcccattcccaccagactctaagctccatgggggcagaataagaatctgcccagtggctcagggtaggtgagtgagtgactctcaaataaagtgatgagcaaacagca

SEQ ID NO: 225760 - DNA, 620 bp, Homo sapiens
atgaattgcatggttgttttgtcactgtggggacagagcttaattcacttagagtgagcacttgtgcttggtgaacgatgaggctaaggaaatgcatatcatcaccattaatttttgataatttttcatgggtgagaatgaaaacatatcttgaatccaccccttttttccctttctatttctggtgccctagtcaagccatctcatctggcccctggattatcctagtaagcttgtaactgtttttcccacctctcctcacctctctcccgagtttggcttcaaaatttaaacttcttaccacagtcacttgtaccccacaagatctgagtccttgttgacttccccaccatcatcttgcccctgcccctgcattcacgactgtccttccacattggccccccatgggtctcttgctcccgcaagctgctttcccctttaaggtctctgtattgttccttcttttgtctagaatatcctttgtggacttgttctttctcactctgaaggtctcatttctgatgtcgcctttctgagaagtcttccttgactatataaaacagtcctccctggctactctttggattaagccccctcattactctctttactaccccctg

SEQ ID NO: 225761 - DNA, 623 bp, Homo sapiens
ctgtaatcccagcattttgggaggccgacgtgggaggatcacgaggtcaggagttcgagactagcttggccaacacggtgagaccccgtctctactaaaatgcaaaaaattagccgggcacgtggtgcgcgcctgtagtcccaggtactcgggaggctgaggcaggagaattgcttgaaactggcaggcagaagttgcagtgaaccgagctcgcaccattgcactccagcctgagcaacatggtgagactcctgagactctgtctcaaaaaaaaaaaacaaaaaaacaaaagagaggctaggatctggcatgaggccgactgagattcacatatcctggttccagcctttttgtgcaggatttgtcatctataacaagtttctgggtgatgtcaatgctgctgcgctgaggaccccacttgaagacccgctggataaggccactcacagtggatgctctctgacaacacagtcagcagctccaggacagagtgttccaagtccacctgagcctggggtgagtcagagaagcagagctctggctgttttcctctttcccattttctaccctgcctctgtggcttcctgagtccttgagagccagtccttgtgaacaggggccaa

SEQ ID NO: 225762 - DNA, 292 bp, Homo sapiens
acttcctcataatctgctgggagttatggaatatgtgccaagcatctgacaccaggatttgtcatctataacaagtttctgggtgatgtcaatgctgctgcgctgaggaccccacttgaagacccgctggataaggccactcacagtggatgctctctgacaacacagtcagcagctccaggacagagtgttccaagtccacctgagcctgggccacgccagttcctgggcctgcttaggttgaagggattttttttttttgtggtttgaataaactaatttttggctaaaa

SEQ ID NO: 225763 - DNA, 857 bp, Homo sapiens
gaaatatacacataagtaacaaatataacataaaaaatatgctccattctattgcgcttcttgtagaagagcacacatcactagtcactataaagtgacctatacagaagataaaattggggtgttcaaaaaatatccaaaatacatgtgagccctgagaaaaaaaataatttctgcccatcaactgtctgagacaatacaaacgtattactgtcaaacaatattttttcgtatcttgtttttcttatgggcttacttttttgtaaaaaaaaataataataataattcttcaagcaacccattccataatggtagtaatgaatggtaacccacagaataaaacaagaatctatgagtccatactggcataaagaaataaactaacaaatggaggaaaatgaaaagcccttcatcatagaattccaattaataaatgtaaaaggagggactgaattagaaaaccaccttgggtgaccaccacagtaattctagcaagcaaaaaatcatcaagggaggctaaagttggtgggcagaataataaaacaacaggatatttacattgtttgtaagtatcttcccaggtgacacttaattactaaagaatagtaattttacattgaggaaactcgccatacaccacctttaccaaataaatgatcaaagttatcaacagtaataagaaaaactgaaaaactgacatcaagtgccccctgagagtatatactgagaacatatcacttctgtgacactcctgccaaaaattcataggctgaatctaattatcaggaaacaaactaaacttgagggacagcctacaaaataatcagtctgtactcttcaaaagagttagggtcatg

SEQ ID NO: 225764 - DNA, 469 bp, Homo sapiens
ttgtttctgagattctaagaacatgtgcttatggacagaaataggataactgggaaggggcaccagtttatgagaggaatcttcatggagtttgaggaaacagcaaaactttctcatggaagatcacctgtagattttgaaaacactgtatttgctttttaaaaggaagatcataggcagccaggtatgaaaccccttctcttagtgtttctgtgtaacctgtggaatttgcccaggggaacatctagagttaacctggaaatcagatgcttttctttcaggcagcatttggcaacatcaaaacatcagttctagagaatattgtgggtgctagagtctgactataggtgacatgtttttgtcatgttaatcaattattgaaattaaggagaagattattgcaatttctattccaggaaatgaagcatgcgctgagttaatcagattactttcaggtgaaaaaggaaaa

SEQ ID NO: 225765 - DNA, 2408 bp, Homo sapiens
  misc_feature (1210)..(1210): n is a, c, g, or t
  misc_feature (1362)..(1362): n is a, c, g, or t
  misc_feature (2078)..(2078): n is a, c, g, or t
ctgctttggttcaccctcaaactgactaaattttagcaatggataaaataatttttgctaacaaatatgtagaaggtttacacagccctttacaacttgggctagaaacttcagaaggaatatgataaacgcccacccaatctttccaggatacatgtagattaaacaatgtcacatctgtttgtaagttaaaaagcttactctatggcttttacattttatcttcatgtttcctactcttataaataatatacatgtgactacagctaacttgtaacataattgagattattatattcatacaaccatatatcttttataaaacaaacaacatattgttacatatatccctctagatcatatgtggaaaacattcactgtatgttataagaaattagtgctttttatcaaacattagtgacgtgtagaaatcatgacttcagctatacaaagtgcattgtgatccagagggctttttttatgatcccatgttgaagagagatcattacatccatgcttctcaaacacattctattgtttttaaataaatggttaagggatttgcaactaaagaaattgggaaacaaaccaaaactagaagacgaggtgaagcgctacagataagagaaagaatttagcaagaacaggtcagagggtagctacaagaatacaaagagccagtgggaagggaggcttagggagcagaaattggggcaaagtgttaagaagagaccaccgtgttgtactggggtccaaaagacaatgtggaggctttaccctcagtgacaaggtagtctaaagatttctcctgtttaaactataaatatttctctgaaacttgtacatatcttctatggacaaagtaggacttccagaagcccttttgtgctaaagcctagaataactaagagggttttggctcatgtaattcatttgcatcttcacaaaatgaatgtgtactcatttgagtccttcgaactttaaaacagccatattcttcttgttgtttatatattttccttaggcattttttttccacgaaatagacaagttttatccatatgaaaattgtctgatgcagataatgcctctcttgataaggatcacagcaagtctcttccttagcatctagcatgcactgccacacaatttgatgatgtgcagaagggaaaactggcctggagcctgtgaatcaccctggtttttcagnaaaaaaaaatcaccagaagtaatttcatctctaccttcttaaagtcttatcttcacttgagataacattaagtcaatcggcatttcacattgatcctgatcttcttagccatagtgaatattgtttaaaatttcatttataactattccctntcattggctgtacagataacatttgacattttgaataatttgtcctttgtccttctgaattattcctaagtcaaataatttttcacttctgatgagctcattttatgtttttatcataatcataatgcctctgcatgaaactctcccagcttctgtatctgttgatcatattgcacttaataatggtcagcatctcaaaatgacaggcaaacatgacaaaattgtagtaatctagggaatataagatgacaagaatgaaaatgctcgtatctcactcctcatgcccactgttagggcaggcagtgttgagtcactttttctggaccatacattaaaaaatgctgtatacattaagcaaaaaattgtagataatggctttctctctatcccttctgctagattgtgagtcactcaaaggcagcacccatgtttagtgttttcagtatgtctcatcataactgttacataataataattcctaggatatgttttttttaaactcaacggaacaagttgataaaaaatctgttatttcaaagagaaaacataatttccttagaactacattcctacatctgagactgaatagcagaatcatctaggaaagtttgcttaaactcacatatcttaccttttccacactgaatatgtattatttaagaaagtttccagaagatactctggaaactgtgtctccatcttagaaccacagcaanaaaaaaaattgagattgctttctttgttatttttactatgttataaacacaaaggcaatgaagagttaaatatatatatatatatatatatacgtacttatatacataccacacaaacgtatatatttatacgtagattcacatataagtttgtgtgtgtacctaaatatatatagatgatatagatataggagacataagtcatggtggaacacttgatctggccttacattcaagatatataaatgtgaaaggaaataattaagcaatattaaaattttcagatatgagcaaaaatgatttgactatagtagaaagaacaaaaaaaaa

SEQ ID NO: 225766 - DNA, 348 bp, Homo sapiens
ttaaagataccttaacacccacgagagactttctcctcagcctactgggaaggcctaaaaaagaactggaaaaaaaaaagaggattctgctttggcagatccagtggtagcagatccacgtgttgggaaatgcttttgagctggggaacaaagctggggaaatagatctttaagaaagggagccaaggttagaaatatttgcctacaaagtgagtaaattttatgtaactctgttaattctctgtaactgcttcctctgccactgctcgtggcccagggctgactttttggggtgaccccaaatgtatgcagctttcaaatctttcacaaactgcttgaaccacaaaa

SEQ ID NO: 225767 - DNA, 404 bp, Homo sapiens
aagtattatcttaagcatgttatttagaaatatggagataaataaaaataactgaaagtaggtagttgcttctgaggagagaaattgggagttggcaagagagtactgtttttcaaccatgtaaatgtatttgttttattaaaaacagattagaggcaggcgtggtaatcccagcactttgggaggccgaggcgggcagaacatgaggtcaggaccatcctgaccaacatggtaaaaccccgtatctgctaaaaatacaaaaattagctgggcgtggtagcacacgcttgtagtcccagctactcaggaggctgaggcaggagatttgcttgaacctgggaagtggaggttgcagtgagctgagagtgcactccagcttggcagcagagtgggattctgtctca

SEQ ID NO: 225768 - DNA, 309 bp, Homo sapiens
agaatttattaatttatcctctctctcaaataggaatgtacctcattacattgctgatgggtgattctccagtgttggtaaagtttcattccattgcatttctgacaactgcaaaggtcttttttagcctaaactaaaatatctttccttctcactaagaattacctttgtactttgtatttttgttttctggtgaagcttgggataatttattgtttttttctcacatcttcacattttctctgagaatactagtggctttatctactgaatatcaatattaaatattttttcactggatatgcattt

SEQ ID NO: 225769 - DNA, 550 bp, Homo sapiens
gtgcaggtctgtgaggagggcagccccgtgctcccgtggccaccgctcagccaaatggattcagcgagggtttttagtgtttgtgcctgtgtccccgtgtgcctgtttcctggtgaggctggatgcctggcatgtctgaacactcacattccccaggcatgcatgtgcagccgccgccgccacccatgtactgtggcgctgacccctcctgtaacagctgtggtcttggcctctcgtgttggtggcagatgtcccatttcccagttactttctgttgtccaaaagtttaactgtcctgccagccaaagctgctgagcattactctgatagaccatcagtccttggtaagtgtcctgtgcatctgggataagcatccgtttgttttcagctgcgctttctgtgacttgctctgcgtgagtcctcggtccacgtgggccgttgcgctggttcccagcctgcccgacacactcactgcgacgcctcccttgcctactgcttgctggcttctgtgttctctgcagtaaacattgatttctgactcgagtgctgt

SEQ ID NO: 225770 - DNA, 269 bp, Homo sapiens
gagccaggtcctggtggaggagggcctcaggtagctggtgcactgggcaggggccccaggacatttccgttttggagcttctgccaccaaagcagatgaaactgagattttcctctctccttatcagactcttccttgaagcctgtaagctttcaatttaaaaataagatggtatatggctgggcgcagtggctcacgcctgtaatcccagcactttgggaggccgaggcaggcggatcacaaggtcaggagatcaagaccatcctggc

SEQ ID NO: 225771 - DNA, 466 bp, Homo sapiens
ttaaaattctatgtttctgatgaactctaacattccaatgttgccttctaagcaaactgaaagctgccttataccgaatgaggaagagcacaaatactcggctgaatgaggtatcgcaaaagactgcatgcactttggagaaagacttaagttattgtcatacaatttccattccttttagctttttcttaaatatatgacaaatacctacacaaagagtggtatttcagtcaatatagtaaatttattttccagactgaccttcagcttaaatatgccagtgtgtgatttaatccataggcacctcatgaacacattattgtcagattggttacagatgctaaacgctatccgaaggtcattcctagtcactgatatttatcagggtaaaagtgaagtgatttcaacgataaaagtacctttgaaataatttatcaatgtattagataaacccagtttcagaatg

SEQ ID NO: 225772 - DNA, 447 bp, Homo sapiens
gaaaggatgtgaccatcacgcttatatcccgggaaagtgatttatcattgcaaattcataaactggcagtctagttcctaaaacgactacatgtgtgtgcacgtgtgtgtgcatgtgtgtgtgttcatgtgcgtgtgtgtgcatgtgtgtgttcatgtgcatgtgtgcacatatgcactgtgtatacattgtgcatgtgtgttcatgtgtgtgtgcccgtgtgtgcatgtgttcgtgtgtgttcgtgtgcgggtatgcgtgtgtgcactgcatgagcatgtgtgtatacgtatgtgcatgtgtgctcatgtgcattgtgcacatgtgtgtgcacgtgtgttgtgtgtgcgtgtgtgaacacatgtgtgtttccatctccattctgtatgtagctcctgtttcttccctcaggcctgggtgacaagagcgaaactccgtctaaaaaaa

SEQ ID NO: 225773 - DNA, 405 bp, Homo sapiens
gcaggtgttcagtagttcagttagtagatgttgatgtcttagaggaggctggtggtgtagagaagttaaatcatgctgggtttggggaggataatgggctggagatattgaatgaagaagaaagagatgttagatgtttgaactgggcaattcgatgaatgatgatgcctctttctgagatggaagagaccagagaggaacattttatggagtaaggtcaagagtttgtttgaaccatgaaaagtttgagaggttattagatatacaaataaagatgtagtatattggcagttggatatatgtatttggactttgggaaagaagtcagtctagttagatgtggcaaattgatgagatgtagagccacaaaactgattgccatcactttggggatgtgtggaaata

SEQ ID NO: 225774 - DNA, 362 bp, Homo sapiens
gtcctctatccgacttgatcgtgcagagttggttcgcaccgcccagtgaggggaagctgttttctcgtcgattgataggctccgggtctgggtaggagaggctgccctgtatgaggtagcttgaagggccgctgacaggaggaaacgcttccgaattttccagacgtgttgacgtttgagggtgctgactacacgttaaggaactttattgtcacgcctttgggaatatactgccaggctcttcctagatatattcattctctttaaaatgagcatgtctacctgggttcaccagaaactaagtttttcttagccttttgtgaggcaactgaaaaataaattgaactgtaggccctttctct

SEQ ID NO: 225775 - DNA, 443 bp, Homo sapiens
taggaataaacttaaccaaagaagtgaaagatcgccacaaagaaaatgataaaagactgatgaaagtaattgaagaggctgggcatggtggctcacacctgtaatcccaacactttgggaggccaaggcagaaggattacttgaggtcaggtgttcaagaccaccctgggcaacacagtaagaccctatctctttttaaaagaaaaaaaattaaattttaaaaacagaaattgtagaagacactctaaaaatggaaagatagcccatgctcatgaattggaaaaattattattgttaaaatgttcatactacccaaagctagctctagacacaatgcaatccctatcaaaataccaatgacattcttcaaagaaatagaaaaaacaatactaaaatttgtatggaaccacaaaagaccccaaataaccaaagcaatcctgaat

SEQ ID NO: 225776 - DNA, 454 bp, Homo sapiens
gatctggagcattggggaacaaagagctacgtggggctccaaggcaaagcccaggcaaaagctgagttgttctctgagctgctgctttgttctaagcccaatgcctaaggctgggttggatctgtcagctgtgggcccctgcagtgccctagactgctctccagagtgcagtgtccttgtgattacttgccagtatctgtcttccctactagaatcaacttctggaacaagggacaggtcagtcttgctcccaactgtatccccagagcttggctgctggctgaagtaggggcttaatcaatatttgtgtaaccagtacatgaacccttagcaaccatgaactccaatcctactgttgtacagataagaaaacagagacactgagaagggacaggacctgcctcaggttgcacagcatggtgggggttgagttaggaataaaactcacggctct

SEQ ID NO: 225777 - DNA, 397 bp, Homo sapiens
ccattgcgcccatccaggggctggatcttgacatggaccgtatgcctccagaattctctccccggtcaaggctgaaatttactcctggctacactcactcacgtttactcatgctcacgcactagaaattaactgcaagattggctgaagttcatttgtaacctggtcaggcccaggatggcactggccccttcaccaaagggaacaataattcaagataagctgttggagtggattgcaccactgacccctcctagcccccttcctctccattccaaacccctctctctttaaaaacccctgcattccccccacaaattgaagggtggaaatttttggaaagaatctcacccactccttcccttattagcatggataataaaatctccttatcaca

SEQ ID NO: 225778 - DNA, 337 bp, Homo sapiens
ggttagaaataaaggtaaagccctttaaccaaaggaaaacattcaaaagaggtagcattaggaagtagacttggggggaaatacctaaactagaagtaatgattgtttgccaaggaaagataggtgtgtttaaatggaacaataccttaaagaaggaattgtctcatgaccttgttaatttctggcctgttgtttcttaatctttattttgagtctcgaacatctttgagaatttaatgaaatctctggactaggtccccagaacagtgtacgtatttacaacattttgcaacacagttttcaggagatcatgggccttgtgaagctcaaccatatt

SEQ ID NO: 225779 - DNA, 298 bp, Homo sapiens
cagacaatacagccaattctggaattgtgcttttctcatgattcaactcacagccagttgtcaggttttcccagacatccccctgatgctccaccaaaccaggaaccagacaaaccgaggaaggggcctccttaactcctctaaccaacagatgagatgttgacagaacctaacatctacttagagatgatgtctcaggggcaacagaagaggcaggtgctgtagggccaggcgggttacctgtgtctgccagaccctccagtagttcagaatagcctcactggcgccgagatgataa

SEQ ID NO: 225780 - DNA, 583 bp, Homo sapiens
ctccaaacacccagagcattttgattgcctgccagattcatctttggtgaaaagtaacattttgaaaaatcaagacttacttggtaatacatattttagggcacgttaagctaataaacagctaattggttctgctctcctgtaatttgcaaagggtcaaaatgatttgtaaatatacatctttattaactgctgtctgccaaaaccaatttctacaggtgacagtagaatgaggtgatggaaggcacctcaacagttaacctcaacatggttttttggatcagtttaatttaacaggtaagtattattgtattccagggcagctatgcatgatgtcaaacagcatatggtacacaatacagagtggtggaaattccacttcctaaatgtgcaggtgaccaaatgtatatatagactcttagccaaaaggaatagaaacagtgtctgtgggatttgtgcacaatatgtccatacaacatatattttcttttttcttttcctcagtttgcacccaggatattgagggaattttaaaatgagactgttaaactactctggataatcttcgtggataaaatggaaa

SEQ ID NO: 225781 - DNA, 714 bp, Homo sapiens
gaaactataacaatttagtggagaatcaatcacttttgtagaagaacttctcatttctttccccaaaataggtcagattacttaaaacaaaaactatttgaggaagtcttcctcacttgtccttgaatataaagactgcttaagacaaaacaaaaatcctaatctggtgatataatttggatatgtgacctcacccaaatctcatgttgaactgtaatccccaatgttggaggtggagtgtgatgggaggtgattggatcatgggggtggatccctcatgaataccatccccttagtgctgttcttgtgatagtgagtgaattctcacaagatctcattgtttacaggtgagtagtgcctcctcccatctctcttgctcctggtctcatcgtgacgggcctggtcctgcctcactttctgccatgactaagagctccctgaggcctctccagaagcaggtatcactatgcttcctacacagcctgcagaaccgtgagccaattaaatatctcttcttataagttacctagtctcaggtatttctttatagcagtgcaacaacagcctaatacatctggcaatgtttttggatgtgattatagataaaaataaatctaaaaagtttaccagctttccagggatctagccatctttatacaaagggcttcaaaaataaactaattaataaaaggacggctaatcattagaacaaca

SEQ ID NO: 225782 - DNA, 561 bp, Homo sapiens
aggtttcctgctttcacagaattattccaggatttatatgtcagggtggtgacttcacatgccataatggcactggtggcaagtccatctgtggggagaaatctgatgatgagaacttcatcctaaagcatacaggtcctggcatcttgtccgtggtaaatgctggacccaacacaaacggttcccagtttgtcatctgcactgccaagactgagtggttggatggcaagcatgtagtctttggcaaggtgaaagaagaaagaaggcatgaagatcgtggaggccatggagcgctttgggtccaggaatggcaagaccagcaagaagatcaccattgctgactgtagacaactccaataagtttgacttgtgttttatcttcaccaccagaccattccttctgtagctcaggagagcacccttccaccccatttgctcccagtatcctagaatctttgtgctctcgctgcagttccctttgggtttcatgttttccttgttcccttccatgcccaggtggattgcagagtttatgattatgaaataaaaactaacaaaaaa

SEQ ID NO: 225783 - DNA, 420 bp, Homo sapiens
aaagtgtttgactcaaaaggctttgttcttcccttaaaggaagcatctaccaaaatgtggcacacaaaccttgcatggtgtctctagggcctcctaccccgcatttcccctgctttttctcttgttctgactgaaaaacaaagtgctttgactgtgctgtgacccagccagctgcatgtttacccagcatgcttgaacccaagctggagccttgaacataaaggtgtttaagttgttgctcaaaatatggaaagaatctagctctggccttgaaccaaatcccttaaactctcctataaaactccataacctgaccccctcagtgcggatatacctaggcatgacattcttgttgcctgttgcgaggatgctttagcctactctaagttctcccaataaatgctttggactgatcaccct

SEQ ID NO: 225784 - DNA, 2712 bp, Homo sapiens
gcgtttgctgggagatgttgtttcataaagactctcagaccttttgtcacagggctacaggactacaatcccaggatgcatcgggatcaaagcagtatgcgacacggggaaaagatgcggagctgtgtgcgtctccctaggtcttctgggagatgtggtctcttggccctttggtcacagggctgcaggactacaatgccagcatgcagcgggttcatggacagtgtgtatcactggaggaagacgtggagctgtgcgtgcctcgctgggcttgcagggagatgcagtctcataactaccccagtcgtttggtcgcagggctgcagcagtacaatttcagcatatctctggctcagggagagtgcactagtcactgaaggaagaggtaggtctgtgcgcacctctctgggcttgctgggagaggtagtctcataaacactaccagccctttcatcacatcgctgtaggactacaattccagcatgcacggggcgccggggccgtccgcctcactggaggaagagaaaggcgtgtgagcgccttgctgggctttctgggagatgttgtctctttatttctcccagccctttggtcacagggcttcaagactacaatcccagcatgcatcctgctcagggacaacgcgcgtcactgtaggaagaggtggacctgtgctgttctcgctatgctttttgggatacgtattctcgtaaacactcccagccctttggtcactgggctgcatcactacaatcccagcatacatcgggatcagggagagtgcgctaatcagtggagaaaggggccaggctctgcacacctcgctggtcttgctgggagatgcagtctcataaacactcccagccctttggtcactgggctgcagcgctacaatcctagcatggaccgggcgcagggaatgtgcgcgtcactggaggaagaggcagggttgtgcaagcctctctgggcttggtgggagttgcagtctcataaacactcccagacctctcatcaccgggctgcaggactacaatcccagcatgcacccggctcagggagagtgcgcattactggaggaaaagtctaggctgtggatgcctccttctgcttgctgggagatgtagtttcataaagactcccagaacttgtgtcacagggctgcaggactaccatcccattatgcactggggttagggacacggcccgtcagtggagaaagaggcggggctgtgtgcgtctccttcggcttgctgggagatgtattcttataaacactcccagccctttggtcaaagggctacaggactacaatcccagcatgtgccagtctcgggggcgaggtacaggcctggaagaaggggcagagtggtacacgccccacctaatatgctgggagctgtagtctgttaactgctctcagcctgtttgtcggtaggcttcagaactataatcacagcatgtaccgggacccggggtgcatagccctggagggaggggcagagcggtgtggacttcccggtgtacaaagcactgctgagttcttatgctatgccgactctttgccaaggagaatgagtacataggtggacctagaggacaggtctgcgctgagcattgaggagggtattaccctacataggcaccttacctttgcccaaatcgggcgggttgtcctcaactgattggccctatccttctcaagttcctctttcagctgcacccagggttctttccagagcattgcgccttctgcagcccagggcgctgccttctttcctaaactgctgtggaaactgtcctgatgtctgagacactgtccattgtgccgcagccctctttttttctctagccaagcctcatgctcaacagcttttgagagaaatcttccacgtggcctgcttatgaacagcttcagaattctgtagggggtgacaaggtctgtggcttcctggaaatgtcactctcaatggcgcctttttcacgaatgtgaaagttgaggcatcaggaaggttaattattgggttgcacaaaatctgctaagagcaaaggagaaaacctcatttccgaggcatgagtcttgtgagccattttcatcaacccatttaagtggacaagctccaaaatgaaacctgaagctgctgactatttaggcattttacacttgaaatcatcggtctcatctcaagtcactcctgacttgccagtgtctcagaaacacaaatgggaccggatccctcaggagcagatagtgttccagctttgttggagcgacatttaagatgtggagcacttggggtcgtttgaaacccgctatcttcagtagggacttttacttctagagaacatgtgcattttgattttatctgtcctcaaactgaacttttgctcattttaatagtaaaaacacattcctaggtggagacttaagatgctaacgagacatgcaatgtatgcacaaatatgtacagttagtgcacatgtgcacccagaagaccactcaaaacatgcttacactaacacttctttccaccttcttatgaataatcgtgcaaaacccccagaaggagggtttctccagtaacaattaatggtgtctcactcttatgagcagcctgccctggaatctctttctcagaatgtaccgtctattctgcacttaattttcaaagtagtcttttctttttttgtgtgcaataaattactctatgctgt

SEQ ID NO: 225785 - DNA, 582 bp, Homo sapiens
gcaaggtttatgttagaatggctaaggacagacagcaaagaattcacagaatttatagtaacaggcttcttggcttctttcatgtctcatagctaacaagtctttgaatatgtggtaagggaaaaaaagttagatcatgtcgttcctctgtccccaagccctccagctgttatgcagagcaaatccaaagcccttatcatagtctacaagatcctaaatgtgcacctctccaccccactcctgattaaagaattttgctcctaatggcccactatgggaatactctttccccagatagccacatgcttcaattgcccacttcctgtctctgccctccctgtcatctgtaaaatagtcccaccactatctccctctctccccttactccctctctccccttactgctacgttctacatatttatttatcattgtctccttgacttgaatgtaaactcaatggggcagagagttcattttcttcactactgtatccgcagcgcctggaacagtgagtgacatagtaggcacccaaaacgtcttttcatatgctgccaataaaccatagctgatcctggctttga

SEQ ID NO: 225786 - DNA, 788 bp, Homo sapiens
ggacctgtaggatttaaatgtggcaaacagtaggaagagtattctagacagaggaaaggaaaggattcactgcagggatcagatgtgtgtgtgggtgtgcatgtgtgtgtttgatgtgtgtgtgtgtaccctgtgtatggcggaacgggtaatgctgagccttcccaggccatagctttgaagtatttatttgtggagaacaccacttttccatttctagcttttcgtttccccttgttcaatctttgtggggcccacacctacacatcttgtagatctcaaactaagctctgcttcttaaaacctttccctgaacttccaagcctaaattgcatgccttattatgttttcctgtaacacattgtgcttcctttgtagaattattatgatatgaataattacttgctgaatttttactattatactgatacttgtggagagaggtaccatttctgtttagttccccattttatacacagtcatctaatacaagtgctcaatggctcataagcactcagtgaaaacgtgtgctatggccgggcgtggtggctcacgcctgtaatcccagcactttgggaggccgaggcgggtagatcacaaggtcaggagttcaagaccagcctggccaagacagtgaaactccgtctctactaaaaatacaaaaaattagccgggcatggtggtgggtgcctgtaatcccagctattcgggaggctgacgcagagaattgcttgaacccaggaggtggagtttgcagtgagccaagattgcgccactgcactccagcc

SEQ ID NO: 225787 - DNA, 358 bp, Homo sapiens
gcagccgcctactactactaaattcgcggccgcgtcgacttatacacagtcatctaatacaagtgctcaatggctcataagcactcagtgaaaacgtgtgctatggccgggcgtggtggctcacgcctgtaatcccagcactttgggaggccgaggcgggtagatcacaaggtcaggagttcaagaccagcctggccaagacagtgaaactccgtctctactaaaaatacaaaaaattagccgggcatggtggtgggtgcctgtaatcccagctattcgggaggctgacgcagagaattgcttgaacccaggaggtggagtttgcagtgagccaagattgcgccactgcactccagcc

SEQ ID NO: 225788 - DNA, 759 bp, Homo sapiens
gggtattattaccaaaagagcggattccaacagatatttagaactagacttagatatcgagttatacaatggggccaaatagttgatctggtaagaacaaatgaacccatgtcttgtctgtttcttcaaaaggatattactgctgttacagatctttaagattcacagtttctctatcactgcctactgctgaatgtgataacattaagtcagtatgtgcttactggtagatatatcaataagaacctaagttttaaatgcaagaggattttcatctaaaaggaaagtctgttgtcaagcatctggaagtcattttaagatatctgaattagtcattatgtttaattatagtcatcaagagctcaaagtcagatgattcccatgaccttaccagactcctctcacctttccctcaagtagttatcacatatcaagcacaactaagagctaatcatttcctcccaaggtacaattaactccctaagaaaaagagcacagaccaaaatttctcattcccacatttttgcagctctgtctgtccacttacattcagccacgggcatgagcccatgtttaaaaactggataaaacattctgatgaaaaatattccaaacactgttctttcataggctgttatctgtggtatcatccagggcatcatcatcggtacaaacatacatagcaatcagtgtctgtctgcacactgtggaaggcagagcagccatttagttactattcataaaagacacacaatccaa

SEQ ID NO: 225789 - DNA, 856 bp, Homo sapiens
acatgaaagacagctgcaaaatgcaagccccagtagagttggagagtttttcaaggtgagaagtcgctgttctctgcattgaacatggattgaattttccttgtctgatggtaacccatggcccccgccctgcggggataacattctcaggagcttctcttgtcctagccccttctcatttcaaaaatattagtcttttattttcctttttcattcagtttttgttttacagcttttgtagagaccaacccaagtagatgcaggtgggtgttagataaaaacacacatccccaggggacaagccatccagcggtgaggaatctctgccatgttctcttccctgctgcccacaaacgttacggagactcccttagcctccccctcctcttccccactgaggggcagcttgtggagatggaggactcgggcccatagatgcagaccccctaccaaatctagcaatagttctcacccttccaaagctcgagtgccattttgagatgacctaccaatgacatgcagtaaaggacataacctcacagcctttttagaagcatttcgaatatctacagttgcctcaattcacggggcatttcactcctctgatccaggttagaattttgctaaatctgtagcatcctgaatagcacactaatttttttttttagcacactaactttaactacattagttgagtgtagttgatacatctgtggcctcgtgtctataaagagcacactagattgtacccagcacttttggatatgacatgctaattagatgtatttaactattcataggaaagtgtatgataaatgactgtaatatttctaataaatatatttgtttctaatta

SEQ ID NO: 225790 - DNA, 1192 bp, Homo sapiens
acatgaaagacagctgcaaaatgcaagccccagtagagttggagagtttttcaaggtgagaagtcgctgttctctgcattgaacatggattgaattttccttgtctgatggtaacccatggcccccgccctgcggggataacattctcaggagcttctcttgtcctagccccttctcatttcaaaaatattagtcttttattttcctttttcattcagtttttgttttacagcttttgtagagaccaacccaagtagatgcaggtgggtgttagataaaaacacacatccccaggggacaagccatccagcggtgaggaatctctgccatgttctcttccctgctgcccacaaacgttacggagactcccttagcctccccctcctcttccccactgaggggcagcttgtggagatggaggactcgggcccatagatgcagaccccctaccaaatctagcaatagttctcacccttccaaagctcgagtgccattttgagatgacctaccaatgacatgcagtaaaggacataacctcacagcctttttagaagcatttcgaatatctacagttgcctcaattcacggggcatttcactcctctgatccaggttagaattttgctaaatctgtagcatcctgaatagcacactaatttttttttttagcacactaactttaactacattagttgagtgtagttgatacatctgtggcctcgtgtctataaagagcacactagattgtacccagcacttttggatatgacatgctaattagatgtatttaactattcataggaaagtgtatgataaatgactgtaatatttctaataaatatatttgtttctaattaaaagaaagaaaaaaaaaaaaaacaaagggggcggaaaaatacccagagggcccaaatacgcacacagattttgacaagggccccaaaggaagccgcataatacacagcacagcgcgcggataaaacgcgccgagggcacagacacgaggacactgtagagaaccacaaccggggaggaagacgatggagacaccacaagagaccgcgcaagaccaataagtatggtaaaccacgactgtgcgaagattagttaactgatgagaagacagagcaagtagcatgaagaagaacagtagaagatccagccgaacacaagatcatacactcagcgacgag

SEQ ID NO: 225791 - DNA, 471 bp, Homo sapiens
catggagtggaaggcgagccgcggagtgacagaagctgtttgcaacacaaaaaatcaaagcacttgtctctaaaacacacacagcccccaggaaccaacaaaaaagacggaccccccaatgacattgttctttgacagcccaattttgaaatggggcaaaagactggaacaggcacctttaaaaggagggtccccaataacccgggagcctcggagaagcagctcacctcagccgtcgcgaggccacagcctagtgcctttcagatctgctgtgctggcgacaacgcagggctctgacagtccatgtgctggaaggaggtgcatcgggaattcccacacgacccagagtgactgtgccatcaacacagattcagcctttgtctcagtttcccggcgcgcagcccctctgaccctaggaatcctggagtgtggtaagagtgtctttttgcatgctaatgagatgacggggag

SEQ ID NO: 225792 - DNA, 491 bp, Homo sapiens
cagagatacgaagaatgagagggatttgatgcacagtcactagcttgaagattggaggggccatatggcaggtctgcaggtgtcctccaggagttgaaagtatcctcttactgacagtggcatggaaatagtgacctcagtcttacaaccacggggaactgaattttgtcaacaacaagaatgggtttataagcagatttttacccaacctccccgccaagacaagaactaagctcagatgacaacttgatttcaacctatgaaaccccaagcagaaaactcagccacactgtgtcattctgacctagaggactaagaacaagttcaccattcaattgaagtaatttgttacatggcaagagcagaccaacatgaataccatctatgtgctgatgacttaaatgtgtatatttagctcagcttcactcttgacctccagtcttatgaatcttcattagtatgaataaaacagaaattttgactctctccac

SEQ ID NO: 225793 - DNA, 290 bp, Homo sapiens
tgtttgaccaaacaactaggcaccatagcctagccacataaaattactatcattatactttttcttatcacatacttctaccttggaagggatatttcccagttggtatagctacaaaacagaggcagatcatttagcctgcatttgatttgtagtgaaaaataagcctttggtgtgtttaaccactgaaatgttgcggtttattagtatagcacaacttatcctatactggccaacatagatgctttcggttgcaagtaacagatccccttacagtttacaaaaattta

SEQ ID NO: 225794 - DNA, 301 bp, Homo sapiens
gctgttattttgcatgtttatatctcagtgggtatttatccaacagaaatactcttagaagcacatgatatagatacaataatattcactgcagcattgttttcgttggttgtcaaacatcatcagtaaggagttagatattttcatctgtcaaagtgatagaatactatgcaactctgcagctgttaaagattgagatagctatgtgtactgataaatcaataggtccaagatagagtgaaaacaaatggactattgtatttatattaaatatacatttatgtttgtatttgcatagcaa

SEQ ID NO: 225795 - DNA, 459 bp, Homo sapiens
ctgcctccatgatatcttagttttctttttacccttagagttatctagttaacaatttattcctagttaactattctaaccattctttatattaaattctctctgtcagtgactgatgtggtttctctctcattgcctggaccctgactgatacagaaattggtactaggagtggccccaggaaaaagaccccaaaagatgggattaggaaatcagcttggctgtgtcattgggtttgaatgtgctgagctccttgccaatgagaatgtgatccatagcatgctgtggcctcataattaatgaaatcatcgcctgtggttatttgtgatgaagtgccaaccaaaggaagtgtctcgggggcccaaatggtggttgcactaactgttatggcagtgataatgactatagggactatgatatgggaccgattcttccagttgcatcatgggccttgcagga

SEQ ID NO: 225796 - DNA, 1582 bp, Homo sapiens
gagggcgccatgaggagcctgtgctgcgccccactcctgctcctcttgctgctgccgccgctgctgctcacgccccgcgctggggacgccgccgtgatcaccggggcttgtgacaaggactcccaatgtggtggaggcatgtgctgtgctgtcagtatctgggtcaagagcataaggatttgcacacctatgggcaaactgggagacagctgccatccactgactcgtaaagttccattttttgggcggaggatgcatcacacttgcccatgtctgccaggcttggcctgtttacggacttcatttaaccgatttatttgtttagcccaaaagtaatcgctctggagtagaaaccaaatgtgaatagccacatcttacctgtaaagtcttacttgtgattgtgccaaacaaaaaatgtgccagaaagaaatgctcttgcttcctcaactttccaagtaacatttttatctttgatttgtaaatgatttttttttttttttatcgaaagagaattttacttttggatagaaatatgaagtgtaaggcattatggaactggttcttatttccctgtttgtgttttggtttgatttggcttttttcttaaatgtcaaaaacgtacccattttcacaaaaatgaggaaaataagaatttgatattttgttagaaaaacttttttttttttttctcaccaccccaagccccatttgtgccctgccgcacaaatacacctacagcttttggtcccttgcctcttccacctcaaagaatttcaaggctcttaccttactttatttttgtccatttctcttccctcctcttgcattttaaagtggagggtttgtctctttgagtttgatggcagaatcactgatgggaatccagctttttgctggcatttaaatagtgaaaagagtgtatatgtgaacttgacactccaaactcctgtcatggcacggaagctaggagtgctgctggacccttcctaaacctgtcactcaagaggacttcagctctgctgttgggctggtgtgtggacagaaggaatggaaagccaaattaatttagtccagatttctaggtttgggtttttctaaaaataaaagattacatttacttcttttactttttataaagttttttttccttagtctcctacttagagatattctagaaaatgtcacttgaagaggaagtatttattttaatctggcacaacactaattaccatttttaaagcggtattaagttgtaatttaaaccttgtttgtaactgaaaggtcgattgtaatggattgccgtttgtacctgtatcagtattgctgtgtaaaaattctgtatcagaataataacagtactgtatatcatttgatttattttaatattatatccttatttttgtcacggttgttgtcagtttttattataagcaaatttctaaataggctacgtcccaacatggataaagaccccaaggttggtaaaatagccccaaagatatgtgcattttcattttacatacagcagagttgtgtttgcatggattttaaggtagttcaaaaaataaacgatgcataaatc

SEQ ID NO: 225797 - DNA, 1645 bp, Homo sapiens
gagggcgccatgaggagcctgtgctgcgccccactcctgctcctcttgctgctgccgccgctgctgctcacgccccgcgctggggacgccgccgtgatcaccggggcttgtgacaaggactcccaatgtggtggaggcatgtgctgtgctgtcagtatctgggtcaagagcataaggatttgcacacctatgggcaaactgggagacagctgccatccactgactcgtaaaaacaattttggaaatggaaggcaggaaagaagaaagaggaagagaagcaaaaggaaaaaggaggttccattttttgggcggaggatgcatcacacttgcccatgtctgccaggcttggcctgtttacggacttcatttaaccgatttatttgtttagcccaaaagtaatcgctctggagtagaaaccaaatgtgaatagccacatcttacctgtaaagtcttacttgtgattgtgccaaacaaaaaatgtgccagaaagaaatgctcttgcttcctcaactttccaagtaacatttttatctttgatttgtaaatgatttttttttttttttatcgaaagagaattttacttttggatagaaatatgaagtgtaaggcattatggaactggttcttatttccctgtttgtgttttggtttgatttggcttttttcttaaatgtcaaaaacgtacccattttcacaaaaatgaggaaaataagaatttgatattttgttagaaaaacttttttttttttttctcaccaccccaagccccatttgtgccctgccgcacaaatacacctacagcttttggtcccttgcctcttccacctcaaagaatttcaaggctcttaccttactttatttttgtccatttctcttccctcctcttgcattttaaagtggagggtttgtctctttgagtttgatggcagaatcactgatgggaatccagctttttgctggcatttaaatagtgaaaagagtgtatatgtgaacttgacactccaaactcctgtcatggcacggaagctaggagtgctgctggacccttcctaaacctgtcactcaagaggacttcagctctgctgttgggctggtgtgtggacagaaggaatggaaagccaaattaatttagtccagatttctaggtttgggtttttctaaaaataaaagattacatttacttcttttactttttataaagttttttttccttagtctcctacttagagatattctagaaaatgtcacttgaagaggaagtatttattttaatctggcacaacactaattaccatttttaaagcggtattaagttgtaatttaaaccttgtttgtaactgaaaggtcgattgtaatggattgccgtttgtacctgtatcagtattgctgtgtaaaaattctgtatcagaataataacagtactgtatatcatttgatttattttaatattatatccttatttttgtcacggttgttgtcagtttttattataagcaaatttctaaataggctacgtcccaacatggataaagaccccaaggttggtaaaatagccccaaagatatgtgcattttcattttacatacagcagagttgtgtttgcatggattttaaggtagttcaaaaaataaacgatgcataaatc

SEQ ID NO: 225798 - DNA, 440 bp, Homo sapiens
agaatcactggcccatgcagcagttttaggcttggcagaaaggaaacttatggtctcagggtcagaatgggctataaaggtcgttgatgatcacttctcatgctatccacttataactgtctaagccagtctagctgtactcacctcctctgatgtgttcttggtggcagcaaaagagccggctctcagtgttccctttgacacacagtgacagaaccattctgagcacaagtctctattaatccagtggtgaacatgactgcatgtagatgctgtcattagaacctgggaagtcatgacatagcaaaaggacagaggaactgggatggcttggctgtatcttgctccgccagttcactacatgcataccctgccctcccattgcctctttttcttccctttgtatttattgatctcaatcgtctccctggcccttccag

SEQ ID NO: 225799 - DNA, 361 bp, Homo sapiens
caaacacccctcaccccatcatccctggcttgcctctccctttggctcctagaacagtcctgtgactttcacttgaccagaattcggagaaaatcctgatatggattttaaacctcacacatggacagagctctctccactgcgatgccaaacatccacttctctgtccttccaactctcatcctgcctcacttcctctgctctccaattccacaagcaagtggtccctgctttcggcccccatttctgccacagtatgactcctacttgctggaagttaaaaggcctctcccaacacctctccaaggcaacggcaccacagccttcagactacctgtgctcaatgcctgcgggagaacac

SEQ ID NO: 225800 - DNA, 624 bp, Homo sapiens
ccttccacctgggaccaggcaggggccacttggtgatctctgtcctgagggatgcattacagtgtggtagagtatgggctagaagtcaacttagccagctgtgccacctattagctttataaacttaggcatttgacttaatctcagtgtccacatgcataaaatgaggataatctctctgcaaagtaatgccatttattgtgaggatcaaatgaaatagcaaaaagaaagcatcagtctggtgcctagcatttgattcacactcactaaatggttgcaattattgtttttctcacttagcaaagcagtgttacaccactgccctgcttaatctttgaatccttgagaatctttgaaaaactttcaatacttctcttgctgtcctacgttttgggtttggagtgcacaagtagcatagtgcaaaaaaattccctaaatgatctgtaggatagtccaggtgcaatttgaaaaattagcattgatgactaaggtagaagcaggtactgtgtttcacataaatatttgacttaaaatacaattcatggtgtttcatggagtagggaagggtagcccctgtgtctgtctgataatagaagtacaataaatttaattgagaagatttga

SEQ ID NO: 225801 - DNA, 551 bp, Homo sapiens
cattcatggcctgtgaaattcagatgaagtacttatttagataactccatcaaaacactaactctttctgatctcagaaatttaaatgagtctaaggaacatgcggtgagcccagtaattttggcataaacatttcacttaaaatcatgagttaagatacaagcttgatttgttacttcaaataactattaatcctcttgctatgtgaatgagctatttttttaaaattcagtgttcagtgtttataatcagacaagatcccattatcagtaggtaatccctaactaactgcatgcttttggttatcaaaaagcatcatagttgaaaaaaaaagtctgcttttgtcaaaatcaaaatctcatagataaaagcagttagtggagaaaattattaagtggtattaaatatactttttaaacacaataaataaaaattctagaacgtattcttttctgaagatgatattcattagtataataatccttccccagatttaactttcttttgctatctccttcagtagttcaatattgtactggtttcataagctg

SEQ ID NO: 225802 - DNA, 451 bp, Homo sapiens
agagaaagctgtgaaagacatctttagggaagaaccattgaagaatgattttatttgtatttgtatccattaatgcttaaactgtaataggtgaccagtgggtgattgctgaatgaatgaatgatttagagactgaaagtgttggggagtggagaaagaggaaaaggaaaaagtattccaatatagtttctaagctttagtcacagtgtagtctgagattgaattctgttaacagaagtacgaaagtaggcttgggacattaaccatcaatttaaaaggcagatttggaacttgggaaagagaaagtggtacacgagttaatatttgtgatttattcccgggggcgtgatatttgaaggtttggaagaaggtgagttttcagagagaatattgagagaagaggccaaagaagaaactttggagaatactcatatttggactgggaagaaaa

SEQ ID NO: 225803 - DNA, 481 bp, Homo sapiens
agaaatggctgtgtgacatgtcagacaaggtcatagagttttccatggccctgcactgcccgtggctcatgtggcatgactgtaggtgaaacccagaatggactctcaaggtgccctgggctcccttcctcaatggctgaagaaggcttctcttgacctaatggagtttaaagagacttggggatatagtgaactagaccccagaagcctttcaaacaggaactagggggcgcccaccaggaccttgtggactgacagtggaggctcaatgagacaaaatgtgtcatggagatgccttcaggacagacagcattcgggaacagataccagctccttacagtcttggcctccagattagacatggccctggaaaaaggtgatgggggacctggaattaccagacagcaattccgttcccccacttagtggaatgggagcacaacatgtaaattaaaggaattagagaaaaacatttaaagtt

SEQ ID NO: 225804 - DNA, 392 bp, Homo sapiens
gcccaggcggccgggagcgccggcgccgagccgcgctctgattggctggcgcgaccgtccctatctgctccggggagagtggaatcttctctccatcttctgcgccccgagcctggggtgagagggagatccgcggtgctttctcctatcttcttgggggagggggaggaggaaattgtcaagggaagtaacaatcgcggccagcaaccctgctctcccaaagccaccccctcgcgcgacagcgtccccagcaccagttcttactgcttacacagcgcaattccacctgtttgcacaaagcccgaagcaacatgcctggccccttggatacgaggcttgcttcaagttttgggacaacggtgaataccaaagaaattgcatcatggctttaa

SEQ ID NO: 225805 - DNA, 218 bp, Homo sapiens
tatgctggctgcccttcctcctgaccttgaccggtagattgaagactgctgtgaaggacttggtcctggtcatttctcctcgttgtccatattctgtttctgcagaagaccttggtgccatgaatgtatatatttctagatgtcttaaattcataaatcgtaagtttctttttcatattccagacctaaataaataactgcctccttgatgtcttaat

SEQ ID NO: 225806 - DNA, 411 bp, Homo sapiens
actccgggcctcccgccgggatccgacgcgcccggtggggtaagcggagtgacgtgacttgatggacacacgccattcacagcccccgtcacgatgcctcccttccagcgcttcgtgtgcagcgcgtgctgcaccctcatttcgtctcctccacggcctcactggcagtagcctgagccgcagtaactgacctgggggctcccaccaggttggcctggctccagagctgtcagagattttgggattgcctttcccccatgctatcctgtcctcatccatcaccacctgaatctcccttgccgtctcttgtcataggatccccagatggacccagatccagttcgtggctattggttctggaagggggccatcctcacctggatcctccagtaccaaacataacagagtcta

SEQ ID NO: 225807 - DNA, 370 bp, Homo sapiens
cactaaaggaaatgttaaaggaggtctttcagacagcaggaatacagtaagtcaatctggctgtacacaagtaaaaggcaccgaaaatggtaactacagggtaaatatataacattttaaaaatttcaaatacttttaaaaggtaatttactgtttaaataaaaacaaaaatttattgagatttctatatcacgtttaagtaaaatgtatgacaacatgaaataaatttaaaaatgtactttatcaaaatatgtgggatgttgataaagcagtactttgagaaaagtttatagcactaaacacctgtgtttaaaaacaaaaaacaaaaaacaagaaaggtctcaagtcaatgaccttgctttataccttt

SEQ ID NO: 225808 - DNA, 420 bp, Homo sapiens
aaatgccctgaattctccctgcacccatgtgtggcaatgcatgtgaaatgctgccaagcaggggagcccaccagagcctgggcgtccagggttttcaatggggtcagctacataggtgtgacctcagactgtagaggaaaagcaggtgttccccatccatcactgttggtatgaactacccagaccaactggtactggtgactcaaggcctcaggcaggcaaaaacactcttaataggtggagccttccatgagcttggttcccaggagctgcacaagggccagtcttgaaaacaggcgttggccgggcacagtggcttacgccagtgatcccagcactttgggaggcccaggcgggtggatcgcctgaactcaggtgttagagaccagcctgggcggcatggcaaaacaccgtctttac

SEQ ID NO: 225809 - DNA, 429 bp, Homo sapiens
tctctgcctgctttgtaaatcagtgttttctctgtggggttagctgagagcaggtgctgctctccaccacaagaaggaacccttaattcctgagcagggtgaggaccagcataggcaagatgtagatttgggccaggcgaggtgtctcaggcctgtaatcccagcacattgggaggctgggctgggtggatcacttgaggtcaggagttcgagaccagcccgggcaacatggcgagaccctgtccctgctaaaaatacaaaaattagccgggcatggtgactcatgcctgtagccccagctacctgggaggctgaagtgagaggattgcttaaccccaggaggcagaagttgcagtgaactgagatcctgccactgccctctagcctgggtgacagggagaccctgtctcaaaaaaacaaaacaaagca

SEQ ID NO: 225810 - DNA, 574 bp, Homo sapiens
agaccctgtcccttgactaccaagcctccaaacacttgggaacactgcactattcagttctgtgctgtggtggttttaaactaggcccacaaattctttgatactccttttatactctttccttcaagaggaacccagttcctctcctcttaagtgtgggctacacagagtgacttgcttctaatgaatggaacatagcagaagtgatgtgtattacttctgaggttaagtcgtagaagacatggtggcttccatcttgctctctcttggacactcattctgagtgaagccggctgccatgttgtaaggacacccaagcaatcctgtggagagggccacatggcaagaaactgaggcctcctgccaatagccatttgagtgagccatttgaccaggaagtgaatcctccagccccagtagagccttcagatgatggcaaccctggctgacctcttgcctgcaactgcctgagaagatcctgagccagaaccactcggttaagcttctcctagacacctggcctgcagcaaccatgaaataataaatgcttgttgtttttaagttgctaagtctt

SEQ ID NO: 225811 - DNA, 371 bp, Homo sapiens
tttaccattttaaccattattaagcatagtcagtgtcaagtatagttcattatcattaagtacattcatattgttgtgcagctgtgactactgttcattttcagaatgtttttctcatcccatactgaaattctgtatccactaagcaacaattcccccatttctaagctaatgatccattcttaaatatgaaaatatatataattttttattttaaagtaaaatattctaaaatcagttttatttctaattaaatttttttaagtttttgaagaaaattcttaaatattgtaaaataaatcttcatggtatacgtattcttgtgtttccatgtaggtgtgagcacaattctaaataacccatgggtaaaa

SEQ ID NO: 225812 - DNA, 700 bp, Homo sapiens
ctgggattataggcatgagccaccatgcccagccaatcagtcttgttctttatcccactgccccatttccatgtgtgcccactgtcaggccccacgcccccttcctcctccagtcccagcatgcagatcccccaacagtcctgttgcccctgaacccaaatagcagccctacccctactagccatgtcaacttgcatgagatcctcaaacctcagtttcctcctctgtggcatgagtgccttaagagagcctaccaagggaatgtagtgaggatgaaattagctacaacacgtaaaacccttagcaggtgcctgttctaaccactcatgtgataactgctggtgacgtttattcccacggatgatttagtggattatcccaacaaaaagtatttggattttaaagaaggacactgttggccaggcacagtggctcatgcctataatccagcactttgggaggccgaggcaggtggatcacttgaggtcaggagtttgagaccagcctggcaaacatggtgaaaccccatctctactaaatacacaaaaaactagccgggcgtggtggtgggcgcctgtaatcccagctactctggaggctgaggcaggagaatcgcttgaacccgggaggtggaggttgcagtgagctgagattgtaccactgcacttccgcctgggtggtagaacaagactcagtctca

SEQ ID NO: 225813 - DNA, 561 bp, Homo sapiens
acttcctttcattcaagggacattcacagagcaaagtgcgtggtcacttgtaagtttgtagagttggttcacgaatccacaccacatccgtgattgcaatacagccacagttagccatggaaacactcacatctagtggcaggcagcaggcaccacatgcccatgagcagtgatggtgctattgaatgaaatggtctttcccacctccctcacccaacgacgttggaaatgtccctgccactcttcagaatttctcatcccttgcaacattgatgctactctgagttcatattcccatgaagatcatgttcttggaaggatgaatcctggtgtggggtccagccccaggtcgtatgtttcttgactgcattgcaggcccccagagagaagccctacccatggacacagaggtgtacgagagcccctacgcggaccccgaggagatcaggcccaaggaggtttacctggaccgaaagctgctgacgctggaagacaaagaactgggctctggtaattttggaactgtgaaaaagggctactaccaaatgaaaaagtaagttg

SEQ ID NO: 225814 - DNA, 480 bp, Homo sapiens
cagccacaaattttctaatggctaattgtgttagaatcatgtactcctttttaaaaagttattcactgataatggccttctaaagtatagtaaattggaacgaacactccggaaaacaatatggtgttagtaacactaaacacacgcaatttatacaacccagcaattccacctgagggagacactcaggagaaactttcatgagtaggctgggtgtggtggatcatgcttctaatcccaccactttgggaggcctaggtgggaggatcgcttgagcccaggatttcaagaccaccctgggcaacatattgagacctaatcgctacaaaaaataaacaacattagtgggacgtggtggcacacacctcaagtcccagctacttggctgagttgggaggatggcttgagcctggaggttaaggctgcactaagatcacgccactgcactccagcctgggtggcagagtgagactctgtcta

SEQ ID NO: 225815 - DNA, 395 bp, Homo sapiens
tcaaagatgaatatgtcagcttaccagatttttgctaaaatccaaaaacatataacttggttttttcagagggcagtagtgttaggctatttctccaattaagctagctacagaaatctgtttaaagacttgccaaggtcacttagcacaaaggtcatgaggcatacagacagcataggctttggcctcaagctacctgggttcaaacccctgctcttttgtttttgctatgtggcttcttaacttctctgtgcctgtttctcatttgtaaaatgggctatcaatagtaccgccttcttaagattgtttggaattaagtctgttaatagtaaaaataaagtacttatacactgcttgctctgtgccagacactgttctaaaccatattagtcaaa

SEQ ID NO: 225816 - DNA, 424 bp, Homo sapiens
gtgctacagtgagagtggcagagaacagacagtctgcagaccaagaagttaaaaaaaaaaaacagttggcaagtcactcctgaaagctaaagacttctttactctgctacagtatttctcacacaggtgaagcttagacataaaagacatgaaagtctcctaatatataatatattggctgaaaatgtgatgatgtggagattcttgtattcttgactgtgactctctatgtgttccatgttttgtgaaagattgttacttttgtgtcattgtcaactatcaatcgctgtgttcatgtattgggttcatgttacccacctatcttctgtgaggagaataaactatgtttttttaatttataaaaaaggaagatgcggccgggcccccttcatattatatttgtgttgttttgtttataaattag

SEQ ID NO: 225817 - DNA, 225 bp, Homo sapiens
gctgcactgacctatggccccaccatgaaagcatcagatgcagccaccgcgcccggccacacacacctttttctaagccagctttgtgtagaagtacagtatacacaccaataaaaggagcacaggcccttggcatccagcctgggggagttttgggagggaacaccctgtatatccagcacccaggagccccccatgtcccttcccaccaccagcaccccctca

SEQ ID NO: 225818 - DNA, 796 bp, Homo sapiens
atcccagaaaaacatttcatgatagtcctgagagatttgttagtgataagtaatactatttacattttattggcaacttgataatgatacatgtattgaattcaatatgcaaaaatattccctgactcctagtccagtccaattttagtattacatgctattatctgattttacacacacagacacaaacacaaattatataatcaccataataagatatttaggaaaatgaatggagccaaatgatagaattcattaaaaatgcttcacgcgtacctcacaaaaaatgtgtgtggcattttaaaagtggcatgtatttgaagaaaagcatacaacatttctctaaatatcccgttatggtgctcacagaattttaaaacctagttactctgcataatgaactgtaaaaatactcataggctatataagtaatatattttagaggcaggaaagaccaaaaagctacgtttaaatatattggctttttaataaatcctgttgtttggaagttataaatacaaatacttggggaaaatctttttaaatcttttatttcactgtatttaaaaaatcctctggattatggtagattggactttgttgctgttttttgtttttgcttcctaaacagtatgtgtatggtgtggcatggccatgggggtggaatcacaggcactctcacacccttgataagaatgcatcatctatgtgaagggcagttaaatcttacatgtcaggccttttagcaaataatcagagaagggctcccagccttttctttatcccagcattattt

SEQ ID NO: 225819 - DNA, 466 bp, Homo sapiens
cggcgcctacctcctgggctgttgtggggattgaatcagcatgccgcacaccggctgtggaatagacagtgggagtcattttaaaaaggggtctttcagtccttggggagttgtcttttctcttctttgtatacaaagagcttcaggctgtcaccaggctggtgacagagtgagactccgtccaaaaaaaaaggaaacgagtatatcaaagggataactgcactcccatgtttattgcagcattattcgtgatagccaagttatagtatcaacataagtgtacatcagttgatgaagggataaagaaaatgtaaatatgttccatggaatattagtcaaccataaaaaataatgaaatcctgtcatttgcaacaacataaatgagactggaggacattacgttaaatgaaataagccaggcacagaaagacgaataccacattttctcactcgtgggaactaaaaa

SEQ ID NO: 225820 - DNA, 450 bp, Homo sapiens
agtagtatttctgccttgcctgactgaggcatgccctttgtgggccaactgagtatgttttaagtagggaagcagacgactatgtggctatttggaacacttgtaatcttgtgagagcttcattccctttgttacttaattaaattgaaacaatttatttcagccaggcgcagtggttcacgcctgtaatcccagcactttgggtggccgaggtgggtggatcatgaggtcaggagttcgagaccaatctggccaacgtggtgaaaccccgtctctactaaaaatacaaaaattagctgggcgtggtggcgtgcacctataatcccagctgctcgggaggccgaggcaggagaattgcttgaacagaggagatggaggttgtggtgtgctgagatcgcgccactgcactccagcctgggcgacagaacaagactccgtctcggaaaagaa

SEQ ID NO: 225821 - DNA, 334 bp, Homo sapiens
gggggctccccggtcctggcgtgcaggtgggtttaagggacgcccagggaccacctccccacgcaagcctgaggacctctgaactttgctacaagtacaaccaactttagccactcttggttggacctgactagaaagggtggtgggaaggcaagaagggtctgaatttaggatctggaagttgagggctctaaggacaggtctgctactaacccaagcaagtctccgcctggtgtggggactcagtttccctatgtctagtgaggtgtgggccaagaccagtgggtttcaccttttttgactgtggcccacaatacaacccatgctgtaacac

SEQ ID NO: 225822 - DNA, 369 bp, Homo sapiens
tggtagttaacgaactactagagaaaaaactatgtctgtctttcaaagcaaggccacaaatgacactttagatttttctttgctctctgtcatatcactcactctgggaaagccaacttccaaccttacagggaggtcgacttagagaggaatggaagtgtcttgtccacaaccacgtgagtgagccttctggatagtgggtcctccagtcctattcaagccttcacatgggacattttgactgaaacttcgtggctgacattttgactgaaactttgtgggacaccctaagagagaagcactcacctcctgaatttttgactaacagaacagtgaaagataatacatggttattgttcaattttaaca

SEQ ID NO: 225823 - DNA, 520 bp, Homo sapiens
aatgcagtcaaatctaggtgcactttcaatattttaacttttaatgtctttgcaaagcaatgcaatctacttttatattatgccagtagtaatgttataatttctcagctggacaattataaacatcaggtaggtttttcaaaacctatctccctcccaaaaccaaaataatagaaatttggagcaaatgacttattttcttcaagtctcatggatttaatagataatttttccccctaaataagataatttagaagtttattatgtatcatcaaatagttgttacttttaactttttatttagaaataattatagatttcaacatgtagttgcaaagatagtacagagaagtcccatgtacagtacacccagttcccccaatggttacatcttacataactatagtataatatcaaaaccaggaatttcatataggtacagtgtacatgtagttctgttgccattttatggtgtagatttgtttaaccattactgtaattagaaatgtttcattaccaa

SEQ ID NO: 225824 - DNA, 489 bp, Homo sapiens
cgagatggagtcttgctctgttacctggctggagtgcagtggcgttatcttggctcattgcaacctccacctcccaagttcaagcaattctcttgcctcagcctcctgagtagctgggactacagacatgcaccaccacgtctggctaatttttgtatttttagtagagatggggtttcatcatgttggtcaggctggtctcgaactcctgacctcatgatccgcccgcctcggccttggtacattttaaactcccaaaatgaccaatatatagtcagggttgaaaacagtggagatgacaaagaactgagactgaggttaagttagaatgaagtagtataaggaacagtctactgccatgaccctattaaaagacagggaggaccatcccaacacagaaactgggagggtggagaggaaaggctcattttggtagacgtttctaagacagaatcaatgagacctacaaaaccaagaatatgagcaata

SEQ ID NO: 225825 - DNA, 476 bp, Homo sapiens
tcatagggattgtgtggggtttaaatgagaaaagacaggtaaggtgctggtaccttataagtgattaagttgccattaaggtattggggacttagtgcttgtccttgaagagctttcggtctcgtgaggagacagcctgatcgttataaactattatagaaaatgggaagaaataagggttgaggtgtgataaagatgtgctaggccaggcaagatggctcacgtctgtaatcccagcactttgggattacaggtgggcagatcacttgaggccaggagttcaagatcagcctgaccaacatggcaaaaccctgtttctactaaaaatacaaaagttagctgggtgtggcggcacccatctgtcatcccagctacttgggaggctgaggcaggagaattgcttgaatctgagaggcagaggttgcagtgagccaaaattgcacaactgtactccagcaagactctgtcaaaaaaag

SEQ ID NO: 225826 - DNA, 596 bp, Homo sapiens
aatgagtaagacacatttcctgctgcagaggaattcagtccattcagggagcctgagcctgacacacaaaccaataattgctaaatactaagagatgttattatagaggtatgaacaaaggattcaatgtgctgaaggaaaatagtggctaataaatcctacagagcagtagatagggacctaggtagaacaaagaggaagattaaaaaataaagacataatacagaaaataggttataagttcaccaaaaggaatggtgaagtttggttgagtgcaggtacatgggtatagctgaaggcctgaatcggaaatgcactgaggactgagaggaaaagagatgaaaaatggtaaagtagcagcactgttagaatgtactgacaaatcgaattggctagcatgtgaaggcaagcacctaccatgatttcttaatttctggcacagacagatggtaatgagccatataaaagaaagaatagaggaggaagagcaacttctaggagtaggaaggaaaaggagactcaatttacacatgctgagtctgaagggagtagacaaacttttagcataccccacattttgtaggccactgagctgg

SEQ ID NO: 225827 - DNA, 1222 bp, Homo sapiens
tatatcacatcacaaattcctgaaataaaactaattctatagattaggaacttagagatttattctgcacttagtcacataatggatgttaaaattaacgagaaactcagattgaggcaaacatgacaagcatgctttactcaaacatcatacagcacagcaacagttcaaaccttgtttcttaaaaaaagagaaagagagaaatagaaaaatgtttttatgtcctactggatttcaggaagagctgaaaaacactcttattcatatagtaaagagggctttgtttggttttgctcattagaattctgtaattctgttagtttcaagtatggtgagcttgagtatacgcagaataacagtgactgaataaagaaaagtaagccttggcttactttaattgtcatagataatgaaatggaattttttattttctgactcaatggcacgtaacataaaaccccaaaatattaatttctctgattctggataaagaatttattgtattgcacatagttgagtttagacaattaatagctgctaccacaacatgtaattttttaaactatgcctttcaagtttcagcacatttgaatttcatttactatcctttttatggctaataataccatggcttgaagtaaaatatttgcaaatagttcaacatagtagtgagtaagggtattttaactgtattcacattcactccctttacagatattttgtgagttcaagtgaagggaaaggtaacgcgaattatgtattgtagattaaatgcgaagttaagtgatcaccattaatatgtaaaattatcaatggttttatggtttacttaaaataataaatacctgaatatgtattctgcatgctatagatgagtttctccagtatttttacagccagcagacacttgagtcctgtcttctaatgcttatatgctagaacagaaaggaattaaggtgtaagtctatttcatgtgatgcaagtgaagtcaccaaataaaatcataaaactgccttttgctaaggcaataaaactactaataacaggcctgttctacatagctaagaggtttaataaaaaatcgaattccttgtttaaaattacatgtctttcatcctgtcatccaggatactgtttaaagagtctctgttatgcactgctttgtttcttgctcagtggttctgtataggttttcttatacaataaaatacaatgaactttt

SEQ ID NO: 225828 - DNA, 407 bp, Homo sapiens
agagccaggcacacacacacatacccacaggcacacatggacacacatacacacacagactcagagacacgcacatgcatactcagacacgcacagacacacacatgcactcacacagacacacacacacacacctatagtgaattgctctgaggtttctaaatccctttgaaaagcaagggcattgttctcaatggcagtcatgccacttgcacgcacagcctctcagaggccacgtggggagctgccttgtgaaactctgaattagcgatttaaaggctgggattacaggtgcgagccaccatgactggcctacactagatctttattaaattaaataatcaaatatcaacatagttatgctgtattttctcaactccctgctgaaattattttacaaagttaag

SEQ ID NO: 225829 - DNA, 323 bp, Homo sapiens
gaatgaaaagataaagccatgtcattcctcatgtgtatactatatatttggggtcaggtgaagaaataaattattataagaagatgaccagcttccatatttcaggaatgaaaatgcttccagactattgaatatacaatagccttcaaattgagaggataaattcaccctcctcaaatagttgtaaatagtccattgctcactaggaatgagcaaaaagaaaaataaacaggcatgatcaagtaccgaggttttgaatagttaggaattagatactttcacgtagtgttagaattaggtactgaaacctcctgagttatgag

SEQ ID NO: 225830 - DNA, 696 bp, Homo sapiens
gaggcttgcatcaatcaagtaatacacaagtaagtggcttagatataatttaaacccaggttgatatgactagataagaccaagtaaaggtctttgctctattgcactaagttgagcaaagatacctcgggaaatggagataaaaaagcaaataaacaatatggtcccacctgttggaggactttacgagtaagttgatttgtttgcattcaattctaagaacaatagaagatctttacactattcatacctgtaaaatatttagaaaattctgtgggtaataagaaagagtattaaaatgaaaagtaggctgggcgcggtggctgaagcttgtaatcccaggactttggaaggccaaggcaggcggatcacgaagtcaggagttcgagaccagcttgaccaatatggtgaaactccgtctctactaaaaatacaaaaattagctgggtgtggtggtatgcatctgtaatcccagctacttaggaggctgaggcaggagaatcacttgaacctgggaggtggaggtagcactccagcctgggcaacagagcgagactctgtctcaaaaaaaaaaaaagtaaatgtcttcttttttcttctagtccccatattccctttttcaggggttacttatttctcgtgaccctttccagagattatctatgcctatatatttgtgtgtgtgtgtgtgtgtgt

SEQ ID NO: 225831 - DNA, 383 bp, Homo sapiens
agctgatggtggctttgtaaggtgtattaaagggacttgcgtcccagtctgtaggccgtgggagccagcggaggatttgtgtactagaaacggtggggccgggcgcgatggctcacgactgtaatcccagcactttgggaagccgaggcaggtggatcacttgaggccaggagtttgagaccagcctggccaacatggtgaaaccccatctcttctcaaaatacaaaaattaactgggcgaggtggcgcctgcctgtggaatcccagctacttaggaggctgaggcaggagaatcgcttgaacctaggaggtggaggttgcagtgagccaggatcgtgccactgccctccagcctgggcgacggagcgagactcagtctcata

SEQ ID NO: 225832 - DNA, 360 bp, Homo sapiens
tactgtcctgaatccaggaaccccagttccacaccacctgtcatgatctaaatgtttgtgttcccccaaaatgcataggtcaaaatcctcacctccaaggtgatggtatcaggaggtcaggcctctggaggcgatgaagttatgagggtggggccctcacgaatggaattggtgccattataagagaggcccatgagagctccctcaccccttcctccctgtgaggacaccaagggaaggcagggctgtctatgatgcagaaagcaggccctcaccagacacctgatctgctggagccttgatctctaacttacaggccccagaatggcaagaaataaatgtgtgttgtttaagctgaaa

SEQ ID NO: 225833 - DNA, 352 bp, Homo sapiens
ccctccctcgtgtgtccccagctcctcagccttcaggcctccgctctggtgtcctcctccaggcagccttcactgaatgcctctgcctaggtcaccctgcccagcactcagcacgattgcagttgaatgcacattgtgcaaggatttgctgacggacggtctgtctccttcaccagactgccttgcgtgaggtcagacttaaaatgtccgagattgaactctctacccgccccccaaaccacagtcttcctgtctcaataaaagtggccttcatccttgccagtggtacaggccagaaaccagggagacggcctcgacttccctctctctcgtccctcacatcccatctctc

SEQ ID NO: 225834 - DNA, 341 bp, Homo sapiens
tagcagctgggattacagacacccgccaccacacctggctaatttttgtatttttaatagagacagggtttcgctatgttgatcaggctggtcctgaactcctgacctcaggtgatccgcctgcctcagcctcccaaagtgctgggattataggcgtgagccactgcacccagccaggtgggtctttaatatcagcaaccctttgcttccatgtaatttccagccagaggtcccagttcccaagagccaggctgttcctcttccacttgagtgccctcctctccctccaggccacctcctttccacactgctcatctgcacttctcccttctgactctcgc

SEQ ID NO: 225835 - DNA, 561 bp, Homo sapiens
ttggtaaagtttcttttcagggggcaaagttgagtttatatttttggttgttgcaaacctgatttttgtgttttctttccatctttagttacttgtaaaggaatttaaaggtaacagaaaccactgtcagattattgtgcagttcgaaaatgcacagtaatgatttagtccactgtgcttaatttctgtctactaagatgaggtaattatgtaatttgaggaaccccaaagaaaagcagatgttcatatgtctcgctgaacgtgtaattatgtttttgcattttcctaccttctcttgccttttccatttcttggagcacttttcccatcctattggaccacccatcacactgtaatagtgcagctccgtattgttatctctttcatctgctgagctctggagtagaaaagcctgacctctaaagtcaggtagacttgagtttatactatctgtgctacttagtagtttgtgaatctctttgagcctcagttttcttatccttaaaatagcctataccaggtggctgtgaggaataaggcatgtctataatatctccagtg

SEQ ID NO: 225836 - DNA, 324 bp, Homo sapiens
acactcagtcagtcatgctccccctgcaggatggaaagccggatggcagggattgcctggtgaacaaccaggtcaaaaaatataaactgtgcctttcccaatgccagcctcgggtccgagggctctacgtgcattatctcttttagttcactcgacagccctaagagatgggcgttattattagccacggccaggattagggtgaggtcattcctctaggttcgaatttcagggggtgatcctccagaacccttcagtaatcaaaataaataatagttcaatgcaatatatcttatctcgattataagataatcaagccattta

SEQ ID NO: 225837 - DNA, 206 bp, Homo sapiens
agcagaagacagccagaacaaaactggtttctacctactccagaaggtgttctccatctccccatctcagtggaggccagcaccatgccttgcgcagccccaagcctgggcactaccttcacctccttctcccttcctcccacggcaaatcctgacacttctgccttcaagacagctatggaatctgcccccttcttcttctccac

SEQ ID NO: 225838 - DNA, 1162 bp, Homo sapiens
acattgattcagataatggaactcgtttcagtgcaaatattgttaaagggcttactcaaactctaggaataaattgggaatatcatactccatggcatccaccttcatcaaggaaggtagaaaaaaatgaaccaaactttaaagaatcatttaaatcgattttgaaaacttcattgccttggaccaagtgtctccccattgccctgctcagaattcaaactgcccctcaaaaagacattacgtacttggtctatcttctattcgaactgcccctcaaaaagacattacatacttggtctatcttctactttgtcttctcttaggacccaaggtctcttagcacaaacactgcctcttgagttcccagtgcatctgtatcaatctggagattacgtcctcatcaaaagctggaaagaagaaaaactcgaaccaacctgggagaccttatctagtgcccctaaccactgagacagcagtctggaccgttaagaaagggtagacccatcacactcagctacccaggaacattttattttatcaatgtaacctgatcatcgtttcctcaaacaattacatttgatgcttgtcttgttatgccctgtggggacctacaaacccaaaggcaactagcctcttcaggcaataacatacaggacataggaatgggcaaagacttcatgactaaaacaccaaaagcaacagcaacaaaagccaaaattgacaaatgggatctaattaaactaaagagattctgcgcagcaaaggaaactatcatcagagtgaacaggcaacctacagaatgggagaaaatttttgcaatctatccatttgacaaagggctaatatccagaatctataaagaacttaaatttacaagaaaaaaacaaccccatcaaaaagcgggcgaaggatatgaacagacacttctccaaagaagacatttatgcagccaacaaacatgaaaaatagcggatcatcactggtcattatagaaatgcaaatcaaaaccacagtaagatactaactcatgccagttagaatggcgatcattaaaaagtcaggaaacaacagatgctggagaggatgtgcagaaataggaatgctttttatactgttggtgaaagtgtaaattagtcaagcattgtggagacagtgtggcgat

SEQ ID NO: 225839 - DNA, 1180 bp, Homo sapiens
acattgattcagataatggaactcgtttcagtgcaaatattgttaaagggcttactcaaactctaggaataaattgggaatatcatactccatggcatccaccttcatcaaggaaggtagaaaaaaatgaaccaaactttaaagaatcatttaaatcgattttgaaaacttcattgccttggaccaagtgtctccccattgccctgctcagaattcaaactgcccctcaaaaagacattacgtacttggtctatcttctattcgaactgcccctcaaaaagacattacatacttggtctatcttctactttgtcttctcttaggacccaaggtctcttagcacaaacactgcctcttgagttcccagtgcatctgtatcaatctggagattacgtcctcatcaaaagctggaaagaagaaaaactcgaaccaacctgggagaccttatctagtgcccctaaccactgagacagcagtctggaccgttaagaaagggtagacccatcacactcagctacccaggaacattttattttatcaatgtaacctgatcatcgtttcctcaaacaattacatttgatgcttgtcttgttatgccctgtggggacctacaaacccaaaggcaactagcctcttcagctcttgtttctaacataggcaataacatacaggacataggaatgggcaaagacttcatgactaaaacaccaaaagcaacagcaacaaaagccaaaattgacaaatgggatctaattaaactaaagagattctgcgcagcaaaggaaactatcatcagagtgaacaggcaacctacagaatgggagaaaatttttgcaatctatccatttgacaaagggctaatatccagaatctataaagaacttaaatttacaagaaaaaaacaaccccatcaaaaagcgggcgaaggatatgaacagacacttctccaaagaagacatttatgcagccaacaaacatgaaaaatagcggatcatcactggtcattatagaaatgcaaatcaaaaccacagtaagatactaactcatgccagttagaatggcgatcattaaaaagtcaggaaacaacagatgctggagaggatgtgcagaaataggaatgctttttatactgttggtgaaagtgtaaattagtcaagcattgtggagacagtgtggcgat

SEQ ID NO: 225840 - DNA, 1752 bp, Homo sapiens
ggtgcctgtgaggaggcgcccgggccgcaaccgctttccgagatccccagtcgcgcactcgctccccgcgctcctgaggggccgcccggccggaggaggccgtcgcggggctcggcgttcagcatgaaccgcagccaccggcacggggcgggcagcggctgcctgggcactatggaggtgaagagcaagtttggagctgaatttcgtcggttttcgctggaaagatcaaaacctggaaaatttgaggagttttatggattactacaacatgttcataagatccccaatgttgacgttttggtaggctatgcagacatccatggagacttactacctataaataatgatgataattatcacaaagctgtttcaacggccaatccactgcttaggatatttatacaaaagaaggaagaagcagactacagtgcctttggtacagacacgctaataaagaagaagaatgttttaaccaacgtattgcgtcctgacaaccatagaaaaaagccacatatagtcattagtatgccccaagactttagacctgtgtcttctattatagacgtggatattctcccagaaacgcatcgtagggtacgtctttacaaatacggcacggagaaacccctaggattctacatccgggatggctccagtgtcagggtaacaccacatggcttagaaaaggttccagggatctttatatccaggcttgtcccaggaggtctggctcaaagtacaggactattagctgttaatgatgaagttttagaagttaatggcatagaagtttcagggaagagccttgatcaagtaacagacatgatgattgcaaatagccgtaacctcatcataacagtgagaccggcaaaccagaggaataatgttgtgaggaacagtcggacttctggcagttccggtcagtctactgataacagccttcttggctacccacagcagattgaaccaagctttgagccagaggatgaagacagcgaagaagatgacattatcattgaagacaatggagtgccacagcagattccaaaagctgttcctaatactgagagcctggagtcattaacacagatagagctaagctttgagtctggacagaatggctttattccctctaatgaagtgagcttagcagccatagcaagcagctcaaacacggaatttgaaacacatgctccagatcaaaaactcttagaagaagatggaacaatcataacattatgaaaccgtggtttgaatgttttcagagtgaggatgccatgaggacttgtacatttggctagtttaaaagcatatatacctctgaccagtgacgtggaataggcatgagacgagtaacgttgcaagcttacaatattattaaagtagtagtttgataattgttaatataaactttggtggatcagaggtgaatttaagtccaaaacaaaggggcctttgctgatgaagttacgtgcttttgctgttttgtctgtggagaatcagatgttaaagcacattcttggaactatgtgagaagactagatcatttctgttggaagtggttgcatatttaacctgctgtgcagagcccagttaatttttcctttaactgtatttttaaaattctaatgtgaagtctgattctctcttgtggtacattggggacctcagctcttaaaggtctcatgttcccaatattttattttgattttttttttttttttttttttttttttttttagtgactgggtc

SEQ ID NO: 225841 - DNA, 489 bp, Homo sapiens
gcaccccagcctaccgcgaccctccacacaacaaaccagactctcgcgtagtgccttggacattggaacattccaaaaacaatgtcaggatgccctgtttgaaaacactgtgaagtgctttacttttcacttgagatatttgccatgggaaagactatcatatttttccctaaaggagaataaaggccaaggacgcggaggagatcatccagggcctgctcctcacgctggaagactcttgcgcctgcctgacctgagtaggagtgatacttcacacaccctggaggacgcactcccaccccctaacgcccccctggcagaaatgcgcggcctctatcgccaatgtcggaccggtttcaatgtcttctctcacaatcctctccacaccactccgcccttcctgcatcgcccacctccttgagtgctgaccggcaccatcggtgcttcctcttatccatgaatcccgacctcagcgcatacctcctcccc

SEQ ID NO: 225842 - DNA, 326 bp, Homo sapiens
cagattcagctgcaagtgaatagatatttttacagcatttctataattattttgttttatttttaaacagaagaagcagactacagtgcctttggtacagacacgctaataaagaagaagaatgttttaaccaacgtattgcgtcctgacaaccatagaaaaaagccacatatagtcattagtatgccccaagactttagacctgtgtcttctattatagacgtggatattctcccagaaacgcatcgtagggtacgtctttacaaatacggcacggagaaacccctaggattctacatccgggatggctccagtgtcagggtaac

SEQ ID NO: 225843 - DNA, 840 bp, Homo sapiens
ggtgcctgtgaggaggcgcccgggccgcaaccgctttccgagatccccagtcgcgcactcgctccccgcgctcctgaggggccgcccggccggaggaggccgtcgcggggctcggcgttcagcatgaaccgcagccaccggcacggggcgggcagcggctgcctgggcactatggaggtgaagagcaagtttggagctgaatttcgtcggttttcgctggaaagatcaaaacctggaaaatttgaggagttttatggattactacaacatgttcataagatccccaatgttgacgttttggtaggctatgcagacatccatggagacttactacctataaataatgatgataattatcacaaagctgtttcaacggccaatccactgcttaggatatttatacaaaagaaggattggaacattccaaaaacaatgtcaggatgccctgtttgaaaacactgtgaagtgctttacttttcacttgagatatttgccatgggaaagactatcatatttttccctaaaggagaataaaggccaaggacgcggaggagatcatccagggcctgctcctcacgctggaagactcttgcgcctgcctgacctgagtaggagtgatacttcacacaccctggaggacgcactcccaccccctaacgcccccctggcagaaatgcgcggcctctatcgccaatgtcggaccggtttcaatgtcttctctcacaatcctctccacaccactccgcccttcctgcatcgcccacctccttgagtgctgaccggcaccatcggtgcttcctcttatccatgaatcccgacctcagcgcatacctcctcccc

SEQ ID NO: 225844 - DNA, 651 bp, Homo sapiens
tgatcgatcgagcggaccggagatatcagctagcaagtagattccttctcattttccagattttctacagtgagcattattaattttataatcagaaaaaaaaagaataactttcattttaaagaaagtaacactgatctgtgtggtgaccattctggggatatgtgtccagcctgaagaccaccaagcaggccccttttcattagcaagtgttgttggaaataatggagaggcaaagcacaggtcaaagcattaaccctggagtggtcagcttgcctgtgcttaactccagaaagatgcaaaatatacattcatcacaagaacaactgagctcttacaaggaaagattttccagaaactcaaggaaaaaaaaaaatcttttctaggcaatttcctagctaggtgcaattttcttataggtctatctaaaaacttttgaaccgggtgactcaaatttgtcagtttccaatattcccatgccatcatcttcatcagactgaattcattacacttgtactatcctgactgtgcatttaggaataaatgaccccattgggtaaagaatgagctgaggtcttattaaagctggcatctttatttccctaaatgtcatactcactttgaaatccactgatagaatgaatgggggtg

SEQ ID NO: 225845 - DNA, 1651 bp, Homo sapiens
aagacagtgtcttgcactccagcctggggcgacagagcgagactccaaaaagaaaaaaaaagcttactataggaaggcaatacttacagatctgatgggataggcttacactttgttgaatgagcaaagatctttattcaacaaagtcttgaagtgcttgaaagtttcacattttcttttttgtacctatttctgtaccttgctaattcttcagagtgatgtggaatatcatttatccaatgttacctgaaaacatccccctaggggagaaagtgagagtcacctttgtacaggagtgtgttcaaaagaatgagaaaggtttttttctagacccttcaaccagcatcttttctagtctgcctgagttaggtcctgcacctgttcctaaccaatacagtctgtccaggctgatctcaaactcctggcctcaagccgtcctctaccttggcctcctaaagtactaggactacgtgtgtgtgccaccatgcctggcttgataatacaaatttaaaaaacagcgtagcaactgtttacacagcatttacactgttttaggttattataagtaatgtagagatgatttaggtatatggaaggatatgcatagattatatgcaaatactataccattttatataagggacttcagtgtcctcggattttagtgtccacagaggtcttgaaagcaatgcccttcagatgctgtgggacaactgtatatgttattttgattttctagtctattacagtgaaaaaagaagtacttttttacttcttaaaatctgaattaatttagtaacctactagtgtttgaaaagcagccctttaagagaactgcttgaaatttcctgagaaaatctgagttgtattattattaataaaattgccagttttgaacacattcaaggagtgtgttaaacacgtgtgtttaagttggtttgatctttcttcagtatctattttgtctattttatttttagcttgattaagataaatagtaaaatacttggtgaattttatggtgtattagtataagctggtattcagatgattttttatttttaacttctttttaaattgttttcctgtcttattccaggccctgaatattttcctcctctttatattagcaattaccaacttgtattccttctaatcagtgttttttctttgtattttactgctccctcttatctaaatccaccatcaattagtgtcttaaaagattttgctgctttagccactgtaatggggtttggagactggcagaagaataaaaccaaaataagtatgttttagataaatgttaatatgtatatattgagtcacaaggtattaatctgatattagcaaatcatgacttcataccatgccattatattaatatagtaaatcttaggtttagcattgacttctgatttctagaacctcactctatctgtaaattgttcattccagttataaaagtaatgaagtatatgaaaatgtttctgttgtcatttgtctatatcagaatgcataagttatgagaaaagcgtgctttttgttttttagtgtgtatcatttaacctcttgacagtcattaggttgacagtgttcacatctgagagaacctgatttaggttcttgaaagaattttgtgaaggccaaa

SEQ ID NO: 225846 - DNA, 1259 bp, Homo sapiens
atattaactaatttagaaaacgttgctttcgcagacttcgccgggtgcctttcactgccaaactaaatactccactttaaaatacgcccctgcgtactcatgtgatttctccttttaggctaggaatgtaatgttgacataaatgtcaaataaaattaatgagagaatgggccctcaaatggtgctcctgtgaagggaatttgttagactgggacctttgagcccaaatgtatatataattatataacactcagacaaggaaggaatctgaatgttaagctttagcaaatgtatcacctttgtcagaaatgctgttacctacaaaaaaaaaaaaacccaaaacaaaacaaaacaggttgcaagtaaattaagatgaaaataccatcagattagaagtctgtcacggcaagctactgcagaattagaagggtggcccatctgctgggtatccaatccttcccttatctgtatagaattcggatcagatgtcttctgttccccgaacacttccgctgttgactttgcaaatggacctcctcccgcccaacccagctccttccctccctcctccgtctctcccaactggccacttaggaagagtaaaaatggcaattagaacaggagcagctattttcactcagtagtcaaagaattggatactagcacagtggctgcctccatccgtatgctgatacataactactttgtcttgtatttgtagtctcaaaaatcttccctaagtatagtagaatcagagaaaatcgctctaatcattgaaaagcgccctgtgctgagtaaagcagccagtcttctcttgtcacagtaaaaggctgggagtaaaatttcccataaacacaggggaaacctacatttactcacatgccaaggaaaatggcacggaagacccacgtgtagccacagcagagtctatgcagagggcctgcaaatgcctggggtgcgagtgaatgcctggaggggcggagtttccaagataacagctattgtgttttctttttcacacttcagaagagaatcctaaggactagactccgctcagtgcattcctttttcatacactgatctcaagtacaatcacataattttgaaaatccatgtagtcctccctaaataaaattataaggataggtttctatttccttccgattacctagatacctccgtcttctggaaaaccccaaaaagaccagtagacgaatcaggaaggtcctaggagtgattcctccaatggcaggaatcat

SEQ ID NO: 225847 - DNA, 656 bp, Homo sapiens
aaatggatttttctagctcctccaagttacagatagttccacgcacacacagaactcaccactctcaaatattttccccactagtatactattaaatttttcaaacatgcaaaagatgaaagaattgctcagtgaacaccatgtacccaccacctagattctacaattaacattttaccctactttctttatcacatatatgtacctatccatctatccattcttccatgaatccatcaattcatctaattttttatatatttcaagttaagttgcagatatgtagcttatgtttcaccttaaatgtttctgcctggctattattaactggagtgcaatatgtttttggttcttctttatggtaaaatctatgttcagtgaaatgcacaagacttaggtatgccattaataggttttgacgaatagacaaaccttgtgtctgaaactgtaataaaaaaatcaaacactaccttgctttcaaaaagtttcctcacttcttttcttggtcaaaacccctccccacctcagcccacccctcagcaaccattgttctcaatttttttttttgcattcctagattgattttgcttgttccataacctcgtataaatgaaagtgtacagtgtgcaaggtttgtgtctggtttttccaccaag

SEQ ID NO: 225848 - DNA, 429 bp, Homo sapiens
catattccctgtgggtaaagggggactactgtatttttctaactgaactgtgatacgctgtaaccttttcttcatgacctccctcccctctacacagcttcttgctccccatagaaagctaggcagtgatgctagttaaaacacaaaacctattttagctgttagcctttcattgctagggttaattcccctgatagcagggccatttcagatcctagggtaatgtaaaattaaagttgtgtggcggatagtcacttggaacattttttaatgggagcttcaaacaatatggcatagtatgtacttttggccggattaatacagccacaagaaacctgtcttcagtacaggataatgattatttttcatgtcataacctgtgcaatctttgcttttactttgagtcagtaaatgagataccctatgcta

SEQ ID NO: 225849 - DNA, 189 bp, Homo sapiens
cttacaaaaagagttagttatgacagtaaaacttttggtaaataccataggatgaaatcttctgaaatttgggttaggcaatgaagtgttagctatgacaccaaagcaaagttaatgtaagaaagaaaaggtgataaagtagagttcatcaaaattcaatacatctgtacttcaaaagacatcattaag

SEQ ID NO: 225850 - DNA, 505 bp, Homo sapiens
agaaaatggatacatgctctgagggaatgaatgtggagagatcagaaggtcaagaacaaagccctacaacatgtctgcagtaaagggatagagaaaagaaaggctataaaagaaggaatgaaacagagttagagtaaaattataaaatcaaagctaaggagaatttccagaaagggtaatatcatttaatatcatagaagtttaggagcacaagatgggaaaaaggcctttgggtaactgacactgaggcagtctttagggaagctccatttccgatagaggagtagacagaaagtcagcttgaagcagggactaggtgaagaagctgttggctggtcgcatggggaaataaataagggatggcatatgccatttttctggatttctttctttcttgcccagcctctatatatgcacagagttttgcgaaaacttacaaaaaataaaaatgaaaccaatttcgtttgcagactcaaatacaatgctttgtgttagaatcaagata

SEQ ID NO: 225851 - DNA, 413 bp, Homo sapiens
tggttgcacataaaaagaatgagtattctgcagtttaggggtgtagtagttctataaatgtcagatcagtggttggtaatgccattgaatatcccttacatcctttctgattttgtctactcagtctccaactatgattgtaactttgtctcaccttagttctccattgtcttttatgtatcttaaaactcagtaattaggtgcatatacatttagaattgataagttctccattaactaaacattgttataaaatatctatctctaatacttgtcttgaagtattttattaatgttttcatggtatgtctttttccatttttacttataacctattggtatctttatatttggataaagctcttgtaaacctttttgaagctttttattgaatctgatgatctttgctttta

SEQ ID NO: 225852 - DNA, 448 bp, Homo sapiens
agcccttcaggaaccaacaaagtcagctggagaaaatccgtgcagagtagacaagagggaagctagtggtggaccttagattgatctgaaacaaccaccagagagagaacgtcggcgctaagtttgaaaatactgaaaagcacactggtagatcaggctacttactactgggaagggacttaaccatatgtgctgcatgcgaggagatggtcttgtcccactttttgtgagaggagatggtcttggaaggataagtaaggcatcctggtaaaaagggtcaaagggaccctcttttagaggcgagctctggaaatcttgcagtgagagggaaattgaagaacctgcaagaatctcttcccttgcaaaactgaaggtagcccagccccttctcccatcattccccttccaaataataataataaataataataataagttcaattttaaa

SEQ ID NO: 225853 - DNA, 703 bp, Homo sapiens
ctggtaaatattcagaaaataactggaacacaagtactttaaaaactaatccagcactgaaagaatagacaacactgtgccagtgcattctacaaggcaactcacactatatgtgatgccaaatgttaacggctcattttactttttccagaaaataatctgagctggttctcaacccaggcatatttcctatgctccctctatataatatacttttcccacacttaataaaattcttgtgactgccagctgggttaaacttgtgagctttccttctgctttcttggcttgtctctgttctacttgatattatcttcctgagacttctttgatgtcatcctaacttttccctgattatttcaatcctactatggctaaaacagtgcaccaactataaaactggaattacattcttcttttccatgcttaatgggttcttcctaactttgttctctattattaataagtctctctttttcaaacccaaatttttcattttgtactaacaaaatttttttactaattttaaaacttatatatgatattgtggaaaataacataaaagtaaaaagataaaaatataaattacccatattctcactaatcaaagatgaggtaaaatttgattgctttttttgtttcctatactgaatgtttaattaatgattttgaattttttcttattaatagcaaaagtattcaa

SEQ ID NO: 225854 - DNA, 363 bp, Homo sapiens
gtagcataattttttaagtcataaagatctgtgaatatcttggaaatcagctcttgaatatttatttttatgctttcctgctccatttttagaaaaggatgataattttgtattacggtggtgattttttgtgtcatagtacagaagattacagagtatataaaaatatagagacatattttgtcaaaaaagattagggatcaaatcctgagtagtattctcacatcgtcttggtactgaggctttctgcttgtgtacacgctagtgtagaaagcactttcctcctggattacaccaagatgacggagatgaatggcgcaagtatgttgtatcaatattgaaaatgaacatgagcctggaaaa

SEQ ID NO: 225855 - DNA, 785 bp, Homo sapiens
ggcagataggcctaaatctttcagattctttctacaaggcaaataacccctctcttgttaattatgatgctgagaaagcctctgtctctttatttcaccttgccaagacacccacactactttggtgatgaaaagaaaggaatgagagggaaagtttggacctgtcactttggtgacagggaaagtccaggtcactttattctgtaactctccattcactggtcaaataactccatgaggctatcagtggctacagtggaaggacctgatcttgtccatctttgtgtgcacagagcctagcacagggcttggtagagggtatatctagtgaatggagaatacatggagaaacttaactaagttacacaagcatatctgacaggaatgttaccttcaattgtatgttacatatgattagtcacttttcatacactataacctctgatttttcactcaagtttgggctgattatattgtaatgatgttagataatactcaacatgattcagtatgacaaacttttttgagcacctactttatataaaacatgacaaattgcagtgtgatgtaatcaaaaacaaagaagccctataagaccatttctctagaacagatgttcttaatatttttcttactctaaaatatgtggtagatagtatgcaagaaaagccgggtgcggtggctcaggcctgtaatcccagcactttgggaggccaagatgggcggatcatgaagtcaggagttcgagaccagcctgaccaacatggtgaaaccccgtctctact

SEQ ID NO: 225856 - DNA, 367 bp, Homo sapiens
aagtgcactgtttttacttaaagtgtgtgttgtgttttgttttgtgttgtgttttggaggggctggtagaatttgggaagtctaactccatccttgctccctccctaaccacatagaattactaaatttcagaatttaaatactgtatgttccctacaaagctgaatttgaaaacggctctcattgagaggcagtgtgtttagttaagagcctggactttggtgtcaagacctgagttctggtctgcctggggcaagttaccttacctcgctgatcctcagttttctcatctttaaaatggagatacggctgggattacaggcgagagccaccatgcctggccgaaaagcaggatttctgcaagaat

SEQ ID NO: 225857 - DNA, 150 bp, Homo sapiens
agtctgtgtatgcttgtccttatacaacaaacttctacaagcaactatacaacaaactatacaagcaacttcactaggctcaaatgtaaattttaatgttaataaaaacagcttccagtcttggtaacacagtgagatcccatctctaca

SEQ ID NO: 225858 - DNA, 480 bp, Homo sapiens
aggtgtctcgcttccccatttatcttttgaaagagaatgggcacctataaacctgactgtcaggattcctgactgcctaggagaggtggggaagaagtggcagatttggggacctgaggcagcagtggggttggtaggcttgtccaggtcgtggcgtattcccctccgtccctgttaggagctgaacccttagaatgttgctggggagatctggaaagtttactattctactaatgttttgtacaagtgagaaagttgaaagagagagcgagaacccaaatgcagactgtcctgccatcatgtcatttaagtaatgtggcatcaatgtaagattcccttccaaggcccacttcatgtgagtaatgtttaatactagcattttccaaagcggcctggctgccagcagggtcacggccaagggtacatttgaacagtctgaagaaaaaaacaaaaacgaaaaccaaaaccaaaaccaaaaca

SEQ ID NO: 225859 - DNA, 420 bp, Homo sapiens
actcatgtggggtattctcctctagggctaaaatcaaaaatggggcaaagctgaagatgccaagtggtccccaggaacattactgctcacaggagggacaccccaagatgagcatatctgctctgaccacataccttctagccaggcctatctacccagggcccctcagaaccgaccatgattaaaggacagccttggtgtgatctgctccatccagggaaatcattcagagttaattttgcttccttttccctccattccggttctgtccacatcctgacttctgatatgtcctcccttctggatccttctcccatcctttagacttcacattgatctgggtttccctggctttgacactcagtaagggctttgggcaaaacccaccttttggttccagcagctcctgtttgccccaag

SEQ ID NO: 225860 - DNA, 452 bp, Homo sapiens
tcagtgagtggtcctgggcacctgagcttgtgcactgaagatttgtgctgatctgcagtgagatgggtggagatttggagggcaaccacttagagactttgataccaattaagcagggtaactttaggtctgttaaatctaataataattttaggcttgaattttagtgtatatttttatttcattttcttagtaattcattgtcattgcattgtatttttatttttattgttttagagacagagtcactctgtagcccatgctgaagtgcagggttgccatcacagctcactgcagcctcaaactcctgggctcaagtgatcctccctccttggcctccaaagcactgggattacaggagtaagccaccacacccagcctgttattgtattttatgaaaatgctcacctatggtggattgaaaatgcacttaaacatctatttttaagtca

SEQ ID NO: 225861 - DNA, 241 bp, Homo sapiens
aagcacgactgtgacaggggaatgggaaatggagaaccagcgtaatgtctccattgcaggtaaatttcatacggaaattaggtatctggaaaaagattcccttaaaactgattctttatacccttatatccttaaaaggcctcatgtacctcaggaggtctgtgtatctcagtttgagggccaatattctcgtacagacaaaaatgtataaaaatatatacaatgtgatacttcttgatac

SEQ ID NO: 225862 - DNA, 631 bp, Homo sapiens
ctttcccagagacagattgaacttcaaggtaaaagtgaattttcagatgcggacaagctaacttctaaggattatgagtaattcgactcatcttttaaatatccagaaaacctcatttttagtgaaagagtggagataaaagaatattaagagtccagaaactggtgttctggctgtggccctgccttagactgtctcactttgtagtcactttatgcaggaaacgtgcccgggcatcttgaaatggatgagttctcttctggagatatgtctcatgtgtacgcatatctggagatatgcctcttgtgggtgctgctgcagctgctgtgcccatctcatatcaatacccaagcttttctcatgacgaaccagatgactcttggtaaccaggtttgctccccagcttctaatttcaatatgatgagaagttacataacatttactcctttgtaaaggtttctctgtcatcagacaaaactctgaatagaaaccggtgggtaatccagtgtactggtttttcctaatgtatttggtactatagtgtatgaaccgagaataatcgagtcaagtgaaacccccttttccagtcataaaatgtctcattcattatactaaaaggagctgttctttt

SEQ ID NO: 225863 - DNA, 177 bp, Homo sapiens
ctctagcccagcccaggcctcagggagagctccccacccccatacacactgtgcctgcccgctcagcactgatacctccttcccagggtatcagttccagaagcgctccccacccctgacaggagagggtagaggctctgggaaacgagtcttctagtggaagaagtgaactacaaa

SEQ ID NO: 225864 - DNA, 319 bp, Homo sapiens
tagagcagtgagtctattttatatgatactaataatagtgaatacatgtcactatacatttgtaaaacccatagaatgttcaacaccaatagccgtaatgtaaactgtggattttgggtgatagtgatgtgtcagcataggttcatttttgttgcaataaatgtaccactttgtaggagggtattgatatgaaagagggtttatgtgtataggggcagagcatgtatgggaactctctgtacttcatgctcaacttttctgtgaacctaaaattgctctaaaaatagtctatttaaaaagtaaatataccataaaatct

SEQ ID NO: 225865 - DNA, 361 bp, Homo sapiens
tgtaagttttctgccttggccctaccaaaagaaagcattgggacatattggtggacccagaaccaaggtgctgtgagtctcctacctggatcctggctgcaggaagcattgtgccatatctctgcactcatcaactatttggtggagtgctcttctcttgcttgggcttatcccattggagatattgtgatgtatctctgggcccatcgcctagattacatggcactcgttttcttcctgggacctatccacagtgaagattgtgacatatcggtagacccagcacctacatgatgtgactttcttctcatactggggtcatgcccactgtggtgattgtgacatataactgggcccaaac

SEQ ID NO: 225866 - DNA, 373 bp, Homo sapiens
cattttcatatttattaataggggtaagaagaaccaaaatgtgctgttaaagtgggtcagtgcatgtctggaaatagtcccttttgatgtttccaaagtctcaaatttctacctgtactattcaatatttttatcaatgatttggattgaggacatagagattccagggataacatatttgtatgacatcatgtaaatgtattaaaagtattgtgtaacataatcagaatccctcaaaattctaacagcacaaaatgaatagccattcaaatagtagccaacatatttagcttaccacccttaggcaatggaaagcataggcattaacaacctccattaaattatgacattaaatatttatagaaatctatga

SEQ ID NO: 225867 - DNA, 954 bp, Homo sapiens
cggacacgaggtttttctctacctcaaagagggagacaaacatatgtactcaacacatatgtgtaagtataagtgccgggaagaggagtcctccaaaagaggcctgttgagagtgacactgtgctgtgacagaaacttctgtaatgtcttctaatggagcttaggaacttgcagaggatcatctgatcaagatccagaatcaagaccaaccaacatgaactgttttatttcccacaccaaattccacactggcctaagatcccagagagagctgcaggggctgtcctcattgcaatgaaggggctccccacaccccacctccaccactagattcctaaaatcatgagcattgaaacaaaatcctccatgagctatgcttattcttttgtcttctactcctgatttctgatttctatcccttgtaggctaaataatggacccccaaatatttctacatcctaatctctggaacctgtgaatgttaccttacatggcaaaagggactttgaaaatgtgattaaggatcttgagaaggggaggttatcttgcattatctgggggggccctaagtggaatcaaaatgcaaaatgcaataagatgcaagtaaagggagatatgacaaagaagaggaaaagatgatgtgataatggaagcagagattggagccatgtgctttgaagatggaggaataggccataagctaaaactaggaggccactagaagctgaaaaagtcaaggaaataggttctcccctcagagcctccagaaaccagccctgctgacaccttgatttaagccctgtaagactcattttggatgtctggcctccagaactctaagcgggtgtggttttcagccacaaagtgtgtattgttttaagccactaagtttgcaataatttattatagcagcaatgggaaactaatacaatccaaataaacttctaggaattc

SEQ ID NO: 225868 - DNA, 575 bp, Homo sapiens
cattatccatgttttcttcttcttatggttcctcaacttgtctttcagtagtaacaggatcttctacactgtagctgcttccagtgtgagccagacaaatgtactgaatataggtaagtactgctcagttttctccatgagcttcatcctcagggccacgtttcttattctgacaacacttagggatgctttcctggtaggaatactgctgttcttaattgcatacatggtgactctcttattcaggcctcagaggtgatcccaccaccttcacagcaatggtccttccccaggagcttcccctgagaaacgggccatccagaccatactgctgctggtaagtttctctgtggtcctctgttgggtggatttcatcatctccttctcctcagcaatgttgtgggcatatggcccaatcaaccagcaagttcagagtcttgtagtcaatgtctatgccgtgatcagtcctctggtgctcctcacttcagataaaagaagaaccaatattctgaaaaatacacaacagaagtgtcatagatttaatatcaattaataataaaaataattcttggaaa

SEQ ID NO: 225869 - DNA, 440 bp, Homo sapiens
gggttgttttttttaatgtagacattatctgttgacttcatcctagcagatgaggatttcgttcccatacacactggtaaacatggcgctatgctgcccatacttaattcatatttccttagtttttagttaatgccctttttctattctaggattccacctaggataccacactgcatttagtagacatgtttccttagccttctcttggttgtgacaattaatcagacctccttgttctaatgacctcgacggttttgtggagtggtggtcaggtattttgtaaaatgttcctcagttggaaatctttggtttgggggtagttttgtttttggttttgtttttttgtttgtttttttgacacggagttaccctgtcatctaggccgagactgtgccactgcactccagcctggcgacagagtgagactccatctcaaa

SEQ ID NO: 225870 - DNA, 462 bp, Homo sapiens
aatgtatcattgctttcccgaaggccgaagcaggctccaagaatccctgaaaatacatatttctgtactttaggattttttgatgttttgatagaaactatgtatggcttagggtcttttctcaaagagaaagagaggtttctttacctgccaaagagaaacctgggcgggagtttgcttccttgagacctgtaatttccagggggtgtgcatttgtgctggacagatgttgctgcttttagaagctcagaggagtggggttagggaaggacagtgtccttcaggcaaaatgaccattatcccctgcttaaagcatgattttctcctgttcagagtggtttttaaaaaacatttctgaaaatgccagaaaaattttagtgtaatacttaatagcagatattttacttatattaattttctggaggcaaatgtgaaatcataaaagaccatttcttatgcttc

SEQ ID NO: 225871 - DNA, 381 bp, Homo sapiens
tgacaaatcaaacctttgcagaatttataagtaggcacaagagagggataagaagaggaatgtaaaagtgacgatttttagtcagaaaaagccacaatcctgtcctcccctactcctcacacacacaacatccctctcacccagcttccttcgattaggaggacgttgtcttaccactctggcctcctacataaatgagaaccgcttgtttaaaatgtaactaattttaaaaggactttaaattcagaaaatgtcattgtagttgcccctgtgatcaataaaaacaggcttaataactaaattcattgagaaaaagcttaatagttctaatgagaatgttaagtattcaagccaggtttttcaactttctagaactaaata

SEQ ID NO: 225872 - DNA, 263 bp, Homo sapiens
ctggaagaactgttatttttaacttcaaagaatttattagaaaataatattttttaaaagcgcacatagtgacgagcccacgaggatggagcctgcagtttgtacagagaaaacaaaggatgtttttgcattaataaattgagaaataacgctgtaaatttactaaaatgtatttttgaatattttgtaatagttttatagaaataaaatgtgccatgcacagaacgcttagtatctaataactaagaattcctgttgcagcc

SEQ ID NO: 225873 - DNA, 609 bp, Homo sapiens
gggaatccaagtgtagttagccagacagttcccctgccattctgtgctccaggggtctaaggctgacacctagtttcacctgaaaaggtgattcaggtttcttaattctttacagaacagcttagtactcagggcaggtgtctacttgtgggctgatctccatctggtatctaggaattaacactgtcatccttgtgagagtctggagtagaagttcagttcctcttggtgtggtcttttgccacggcaggtatgatttatccattaggaatgtcatcccaagtgcaagggagaaaatgattttgttctcctaccctattaaggcagtgtctgaggggcagactgatcatgtcagcaaacttgtctagttctgcttcctcccgggcctgttgtgaggacctgacatacctgaccatgaaatgatgtgctcttgaatctgaggaagtgttgggggtcagcaagctttgagaggagggttaggcccttctcatgttaacctctactggccagaaccagactgaccagtagtcttctgagttagttaagtagctcttggatgtgatttccttccacccaaaaaatatgggcaaagccccccagagggaaggt

SEQ ID NO: 225874 - DNA, 982 bp, Homo sapiens
cctgatgtagacaccatggtctttttctgggttctagttttatggggcccagaatttaatggcttattaacaatttaatagatatcttcttcactcatttcatatacagccacattcctttagtcaatttttgtgctgttctcatccatttaaaaacaccccaaagtctcattagaagcttcatgtcatcatctaattcatgtgaaatatagcccatggtgtcttcaggagggtccagttaaaataatttacatcagcacagggcagtatagctgtcactttggaggtagtggataaggtagttgtagctgtcttcttggagatggaccacgtaattgttatctaggaatgctcgaagcttgaagttagataggatgtcctggatggtttgagtggtctgtagctgctcaatgacgcccttctggctagctttctgcagaaacattccatggaagcggctgtaaaaactttccactgtactttttggactgttctggaccaggctgagatggaggcagacaaagagaggataaaggagaggcatcacttcgtggctatgcggggaatcagaatcgatgagaaaattccgcagtcgtccaaactgtacttcatattgctggggctctgcctggcaagggactgcagacactatgtcggcacaatgagattctctgtgtaccgtgagattggccgccaactcttcagcagtctgtggcagccgcagtccttgcttcaggggaccgtctgagtccacgtactgccagcgtttgaggtagcaggacactgccatctggatctcctcggtacgcactcatttcatgactgaacatcccaggcggccccggctccccacgccgccgcctcccggatcgagatgcttccgcctccgtcgtctctgctgcaggtctcgctctgaccgccggctcagctgtgtcctggagccccgcgccccgccgccctcgccgccgctctgggcggccgc

SEQ ID NO: 225875 - DNA, 312 bp, Homo sapiens
gtagtgagggagggacacccatccttgacttgcttaatgcgctcctgtaagacctccagggcagcatcgttctgcagaatagggctgggcatatcaggggcctccaagtaattgttctcactgcgggaggagctgccacttgcatacagctgttagtctgttgtcttggcaggctgcacatcaagatgaataagtaagataaacattttgcacagggcagtatagctgtcactttgggaggccgaggcaggcggatcacaaggtcaggaaatccaggccatcctggctaacacagtgaaaccccgtctgtac

SEQ ID NO: 225876 - DNA, 865 bp, Homo sapiens
tctggtcttagtctccccatctgaaaatggcataaccaacctacctgcctcaaatacaagaccctgcttgtgaaggtgagctatttaggagactaccatctttcctttgaactccaacagctctttatgcgtccccctcctgggacacatctcactgacttatctccccattagtcagtgaggagcaattggaaaggcgggttctgggtccagttcagagcaggcctcctgacccctagggctgagaagctgagaccctgccagagcactgaggctatgggccagcccaggtcggtgcattcattcccattcgctcatctccttcccggcgttctgctctgagcccatcaccagaggcaagggagtttctagcttgaggatcagacgtcatcctccgcagactgccttccccacctcatctgcacccagcgtatcccagaccctggccagctccacgggcgccacagaggtggagagggacccaaccccgactggccaaggcagggccacggaagtctggggagaccgtgcggccgcgggctggcggcggaggagcgaggcgctgacgccgattcccgggaaaggctcttagagctgccgcccaggtcacaacgctaaaaatacccagggcccctggagcctgtgctccagcagcgaggagggggagggagaggccaaggtgggggagctgacgggggccaggggctctgggacaccccctctcttttcccctccccctaaccccaccgatctcacgagactgaaggagctgtcccccggggggccgcggagcccagagctggagaaagggagttgtttacgcgacctataggtactggaaagggggtgaagagatttgggggca

SEQ ID NO: 225877 - DNA, 392 bp, Homo sapiens
aaattttgtcacacctgatctgagaatataaaatttgttcatttgcaaaacatgcttctgaaatattttgtttccattatttatttagccagctagtttcttatgggtactaaagaaggtctcccaaattacctaaattccacaatagggcttagatttatgaagttttatattttttcctccttataaaaagctctttttataaagaatatccatgtaatactaaaacggggaaatctcctaaataatatattttttaatattacttttttaaaaagctagggtgagcacctcacaatcaaaatttaatgtatttgtcatattgaaatgcagggttttttgaaggaaacatggtaggtaaacattttagttcccaactcctgatcgttaaa

SEQ ID NO: 225878 - DNA, 487 bp, Homo sapiens
gagaagaattattggaaattttagtcaggtctgtggcactaaggaaatctgtcaaaggggcaggaccctagccacggagttagattcagaagtaaaactggactttctgagcagggaaaaaagagaaggtgctgacagcggcaaagcgaggcctcaggtcatttcttaccagtttaggcttatgggaccaaagcagaaattcaagctacagacccgaggtacaaatacaaagtgagcagatggtcttggaaacaggtcagaagccttatgactctaaggggtctatatgatcatgcatgagccaggaggaaggccactttgcgccggttccctgagcttagaagagttaagttcgcagagctgtgggcaacacaggcgaggcaggaggagtgcctcaaagaaccagctggtacatgcacagtcctggccttcttcacggcacatttgacagtttctgttgattaaaaataaagtttctgatcctcat

SEQ ID NO: 225879 - DNA, 485 bp, Homo sapiens
catatatggaagcttgctgggtaacagaggcatataaagaactgttcaacaaattgtgcccagtaagttgaaatccctggggatcagaaggaaattggattctgtcttatcctctatacaaaaaatcaactcccagttgattaaatacagttgacccttgaacaacacagatttgagatttgcgatacttaaactcacagatgaactgtgtagcctagaaaaaaattttttagtttttaatttttattttttgtggatacatagtaggtgtagcctagaaatagtcaaaaaaattaaaaagtatgtcatgaacggataaaatatttgtagatgttaatccattttattgtttgcagaaagacataagatatacacaaatctattataaaaagttaaaatttcactgggagtctgatgtgggcagatcacctgaggtcagaagttcgagactatcctggccaacatggtgaaaccctatctctatt

SEQ ID NO: 225880 - DNA, 461 bp, Homo sapiens
taggctgggatggggcttcttggtctccacaggttcactctccaccagccagctcttcttcctgactcccctgtgtctgtgctgggcacctcctcctgctgcccaccaggcttggagtttgggaatcatctccaatacttttctctccctgtcctgcagctacctgtttgtttggtcttaacgggtcccccttccctttcctccctaccccagtgcccacagagaatatctaacagcaaaacgtacttttcctccactggactccaccctggcttggagcagatatggaattcccagttctgcccacagcctcctcccttagctcccgtccccagctgctcacccccaaacacccccatcctcctgccacagttttaaaaagtgttgcttggattgggccatcgcctgcttagaaacttaaatgtcttttgtggcttctcaaataaacatttaggccctta

SEQ ID NO: 225881 - DNA, 381 bp, Homo sapiens
tacagaaccaagcaagttctataacctctttcagtggattttaaaatgtttgtatagacatatgttcccagctgtgggttttgtattctctctaggacacaaggaagcagttcccaatatgccaactaaggtagctaccttcttggtgttcctcagtgacccatactgagcccctttcattcaatacagacacattcttcctgaggtgatcttctgcacgataaggtgatcttctgcacgatgaggtgatcttctgcacgataaggtgatcttctgcacgatgaggtgatcttctgcacgatacggtgatcttctgcacgataaggtgatcttctgcacgataggtgatcttctgcacgataaggtgatcttctgcacgat

SEQ ID NO: 225882 - DNA, 1185 bp, Homo sapiens
caccaacatgtatacaagtggcatgtcttagtctgttttgtgcttctataacagaataccacaggctgggtaatttacaaagaagagacatttattggctcgtagtttggaggctgggaagtccaataccaagatactagcatctggtgagggccttctcgctgcatcataacatgacagaagccatcaaatggtagaagagcaaagagacagcaagagggaataagaacccattcttgcgatgatagcattagtccacctatgagggtggagccctcatgatctgaagcctcttaaaggttccacctcttaatattgttacagtggcaattagatttcagcatgagtttggagaagacaaaggtttaaaccataacatggtgtaagtcacataactctgggtcatatgcatatgaaagaattcgaaatttctctatgaacacatgctagtcttatttgggtttagagaaatctttagttgcagctgttaattcatcctgggtccaaggtttacatctgacagttgcctacatacttggctcttgaaagcatagatctttagaggtaattggcattttggaattttaggatattttttgggaaaataaagggggcctgggcaaaggatagaagagggaggaggtgcagaaggagaaagattaggcagggtacggtggctcacgcctgtaatcccagcactttgggaggccaaggtgggcagatcacgaggtcaggagattgagaccatcctggccaacatggtgaaaccccgtctttactaaaatacaaaaaattagctgggcgtgatggtgcgtgcctgtagtccctgctactcaggaggctgaggcaggggaaccacttgaacccgggaggcagagattgcagtgagccgaaattgtgccactgcactccagcctgatgacagagcaggactctgtctcaaaaaaaaaaaaaaaaaaagagaaagattagaagggtaaaggggaagtagaagagttagatataaggcagcaactagaggaataggagggggaggatattgcttaagtttgccaaattgttcaatggctttattcaaggaaatttttactgaaacaattttttattcagaaccttggagattgtacaaatacgattcattccaataaaaaactactgcttactgggcctgagaaattttgtttt

SEQ ID NO: 225883 - DNA, 339 bp, Homo sapiens
ggaactcaggtggatgctgtatgttggcttcagtgtatcaacactgataattgtgctgggactgcactgtggtaactggggggaagctggctgaaaggtatgtaggaactccctccactatctttgcaacctttctgtaagcctcagattatttcaagttaagtagttttttaaggtcacaatggagtcactaaataatcattctcattagattttcgctaatttatagaggaagattctgcatttgcaaatcttagaacagagtaatgcaggggcattcttttcatcaagactatttcttgagctattttctaatccttctcatacacactcccatcc

SEQ ID NO: 225884 - DNA, 395 bp, Homo sapiens
tacaaatgtgcaacacaaactatggattctaatgtaaactatgaattttagttaatgtaccaatattgctcatcaattgtagcaaatgtaccacactaatgcaagatgttaatatcagggaaaatcgtgaggacaggcagagataatgggatatgtgggatttctccgtactttctgctcaacttttctgtaaactctaaacttctcaacataaagcctggccagatgctgtggctcacacctgtaatatcagaacttttggaggctgaggtgaagggatcgcttgaggccaggagtttgagaccaggcagggctaacacagtaagacctcgtctctatcaaaaattaaaaattagttgggcatggtggcacacaccggtagtcccagctactca

SEQ ID NO: 225885 - DNA, 273 bp, Homo sapiens
accttccgtcctggggaggaggcaagcccgcccttttctgcgcccagagggagccaggcatcctaaggctcccggcgcgctccaaacaatcttgggctcgtgagtcctgagatccccgcgttccctcggagagttggagtgcggacgaggtcctgggtctccgggccagaggagtaggccggggccctacgccgcgtccccctccctcggtcccaccctatcccgggcctggcccgccgccctcgctgcgcggggcaggccggattctctgca

SEQ ID NO: 225886 - DNA, 233 bp, Homo sapiens
gtggcatccatcacctctcttatgatgaggcagtcaagagataagcctgcccaactcagaacatgggagatgtcagtttcagattggacatacattccctgaagtacttctcacctttctctctactcctttgctgtccttggcattcagtatgttaacccttatgctgagctgcgctactctgttcagttgcctggaattcaggaatctactctactattagaaactccaat

SEQ ID NO: 225887 - DNA, 433 bp, Homo sapiens
atagctcaaaaaccaagcctccaaaatatcccagatgttatctacattcaacagcaataattccaaatattattgagctcatgtacctggcactctgatgacttgaaaatagtattatttcatttacaacatattgctgccttgattttttctaactaggttaaataattactagaactgagactgggattcagttttgcctgacactacattgcctctttagtatgatgcacatccatggattgttagccttgatttggctgatgtgaccggctaggcaactggtatcttctctcacccacctgtgtggattcctgaaagctgtgcactcagatgaagaaattgataagagccattatttcatcaagggttattgagatgctgaactcctctggtgggaagcacaccataggatgctttaactctacaaagc

SEQ ID NO: 225888 - DNA, 222 bp, Homo sapiens
gcagcacagcttcaggtccaccactgtcttggccaatcagtgggaaggaggtgaactctctgccccatgtctttgaccccttcaggtggttgtccctgacaatggccaggccaggctggagctctggatcccacccttcccctcacctcatcatctgaagcctttattagcatgcaactgaattgatctctttcctttttcatagaatccaattaacatttg

SEQ ID NO: 225889 - DNA, 206 bp, Homo sapiens
tcaggggcaactgactttccaccctacagtgaaaattattccttactctttcttcaagaaaaaatgggctgagcacggtagctcaagcttgcggtcccagtactttgggaggccaaggcaggcagatcctttgagcacgggagttcgagaccagcctgggcaacatggtgaaaatacaaaattttctctgcaaaaaaatataaaga

SEQ ID NO: 225890 - DNA, 545 bp, Homo sapiens
gtcaggtctacagaggagcttccctccctgggagtaggagggctccaggtgcctccttggggtctgtgtgtcccccttcctccctggtatgtcagagcccatgcctctacttgctctatgctgttgtaaaacaaggaatgaccaactgctacaatctttataggactgctctgtaccaaaggcctttactgggggaatgtgagaagaagagggaaatggtttaaaaggatgatccatggggaggatttgatcatgcaggcagttaggcctttatactataaaacttcatcactccttagaattgagcaccatacattgcacacttttccctagttgaaaagaattctgaaatatactcttattggcaatagagttctatgacaaagtggatggctaggctcagaaatcagagacctgtgaaaaatattctgtttctgcccttttttcgggggtggggtggggaagggaataaaagtctccccttttctctcagagatgttatgaggattttaaaaaatacctgaaataaagacatatctacattc

SEQ ID NO: 225891 - DNA, 553 bp, Homo sapiens
tgctttttctggattgtgcaggtaaaagtaagtaaaaatgagaggatgataatgctttttttgcctcaaattattatacttcttaatgtctattagtctaatttatgttgctaagtgttctggaattattttgatttctgtggtccaacaatttggaatgtttttaaattttgaagtgcttgagtttattgtttgtttacatttttcttaatgatatctaattttatttccttctgaacatagaataagactttatcagattctgctttggtctatattgagattttctttgtatattaatttatagttcattttttgaaatgccctttggattcttgggaagggaaaaagtgtatctttgtagtctgtttatatatgtattttcaatctttcatatatattctcatcgtttaatattattcatactttctggattcctttttattttttacttagagacagtatctcattgacttagtataattgtgtctctgtcaaatttttcttttatttttcagtttgtacaataaaaatttatgaccactaaaaaaaa

SEQ ID NO: 225892 - DNA, 479 bp, Homo sapiens
caagacccctccccatcaacaaagaattatctagcccaaaatgctgtgtaaaatgtctggtatataataagtataatatttgatgaaaatcagtacctttgcccccaggtgtgatatttaagaaggtcaacttactaaatcagtgatggagttagtcctaacatctgggtgttctgactgctgctaggccagtattctttatatgataataagaactttgtccacagaagatatccctaataacaaaaaaggtttatttgaagaggactcatgtgttctttggctgattgtgaaagtgttgctttgaacttctgttagaaaaggttgaagatgttttccgtaagtgtttttaatactgtacgtagtattcagaaggatgtttaattttttttttaattttgctagtagtttttaaagtaatcctttttcctttaattatgtagttgttgaactgttgggagttacttttctcttactat

SEQ ID NO: 225893 - DNA, 443 bp, Homo sapiens
ttccacccgacgcggaggacacagacaagctggcatggcctgttgtcagggggtggacagcaaagccatttcctccacctccaaagtcccttcctacccagaatcttccttctgattcagaatcagtcatgtgggaaccagagctccttggcccaaagtgtgactgtgactctcctccacattctcggtctgggagatttcaggcattagtccgcgctctgtgactgcaattttgaactcctgagcgggcctccctcccctgccccccaggaggtgtagaagagaactggacaagcctctcccaagcctctgacaatggtgtccacccttaagtcaatgctttacagttccaggatgattttccccttttttaaggatgtgagttatacagttatatgtgcacaaagtttttaaaaattacaccatgcagaagatacaaaagg

SEQ ID NO: 225894 - DNA, 249 bp, Homo sapiens
  misc_feature (15)..(15): n is a, c, g, or t
ggggagagcgaagcngaggagtccagcgctcgccgacaggggcctgggctgtcccgagccggaatccagatcttacataagatggaagtctctcacactagatactgaacattaaatagaaaatctatttagtaaaatctaagttgccaaggaagaaataccagtaaaagttgctgtaagaattagacctctgctttgcaaagaagttcttcataatcaccaagtttgtgtgagagttattccaaacag

SEQ ID NO: 225895 - DNA, 570 bp, Homo sapiens
caggaatcactatctggggtagacagaatagtggcccacaaagaggcccacatcctaatccccggaactgagaatatgttaccttccgtggcaaaaggggattcagcagctgtgattaagaaccttgtgatggggagggattcctggattacccaggtgagtttaatgtaaccacaaagatcctttcaagagggaggcaggaaggtctgaggcagacgaaagagctgtgccaagggaagcaggcggcagtgggatgcaggtggcctctagaagctggaaaaggcaagtccatgggttctttcctggagccttcagaaggagcacggccttgctgacccatcttagaacggcaggataatcaatgtgtgttgtttgaggccactaagtttgtggcaatttgttacagcagcaataggaaactactacactgtgtctgattagatcaggccaatgaatggagaaagtattggatttcagttgagtgctaaaacctggtctgtttaaaggttcaaattgtttgaaacagtttttacatctttaaataaataaattaccatctatacttaaaaa

SEQ ID NO: 225896 - DNA, 451 bp, Homo sapiens
tactctgaatgtaaatagatcactgttgcagatgggagttctctgaacctcttctggctctgagtgctacctggttcatgacttattctttgctcaagaagtggaggatcacatctcaccctgcaagtgcgagctatgcagagtgctgttctgctgaggaatgcgtatggaaaggtgaggaaagcaaccacacagcggataaagttgagaaacactacctcagccctgtggccaaggtcagcatcaacagcgacacattatgttggtggtatatactcacatgatgtggtcatgtgatgtggtgatgagaagagcatttcctcctcaaagcccataaccccattctaataatgagaaaactatcagcaaaccccaaattgaggcacagagtgcaaagtgcctggccggtactcctcagaactgtcaaggtcaccaaaaacatggacagacc

SEQ ID NO: 225897 - DNA, 470 bp, Homo sapiens
actgttttgggttttccttttcccctggcagccaaagcttgggcttagggttattggagcttccacatgtgcatgtggggaaatgaacctgagtcacaggacagaaagtggagtctcaacactgtgatgctttcctacaaggcacacatggccccaggcagagccaggctgcatgccttgaaggaccttttgcttcacacactggggccactgctatgacactgcctttttgccaatagtgatgacaggcaatctaaagccccatcatcacctctccacaggagagcccacagaggccacaagaatcgtcttgtaacaattgtttgctgcaaagcagagagggtgcacaagaaccgagggctttggcatttaaggatctttcttcccttttattttgttcttttgttttcattctatttttttaagctcagaaacctgaaaatgaaataaatgagccacaggtagaaata

SEQ ID NO: 225898 - DNA, 123 bp, Homo sapiens
aattggctggaaatgtgtcatgtagaggaaaaggaatagagataatttatggcagagaaaagtatgctaaatttagtattggctagtatataaaagctaaaactggtgaaaagtttatggagt

SEQ ID NO: 225899 - DNA, 359 bp, Homo sapiens
cggcttagggcaaacctgtctcccgttctattcaaagtcacccctctgcttactgagatagatgcatatctaattgcctcctttggagaggcttatcagaaactcaaaagaatgcaaccatttgtctctcacccacctgtgacctggaagccccctccctgcttgagttgtcccaccttaccagactgaaccaatgttcgtcttacatatgttgattgatgtctcatgtctccctcaaacgtgtaaaaccaaactatgctctgaccacctcggcacatgtcaccaggaccttctgaggctgtgtcatggacgcgagtcctcaaacttcgcaaaataaactctctaaatgaactgagacc

SEQ ID NO: 225900 - DNA, 347 bp, Homo sapiens
tggctgacatggtcctctcacttttttaagacttggcctggactcagcttagatgtgtcttgggtcaggacggggagggcatgccaagcatgggaaatggtgtgagccaagggctgggtagaggaatgactctggtgtttccagggaaaagtaacggatccagttggccaacaccacaaggttcgtgcaaaaggcgaagtgatcaggaatcagtcaagtgagtctttgatccctgggacaattaggtagtgtattatctattgcttatctattatctattgctgcattacagattgcagcaataaaataagcatgtgttatttcacaaagtttctgaaggtcaaaaa

SEQ ID NO: 225901 - DNA, 535 bp, Homo sapiens
gtaaacatagttttgcaaacctacattataaagatgtttcaacctcatacattggcctttaccatcacgttgaatacagaaatactgttctctctggaatttattgtgagtcctgggttcatttacattttatcagtgacccaacatgaaacataacatttactttttgtttagtactttcctgaagcagacaggagaaagtcattgaaattgcttcaaattacctgagaaattgccataatttgcaacttcacaatgcaagcctggatttcccaagttagctctgatctcaatgatgagtttaaatgccaggatgatattttaactatgcagagtcataggcatacatgaaactccattagtttagaatctaatgaagacttatgttgacatatcattctatgtatttcagcatattatctactaagacattataagaacaaaaccccccaaaattccattcttttttgaggtagggtggctttttctcttttaatatttttttacatttgagttcttcatgtttcctgaaggt

SEQ ID NO: 225902 - DNA, 551 bp, Homo sapiens
gacatacttgcctttttcttgatgtttgggagaaagcattcagtgtagatcgttaaatataatacctgtagacttttatgtacatgttctttagaaagtttcccttctgagttgctgagggcttttattgtgaatgggcatgtaatttgccaaatgcttttcccccttcaattgatatgatcatgtaatttttcttctttagcctgttatgatggatggctttaactgattttagaatgttttgttgtttttttgagaccaagtctcactctttcgccaaggctggagtgcagcagtggagcaatctcagctcactgcaacctccgcctcccaggttcaagcaattctcttgcctcagcctcccaagtagctgggactacaggcgtgcaccaccatgcccagctaatttttgtatttttagtagagatggggtttcaccatgttggccaggctagtctcgaactcccaacctcaagggatccgcccacctcggcctcccaaagtactggaattacaggcatgagctaccatgcctggccgctttttgaatg

SEQ ID NO: 225903 - DNA, 468 bp, Homo sapiens
agcccaaggttaaggcaccagcagatttggtgtctgatgaccactggccttctggttcatagatagcaccttcttaactgtgttctcacatggtagaaggggcaaggcagccctctgaggcctcttttataagggcaccagtcctattcatgagctctctgctctcatgacctaatcatctcccaaagaccccacctcctactgtcaccatactagtgactgggtttcagcatatgaatttggggggaacacaaacattcagaccatagcaggcctcacccttatggtctcattgaaacctaattacctccttaaagactatgtccaaatgtagtgtcactggcggttaggagttcagcataggaattgggatgagtggtggtagggagatcaattgagtccctaacagagatcttacacagggaaagttgtttggcattggaagcctgtagtaccagcaatatgcca

SEQ ID NO: 225904 - DNA, 514 bp, Homo sapiens
attttctcccactaaataatttatgcattcagaggttgggtgtgcttatgtttccagagagacaacagctattgaatagcataaataagataaaatagtcatgctagtgtagaaattaaatgttcacaaatgtgttatcgagtctatccatagaataaaagtgtagcttataaaacaattattgctttggatttcatgttttaaatttacaagactgtgttacattttgttgtaattagtaatgcttcatagctacaaggattaccagatccatatcactgcatttttccatagcacaaaacacatttatccaaagtaaaaatagtgtgctaaacatactgaagtttctgacagacacttatatttctcttcattctttcattcacagcagagtttcatccatattaaataaattggttaagttttgatacctcctactttaatcactcatcttatgtactaaaatgaaccaaattaagtttgagccaacaaataaaagtgatatgctttgagt

SEQ ID NO: 225905 - DNA, 476 bp, Homo sapiens
gaagatgactggagtcacatcagatcatcttttgtgatgattcctcatcacttccagaagcagctgaggagcttcttctgagtgcttggggatcatatagggagtttttgctttcattttttgttttttctatttaaagacgggtctcactgtcttgcccaggctggtctcaaactcctggcctcaagcagtcctcctgtctcagcctcccagcactttgggaggccgaggcgggtggatcatgaggtcaggagatcgagagcatcctggctaacacggtgaaaccccgtctctactaaaaataccaaaaaaaaaaaaaccaaaaaattagccaggcgtggtggcgggcgcctgtagtcccagctactcaggaggctgaggcaggagaacggtgtgaacccgggaagcggaggttgcagtgagctgagaccacgccactgccctccagcctgggtgacagagcaagattccatctc

SEQ ID NO: 225906 - DNA, 412 bp, Homo sapiens
atcaagcactctctcacaccacagcgaaataaaactggaaatcaactccaaaaggagccttgaaaaccatgcaaatacgtggaaattaaataacttactcctgaatgatcattgggtcagaaatgaaatcaagatggaaattaaaaaattcttcttactgaacgacgatagtgacacacctttcaaaacctctgggatagcaaaggcagtgctaagaggaaagttaataacctaacttttaacttaaaagtcaacttaaaagttaaaagttgatgcctacatcaaagactgtgaaagagcacagaccatttaagggcacctcaagaaacgagaaaaagaagaacaaaccaaacccaaactcggcagaagaaaggaaataaccaagatcagagcagaactaagtgaaattgga

SEQ ID NO: 225907 - DNA, 3635 bp, Homo sapiens
  misc_feature (921)..(921): n is a, c, g, or t
tttgcgcccccgctggcgctccctggttctgtgaggaacctcgcggcggcgtcgcaggcgtagagccagtcagtttgtgcttggtcgccagaggaggcggtggctgaggagagttgagtccactgctgaccctgttttacggtaggaggcacggctagctctaaatgggcaatttacttagtaaatttagacccgggtgccgccgccggcccctgccagggccagggcgtggcgcccccgctcccctgtcccgggacgcctccccgcccggtcgggctcactctgtacccaccccgcgccctttccgcggcctgttccgccggaacgcccgtcgcaggccttcagcagccagcatcttcgtcgcccctaagaggccgtgtcctctccctcgggctgcggccgcccctctgggggtcctgccggctgtgggttgggggctggccatcaggaagacacccatgctgcctgctcggaaccccccgaggtttggacaccccagttccgtaaggatccctcctcccagccgcatgttcactctcctgctgccttcaccacgtgagccggcggtcaaggccaggaagcccatcccagccactctcctggaggagaccgaggtgtgggcccaagaagggcccagaagagtgaagaaggatgaggatccggtgcagatcgaaggggaggatgacgagaaaaggaccccccttagcagcggagaagcatcgtccacatccaggtcccagggcacccagggagacgtggcctccttcagatgcagccctgggcctctggagggaaatgtctaccacaagttctcagaaaacagcatgagtgagaaggcccaggcgtctccagcgagctcctgcttggaaggccctgccatgcccagcacacacagccaggccggatgtgcccggcatcttngaaagcctgatccggatgcaacagcgccccctgagccagccgttggctgctccctgctgcagcagaagttggctgcggaagtgctgaatgaagagccaccgcccagctccctaggcttgccgattccgctgatgtccggaaagaggatgcctgatgagaagcctttctgtattcctccaaggagcgctgctcctcccagagctgcccgcaacaggccctgcaaaaggaaaatgtcgattccattgctgctgccgctgcccccttcactgccattgctgtgggatcgaggtgagcttcccccacctgctaagctcccctgcctgtctgttgagggagacctacacaccttggagaagagccctgagtataaaaggaatagcagaatcttggaggataaaacagagaccatgacaaacagcagcatcacccagcctgccccttctttctcccaacctgtgcagaccacagactccctgcccctgaccacttacacttcccaggtctcagctcctttgcccatccctgacttggctgacctggctactggacccctcatcctgcctatccctccactttccaccacaccaaaaatggatgagaaaatagcattcacaatccctaactctcctctggctcttcctgctgaccttgttcccattttgggtgatcagtctaatgagaaaggaggctcttataattcagtcgtaggagcagcgcctctcacttctgaccccccaacacctcctagctccacaccctccttcaagcctcccgtcacaagggagtccccaatatctatgtgtgtggattcccctcctcctctttccttcctgactcttcttccagtcccttccaccgggacctcagttatcaccagcaagcctatgaattccacgtcagtcatttccactgtcacaacaaacgcatctgcccacctaacctcacagactgcggtagaccctgaagtagttaatatggatactactgccccatctcaggttgttattttcacatcttccctaagctccagagtgagctctctcccaaattcccaaatacattgcagtgcagagcagaggcacccgggaaagacatcagtctacacatccccacttccatttatattccacaataccaccccaagttttaaccaactctttggaaaagaagccacccctcagcccaaatttgaggctcctgatgggcagccgcagaaagcttctctccccagtgcctgtgttttcctgagccttcccatcattcctcctccagacacctccactttagtgaacagtgcctctacagcatcatcatccaaacctcccattgaaaccaatgctatgcataccactcctccttccaaggctgtcatcttgcagtctgcctctgtctccaagaagtacctcccattttacctggggcttcctggttctgggaacacacaacccagcggcaacactgcctcagtccaaggctccaccagtttgcctgcacagtcagtcagggcaccagctacagcttccaaccatcctttaaatccaggagccacccctcaacccaaatttggggcccctgatgggccgcagcagaaaacctctctccccagtgcccatgatttcctgagccttcctatcatggttcctccagacacctccactttagtgagcagtgcctctgcagcatcgttatccaagcctgccattgacaccagtgacatgaataccacccctccttccaaaactgtcatcttgcagtctacctttgtctccaggaaggaggagtacatccgattttatatggggcttcctggttctgggaacacactacacagtgacagcattgcctcagcccaagtctccaccagttttcctgcacaggcagataggagaccaaccacaacttccagccatcctttaaatacaggatccatctctcattccacacttggggccactgatgggcagcagaagtctgacagttcttttattctggggaatccagcaaccccagcaccagttataggcttaacatctccttcagtccagccactgagtggcagcataattccaccaggttttgcagagttaacatcaccatatactgcattgggcacacctgttaatgctgagccagtcgagggtcacaatgcaagtgctttccccaatggcacagcaaagacttctggatttagaattgccactgggatgcctggcactggagacagtaccttactggttggaaatactattccaggcccacaagtgattatgggacctggaacccctatggatggtgggagcattgggttcagcatgtctgccccaggccccagttccacatcaggagaactcaacattggacaaggacagagtgggacacccagcaccacttctgttttcccatttggtcaggcagcctgggacccaactggccacagcatggctgctgcaccacaaggggctagcaacattcctgtatttggatatacttctgctgccgcctacattcctggtttagacccacctacccagaattcatgcagtggtatgggaggggatggcaccagatccatagttggaggcccttgtgttcctgcttttcaacagtgcatcctgcagcacacatggacagagagaaaattctacacttcaagcacccactactatggacaagaaacatatgttaggagacatgtctgtttccaacttccgtaa

SEQ ID NO: 225908 - DNA, 391 bp, Homo sapiens
cagagcctccaaaaggatataattcaaaaaggattttaaccaaaatgaaatatgttgtgactaatatatacagtttatttgaatgaatgatagtttttcccatttgatattttaactgtgctacacaagaatgagagtagacatagctcgatttgtagtctcattgttctgtcttttctgcccatttcagtgacccaggactctttgtttattgctgtgatttttcttccacagctatagaactggtccaggtgagtacgatgggaaattacctattggtaatttccactgattaaagggaaaaggttctcctaaaaatcaaggtctctggctgtgttcttatacggtctgtgttcttacggtctaaaagtaaaagatttactgataacga

SEQ ID NO: 225909 - DNA, 452 bp, Homo sapiens
ggcatcccccatcagaacaccctgaaagcacagggtatgctccctcactaatcctcatagattaccttttagtaacaatgtcatgtaatgatatttaacagttggtggctgcaataattcacagggcaagagttcaagaccagcctaggcaacatagtgagaccccatctctagaaaatataaaaaaaatcaacctatggtgacccacgcctgtggtcctcgctactcaggaggctgaggttggaaggttccaggctacctgagcctggaaggttgaggctacagtgagccatgatagtgtcactatactccagcctgggcaacagagtgaggtctgtcgggggtagggggggcagcgggtggaacccaaaccaaaaaaaaagaaatataaaggactatgaaggaatacaattaaaaaaattgtttgccaaataactagataaactacatta

SEQ ID NO: 225910 - DNA, 419 bp, Homo sapiens
tggggcctaatgagaagaggctgtgcaaggtcacacagcaaggagcaaagcgataatgagaacccaagctccccagcgtcccattctctgctgctttctaccctacctccctagttccaagaatggtcattgattttatagagggaatactgtttcaaccagaacctgggagggtttccactggctacaagcaatagttaggacatagacaaaattctgcaggagagcaagaatcttacagctacatttggagaggtttgccctgtggtggttacttaggacacaaacacacatgagggaaaatacatcaggtgacatgtttggattgaatagcattctttcattttcttgaaggaaaatgtagctatttgagccttgaaatgctagttcttgcattttgcagtgttgtttccagtagc

SEQ ID NO: 225911 - DNA, 176 bp, Homo sapiens
tgtctaagaagcttagtctagggcttctgcctgtggaagtgtccatggaaaaccacccaacagctagctatactaagtgagatttttcagctcatatagggccagctgagtcatgacatcatctcggatgagtttcctttggtcaatgaaagcgttagctaacacattaatttctg

SEQ ID NO: 225912 - DNA, 223 bp, Homo sapiens
cacacatgcacatacatacacacatgctcacacacgtacaccccacacacgtccacacacactcatatgcatgcacgtgtccacacacatcttcacatactcacatgtgtgcacacacatgcacacacaccctcacacattcacacacatcccacatccacacacatgtacacctatttacacagctcacatatccacacacgtacacatatgtacacacaca

SEQ ID NO: 225913 - DNA, 451 bp, Homo sapiens
ggacaaattatattccacttggctacagacctgcagtcgtctaatttggcttccctgcatagttccttattctatttcatttttgcaaagaatttgtagtgtattcaatagattgttccaccagatttagaaaacattactccagttatatgtaaagcaagaaatgtctgctatgttaatttacttatttgtttgttcttactgtctatataggatgagttcaacaatgacttaatagcatcagaattttgacaaagcgggaaaaaggcaattaaaatagtagctagaactttgtcagctaatcacctaatgttacctcaagtatctgtcaacagtgtgatggattttaagacattaaaaactgggcaactcaggaataagctgaaataaattataaggttttatcaaaaacctattatttagctatgaagactttttgttgttaattata

SEQ ID NO: 225914 - DNA, 300 bp, Homo sapiens
tacacataacactactgtactgcacacttacaaatggttaagatggtaagttttatgttttttaccacaataattaaaaaaaagacactgccacacaggagctccagcagccctaagccttcagcggaggttacttcagaggattgccccccttcctgagcttcatttgatacattatgcagccttcaggacaattagataagaggtgctgagtttcttaaaggagcaatcagtaggagccaggcagctcattatcataaggttggcattatcatcagttcactctctagttatcaggtt

SEQ ID NO: 225915 - DNA, 447 bp, Homo sapiens
ctcctgatccacccgcctctgcctcccaaagtcctgggattacaggcgtgagccaccgtacccagctacaggtagtcatttctacataaaatccgaaccccggctggcccacttcagacctcctcacctcgcggacccatggacaaacagaaccacatgagtggacttgggctggtgctgggattttcctggggtgctttcagcagccttccagagaccagcatgcctttctggtttctggaacgctcagtgagctttggctggggagcacaaggctgatcagttaagttcaagattatctggagatggacaggtacttttgctttatacacaccttgaaaccttgaacgaaagcatgcagtttgggtttaccatccccgtccctgctgtgtattttttttttttttttttgtcgacgcggccgcgaatttagtagtagtagtaggc

SEQ ID NO: 225916 - DNA, 473 bp, Homo sapiens
caagttcatccatattcacagccatcctaactgcctttcctcctgtctgcaggaagaaaatttgtctctctcttatttgttcaaagctatttgctcaaaccaccccatattactgtcctctcttattctttatagataacagaagaggctacattcactctattttcttgacttcatttgctaaactgtaatacttggctttcacgtcctacctttttacaatgccctaaaatgttgctattttatcatcttgagtacctggctcccatttattctctctgaatgctatctcctctgggtgatttatggcttcaaccactatatatgtgcttatcctcctcatatttctaaccctgataactttcctcacggtttcacttaaacaacaggcacttaaaattaacacttaaaaccaaaatcataagcctcccacagaaaaccaccttttccatttaaattaatgaaaccttgac

SEQ ID NO: 225917 - DNA, 668 bp, Homo sapiens
taaaatttaccttttaaagtaggccatttacagatttttagtctattcattaaattgtgcagccgttatctaattctataacattttcacttccccagaaagaaactccatatttatttcccagttattctccattccccttccccctgcgttggcaacaactaatttacattctaagtctctatgaatctgcttattctgaacatttcatgtaaatggaatatacagtatgtggctttgtctggtttccttagaacaatgttttcaaggttcatccatgttatggcacgtattagtacttaattcctttatattgttgaatagttgtgtcaatatgccacattttatccatttatccattgttccttaaaatttttctatttctggccaggcgtggtggctcatgcctgtaatcccagcactttgggaggatgaggtgggcggatcacgaggtcaatagttcgagaccagcctggccaatagggtgaaaccccgtctctactaaaaatacaaaaattgcctggcatggtggtgtgctcctgcagttccagctactcgggaggctgaggcagaagaattgcttgaacctgggagacggaggttgtggtgagccgagatcatgccgctgcactccagcctgggtgacagagcgacactccgtctcaatt

SEQ ID NO: 225918 - DNA, 148 bp, Homo sapiens
gcttttgtctgtgtgttctaattaatcttccaaataaacatgtgagataggctaaggagactaagaacagagagtctgtgtcattctatttatttatttattttttatcatactttaagttctagggtacatgtgcacaatgtgcagg

SEQ ID NO: 225919 - DNA, 545 bp, Homo sapiens
ttttttttcacaagttggggaaataaccaaatgactttgcagatcagatagccaaacaaactgctgtttcttctgaaatgtctttcacttaactccttgccttccttcccctactgtagtccccatcttctcttccactgaaaaagaaaacctaataaaaataggagctaaagagaacacaaaaggaaaatggatattaccagatcaaagggagatattatccaaacctctcataagggaggtcttaactacggttctcagagtttataagtgtattggaatttataccctagtcaaacaggtcacagacaattgtctaacatgcaggaaaactaataaacaagccctaagaaaatcaccccttggaggatgagatctggagctaagaccattccaaagtgttcaagttgattacaccgaagtgcctccaatcggtcgcctgaagtatttattagtaatagtagatcatctcactcactggatcgaagctatctcctttccaaatggaacagctaataatgtaattaaagcattaattgagaata

SEQ ID NO: 225920 - DNA, 449 bp, Homo sapiens
acatttctctaaagaagatatgcaaatgaccagtaagcacaggataaggtgctcagcatcactaatcatgagaaaaaagtaaatccaaaccacaatgcaataccaactgacacatgtaagcatagctgccatcaaaaaaaccccaccagcaaagcaaaacaacaaagccccagagaacagcaaatgctggatgtggagaagtcaggactcctgcacactgctggtgggaaagtaagatggcacagccactgtggaaaacagtaatcaccatatgatccagtaatcccacatctgggtatataccccaaaaaactgaaagtgggaatttgtacacccatgtttatagcagcattcacaagagccaaagggtagaaaaagcccaaatctccatctacagatgaatggataagcaaatatgattgatacacacaatattattcagccttaaa

SEQ ID NO: 225921 - DNA, 205 bp, Homo sapiens
actgctactagtatctattttctattagtttcattattggaactgcagaatacaaaatttaaaagcagtttctaaggatctactaaatattgaactctgagtttaaaaatgcactttacctctctttagcctacttttatatttagtaaaataaagggagactgaagaggcagaactaggtcccttctgactctatgggtcagtc

SEQ ID NO: 225922 - DNA, 458 bp, Homo sapiens
ggcaggctcattacagaggcattttcagcacttagagaaaggagttctctgtttgcacacacacgtgcatactttatctctctctcttccagtttttgctttgtccccaaaattctgatactctccttcagagaaggagctgaagtaaacaaatcaacaatcaaggcattttctgaacagaatggatgcattattctttgggtgagcagaacccagattctggtttctgttcttaactcagcttcttctcccttggagagggggagtaatggagaaaaacagaaacaagtgatattactaataacaaccctgccagctctcttttgattactgatcaaccgggtgacaatcccacagggcagagagttatctcggcagcctgtgatacattcagtttaagctgatggcggcgtatggcagcacagctccagcagaaaagcactgtcccctgtctgagg

SEQ ID NO: 225923 - DNA, 439 bp, Homo sapiens
atgagtgaacttaaagacaagtcaaaagaaactatgccaactgaagaacagagagaaaaaaagtaaaagaataaaacaaagccagagcctcagtgacttaaggaacagtatcaggcagtctcacataggtgtaattagagtctcagaaggagagcaaagaggaaatttggcagggagaaggaggaagctatgaagaaataatggacacagtttatccaaatttgatgaaaaacaacaagcctcatatccaagggtcatttcatagtaatatgttgtttgattgatcaaaaagatataacacctctaaatgtatgtgcatctaatgattccagatccatgaagcagcaatatatagaactaaagaaagcgacaaatccaaatccacagcagtgtagatcttaatatcaggttcttagtaactgatagaacatatagatta

SEQ ID NO: 225924 - DNA, 280 bp, Homo sapiens
gctgctaaatacatttttggagattcactattctgtttagaaacgttcctgctgacaccagtgttctgaggggccttatcttccacccccaaggagtttatatgcatcctaagagaaattcacacatgggctataaagctaaaattttcacattattttgtacaaagtcaaaatgacttgaatactaaccacagaatattaagtggcttccactagatcagcattcccaatgtgtatcctgtgccccaatcctgtgagtaaatttgtagaccaaaaaaat

SEQ ID NO: 225925 - DNA, 178 bp, Homo sapiens
gggatattaacgatgaactgttcaaattttattcaattactgaagaattagcagcacctttattgtaatggaatcctctaaatctacaggagatatagccgtgtatatatgtattttaaatggtaacacttttacctccatgctgctattatatacaattagttacaacatattcaaa

SEQ ID NO: 225926 - DNA, 471 bp, Homo sapiens
gcttatctgcacattcgccctttgagcagcaaggcttagaacagagaagacagtcatttccttagaaaggtgtgtgctcccaaggtaacgacacagactctttaacagcaaaagcacagggctggctgatgttcttggtgacttcagttccatgctgtttgccttctgctctttcttacacacttttgcattatagtctaatctaatctgagagctttgttggctccaggtagtcctccccagaccagcttgagactggagaggtcctaatccctgaaaagatcatagtgccctctctctcccctcttcctatccccaatatgtacttcaaaataaaattaagactaagtaaaaaataggtaagaaagtctaacaaatctttggggtttttttttttttcatgacatttaggcttaaaaacaaataacattaaaattttctctcttgccctacatttccccaaccctcacc

SEQ ID NO: 225927 - DNA, 92 bp, Homo sapiens
ccctcccaaaactgaacctggaagaaattgaacccttcaacagacagtaatgagctctaaaatggaagcagtaataaatagcctactaatca

SEQ ID NO: 225928 - DNA, 146 bp, Homo sapiens
gcctcccaccatcaaaggccacctgcttggcggctggacttctctgggtgatgaaaatatgactgtttattattatatcctttttttttttttgcattttagatattgttcttaaaaaaaaaaggaataaaagaatcagtgagaca

SEQ ID NO: 225929 - DNA, 393 bp, Homo sapiens
cccggtggtggtgtcaaaagcatagaagatctcctcttggtgggtgttcagtgaatgtaaggcatagagcaccccacaggccatgaaggcccctgacagggctggcttgtactggctggtacgccaggttttctccacttctagggtgctagcgttgagacgactcacaaccaggttgcccttgctctcctcagtggcatagagaacccacagccccttctcatcaccagcaaaatctaagtccttccagggcacaccagcataggaaaagcggttgttataggtggcaccaggcagcagacgccacagcaccagtgtgttggaggaaaggtccattttggccatgtcacttgtgccacagtagttaaagtacataaagttcttgtacacaac

SEQ ID NO: 225930 - DNA, 436 bp, Homo sapiens
gcccaggctggagtacaatggcacgatctctgctcactgcaacctccacttcccgggttcaagcaattcttctgcctcagcctcccaagtagctgggattacaggcgcccaccaccacacctggctaatttttgtattttcagtagaggcggggtttcaccatgttggtcaggctggtctcgaactcctggtgatccgcccacctcggcctcccaaagtgctgggattacaggcatgagtcactgcgcctggccgtcactccactttttaaatagcctaagtagaaagaaaataacataaaccttaggaggttttcccattaccttcaggattaagattagcatcttaagcagtataatgatgttcagggtccatcacgtttaccccagttttaatttccagactcaccttccaaagccccttctgtagtcttctc

SEQ ID NO: 225931 - DNA, 937 bp, Homo sapiens
caaaactggagcaaacaggaagagctcaatggttttatgatctgctgagaaaattgaattaataactttaaagccttcccacagagaaagcttcagggcgagtgcctttactagtgaattctttccaattttaacggaagaaaatgacgccaacgttagacatatcttccaaatactagaagaaaggaacagtctccagcctatctaagctggcatggtcttgatcccagagcctgacgtggcatttcaagaaaggaaattatcactcagcagagatgtgcaactattaaagtaaataccagcaaattgaatccagtgagacagaggaagaaccgtgttgcatggtccgcaggctcattccaagaactcaaggttaagtgagtgtttggaatcaatgtgtagaatttaccacattagccgaataaaggagagaacccgctatatcacctcaataaatgcaggaaacacttttgataaaattcagtagccttcgtgataagaatcggcaaattggagtataaagaaatgttctaaatctgacaaaaagtatctacaaaaaaaaagttaaccttttggttaattgtgaaatcatgatgacttagcctctgagcacgggaacgatacacagacgcccatcgtcaccacttatattcagagttggctggagatcctgcccgggttgtgtgtgcagggctgcccctgagagctcttgccttcctaatgtttgtgtcatgtcaggaacctcccttgcccccctcctccctgagtcctaccccttgtcccaagctgtgcaatacagtgataaatgaaaggggccaggcactgtggctcatgcctgtgatctcagcactttgggaggctgaggtgggtgggtcacttgagctcaggagctcaagaccagcctgggcaacatggcaagaccctgtctttactaaag

SEQ ID NO: 225932 - DNA, 652 bp, Homo sapiens
gagggacaaacatctgacttggacagctgaccagtgactgatcagattctctctctcttgagagcatgaattaagagacatggagactgcagtcacttgggagtagacacctgaaactaaaaagtcaaacttcattatgcagctagtttgacttggtttctcttcctgttcaaaggaagaatgggtagaataaagatttgatgtggtctggccccttgtctatgatctttttagcttgatttcttgaaatgctgcttcttccctacccactgtaactggcattcccatagtactgaggtactagagacctctgagatctgcacacatggttccctccacccagaaaactgcccttttctttctctcatcctacatagctgcctggcaaatccctagtcttcatcagctcacatcacatttccatgacaatcccctttgattcctcagaatctggccttcctttatagcactggtcatattgtattgtgcatatctggttatttgcctgttttccatgaacatttcaagcttatgggggagaagacactgtatacattttcatctgcattccttagaatctgcataacagctggtatagagaaggtactcaaaaaatccttaatgaataaagtaatggatcgtacccaaacat

SEQ ID NO: 225933 - DNA, 450 bp, Homo sapiens
ttgcggtcaactaaaattcatgtgacatttggttgtttttatcttgaaaggaatttctgcttcaggttgagaagattcataacccaaattttttctctaatctgttgtgaggaaataaactgaggacacacacacacacacacacacactttctctcacatacactttccacctgagtcaaagctctaagttatgtttacagaatttcataaaattatttcttatttttttgcagaatttttgattgattaaggtcattctacccttaatttaagaggaatgataagaactttgaaaggtcagatttaaaaggttatgaaatttaagggtgaccacttgatatttgctagtgttgaaatacaagtttattagtttctgcaggtataagctgaaagatgctgcctcttctatattgattagctgttataaataaaatgcaggaaaaatgtt

SEQ ID NO: 225934 - DNA, 696 bp, Homo sapiens
tgaggtcactaatattatacaaaagaaaaggaagcaaagatggtcatgagagagcaacgttttgaaaaagaaaagtggtaggaagcatagagaggaggataaagaagattaggtttctttctgcttatttgttaaacctgttcaagctgcagtaagattgtcatgatctccgtcgtcatctgatttatcccccagccagtttctctgtaaaatctggaaagatagtagttgctgaggggcctcattagaggattggtgtgagagtggagatgtgtctgttgcaggactcctgggacctgtccagacagcagtggtggagggaagcgaagtgaagtgcagttctgtctaaactagagaaccctggagcaaggaagactgtgaggcaccacccgtggggggtgcagggcagctgccacagacgttgtttggcttcatgaagctgagttgaagatacgcaccctctgtggcccagcattttcacttcgacctgaatacagcgctctcagcagcactgttcataacaacaacaagactggatatgacccaaatgctcattgaaagaagagtgaataaaccaggcaggtgcggtggtcacgcctgtaatctcagaactttaggaggccgaggcgggtgaattgtttgagcccaggagttcgagagcagcctgggcaacatggcgaaaccctgcctctgcaa

SEQ ID NO: 225935 - DNA, 436 bp, Homo sapiens
cagtaggtattttataaatgccccccatttcctttttttctatcacatagcttctaaacatttctaggagaatgagtctctacacaggtgggatcattctctttttttgtttacagatatatgtcaaatgcctagaacactgtctgggcatagttagtattcaataaatattattgactaaataaaggaaatgtcatgtttttggaataaaattgatgtatgttaatgtttttaagtatctaaagtagaaaaatccaattttaatttctgtaaatttgtacaattttatattactttccctttttacccccaagttcatataacaaatgatagatgccttcattatataaagaaagctaaggctcatttacttcaaaaatatttactgagatccttttgtgtgccaagcactgtgataactaataggtgtaatagt

SEQ ID NO: 225936 - DNA, 1160 bp, Homo sapiens
tgaatatatataaatgatactatatgacctagtatccgcttttatattttctttactatgttcataaaattatttgcatggtattgatgaatcatcctaatagctggatcattgaagaatcactttatattttggtgctctggataattggaactttatttttttatgtcagaagctgatattcacttccattgagaaatattaccataactgtaatgttgtctctggagccagccagtaaagcagcatttacaagttcatggctaacatactcagctgcgccttcatagaaactcttagtgtctgattctttttcatttgttgccacatcatttacactagttggtctgtcagttactttttcactgcaaggtttacgatgagtcgtttctgctggaaatgtttctacattctcagggttataaatacagtatttagaatagtttgaatcggataaattttctttggaatttgtagttgacacacgtacttcagatacagatttatactgaaacaatacgtgtatattactctgtgatttagtaaggtttggttcactggttgaaaaaagcagaggccctttggatggtgatttgttaggtatgataggacagtatgtttctttatacatgtgaaatgttgtcattgccagggcagtaacttcctctttatccaaaacttcccaaagtccattagtagctacaataaggaattgacataggtcatctatagggacagaaatagtttgaggtgctgggataatggattttttcagcttgagatttccatgaaatccaagtcctcgtgtagtttttacttgcccctctacaagcccgtatggttcatttgaactaatgactgctccattctgaagtattcttcttctttcatttgtgtttcgtgtagtatgttctttggttaggcaaaaacctttcccatttctgcataagactgcttgcacattacctaaaagattattttttaaaagaagaaatttttatcctagagataaccaattgtatcaaaatctactgctaactttagtaaattctgtgtttcaatgctaaacagaaagcaggctatgtaaaagtacgtttaaatatgtgtaatatatcactactgaatgatgtacagtaaatacagatttcaaacaggtcaat

SEQ ID NO: 225937 - DNA, 417 bp, Homo sapiens
gaagggagaatgagataaaggagttccttacacccagggggaagtcacatttgtgtgtgcgtgttttcatttttataactttttcatcatgaaaggggatgtatgtcaatcgtagaaaaataggaaaatgtagaaagcattgaaaaagtcctatactacctactagtgtttttatttatttctctttattttaatgcatgtatatttgttatatatctttcataagttagaattatgttgtatataaaagcactttccccatggcatttaacattctttaaagacctagtttctaatgtgtagtattatgttctatggactaattctaagttgtgttagcattctctatttttgtaaatgtagcttgtttatgattttttactattaaaaacaatgcttttgtggacatctttgttg

SEQ ID NO: 225938 - DNA, 322 bp, Homo sapiens
gtatgtatacctaataaaattagcgctttctaaaaatgcagtgcttgtcatttactattaagtcaagccatatgaaatcacattttgtcagtaaataaatgttcagatatccacaatcttatacagttctaatagatactcaagaaattttgtcgacatgaagagagtcaaatcataaaatggtagactgaaaaagaacttcgtggagaattcttttctttttgcaaacagaggtgactgggaggtcgaggctgcagtaagtcatggtcatgccactgcactcgagcctggacaccagagtgagaccctgcttcaaaaaaaa

SEQ ID NO: 225939 - DNA, 1160 bp, Homo sapiens
aaactgctgttgtgtttaaaacaattattgcattctgcaaaattcttagtcgtattggacaatatttcagtcttacttttctgctcctctcttatcacaccctcaattctaggtgtgctgacaaggcactgagcaagggaatgggaaaatactggaaatgtagcaagaaatgcaaggagctgttctgatctcctaatttctgtgcacctgcatttgataggataactctctctggctctgaaatcaatcgtcttctgtctcatccccttcagccattgtgacctcaccatatgcccctgactggagagaagcccaggttggctgcctacaatcagagtccacatatgttcgggggagggaccccagaaggcggctgacagtattcctttagccagaaatcccttcagggaagagaaaggtgctcccctttgcctgcttttatactacagactgtttccaactccagctagaagtgactattgccgattatgctaatcagtggcgacaagctccctttgactgctcacttctccagtgaggcttcaagcttctaggcatcaagattagtaaggctgtcttctgggtgggccagtttgtttctcagtgacacgaaaacattgcctggggtgtgcactggtattttccagaaaatatttcaagcagaatatacttattttccagttttgaaaacaactagattgcccatctccatttctctctatcatctactgtattattctatggacaactgccaccctaataaggtcaagaagggaagccagaagtcaaggccacagaagacacaggaaacatcatttccaaagtgggagacaaagctgttaacaggaaattatttgtaaagtcaagagccaagcaaaacagaaaaaggacaagaaatctatcacctgtgggtatgaatggttctagggaagtctgttgacaattggagggtctcaaaggcgctttatggtacttattttatgaccctgagtctggagtctgatgaattaaagaggaaattctgctctgggcaacatttaagagatagtatctccaggcagtaactttcgtattaactctcataagattgatgccattctgtcatctaaagtgtggacaaaagtagcattaaagcaaaatgaaaggatataaaaatcttt

SEQ ID NO: 225940 - DNA, 748 bp, Homo sapiens
aaactgctgttgtgtttaaaacaattattgcattctgcaaaattcttagtcgtattggacaatatttcagtcttacttttctgctcctctcttatcacaccctcaattctaggtgtgctgacaaggcactgagcaagggaatgggaaaatactggaaatgtagcaagaaatgcaaggagctgttctgatctcctaatttctgtgcacctgcatttgataggataactctctctggctctgaaatcaatcgtcttctgtctcatccccttcagccattgtgacctcaccatatgcccctgactggagagaagcccaggttggctgcctacaatcagagtccacatatgttcgggggagggaccccagaaggcggctgacagtattcctttagccagaaatcccttcagggaagagaaaggtgctcccctttgcctgcttttatactacagactgtttccaactccagctagaagtgactattgccgattatgctaatcagtggcgacaagctccctttgactgctcacttctccagtgaggcttcaagcttctaggcatcaagattagtaaggctgtcttctgggtgggccagtttgtttctcagtgacacgaaaacattgcctggggtgtgcactgggtgaggcttgtcagtcaagatatgattttgcacttctgatggattttccaactattcactacaagttaaagatactagaaatatatacttccctatatctcttctcctaac

SEQ ID NO: 225941 - DNA, 483 bp, Homo sapiens
gatctcctgacctcgtgatccgcccgcctcggcctcccaaagtgctgggattacaggcgtgagccaccgcgcccggcccctcataaggtcaagaagggaagccagaagtcaaggccacagaagacacaggaaacatcatttccaaagtgggagacaaagctgttaacaggaaattatttgtaaagtcaagagccaagcaaaacagaaaaaggacaagaaatctatcacctgtgggtatgaatggttctagggaagtctgttgacaattggagggtctcaaaggcgctttatggtacttattttatgaccctgagtctggagtctgatgaattaaagaggaaattctgctctgggcaacatttaagagatagtatctccaggcagtaactttcgtattaactctcataagattgatgccattctgtcatctaaagtgtggacaaaagtagcattaaagcaaaatgaaaggatataaaaatcttt

SEQ ID NO: 225942 - DNA, 83 bp, Homo sapiens
gacagtccccacccttgggaagtcatgtagaaagacatgacatgcacataaaaaataaatcaaaataaaaacatgacatcacg

SEQ ID NO: 225943 - DNA, 373 bp, Homo sapiens
ctgtatgccttgaggtatagagtaagcaagattttgatttttgctaaggataaatattcatcggtgggcgcagactaggcctatctagggatgtcaggcttggatagcagctaaacttctgccttcaaggattcacattatcatacaaatgtttgcagtgagaaagggtctgatagagagaatataatattacaggaacagatatttcatttggggccagggccaaccattcaagaatctcaaacaatattctgtacctctcacggggttagctagtccaagatttgggatcctaatcacctttctttctttttttgtagagacagggttgccattgtattccagccttggcgacagagcaagactctgcctc

SEQ ID NO: 225944 - DNA, 557 bp, Homo sapiens
ttcaacgaacagttcgcatcatcatcagtattaacttctggttaactaaacatctggaccagagtccatgatttctggtttagtgctgcagaagtttctgttaatttgatgaacctgacttcaaaccacagaatattagaactaggagcacacgataccatagctacctttctgtttctacagacaagagatctggagcttacataagaaagcgaattgttcaaggtcatagatggaataggaaaagagctcagacttcagcccagttctgggctctcagtccagtatgccttccaccatcccatggagacagagactcacagatcttggaaccgcaaagactgtgagagatcatctagctcattccatcgcccatggtggaaggaagtcacaatgcagagaaagaaaatggcatggcatggttacataggggctggaagtcatttcagtgtatacatatcttaacacaccatactgtacaccatgaatatacccaatttttatatgtcaattatgctttaaagctggaagaaaggagaaaaaatatatatatgata

SEQ ID NO: 225945 - DNA, 400 bp, Homo sapiens
ccttgtattgtagaacaaagcaccaaagttaatgatttctaaggtccgtctggtgctaaaattttaagattctagcaacaatttagagtatgcaagggactagtgttaggtttacagatttctcatgagtagcctattctcatcaaaaaacatgcataaacaagattagtctgtgctcaaaacaagttaaaaagacatggcactctcgtgtattgtcatgggaaattagtaatagagagcaatgtagccccatctatataagttttaaacgtatagcacccttggctattctgtttttaaatgtttcagtccacatatatatctgattctgagaaagcacaaagcagctcctgccccctaagaagctaaggactcctggcctagccagtccactttctgt

SEQ ID NO: 225946 - DNA, 425 bp, Homo sapiens
ctgcccaaggttacacaggtggtagattgaatgagacttcaagcaaataccaaagggtcaaccttcatccagtcctctgagcattactggcagacctccctgaatgggcacatcacaaaaaaattgtaaatgcttcccacccagctcccagacaaaactccaagaatgcactaacaccactcccaaggggttgcaccagctattggagtggcttgggcaggggtactgtaagtgcctttatccagaagagcccagtgaagacctctgctctgttttcagaccacgaggacacttgggaagctgctctgagaaatttcatcagctgtggaagcagaggggctgttgatggatttctggaggagggatggttgtctgttctcttcgcttgccctactcagaaaaatgttcagatttctttttaaggc

SEQ ID NO: 225947 - DNA, 411 bp, Homo sapiens
agagatctgctcctcagcagtggatactcacctttctgtgttctgacagtgctactctgtcccatgcagctttctctagtcctactattacttctatttctttagaacaaccatagcgcatagtccttttcattaagggttttagtaggaatctacaaggcaaccaattgggaataacaaaaagaacctacgtgctttaggacttataaaaagccctataagccctccttcagaggccaaacactgaaacctccagatgcttctgaattcattatcttagaaaagtcaccaaatctttttattttttcacggtaagaactctcaacaaacatgtctttctgaacacttcccttaggtgctccatccaggtgcctgttattggaacaataaagtcatgttacttcattagga

SEQ ID NO: 225948 - DNA, 380 bp, Homo sapiens
tgagaggcctggtgggctcacaactcaggaagaccccacccacctgcccgcccccacgaacagcccaggagcaggactgagctcagcacagtggagctgatttacctgctgcagcctttctcctctgccagaggtcttctggggccaccagaacctggccatgctcacagagtgtccagccctcactgagcacaggccctagcatggaccatgggaaaagaggtaacagggtagccagggccatgctcggctgggctggagttggaggagaaaggagactcaggcctgaggggttagggactgtggctgggagcggctcctctgggctccatagcaccccatgtagacctcttcatataaaaacagtaatagctgccact

SEQ ID NO: 225949 - DNA, 462 bp, Homo sapiens
tttacccttttgcttttagttctgcaagttctatatgtataagcttgttaacttaaaaaagtagttttaggtcaagcttcatcagattttcatgagcattgttgaagagtaacaaaggtgttattaaacctttaagcttatagcttgttttggggttattttctacctaatcttgttcccacatcttaggaatgtaacatctttacaatggaaaggtactaatctttataatgggaaggtactaatatacccaaattagtgtttttatgtacatttgatttgtatctataactttttgaaaacagttttgagccaggagccgctgaagtgaaataaggaaaacatatgaagtgttcattatctaaagagttgttggtagtttattaagattaatttcccaatgcttttgatacaatatggtcctcaaagttttatttttcttcacagtgacctatcggggag

SEQ ID NO: 225950 - DNA, 927 bp, Homo sapiens
ggtatctgcacccttatgtttatggcagcagtattcacaataaccaagacttgaaaacctaagtgtccatcaacagacaaatggataaagaaaatgttgtacatatacaaaatggagtactatacagtgataaaaaagactgagatcctgtcatttgcaacaacgtggatggaactgaaggtcattatgttaagtgaaataagccaggcacagaaagacaaattgtgcatgttctcacttgtttgtaggagcttaaaaaattaaaacaattgaactcatggagatagtagaatgatgattactagaggttgggaagggtgggggagaagaggcgctcggggagctgggacgggcaccgggttggggggtcccggaacccctgaaagttcagtgacacctccagagttccctcttccccctgcaacaagaatcactccaaacttcccaaacactttggacccagcaatttccaggagttcatcctgatgagagaactgaaaggtgtgcacacgttagtaacaaggaggcctggtgaccgcctaagcgtccaatcccggggaccaccgggtcgaggccgagaggatggagaccgcgtcacaggcacctcgctgctggaatggagggtggtggggagaacttagaagattatgcaatgggctggcagggctatacccagccgccctggtaagcagaaactcaagaaacttctagggtcctgttttctggtcgtatgatcccaggagtgcacatgggcccctcgggtgtctgaacagaagggcataggagggagggccgcagccctgcagtcttactctgctggtgtagcggtcacctgccaactcccaccccaccctgcaccgcgggctcctgagtcggcagattaagcattttataaattctattttaaatacgtgttttaaacttgtc

SEQ ID NO: 225951 - DNA, 467 bp, Homo sapiens
aggctgaggtgggaagatcacttaagcttgggtgatcaagtctgcagtgagctatgactggcagagcgagaccacgtctaaaaaataaataaaagtaaataataccctggataagattcagaggagcttactagagagctgaatgggaatcagttcccaacagtacttctgttggggaggggtagagtcctggttgtggctgtgcaagttcttgaacttgtcaggaaaaagaaagatccatggatgataaaacattgaatggattcatagaggtgctgggctgtaaccagttagtctttcttaggaaaaaaaacttaacaagtttttgaagaaatacaggaaactagagtggcatggtggcacacacctgtagtcccatctactcgggaagctgaggtgggtggatatcttgagcccagcagtctgaaaccagcctgggcaacatgatggaacctcatctctattta

SEQ ID NO: 225952 - DNA, 291 bp, Homo sapiens
gttaggaggagagaataatccctgtctctgagcctcggtgagtgctgagtctcgactagccagaaagggggccagaagtttgacaatggatcagactatctcttagtgcgtggggctctcagaagtcatttaagaggatcaggggctcaataaggaaagaaacccacagattcacaggacaaaaacccattgactagacgcactcctcctgtactacacagctgctctagggggtgcaggaaggcaggggagcagatgataggacaaatgcttctatgagatataatcata

SEQ ID NO: 225953 - DNA, 443 bp, Homo sapiens
acaagatgaaggatctaataaaaatgtgttcttattcctgattctaaaactttaacagctgggctttcccatgtggaataatgttacataaataactcagccaggaaacagaggggctgtgaagaagtccaacaaaatgatagatgatcttggacagtcttagtatcacacccaatggagttagaaggaaataagtgcattgaaggtacgggtgagctatgttgttatgtgtgagcagcaaactttacagaacctgacagttatctgagtcatgtatcactaattctacagaagttttctttctacttaagtatattaacactccctaatctattccatagggaccttttctgctccatccaaatttgtcatcttttaattagtcatggaagtctagataaagcgggtttcagaaaataaacatgttgagttttaaaactaag

SEQ ID NO: 225954 - DNA, 309 bp, Homo sapiens
ctttaagctctagggtaaaaaggagaacattcatgcttttaaattggatagaaaagcagtttccatcctgtagctgttgtagcacatattgtcaaatagagactattagatatatctaaatgtattgcttctcagcaaattatatacactttttttgacatgttttacctatgttgaccttatttagagttttgttgcatattttagagatgcaagttattaaatgttttcagtttccaataatgtgatgcaagctcaatgctgtttcttcaacctgtcaagtctcttagaataaaacacagggtcact

SEQ ID NO: 225955 - DNA, 398 bp, Homo sapiens
tctctggcccggcgtgggggcagggcattgagccttttccttaattcttcagttattgaaagtagagtccaaccaggttacaaaactaaaaaaaagagtccaggacattgtctgtctgccttccggtagcatggttctctgtgggtaccctacgcttcgtttcttagttttactctaaaacaaccctgaggagacatttactagttgtcagattacgggaaggtgatgggttccagttttttgaaactttttttgttggctttcatattacttcaaatggcagtgaattaaaacagtttcttagaactctaatctgaaaagttaaatacgctttaaaacagtctgaaactcttctaaaaagcaaaactgcattattaaaagcatccatgtaagtatct

SEQ ID NO: 225956 - DNA, 383 bp, Homo sapiens
tcatccaaatacacccattgtgtgtgtacatgtgtcagattctgcaggggagggggcagacctcatccaaatacacccactgtgtgtgtacatgtgtcagattctgcaggggagggggcagacctcatccaaatacacccactgtgtgtgtacatgtgtcagattctgcaggggagggggcagacctcatccaaatacgccgattgtgtgtgtacacgggtcagcagtcctaagcaccatggggtcaggcggtcctaagtccacaaatgcacgcacctactatgcagccacaaaaattgtaaaaaattaaaaataaataaataaaaggggagaaacagaaaaaataaactgctaaaaatatacttttactttttataaacaaa

SEQ ID NO: 225957 - DNA, 395 bp, Homo sapiens
agctactccggaggctgcgacaggagaatcgcttgaacccaggaggcagaggttgtggtgagccaagatcgcaccattgcactccagcctgggcaacaagagcaatactccatctgaaaaaaaattaaaatcaggaataaggcaaaaatatccacttttgtcccttctattaagatctagccagagcaattaggcaagaaaaataaaagacatccaaatggaaaagggagaagtaaaattatctctgtttacagattatatgatcctatatgaagaaaatcctaaagattccacagaagatctgttagaactagtgaatgaattcagcaaagcagtaggatgcaaagaacaatctgaaaaggaaattatgaaaacaattctatgtacaatagcat

SEQ ID NO: 225958 - DNA, 408 bp, Homo sapiens
aaaccattctctttttatttttcaaatttttttagggactaggtcttgctctgttgcccaggctagcagtggtgcgatcatagctcactgcagcttcaaccttctgggctcaggtgattctctcacttcagcctcccaagtagctgggactacaggtgtgtactaccatgcctacctaattttttaattttttgtagagatggggtctcactatgttgcccaggctggccttgaacttctggccttaagtgatcctgctgcctttgcctcccaaagtgttggaattacaagagtgagccaccccgcctggcaccattcctttttaataaagatcaaactaatgataattgaagtgtcaatataaggaatgaaaattctcgctctggcttctcagatgtggggggcaaa

SEQ ID NO: 225959 - DNA, 213 bp, Homo sapiens
agtgaggcagatgtataataataggccgtcttggaacaagtcttgcttttcaaacatagtataatagccttgtttgtgttagcaaagtggaatctatcagcatggttgaaatgcttaagactgctgctgataattttgtaatataagttttgaaatctaaatgtcaattttctacaaattataaaaataaactccactcactgtgctaccaaa

SEQ ID NO: 225960 - DNA, 266 bp, Homo sapiens
gttgaacaaagaactaaaatcaagatatgctttatttaaaaatttgaaaatcattgaagtctttgtaagtctttgctataattttccatcacatttaattggtattttatacaatgaaatacaaaaatgtcaacgaattttctcttcaaagttaatgccttgtctgtttctctttcatcatattcattatcaatagagtgtgttaaatctccaaattctcagttgtaatatgctatgcaaaagtaaaataaacatttaattttata

SEQ ID NO: 225961 - DNA, 414 bp, Homo sapiens
tttttccaaagaagcacagcggcagctggcctgtgggtctcagggtggtcctgcctgcctccttccttcccttctcagttaagactctctttagactgtggcttgctgagcgcaagaagctgtatgagctgaaagtcataaacttctcataaagtctacccatacaaatggtattagcaataagaagataacattgctgcaaatattcaactgaatggagtactagttttattttataagcatacaagggagagttctggtaaataccttgtctgagtaaccaaaatcaatgcagttttattaccaagaaaaaaacaacacgtcttcctctaaaggttgattataatgtctccaagaggtcgacttaaaaataaatttaaaatatggtaaaaaacatacacactgaagaacaat

SEQ ID NO: 225962 - DNA, 320 bp, Homo sapiens
agaccatcctggccaacatggtgaaactccgtctctactaaaatacaaaaaattagccgggcatggtagcggatgcctgcggtcccagctactcgggaggctgagctggaagaatcacttgaacccaggaggcagagttgcagtgagccgagatcacaccactgcattctagcctggctagagagcaagactccgtctcaaaaaaaaaaaaaaaaaaagaataggcaaataactagagaaaaatagtccagaaacagacctgaatatatataggaatttagaatatgaaagtgtcagtgtgtaggaaggagtgaaatgaa

SEQ ID NO: 225963 - DNA, 371 bp, Homo sapiens
caaaataattgtgttaagttttatggaagatggaaatataaaaaggacacagcctctttgtcaatttggcaggcagaacactgttagtgccataagggaaggaaaaaatgccatgggagcttattcattcactaaccaaatatttattgattatatgttgccccgcaggcactatgataggagatatgtgatgtctaagacccagtcactgctgtgaaagatgagagaaatgcaaaaaacagaaaaaaaagtgctgttaaagtatgaaaattcacagctgtttattttgtggtctctctcttgactagtcatgatgatttttatttgctattaacttattaaataaagttaaattgttaaattgttagcat

SEQ ID NO: 225964 - DNA, 1914 bp, Homo sapiens
caaggttgcagtgagccaagatcacgccactgcactccagcctggacaacagagtgagactcgtaataatactttagcctttacataattactctaagttacgtgtgctttcaagcttatacatttaatttgatttttaaacttaaaaagaacttgtatcatcaacctgaacactgagcttaaattcagaaaaaaagattttagggccaggtgtggtggctcacacctgtaatcccagcactttgggaggcggaggtgagcagatcacctgaggtcaggagttcaagaccagcctgaccaacatggattaaccctgtctctactaaaaatacaaaattaactgggtgcggtggtgtagtgcacacctgtaatcccaggtactcgggaggctgaagcaggagaatcgcttgagcccaggaagcggaggttgcaatgagccgagatcataccattgcactccagcctaggcaacaagagcgaaaaactctgtcttaaaaaaaaaaaaaaagattttaaacaatttatctgcatttcactggtaccaattctttatgatttattccattaacctgtgttactgccctacaccacaaatttggaaatgataccttacaaaaaaggaagtgctgaaatatcctctaggttaataatttaattcacactgcacaaatgctaaactcccctctgtgaaaaaagccactcatccccttgtgtactcagtacgggtagagagtcccaggcccatgagaagtccaggatacatgttcgcctcggtggccacaagactcttccctgagcacaagtgggaggcccagcctccatctcactgcccttcttactcatctctactgcaagactcattcctactgttcaaaaggtctgaattcggccaggcgtggtggctcacagctgtaatcccagcactttgggaggccaaggcgggtggatcacgaggtcaggagatcaagaccatcctggccaacatggtaaaaccccatctctactaaaaatacaaaaattagctgggtgtggtggcgtgcgcctgtaatcccagctactcaggaggctgaggcacaagaattgcttgaaccagggaggcggaggttgcagcaagccaagatcacgccattgtactccagcctggcaacagagcgagactccgtctcaaaaaaataaggtctgaattctggccctcactgaaagatcaacttatctccatgtttatcatgttagcatgtgcagaattcaattcaatacaaatcgttctggctgaatggtgaggagaattttctttaaaaactcaaaatcgggccaggcacagtggctcatgcctgtaatcccagcactttgggaggccgaggcgggcagatcatgaggtcaggagatcgagaccatcctggctagcatggtgaaaccccgtctctactaaaaatacaaaaaaaaattagctgggcgtagtggcgggcgcctgtagtctcagccactcgggaggctgaggcaggagaatgatgtgaacccgggaggcatagcttgcagtgagccgagattgcgccactgcactccagcctgggggacagagcaaggctccgtctcaggaaaaaaaaaaaaaaattccaaaaaactcaaaatcttggccaggtatgtgggaggagtggtgagatcatagctcacacctgtaatcccagcctggaatgcagtggtgcaatcacagctcacagcaacttcaaactcctgagcactggggcaggaggatcgcttgtgcccagaagtttgaggctgcagtgagccgtcatcacaccagtacactccaggctaggtcacagagaccgtgtctcaaaatcaaaaacaaacaaacaaaaactcaagatcctcatagtagacgcaaacttcctttgttgtgacacagtattttgt

SEQ ID NO: 225965 - DNA, 248 bp, Homo sapiens
agtttgttctttggtattagatctgatagactttatattcactaatcattgataaaactttggaaagtgctgtatttttctttgttgaagctaagaatggtttgcttaggagcatcctcagatttgtcttaactattgatactttcttttggggatgttttatctttcattataactaaaagcagatatttctccttgaggatgttatttgtttctacataaccaaatgttttctttgtgaaatggaa

SEQ ID NO: 225966 - DNA, 697 bp, Homo sapiens
cagcaagaatggaaggccctcatagcgatggttattttaggcaagtgctcaggcaaagcaactatctcagaataacttgcctggcagactgttaaggtgaaaatatttgtatgccagtaaaaacatcaacatattttctacttgtcaatataaatatatcaaatgagatcatgagggaaagggctttgcaactgtaaagtatctctagctatgtgatatatttattatttgcttttaaaataccaagatgggctagagaacagctcataattcccacagaacagtttcaagacggaaaaaaaaaaaaaaaaaaaaaacaaaactacccgcatttttaggccttgtccacgtgctccagagttgtcttttgctgaaagatcttaagtgtgactccttttgactggattttttcacccacggccactcagtaatgcaaggggcctggaccagcagcctggtgagactgcggggcctgcttcaggaaggagggtggtctctctggaccccacaccttcctgacagctcagcatctgaaaggaagcactgtggtgtggccttcaaggggcgatcccgggtttgttggttttgatcaacctagtgacatgcttagtttcttgtaggagtgatagaatttttaaatctccaagtcctagcagttaagtatacaaaacactgcccttgccaacaccccccatta

SEQ ID NO: 225967 - DNA, 578 bp, Homo sapiens
ctccgaggttacgctgtccatctcagggcttctaggattcccgtaaagaacaactgaggacttcttcctttacatcttggggtaaaataaatactcaggacttatttcatctagaaaatatgcaaaaataaaagatttttcagccttctgacaatctaaattcaagaaaggtattatagcttttgaaatgtacaatttcacaacattgataaatgtcctcggtggagacctatcgctcattttccattccctgcacatttcattattacaacgtaaattggcagttgattattactactttattaccctgtatgatttcctgaagtgcaggagacagaaagtccactataaaaatacccatgaaatttgtatcccaccccttgatgccactcattgatttgtctttcttttatccagccccatttggtttcacctttctgcacagcaaactcaatcacacataagggtacaggcctgtgcacacacagaggcaagttcaaactctggaatagtacccttccagagattaagaaaaatactgtgaagtcccccgtcttcagtcccttctctcttcaagt

SEQ ID NO: 225968 - DNA, 573 bp, Homo sapiens
ggtagccattggcagagccatgggcacccagcctcccccataggccacactcccttggtcccctggcatcctggcatgactcgcctggttggcagcactttgttaatatgggttgccggagattcggagttgggagatggaaatgaaggcagcatttctcaaagccaggtcgtctagcaaggaagccaactgtggagctcggcggagacctctcccgccagcccttctttctacgtccccaagtgcctccctccctcctcctctttactgaaactgaaaccaaagcgttcacagttagattttcaccttgtgccactctcttttggggtctggcttgagcatctatgggcagccacagcgaccagtctagtcccagacagcacaggtcaagcagcgtgggactgtggagcccctggcaggctggcctggtgctgcccccttagcccagaagccctgccaggtccagtggcctggggtcccactgctgagggcacctgccaggcctcactccaccctgaatggactcgagccatgtattcattcagtaaactgacattattctcccaaaaaaaa

SEQ ID NO: 225969 - DNA, 555 bp, Homo sapiens
tatgagcagaggtttgcagaactcatgaggctcaaccacaaccaggtggaaagagagaggttgtcaagaaattacccacaacccagaacagaggaaaatgaaaattcggagttgggagatggaaatgaaggcagcatttctcaaagccaggtcgtctagcaaggaagccaactgtggagctcggcggagacctctcccgccagcccttctttctacgtccccaagtgcctccctccctcctcctctttactgaaactgaaaccaaagcgttcacagttagattttcaccttgtgccactctcttttggggtctggcttgagcatctatgggcagccacagcgaccagtctagtcccagacagcacaggtcaagcagcgtgggactgtggagcccctggcaggctggcctggtgctgcccccttagcccagaagccctgccaggtccagtggcctggggtcccactgctgagggcacctgccaggcctcactccaccctgaatggactcgagccatgtattcattcagtaaactgacattattctcccaaaaaaaa

SEQ ID NO: 225970 - DNA, 790 bp, Homo sapiens
catccttgcagcctggcacaatgggctcccacggagtacacagtgtttcttattgtggcataaaatgccataaagtcagaacaaagagtgagcccagggccttgatgggtctgctgcttcctgccgcgcagagaatacaagcgattgtttcaaagccagtggtgagttgtcaagaaattacccacaacccagaacagaggaaaatgaaagtaggttttgggggccagtcctgccattttgagggtgtttgctaaattactctttttctgtgactgtgtggaaccaaatgccatggaaggaaggaatgaccaccacccagaggcaaaaataaccccgcaaagcttgggaaagtcagccgcagcaaacaatcaggaaggcgaggccaagttcactggatgcagagcagataagaattttaattcatcctgaacgcaaggaaaggcgccaacaaagggaagaggttatcttccggcatgagataagatttgttccttttccttgctgggattctccagcgtccagcacttggagagtttgggggttggtttttttactgccaggattcctctaggaaaaccctccccaagccctggcaggggctgtctggcccttacctgaagggaccacattcactcacaagctagtggccttggtggatttggggtctgctgaattcagaggttgaacaaagcaaacaggtctcccaagaaagggccctcaaagcgggcaagacggctctctgcaaacaggttcgagaaaagccttctccctgttcctttttccattaaaa

SEQ ID NO: 225971 - DNA, 250 bp, Homo sapiens
cttgactactttatttctggcagaccaatatctccaagatcatcagtgaattcatcctataaccctcctgcatcattcatgcattctgctctgagagatgatattccagtagacttgtcaatgtcatcgacttcagttcacagctcagactcagagggaaactcagggtttcatgtttgcctcactccaccctgaatggactcgagccatgtattcattcagtaaactgacattattctcccaaaaaaaa

SEQ ID NO: 225972 - DNA, 535 bp, Homo sapiens
tgattctcacagcggactcttcccctttttgcccctgttctttcttcacctttggcaagcatcagtcacacatcttgaggaacctgctcacaaagtggcgcgtgtagcagccccaggtgggaatggagggacttttctatgtagtgtaatggacataaggaggcagatgtctgtgtgggggtgagatgtctgtgtggaggtgtttgtatgcgtgatttctgtctgggccttcttaggcctgctggtataaaataatatgggaaatgcagatgactcagcactgacacagtcaagatccccagagttagcatttctatattctctgctgtttacgaaaaatgtgcttgtgccatcaatcagcaactcatcctgcattttccgctaaaagccttttactgaaaaatgcatatacttcaaacttattccccttctttttgtaaactgagctcattagcagctgacaccaaactgagaactagttttgtttgtttgtttgttttagcacggaggattaaactggaaggaaatgagcatt

SEQ ID NO: 225973 - DNA, 468 bp, Homo sapiens
tcttagaacttgttgcctccctgggcagacgccatgaagtgtgataaccagcactaagagaaagtctcaggaagttccccggtctgaccctgcggccacggcagcctctgcccacagcctgcttcagtccacctctggtgctgcagccaactctgctacaacactgcttccaccagagtgtggaataaaatcacagtaacccacgctgttcctgaaacagcaccgactgcaacactgcttccaccacagggtgtggaataaaatcacagtaacccacgctgttcctgaaacagcaccgactgcaacactgcttccaccacagggtgtggaataaaatcacagtaacccacgctgttcctgaaacagcaccgactgcaacactgcttccaccagagtgcggaataaaatcacagtaacccacggtgttcctgaaacagcaccgactacaactgcttccaccagagtgcg

SEQ ID NO: 225974 - DNA, 405 bp, Homo sapiens
aaacatgccccaagtgggtaaaatgaaaacctgttctcaaaagagaatatagaaagaattttatttaaattggataaaagcctagttgttgtttttataaattttatttaattaagttgtcacagtgggaaatattcaatttgttagttgaaaaaaatgtaaaattgtgttctgggatctgtgattatttactgttacagcagtggggttggggttgggttgtgcattgggaacttaggggtttataataacttccagtatcaggacagtgtaaatgacttaaaatctcttgtgtgaaaaagtttgactttctgattctcagccgtgttgtggcaaaatggtccctggagtttttgaccctgtgtttaaagaaatatgctataaaataaaaaataatttggaaga

SEQ ID NO: 225975 - DNA, 484 bp, Homo sapiens
ttctcacatcaaaacttcttagagaaagcagatataacttcaatggataaataatttaaataattatttgaataattatttaaattccaaataatatccaagactagaaatggccgtggtcaaagacacttaccacaaacacaaacaactggagtttatactgttgtattacgtggggatttccaaaccacacagtattaccccattactctaatggaacaccttaaacagtttattgccttaaaatctgctttattaaaacaaattgtagcatgcaagtgtatgtatgcacagaaacagaacagctaacccttcagatacctgagattagaaataccagtatttgctgtgaaatgttggcttccccgctaaacataaagcaatagattctgctctatcagtgttccctacactactaaggtattgtgcactgctaacccttgcagctctattgcaaggtcaaggtgattatccctattttaga

SEQ ID NO: 225976 - DNA, 347 bp, Homo sapiens
gctgttaaaggaagccaagaaaaagagtgaagacattgagaaagtgtgcttatcaaactcccttaacagaattacagaactacaaaagctggagaaaacataacccagccattttatagatgatctcatggagcccaatttttttcacatgatttgcccaaagtcatttgtgcagagtaatgactcatgaaaaatacaaataaaataaagaggaaatctatgcagtaaataaatacatggccttaaaatattagacaatgcaagtattatacccagaacagatgtccagatctctgcagacactcttaggtgcttagggcctgagtatactaggtgacatcatagac

SEQ ID NO: 225977 - DNA, 200 bp, Homo sapiens
tagtcactacattacactctgccttctgtgtaaaggagaaaagctagtctgactcaaacgaagaagactttaagaacagcttcttggagcacacttatggaaactgacgtaacagatctaggctgggctgagaatcacacttttataaaaggttgcccaagtagttaccctgaagaccagccaggtttcagaacccctaa

SEQ ID NO: 225978 - DNA, 530 bp, Homo sapiens
agtaaatttggtaaacgaaaaattatattggataatttaaatgctggcttccttatataacaatgtaaggaagtaacaatgatctcactttctttgttatccatttttatatacactattgttatcgcctgtggtgtccatttgcccccttttctaccatgaaaatttttgcatttgatatacgatagctttctaaaatattaattgatgattaatataattaataattattttaatattttacctataatattgtcaaaaatatttcccaataatacttttatatttaattcacgggaattttactgtaaaattagtgctttttatttgttaaatctttaattttgtcattcttttacttatgttttctgaatctgatatcatgacctctacaatgtttgtttacaaaaatatttactgatatattttaatatctgttgttgtagtttgttatgttgaactcattaatattttgagattaacttgggaatgcaaaagtacaaatgataacatgaattttaatttccaaa

SEQ ID NO: 225979 - DNA, 582 bp, Homo sapiens
ctcacacttgtaaccccaacactcagtagagacggggtttcaccatgttggtcaggctggtctcgaactcctgaccttgtgatccacccgcctcggcctcccaaagtgctgggattacaggcgtgagccaccacgccaagcctaatttttgtgtttttagtagagatggggtttcaccatgttggccaggctggtcttgaactccttgcctcaggtgatctgcctgccacggcttcccagtttgctgggatttcaggcgtaagtcaccgcgcttgaccccctttcttgtttttgaacttagcttagctatatattaaatttttgtgtgttttattttatccagaactataatataaccaactcatcttcttttcctgcccctttttctttcccctttttcttctcctttcctctctctttattcactcttcagcctatttatactgactttagcagttttcaccaaaccactttattcaaggccaccaaacacttctatttgctaaatccaataaatcatttatttatttatttattttattattattattaatattattattttttttaaagactgagtct

SEQ ID NO: 225980 - DNA, 584 bp, Homo sapiens
gccatttcaaatggatctgtgtgattgttgaggaatgtctgactccaagagaagcggtggggcagtgtctgtggctgctcaacattgaaccctcaggcctctcctgaatgacagacctgcctcctgatcccggccgccaggtgctgctgcagaacctgcaactcaacatttccaaacaactgcatgaattcccatcaaaaatgttctcttctcttcttgtaccccaacctcagtcaacgctgccaccacccgcccaggtgcccaagatagagatcctgcctgccttcttcatccttatacctgtcctgaccctggtcaggcacacaggagggcccaggagatgtttgcagagtgaggtctgtggtctccctgcccagcctcgagctctctggccttctaatcccacctctgaactccctgcatcacctccttccaccttaagtctgtcttgggaaaataccggtagcatattcagaaaaatgaaacgaaatctgccctaccaaaaaacaaatattccattatcttacatttcctgtttccctgagaaacggaatagtcaaaaataaacaaactgataggatggc

SEQ ID NO: 225981 - DNA, 236 bp, Homo sapiens
aagaatactaatgagactatgcagaattgatatggaattgcacgtatatgtatggctgggctaagatttgcaagggcagaggggagatttagggccaaatcaagcaggccttgtatactctgccatgaccaggattgggctttattctggagataatgtgaatctatggaaggacttacataagaaaagatgaagtcagttttatgtttcaaaatgatcaatgtgtctggggtggt

SEQ ID NO: 225982 - DNA, 2388 bp, Homo sapiens
ccgcaacctgctgcgctcgcccaaccccgaaggtgcgcaagggcccagagcagccaggaggcaccaccctgaccgtctgtctcttcctctttccctgtttccttatctctctacctctttgtctctctctgtctatgcatttctctgcatccctctgtctctttaggattctttactggtgctttatttagttcctttgatgaggttttgttttcctggatagtcttgatgcttgtggacattcatcgggtctgggcattgaagaatttggtatttattgtaatcttcacagtctaggcttgtttgcacctgtccttcttgggaaggctttccaagtatttgaaagcacttgaatgttgtaatctaagtttttagtcactgcatctgtatctgcattagtggggactcaaagcccagtaatgctctggttcttgcagacttgtagaagtattgtcttggtggtcttggataagatttggaagaattctctggattaccaggcaaaggctcttgttgtcttcccttactttctctcaaacagtctctccctccatgttaccaccagtgatgttcactcaaggccctagggctccacagtgagcaggtgatgaagccgggcaggcttgtattcttttcttcagggaggtgagttccttggttccaggtggatctagagatgccaagcaggagccagggcctggagtctagaaccttaggaatctatctgttgctctgttctactgtggctgagctggcaccggagccagaagaggaagttcttcccactcttctctcccctttccacaagctaaggagttctccccatggccaccaccaccccaggctcatggcgagtactgccaggctactgctgatgtttatttaaggcccaagagggttcttccatcagtttgtggtggatgctgccaggcctaggactctcccttcagggcagtgggctttcttctggcccagggcaggtccaacattactttccaagagccaaggcctagaatcaaggaccccaggagactgcttgatgctctacctgactgtggctgaactgctgcctaagatgatttttgattcttatgaaggtgctttttggtgtgaatagtttttcaatttggtgttcctgcagtgaggatgattaatggaggcttctatttggacctcttgctcccctctcctcttatagtattcttgctaataattcataaccttaatctaaccagaaggaaaaaaaccggaaagaaacaactggaaatcctaaattgggagactctcatttcataaaacaccaggcttgtcatgtcagtgacatgaatgattaaaaaggactgatacatgacagctaaatgtaacatgttatcctagattggagaaaaaactttgctgtaaggaaaagtattgaggtaactggtgaagtttgaagaggaaccttattaaataatagcattatatcaattttaaatctcctagaaaaaaggaaaaggatgctgttatattccctttgtgatatcgtacaacgagacaactgcctcttctctatccatttcaaaactagaaatttactcatgggaaagagaaaatagtccagactatgtagcactgctttcctaatttgagagaagatataccattctgagaaacagaggaattaaatgaacatgtacatactgaaaatgagacctctagatctttttccctactgggttttcaaatgaagacaaacaggcctttatgctccaggcagagtattagaagattcgtctttgcggactcttaccaaccaagaaaaaggacctgaaacccttattaggttatagtgaaactgagcttgcaacaagcttcacctgtggcatcaaagtttccagctagatttacctaggaacactagacatctgagaaatgaaaaacagagacccatacaaataaatagggtaaaacacttggataaaacagactacttaaaaacttaaaataactgctatcctcagcgattcaagaagttactacagtcatgaaatgagaacttaatgttccaaaataaaaggaatatttaacaaaaaggagtacttggaaaaataaaaatataatagaaatgaaatgtttaactgaagggttagaaccttctattcaatttcctgtaacatagggcagaaagaaacagaaaatagaaaagaaaaattagaggactagtaatactagaagctagaagacagagaagtaacggtgctttcaacattctgacagttctagtctagaattctatacctagttttatgatttaagcttgaatgtaggctaaacacattttagacatgcaaagtctcatagaattatctcctacaaaccctttctcacaaagtgactaaaggagtaaac

SEQ ID NO: 225983 - DNA, 404 bp, Homo sapiens
ccccagcacagcctcaaatgtatattgaccatctagagaggcttctagatgccacaatacaggagccaaggcctggaacacaggagttcacaatccaagtgtgcctcaaaccgaccaaacgggaaccagggtgaggaacatgctccccaatacccagccatgtggtactggctgtcactgctacagaattcaggggaccgggtcattaaaatttgccatgcagcagatgaaaaagaagcaagctgtgaacaaggatcatcgcgttggaaataacagatactacccaagatgtgcagagaaacaagaatcaagggagaatacccagcccatccatctggagactgtcagttctcttggggaaaagcaatatttttatgctgcattttcctactcctcagggtaac

SEQ ID NO: 225984 - DNA, 498 bp, Homo sapiens
ctgagaaactcccctcccctgaagggcattagtaactgatcttccctgcacacttcctcccccaaaacaagaaggagaggatgaagcttaaaaaccctgtttcagctagaatctttccaagcccctctgctgagaaagacagaaccagtaccagctctgccaggcccatttaggtcttcctctcaacgttctgccactgctagcagctctgtgatccagactgctgaagatcagtaaagatgtccatttgcccagctgcatcatctgagagtgtagcatgttgaagacatgatctgttacagcgtgagacaactttctcttagtgcctcatgtttaataagtacttgtacatattgatagactgcatgaagtatgcataaacatacttagaaaaacctggactgaaagacaaaccctacactgtggtttcttcacccactgccctaactcactgtgctgtacagggggactgaataaaatcatttcacatgcatttcc

SEQ ID NO: 225985 - DNA, 418 bp, Homo sapiens
  misc_feature (141)..(141): n is a, c, g, or t
tatgtccatatgaaatgctgactttgttcaaacatgcaaacgggctacctaccctcctctcctacccaccctccaattgctgaagttccattcagcttttccttgtcttcagaaagtatattgaatgaaggtatagaaaantaaagcatttaggccaaatgttgggagctggaagaggaagaaatcaactgttaacttcaaagtgaaaagacaccaatagccagaaaaggttttctctcagtacagattttgctgggagtatatttctctattatttcaattattacaacttcctgcataggttgaaggtcattcataattcacgcttctgtcatttttagacatgccaaatgcagtctattaagcataaataaaacttccagtgtttgatcaggaaaaataaacggggattcataac

SEQ ID NO: 225986 - DNA, 264 bp, Homo sapiens
ctactgaggaattgataaacaaaatatatatctgtatagcaggatattattcggccctacaaagtaatgcagtactgctgcatgctgcggcaggggtgaaccctgatgcgttaggctgggctgggtgcggtggcgcacgccggtaatcccaacactttgggaggctgaggccagagggtcgcttcagccctggagttggaggttgcagtgagctatgattgcgccgccacactccattctgggtcacagagtggatcctgcctc

SEQ ID NO: 225987 - DNA, 293 bp, Homo sapiens
aattccccctttcatttcagcagaggacaatattgagagacagcagagtccagaggcttttcttatctaaggagataataactgcctaacaggggcatggaaaaatattgaagtattgggatgggcaggagaccagagagcttagccccgtctcttccaatctgatagcatcccttgatagttcatcttggtttgctttagctcagatgtacctggacgtcagggcagggggaagggaggatagagaaaagaaagaagaaaaacaagataaatgtatcgtgttatgaaagttt

SEQ ID NO: 225988 - DNA, 579 bp, Homo sapiens
gagaaaccagaggaagtggctcccctctgcacacacacaccgtggaggattatcttttaaattgaagaaataaggaagtgaaagaacttttgagcctgttaactcagaagattagcactggaaaggacctgggatctagaccgacctccttatttcctcatacaatggaggcctacaaacttgggatgttttacccaggtctacatacattgtgtcacagccatgactgcaccgtgtgactcctgttctggtgttctttctggtacaccattgaaaggcaatgagattatttccatgtctttaggaggaaaaacagaacagcatcctgccacacccagcctcttggtattcaccatgcactgtatttcttccttaaaacaattgaagcccagacctttcttttctggccccctactgaaatggaaaatatgttcgattattgttaatttaaaaaaatcagtgaggatacaagtgttagacgctactaatgaatcaagggaagtcttcaataagatgtagccaaaaataagcaataattgattcttagaaaggtataacagtgtgaagacgggtttgctc

SEQ ID NO: 225989 - DNA, 355 bp, Homo sapiens
tggtggtgatggtccagaaaggaggcatatacttgtgatagtggtttttgtcctttccatacatgacttcaactattttttatctttaaaagctaaattctaaagtaatgatggaaatggtgactgctctggcaaatttagattctactgtaccctgtccttcctatccttcttctggacatatttgtgtacatctttctttattgtgtgggttacatgcaaagctggggccagagtgtgtattagttgataaaagcagtactttatctgaatagttgttcactgttgcttttatgaatggattcatagaaaaaagggtaatttaggacacataaaatacatgattggaaattaa

SEQ ID NO: 225990 - DNA, 303 bp, Homo sapiens
cgattcttctctagtaaatgactgcctgcttccccccaagaggaccccaaagcaaattttaggtatgccacatagcctatatttaaaaccatgttgctcaaaacacactctccaaatttgataaaaatctgtcaggctgattttgcttgatgtagtaacagagacatgtaaaaacatatacaaacatttttgtttagctatacatagatgcagttaaaaagaaataaatactaggcagtaaattcaactggctaaggaaaagagtattttgatggtgttgttagaatagatgggaatttgagt

SEQ ID NO: 225991 - DNA, 708 bp, Homo sapiens
ggcagtagggcgcaaggcagtccggggcgggaggcaggggtcgcggtgcgccgggccctcaccgctgctgagcgtggactcgcagtgccagatgtccaagctggcgggtttccggcaggactcccacaacgacaggtagtactggtggtcagctgtgatccaggccgggctcagcaccgcccccagatccagatacagcgtcaggaagatgcacaacagcccgaccagcttcaaggggagtcaacaccgacacgcgcacctcctccatgccgctgcccgccgaagccattcctggatgccgctgccgcccgaggacgccaggcgggtccggggagccaggagtccgacctcccgaggggagaagccaccgagcccccacgcactgggactcgctccctcggggctctgcgcgccccctgccgcgcgaccaagatctatggagaagtgaacccagagaatttgcactgacacccatggacggaaggtaagatgtgcctttcacttttcaccatgattgtgaggcctccgcagccacgtggaactgctgttggccagatgcttatctgagctcctagaaaccacccacattctttaccatatggccgcctccatcttcaaagccagcaatggataatttataccttgtcaagttcctctcattcttcaaatctctctgacttttctgtctctgactagtgtgtccagatt

SEQ ID NO: 225992 - DNA, 522 bp, Homo sapiens
agccttcctgggaaattccaaaaacacttgcaaattcccatagggaatcttccagctaagtttagggcatatttgtccaaggtcaccgacagggtgaattatatgggtcaaatttctaggtgtctgtatgtgtctggcactccacttccattccaaactggctagaaaagaatgtttcatttttccattcactttcagtgtctgccctgttcccatagtaacctttggctgtcaccctcccccaccttacacagatagatacacatcctttctgaattaaatggaactatgtgacctaggttatttaagtcctccctatcctgtgtttgctcatctgtaatagggtgataatagaaatacctacttcaacaggttgttatgagattaaatgaggtaaagaagcatcaggttttaccacaatcaccatcactactttgtgctagaggcaaatctccataagaaagttgtccctttaagtctcacgaatagttcacgggtttgggaggtgggggggggcggaag

SEQ ID NO: 225993 - DNA, 695 bp, Homo sapiens
ggaattgatagtacatactttgattctttcttaaacgtcttccaaagactagagaagagttttacttttcttcacaataaaactaattctgtttcagaattactgtgtgggtacattggacccttttataaatctaagatacttcatggcctcctgccatatcttgaaaaactatactgtttcatcatcctaggaataattttatcattacttattcattatttccagttgtactgaaaaagactaaattattaattttttaaaaaaacagaagaatgatgaaattgcctagaaggataatgcaggagtgacatgaatcatcactgttacatcatccttcacttttattattgtgctgcctaaagtattgcattatctttcaagaatgtgcagtagaagtctggagacacactgtctttataatcttctttcactttcattgaacaaggctgagaattcacaattttatattttccacacaaaatggcaaataggaaattgacaaaacatgttttcacaatttttagatgaatcagaagatgaatgcaaagaaacacgtagtctaggtactagaacctaatgatgtaatgaacttcatcttttaagtaattctcagactacgatttttcagtggatattggtagatgttttttctaaaactcaagaactgataagtgaatgatgtatttctgtgt

SEQ ID NO: 225994 - DNA, 167 bp, Homo sapiens
tgttaaacacataatcctaaatttagttgaaccatctgggcaactcttaataaatagtgagaacagactgttctgtgaagacgggcacattttaagtgctcgggcagcataaatactttggccaaccttgagccagtgagccaagtaaaaaaataaaaaaatgaccc

SEQ ID NO: 225995 - DNA, 323 bp, Homo sapiens
aagaatcccgaataatacaccatgtactcttattgtctttctactacagctctttccactactaacatgaaacctatgtcaaaactaagaccaacctggaaatgggaaattaacagattttagctcactataaatatttttcaaccattagaggctgaccaaaaatggaattgactgatttatgcaacaatgttccttattgctataaactggtaatgaatcctcacactgaatgaaaaactgaattggatatttctcaagttccttccaattataaaatcacatgcttctaggtgagtataaggtgtacttaactgtccttc

SEQ ID NO: 225996 - DNA, 219 bp, Homo sapiens
gtgacatctctcagccaactgaccacagttgactcagctgttctgactggctagcaagatgtttgtgaaggagggggaggaaaaaaaacaactctaacaaagctgaatattctgtctgtgcagacagatctagctttttaaaacagaatcctcaggactaactttaaaaagtatttttcagggccagtatggccctctgagaattatgaaaaagggtat

SEQ ID NO: 225997 - DNA, 420 bp, Homo sapiens
ccatgttggccaggatggtctccatctcctgaccttgtgatccacccacctcggcctcccaaagtgctgggattacaggcgtgagccaccgcgcccggccaggcttctttaataagggcactaatcgccttcatgagggctctgtcctcatgacctaatcacctcccaagtgccccactcctaatcccatcaccttgggagttagtatttaaacatatgaattttgggagggtacaaacattatgtctatgccagtaacctcctttgtgaagccttctttaactcccaccaattcttgcatccatactccccctagcgttcttcacatgcttcgactattgcatctcttacacaaaattatttacatgtctgtgagctccttaaatgcagggaccatgtctcaaataaagtgtatccaca

SEQ ID NO: 225998 - DNA, 372 bp, Homo sapiens
aagaaatcccatgaagagagaaaaatatgattaataaaatacagtatataccggaatatattacaattattatttctgaggaaaagggagggacagttttttaaaagctccttctttatgtgtttattttccaaatttcctataacaaatgtgtagtacaatgatgattaaatgaatgagtatataaagtgctagaagaatgcctggccttatagtgaactctcaaatatgagcttttactgttgctatgatataattacttttattatatataaaatatttttaaaaactcactctaattgtaattaattgtttgtgtaactacttgtttaatgtttgtcctctatcctctatcgtctttggtcccttata

SEQ ID NO: 225999 - DNA, 407 bp, Homo sapiens
tgagaaatgaggaagatttatcaagagatggggatggagtataaagaggtagttaggcagatgctgtaggtagagagaatcttgtgggctgagagttggtgtcataaatgcatgacatgtgtttagagtatggcaaagattcacttggaagtaaggagaggtgaagagtgtggaacagtgtgaggaggttgaagtctgagtacatttctatttaatttagtaagcagtggaaaactatgactttttaaatttagtttttttttttttttattatttgtaagctttttatcttgaaacagttttacatacacaggaagttgaaaaagaaatgtatagaggagtccagtgtatccttcacccagttccccccagtgaaaacatcttgtataactttaggtataataaaa

SEQ ID NO: 226000 - DNA, 294 bp, Homo sapiens
tgaacagatgaagacgacaaagccattgtccttaggggatcatctcttggtgggaagacaggtaaacagtaaccattccacaggcacccctggtaaggatttaggtggatggatcctgtgggagccctgaactgggtcttagaggtgagcaggtgagcaagtaaggaagccagaccaagagtatttcaggcagaggcaagaacctaggtaaaaagagaaaccaaatgtaagctcaacgtctttctgtggagcagacacctaagaaattgcccaattcattcccaagcccccagg

SEQ ID NO: 226001 - DNA, 675 bp, Homo sapiens
gagactttggacatgtcagtactcttttgggggccttacttttcttatctgtaaaataaaatgctaacattctggaattttatacacaatcatgtgatgagcaccctaaaacatgacagttaaaggatacggctaaaaggtcaggctggacctctcgcgagctctctatatttcagccattttcaggttggttctttttgtccctttatgcctttaccgggcagcggtgatcgccacgcagcatcagatagtatatggataaaaataggttcttgtaaatgttgaactgaagctgcattaaacacctagaaaaaacatatgtatgtgtcagtgctatcagtatattcaatctcagaagtcctcagtatattaaatctcagaagtgataaactttgaataatttctataaaaatgtattactgatttttccagttttattacattactcttctataaaatgatggaattttgtttcccaattatgaccaagatgattatctcttaatcaaaagattattattaactcaggatcagatttaaagatacattcaggccaggcacggtgactcacacctgtaatcaaagcacttttggaggctgagatgggcacattgcttaagcctaggagctcaagagcaacctgggcaacatagcaaaaccctgtctctgcaaaca

SEQ ID NO: 226002 - DNA, 830 bp, Homo sapiens
cattacactgcatcccacgtaagttttatgccacaaaagtaattctgcagaatgtctgtacaaaaaaaaatctctaactactgtgaacttttagtttgaaagaagatttaaatttcagttttcaccaaatagaaatatctagaatacagcaaagtttctcttttaaaatggtgtcattgatgtcataagtatgggtatttctctgcatattttcattgtttccacaaattttacttgcttaaagaagtgaaatctatgaaaattagggttatgttatatcatttaacagtcataatactttttaaacttttaaatatgttattgaaatgtagcatacacatagaataatgtgcctaagcattggctctgttaattttcacaaaatgaacacatgtgtaaccaggatcaacaaagagagcattatcagcaccctgaagtctcctagtcactatcctaacccctaagccactcactttcctgacttctaacagcatgaatttgcttgcctgtttttgtgtttctagcatatggaatcctatgatgcctgtaggtattgttttgtgtctggcttgtcttactcaacattatgtttgtgagagtcatccatattgttgcattcagttgtagttcagtcattctcattattgtatagcacttcactgtgtgaatatcgcactttctcaattctactaaagatgggcattattaagtagtttctagttttgggctattttgaatagtgcagctgtggacattctcctatgcatctttttggtgcatatatatgttgaatatgtaagtatatagatataaaaacctatagctgtgta

SEQ ID NO: 226003 - DNA, 442 bp, Homo sapiens
agctaaatgggaatattttagaagtttgacccattgttgcactctcacatggcagcctctttatcttgttagagaacatcctttgatttcccttttcattctttctgtgagtctgagctttcctttttacctataaatgtgcttatcttatcaaatagtactgcatgttgcccattcctgggacaaaagagaaataccatcctgtatttcttatagcaacccaggtaaggtttgtgtgtgagggagcattttggagaaaagagaattgtaaataaatgggtataatctagttggaaaactaaaaactttctttaataattttaaggtaggtcaagagcagtagtagtcattgtgtatttcaggttaaccaagaaactcctactgccctgtgaaaatttattttcaatgttagcattcctatcaatggataacagttacaagg

SEQ ID NO: 226004 - DNA, 661 bp, Homo sapiens
ttcaccgatggctaatactttaccacatttattctctgtatatatacatattttttttttctgaaccatttgagagtaagttgcagacatcaaactcctttacccataaatactttgatgtgtattctcaaaatgaaagacatttacttaaactgcaataaattatcaaaatcaggaaatttaaatattaagacaatactattatttgatctacagaccttattgaaatttcaggagtcccagtaatgtctattatagcattttccccccaactccagaaatccaggagaatcatatgctatttttagtttctaagactcttcagtctcttaacctagaagagtttttcagcctttgtcttttagacaccaacatttttgagtagtacgcatcatttattttgtagaatgcccctcatttgtttaaattcatgttacacattttttgacggaaatttatagtgatgtgtatcctcagtgaatcgtatcaggaagaacatgatgttgattagtccccttattaatgttgattttgattatttggttaaggtgggtgtgccaagtttcttcactatcagattatctcttccttttctaattaataagtaaattatggggagatactttgagactatataatattttgttcctcatcaaacctg

SEQ ID NO: 226005 - DNA, 413 bp, Homo sapiens
ccggcccaaatactttatattaattttagcatttagatactactatccctccattttacaaatgagaaatctaaggcaagagaagtgaagtagtgtgctaagtaacatcccaaagacagtaagcaggccgggtgcggtggctcacgcctgtaatcccaacactttgggaggccgaggcgggtggatcacaaggtcaagagttcaagaccagcctggccaagatggtgaaaccccgtctctactaaaaaactataaaaattagccaggcgtggtggcaggtgcctataatcccagctactcgggaggctgaggcagagaattgcttgaacccaggaggcggaggttgcagtgagccaagatcgcgccactgcactccagcctgggtcacagagcgagactccgtctcacaaaaa

SEQ ID NO: 226006 - DNA, 360 bp, Homo sapiens
gaccttgtgcttatgtctttcccttctctttctcttggagacagagatgctctgaacaactgtggaccttgtgcttatgtcttttcccttctctttctcttggagacagagatgtaacccattgctccactatgttggaaccagaatgtccaaattagcacttgaggttctgcatgaaagaggaaatagcagaaagcggggatagagtcatagaccacacgggcaggacgtccctttgacctaggagggccctgggcagctgggcactgggtggttagagcaggggtggagtcatagaccacacgggcaggacgtccctttgacctaggagggccctgggcagctgggcactgggtggtt

SEQ ID NO: 226007 - DNA, 669 bp, Homo sapiens
tgaacatttactgattgtttcctactatgtactagacacagtgggagaaactcaaagacgagtgaggaaggaggatactgcagccaacagttggcattgttacattaattttagaaaaagtagccttcgggcaaaaagtattacttggagtagagggtatctcctaaagataacaggtgtgagccattgcacctagctgagagaaacttaacaacttcagaatacattctacattctttggaagctcatgggcaacatggacccaaagtgaccattatgctgagccataacttctggcaaatttcaagaaattgaaatcatacatactgtcctctttctgtgctccgacaatataccttagatcctagccagtacggtaacagtaaaaatatgaagacaatacagattagaaagaaagcaagcttgctttattcacaaacaacatgaccgggtggaaaatcccaaagaatctaccaaaaaagcttctagaattaagtgatttagcaagcaacaaaatccaggaagtagataaaagttttacaaaatatgtaaaaggtctgctgaaaactatacaacagataaatcaaaaagaccttcaaaaatagatgtaccatgttcatggaacacttagaagtggttaaggtaatttttttttttttacttcaatta

SEQ ID NO: 226008 - DNA, 344 bp, Homo sapiens
ttcccattctaactgccttcattaaagaaggcaataacctaggaaagttatttttctagttcaatttcataccttgttaatataattcttattaacgatagaaccgatcttacaatagagtatggtaaaatcagatgcctccaatgagaacttgctgcagcatcattcctctcttctctctgattctgatttataaaaacttaacagaggccggatgcagtggctcacgcctgtaatcccagcactttgggaggccaaggtgggcggatcaccagaggtcgggagttcaagaccagcctgaccaacatggagaaaccccatctctactaaaaatacaaaaaaat

SEQ ID NO: 226009 - DNA, 498 bp, Homo sapiens
caaccatcccacattagcaacctaagtaggccaccagtagagctggtcaagagaaaggataggttcaattaattattttttaattaaaaaaaaatagagacagggtcttgttatgttgccgaggctggtcttgtactcctgagctgaaattatcttccctaacactttgggaggccaacacaggaagatcacttaagctcaggagtttgagaccagcctgggcaacatagtgagactccatgtctattaaaacaaaaaagttcaaggagaatccaaattaatggatgtggatagaaatcaaagtggcgattcctcttcagaagtgaagactgactgataggagaaatgagagaactttctgagtgatgaaggtgttttatatctagattggagagttggttacacaagcgtatatatttgtcaaaagtcatcaaattgcacacatattatttcacagtatgtatgttttaccttaaataaaaatgttttggccaggca

SEQ ID NO: 226010 - DNA, 359 bp, Homo sapiens
ttaggctagcttctacaaattgcaatatgcagtttttgaaagattttctaacaaaaagccaataaatgtagccatctccttgttgtttgcaatggcagagcatcctagagttcctcagctaacctctcattatgtgtcttaaatgcaaaagagccattaattatgccagtatttgaatcaaagaggtcattctctgtctatagtgttcccatccatgtgttccaaatgggagcatagcatgaagtgatgcacatatttcaccacggtatcatgtacttcatggccagtgttttatctcagcagggaactacgccaagttgaaagatggggttgggtaaagtagattaggtgaagtagaa

SEQ ID NO: 226011 - DNA, 443 bp, Homo sapiens
cacaggtggctcaacctcaagggttggtggtgaactgttagtagcccagagttctgaactcatatatccaatgtgaatcaccccaaattagccaatcagtaccattctagtggcccagtattgttcaatgccataaaataaatactgtgctggtcagcagaagcaatctacttgtcaggttgccctggacaaccccataggcatgagccctgaaccgcctcagggcatttggccaaccacacagatcaagaggtgggtcacagagtactctgaagagaaaccaactgggatgatcccagccactgaagagaacttagaatatttcaagaagagcactcaaaagtgtggggtcccctgagaatctggcctggggcctgagctagggaccctgcttgcctaggtcttagggcaaattgtgtaataaaatagagatgatctcatat

SEQ ID NO: 226012 - DNA, 506 bp, Homo sapiens
tcctttagcctttcttgtcttgcatttctgcttgtaacaaattctctcagctttagtttatctgaaaatatttcacttgtttttttaaaggattttttttttgctagatatataattcaggatttacaggtgtgcatttttttctttctgtattttaaaagatgtcattcattgtcttcagatctccgttgtttctgttgataaggcagacatcatgtgcattcttctcattatgtaatgtgtcttttctttggctgcttttcagatttttctctagctttcagctgttttattctggtgagcctaagtataattttctttgcatttaacctgcttagggttcactgagattcttggaatgtaggttgatgtttttgtcaaaattgggaaattttcagccattaattctttaagtttttttttctgccccaaactctcttttctccttctaggacttgaattaaacacataggatcactttattattttgcagattactgaatctg

SEQ ID NO: 226013 - DNA, 210 bp, Homo sapiens
acagcttgcacgggcctcaagggtgtcatgtggcatgaaagacactcatctcaggccacacaggattccattcattgaacattcctgagacaacggaattctggtgatagagcacaggtcagtggtggccaggggccgggtgtggctatgaaggggtggctgccttgtgatgattcaatatgctatgtttttcctttgtggttttctgta

SEQ ID NO: 226014 - DNA, 353 bp, Homo sapiens
ttttccttacaacttatctccttttaacaagctgtgtgatttacctatttatttcgttcatttttttattgtctgcctcctcccaacagaatgttgtaaaggctaagaaaaaccctagtgtttttcctattctcacacaacacaacccctctgacatgagctgtgttagggttgtttcctcacataccaaacaattctccagcagacaccagctgggtgtcctctaattcaattctattccggcacttggtgaagatagtgtcggatcccacaggttgaaggctcagtcccatcagactgccccccacttcacatgctaatcacaagtcctagcttgtgacctatactgatga

SEQ ID NO: 226015 - DNA, 459 bp, Homo sapiens
gtgatcccatgtaacttctctgctatgtgagtgatggatctactggctttataggacatggagatttaaatcctttaaaccaatctgtatgtccatttttccatatccgatcaaactctccagcccacaaactgccactcaggtcgcttaaaagttattgaagaaaaggcagctgggtgcggtggctcacgcctgtaaccccagcactttgggaggctgaggtgggtggatcgcaaggtcaggagatcgagaccatactggctaacacggtgaaatcctgtctctactaaaaatacaaaaaaattagccgggcgtggtggtggtctcctgtagtcccagttactcatgaagttgaggcagaagaatggcatgaacccgggaggcagaccttgcagtgagcctgggcgacagagtgagactccacctgggtgacagagcaagactctgccttaaaaaaaa

SEQ ID NO: 226016 - DNA, 344 bp, Homo sapiens
ctgttgttgagaagtggctgtccaaccagggactcatttcccagacccccttatgtccaggtgccattgttcttgccaatagaatcaagccccagtcatgggtattatttccgggataggtttgttaagaagcaggtgtgcctgctccacacagacccttttcccttccatcagaagatgaaactgacaacaatgagttcttcttgtggagccagaaagggaagagggccggaaccctgaacgaccacgtggaggaaagctgtccaccaaccaaaaatgcctgccttggaacacccattcattgctatgtgggcaagaaataaactaacatgtcaagctgctga

SEQ ID NO: 226017 - DNA, 695 bp, Homo sapiens
aagggctttaaattggatgatcttattagaggtacattaaagatagatcgctgtatactgtgtggagaaaagatttgaggaggacaagactagaggtagagagactggtcagtagactttttcagtaatgctgataaggaataatgggagacttagtacagccattaaaaggttggaaaaattggaagactcagaaatatttggaagaggaatatttggcagcacttaatagttgattagatatggcatatgagtagcagtcaaagatgagtcccagatttgtaggttgtgacaagatatatagtgatgctgttaataaagaataaaggaaaaatagctcatgagacagtgataaacccactttagtcctcttaagtttgagggtacctatgggacagccaaattagcatgtctgcactgcagtaggctatagtagtagaagttagaaatatttgagtcattggtatgtaagtagctgaaatcatgtgagtggaatagcccatctgggaaaagactgtgtgaagtagtgatttttttttttcttttttaggacagagtagattactctgttggtggattatgtggtttgagaaatcattttttgtatgaaaggctttatttggaaaaaagcctttatcatatttatgatatgaactataaaaatcaaagaattagaaaacctttggggtttatgt

SEQ ID NO: 226018 - DNA, 277 bp, Homo sapiens
caagagtagaatcaagtgcaaaggaaagaggaagcagaaattgcctgtcccctcaaaaagtaaaggaagactttcagaagaggggacactcaatccaggttttgagggatgaacaggagtttgccgacaggacaaagaagagacggacatttgaaacagaaggaatgggatgtaagaaggcaccaagaaagatgctgctaatgagaattattttaagtgcagagtagtgtatgtaatccttcattaatatattaataaacatatttataaataattt

SEQ ID NO: 226019 - DNA, 1096 bp, Homo sapiens
acagaattattattttaatacatgatataaaattcaaaagatacaaaagggattagagggaaaaatcattctcctctcccttccagttctgtcttctattttcccgatttctctcccaggggacaaccagttagttataaatatttccagagatactctttacccatataagattgtacatatacatgtgttttaaaattttatttaattttgtatttagaggttaatggtagcatgctacatggacctagcaagctactgtatgcaccttgcttttctcatttactgtctcttggagtatgctccattctcagtaggcaatatagtgcagagattgagagcacagaccactgggtttgaacaaactccactctttactagctaagtcatcttgggcaagttttctaacttctctgggccttaagttcttcatctataaaatggatataatagtccctacctcataggcatagaatgactgtaagtattaaatgagtcaagatacatgaagtatatagagcttggcacattttacataattattaactattacgaatacatatggagctgcatccttctttttaacacctgtataatattctacactggatgtattatatattttattttgtctgaccagtctcatattgatggacaactagattgttcctagtattactgttgcaaacaaattgcagcatttgctgtgatgtatatttttaaaggaaacaacataaatgtccaaagttagtttaattatggcacagtatatgtccatatgatggaataaatcagaataagattgtagctaggtgtggtgctcaggtctgttatcccaatattttgggaacccaaagtgggagtacttcttgaagccaggagttagaaaacagtctgggcaacatatggaaaccctctctctacaaaaaaaaaattcaaaatattagccaggaacagtgtcatatgcctgtagtcccagctattcaggaggctgaggtgagaagatggcttgagcccaggaagtcaagactacagtgagccatgattgcaccacacactccagcctgggcaacagagcgagaccctctctcttaaa

SEQ ID NO: 226020 - DNA, 615 bp, Homo sapiens
ttttttgaaacgctaattcagtgtagtatagtatataacattaatacagagttgaaatatggtctgaaattgttaaaaattgaatgggataacatttttcactttagacttggtaaaatttggttaaaatcgataaaagtaatctattcataaaaaattctgattttgtggaacatggaagatgaaaccatgattatctctagaataaaattgaaaggcaaagaaaggaattgtttagcatttcaatcagaaatttagtctttgtgggtatattgaaattttagggattattttcatgacctgtaagggccaaaaagaaagatcatttgcttgtagatggtagaagtcaaatatgttgatagtatagtactaatttgtcttaattttttctccaatatgtgtagcactttttcaaacaactttcttatcggatatgcttgttacttgaaaataatttttaaaacttgtgtttcttttatagcagaaattataactagatgagtgaaacattcctcttgtgaattgttacacataacatggattgaattttggaaatgaatctttttttttttttgagacggaatctcgctccgtcgccaggctggagtgcagtgg

SEQ ID NO: 226021 - DNA, 219 bp, Homo sapiens
gcctctggcttttgtttgggttgggttctgccaatgtgaagtgctgggagaagactggaaagaaggagaaaggcgaggtcagggtatttcttcccccggcctccttcactgtaggtggccatggctgctgcccttgaccaaaggtcacagcccttatgacagccctctttccacgtgactgttttcttccaagttcctgtaactgttccccttctgcta

SEQ ID NO: 226022 - DNA, 649 bp, Homo sapiens
gtcattagtcaagttctgcaggcctccccgcttccctggtggtgtctgcctatcctcaagcccattgagactccagtaatttttcctaggtgtacgggttcctcaataatctttgttctggaaggccctgttcctgagaggaatgttgcattttcctcagtgtgttttagaaaagaatttttattattttgctttacgttttctgttttttttttgaaaatttattccaacataactaaaattatgtaaaaagggaagatggcaaaagaatagagtttcttttagattatagtaataatctaacatcttgaaaacgcttaactttgcttttgatgatgacaagaaaatgagatgaatctactgaaggtgaacctataggaattttttattacttctgatcacgctttgcttaatgctggaaaactcaaatctttatgtgtattataaccatgcttaagtataattatagtgagcagacattgagttaaatgaattgatggtataaatgatgttgtttataaaatatagtgctatcaactgtattgtagcacttttttgttataaatagtaatttacaagccagctgaagattttgcattgagcttagatattgtccctgagtatttcaataaagttttaaatttaatat

SEQ ID NO: 226023 - DNA, 418 bp, Homo sapiens
tcataagcaatgtctaaataaattgtgctagatcctgttgtagtttccaaatatttgccatttttccagcaaaaagttgatattaatatttcccaactgctgccatcaggcttggccacgtggcttgctccagccaataacgtgaatgaaattgatttgccaccttcttgcaggtgcatgattctaccatcttttttccttcctttgcctcaagaccagcacattccagattgggcctgctcctatgtctgggtgccagaatgaagaagacatggaggagagctgcagccaacctatgaaggacacataacacagcaagaaataaacgtcctttgttataagaacatgagtgtggggccattggttaccatagcataacctagccaaagttgactaataaatagttttttagaattgt

SEQ ID NO: 226024 - DNA, 567 bp, Homo sapiens
agaggatgagggaggagcatattcggattgaaaatggtgatggtgtggcaggaacacagggactgtccactctgcacaggctgtcggggtctccgtgggggctgagcacagggtggcaaacacaaagaggacactgaaaatgaccaactcaggatgggggagctctctagtaatctgaaaaagggagattctagccctagttgaggccggcgctgtgtggggaaggggacaggctcctgtatagggtgacgctggaactccctgactttaagatcaccaagtcaggccgggcgtggtggctcacgcctgtaatcccagcactttgggaggccgaggtgggcggatcacgaggtcaggagatcgagaccatcctggctaacacagtgaaaccccgtctctactaaaaatataaaaaaattagccgggcgtggtggcgggtgcctgtagtcccagctactcgggaggcagaggcaggagaatggcgtgagtccgggcggtggagcttgcagtgagctgagatggtgccactgcactccagcctgggcgacagagcgagactctctcaaa

SEQ ID NO: 226025 - DNA, 549 bp, Homo sapiens
  misc_feature (511)..(511): n is a, c, g, or t
cagcaggccattttagtcacttcttttgtaagcagtatgacccagtccctcatataagggaaagtaaaatatccatctgaaaaccactcttagttctaggtataataaatcacagccgctatcatatatctcatacattactatatctagtgtatcacagtatctaggacgaacagacatcaagtaaaaattatctctgaaaaacaagtgaaattataagcagcttaaacagcactgtcccaaatttttttaaaaaatcagttcgtagtacctcatgcttgtttaaattgtttgactaaggctaacacccacagtttgatccttttttataaatcagtcagattttcaaccagtgacataatatacccataactctggacaatcagaggtagtaaatatacgtgtgcatgtgtctttataatagaatgatttatattcctttgggtatatacccaataatgggattgctgggtcaaatggtatttctggttctagatccttgaggaatcancacactgtcttctactatggttgaactaatttacattc

SEQ ID NO: 226026 - DNA, 715 bp, Homo sapiens
aaaggctgggggtcctattcagcctccttgcacagtgtggtggtgaatccctaaggtgtctgggagagctgggagacgtgggttctgccaccagctctaccaccacctcccagccagcttacctcaacttcgtgggggctcagtgttctcacctgcaaaggacgtttgggagagatctctgatactcctcttccctctcccgctctaacaaagcatagtcctaacatctgaggccagggtcatcatagagtagactgaaacatcagggtgagcagggagaaggaagggcaagtgggcgagcagctgtctagaggggcttcattagacagccgaagtcagccaaggaaagagggaccgaggtcattagaccgccaaagtcagccagggaaagagggactgaggagacgggcctgagagaggccgtcgaggaggcgtgagagcctgagcctcaggcgaagcttctcctccccagcctgatgttcctagatgaacttaggaagccagattcccctgtctcctgggaggatccactcatgagtgtcacacctggctctagatcaggcctacactggtgctagcatgggacagctaaggccatgggttttagagtcagtcatacctggggtcacttctaggactgtcacttactagctaaacaagttacttagcttccccaagtcatgttcttcctaaataaaggacaaaataacagttc

SEQ ID NO: 226027 - DNA, 307 bp, Homo sapiens
gggtattttgatgaattcccagaatctcactgttggaattgattcttaacattctaatcaatgctttaaatctcctttatgagaccacaacaagtggactttcagcttttcttaggaaaaacaaacaaaagactgaagtttcagggaagaaactgtctcataagaaagtcattactttttcatgcccttcttagtaagtttttgcttttataaagtcagatctgccttcttgaaagttccaacctgtttattttaatactgtcttctaggaccacagaatataattttaactcctttttcatcatgt

SEQ ID NO: 226028 - DNA, 247 bp, Homo sapiens
ggatgagtgctgacttaactctgatttcaacatgctacagggtcagtgctgacttaactctctgatttcaacacactgcgaggccagtatgaacttaactctgatttcaacatgctgcgggacaagtgctgacttaactctgatttcaacacactgtgggatgagtgctgacttaactctgattttaacatgctgtggggtgagtgctgacttaactccgatttcaacatgctgtggggtgagtgct

SEQ ID NO: 226029 - DNA, 370 bp, Homo sapiens
tcatggggaggagtaggcacctgactttctttttttccttacgacagctttatccaaataaagcacggtgtgtttcatcacccataatggaaagtgcctgtcactccttgaacaacatcatatggttggtggccggtggataatggaccactgagtgtcaaggtgactggctttcaatgcacacaaaactaaaaattatagacctgtcattccacaggcaggccacaattagctgtctatgcaacttgaaatttccattttgccagctgagtaatcatttgactagagtttttcatttggaagcatttctaagccttttgtgtgcaagtcttttaaaatgtggatcctgaagtaaataaacagtgcactt

SEQ ID NO: 226030 - DNA, 448 bp, Homo sapiens
cacatgacttctactttctccacatcctcatcagcatttgttattatcctctgttttgttttgtttttgactttcgataatagctatcctaatgggtataaagtagccatagttatttctgtgttctaattttatcaattctaaaatcttggcactgtgaacaagatttcatctcttacaaatgcttgtggctggccactaaaagcctgaggaatccagaatgtctggccctcatcttagctggcagttggcaccaaggtaaaaaccctaaatccctttgggaccagaagaaacatttacccctttaaagaccttgctacataaacattccatattacctgtgatttctggttgttttaaatgccaactgtttttattttgtgattttgtaagtgaatttagaatgttgtatttaaacttttgtgctatccaaaagtgctctctcaaa

SEQ ID NO: 226031 - DNA, 109 bp, Homo sapiens
ctagcaaagtttcaatgatgaataacatctctggaaaggttgctgtgcaatgaaacccaatgtctgagtcagaatctgatcagcaacctttcatattccaaaggggagg

SEQ ID NO: 226032 - DNA, 448 bp, Homo sapiens
tacctcccggctgacttttcaccttccgctcccctttcctcctagtctcgaccctactacaccaccgtcccctcccaagtcccgggcagtgagaagatgcccggcatggggggcagccggagcctccctttagcagccagagtaggaagggggcttagtgagggagcccagacccaaacttcatccgcagctttcttcggcggaccttaccctctcctccttcagtggcattttggcatctattgtcgtcatatctgtctgctgccccacttaatctacaaatcgctcacgggtcggaggcaggacccgtgcgttttcagatgtactagctgggctgttctaactgcagggaaaaagcttacaaaacaagagttaattttaaaaacgtttcaaagaaagatgtgtttttaaaaataagttaataaaataacactcccttttccctcct

SEQ ID NO: 226033 - DNA, 534 bp, Homo sapiens
tcccaggggctggctggactctgtggggaatacaaaaggaccagaaatagtccctgcccacagtgaacttaaaatttgcttacggaagagcagctttatacacagataaccttgaactagggttgaaagtgatgaaagttttgagagtgctgtgaactttgcacagaaagagagagtttaagttcagcattgggagttagggaaggcctgagctggaaatgaaaaatggtttaggaaacagacctgtgtccgggtgcagtggcttacgcctgtaatccaagcactttgggaggccgggtcaggtggatcatttgaggccaggagtttgagaccagcctgggcagcatggcaaaaacccatctctactaaaaatacaaaaattagccaggcatggtgccacacacctgtagtcccagctactctggaagctgaggcactagaatctcttgagcccatgaggtcgaggctgcagtgagccgtgatcacgccactgcactccagcctgggtgacagagcaagactgtctcacaaaaa

SEQ ID NO: 226034 - DNA, 412 bp, Homo sapiens
caggagcgcgactcctccagtcacatttgggccacagaaatgggcttgaggccgttagtgccagcagaggccagcctgtggccctggcatggggcaaaggctgtatttgaaaatatgtcatggactggcacagtggctcatgcctgtaatcccagcacttttggaggccaaggtgggtggatcacctgaggtcaggagttcgaaaccagcctggccagcatggtgaaacctcgtttctactaaaaatacaaaaattagctgggtgtggtggcacatgcctgtaatcccagctacatgggaggctgaggcaggagaattgcttgaacccaggatgcgggggttgcagtgagccgagatcgtgccactgcactccagcctgggagacagagtgagactctgtctcaaaaaaaga

SEQ ID NO: 226035 - DNA, 362 bp, Homo sapiens
aagcctagtctgtttgttttttcctaaaagaaaagcagatgattcaactgtgtatttctcagtgttgatattgtggtttgaggtatttcataatcttgagtaaaatcttgtcaattttatgctatgccttgtgggaacatatttttacttttaagtctctttggcaagtggagcttcctttgtgtttcctcaccaaatgtattccccattgttttctgattaattctttttcagaatgtttactccttcttacctcaatgtcattacttttcagtcttggctttgggtaaacctaggacaagaattggatatccaaagccaatttcaatataaaaactataatatctatcaaaatctatgta

SEQ ID NO: 226036 - DNA, 586 bp, Homo sapiens
ttccagaattaggggaatccgtttgcgttgttttaagccaacaagtttgtggtattttgctgcagcaacagtaggaaacaaatgcagccatgaagtgaatgtccttctgtacctttgagtttatgtataggtttaaaaaaaaatgcccacctacactaatcaatacggacaaacatgggattgtctatgcgtattactttgtgatttctctcttcacctaatttgtggtgaacaacagatatgttgtgaacaactttctatgctatgtattttaatggctgctccctcgcttagcaatagttgatgcagtatttattttgtttttgtattcttttgctgatggaggctggccttgctggctgtacatttattttgttagttctgttctgtttttttgttgatacatcatatgtatcttgagagttttcccagtagtgttcatcccagaggatccaagaaacgtcaagttggttggaaggtaggttgtacaatggagaaatatttttttctccctgacttaaatttctgattgattaaaccacaacagatcacagcttaagatccattcgacagggctttcttcaca

SEQ ID NO: 226037 - DNA, 313 bp, Homo sapiens
ctctctttctccctctctcccagacctgtgagaccaaaccttaattaatgtaaacagctgtcaggagagctgctccgatttaaggaatggtcttgttttttaactgcttgttcagtgcaggtgaaggaacttttggagggttgggaatgtcaagctccctccatggataatttcttataaaaatgcggccgggcgcggtggctcacgcctgtaatcccagcactttgggaggccgaggcgggcggatcaggaggtcaggatttcgaaactagcctgaccaacatggcgaaaccccgtctctactaaaaataca

SEQ ID NO: 226038 - DNA, 531 bp, Homo sapiens
caacagcagaatgcacattcttttcacatgcgcaaggaacatttaacaaaataggccatattctgggccataaaacaagtctcaaacatttgaaatgattcaagtcataataaaaaagttatcttaccacaatggaattaagttataaatagtgagtaatagaaagagtcttagaaaaatctccaaatatttggaaactagataaggcacttcttaataacctatcagtcaaaaaggcaggagggatcagaatgtattttgaatggaatgaaaatggaaacccaacatatccaaatttgtgggtgccactaaatcagcacttgaaaggtttcaagtcaataacttcagcctctaccttaagaaatgagaaaaagaagagaaaatgaaacccaagtaagcagaggaaaggaaataatgaagatcaaaacagaaattaatgaaatagaatactgaaaaacaatggagaaactcaatgacaccagaagctagttctttgaaaagatcatattgatcaacctctaggcatggatc

SEQ ID NO: 226039 - DNA, 564 bp, Homo sapiens
acacagaaacattccaagcctgtggtaagttctcttgccctgaacctttaaatactcttagtctgtaagagagaatgctcctgaccaaaatcagctagaagtccctctctggtttattctccaaaataaacctgtttttgactgttgagtgacttttcatgtttttttcctctttctttaactcttacacccaatttattatctctgttattcagtgtaggttattcctattgatctatttttaattttgttcactgtatctttggtcatctccaatatgttgttaatttttatttcagatattgtattttttagtttttaattctcgtttgttcttttatagtttctatttctttgctgaagttcactatcttttcattcattatcaatatatttccataggtctttgaagataattacaacagctggtttaaaatcggtgctgtaattccaacatcttcaacaccttcagttttgcctccattgattgtttttctcttgagtgtggcatttttagaaatttctagtttcttagaaatctgagtactttggatttatattcta

SEQ ID NO: 226040 - DNA, 365 bp, Homo sapiens
tagctattattattattattgttgctgttgttttttgttattactactatggagagagaatacttaatgaattccaagtttaacatgcttattattctcagaatagatgcattgtgggtcaactcctgaattcataaaagtcccattctggctgttgcaaagcctgacataaagggaaccctcttttctattgagggaacgcagatgccaaaagtcacttcatattaaatatttgcatcattttttattctgatctccatgtgcgtgaagttttcagttttgtgtatgaaaatggctcttagtgctaacatttgtatttgtccatgaagagcactactttaaagaattaaactgaaaattttaat

SEQ ID NO: 226041 - DNA, 522 bp, Homo sapiens
ctaaaaacgttaagcgcctttttatacgtgcagctgtcgtatgggattcttatattgtaaaatgcctgtttacttcttttgctcattttctacttttctccttgtttccaaaaaattgaatcactgtatatataaaatctttcactctgtatttcaatattttctttcttaagagtatgttttgaaagacaatctttaattataatgtagctcaatttattattattttttcctttgggattaacagttttttgtctagtgattatttgccaccccaactacataaaaatattttcctccattgttataggttattcttttacttttgcatttagactgacaatctacctgaaatcaattcttgtacgtatctaatttaggtagcatacttaaaatatcatccttctcccttcactgcactgtcacctgtgtcataagtgaaaatgaccacatatggattgggtctatttcttgactctattaataaagtccattggcctgttgtttctatccttacaccaa

SEQ ID NO: 226042 - DNA, 376 bp, Homo sapiens
gacatttgccctaaccttgcagccttggaagatacgattacggcgcagagtgctgtcgccttaagcaggaaaggagcatacaatcttttgggggagataagacagaagaaacacatagacatacaaagaacagaattagaaaacatgctgagctcagcgagagagagaacattttggattgggaaagaagaggtgcctgcacctaaaaccaattatgtcttgaagagcggatagtgtgcgatagaagatggggctacccttcaggaaggggacctgccgagagaagtgagaaagagagaataggcaggactcttttttagagccggacacttagtcactaaacaatctttgttacataaaatacttaaatcagctt

SEQ ID NO: 226043 - DNA, 731 bp, Homo sapiens
agtagagatggggtttcaccatgttggccaggatggtctggatattttgacctcatgatctgcacgcttcggccttccaaagtgctgggattacaggcgtgagccactgtgcccagccctcatcacagtttttatttatttattttttaattgttttaaaaatctgaccaaacctttggtccaccctgactggacgtaaactatcctgagtgccactccctgggccccaaggtctggcctggtcctgccacttctcctctgtctgttgtctcttccagtagaggccccatcatgcgccttgccagccccagcacaagaaacagcttggtagaaaagaagggcgcacgggctttgggtgcaggcagaatcagaattcagactgctcaccgaaacccatcctctcgcgcttgccagctctgtgcccctgggcagatgatttagcctctctgtggcggtttccttatctatatgtttaggagggtcctctgtgagggttaaacaagataaagagccccattctgtgccaggcaacgagaaatagtttttgttttggggattttttttttaatgttaaatctttgcccttcaataaacatttgtagattgatttaatttttaagggttctctttggcagacactattcctgccattatttcaatgtggcctccttttcctctgaaagaatactgactgggggcaagtgacttgggtatttctaccaccacatggc

SEQ ID NO: 226044 - DNA, 117 bp, Homo sapiens
ggttgagggtgaggtctgtttattgccattctccaagcacctgtgcgtgctgcaggtgttgcaaggaaaactggtaggcgggtgtttgtctacacctaggcaaatcacacccaccag

SEQ ID NO: 226045 - DNA, 410 bp, Homo sapiens
agtgaatctgatgatggtggatttggggaaaaagccctagatagtaacctttgtcttcttgtcttttcactgtacacaatcccccttccaacttgttttaattacctggagctttaattatcacctatatgccaatgacttccaagtctctatacctatagtcctaacctctctcttgaatgctaggtttaaatttccatcagccagcagataaatctcccttaatataccatggataatttcaaaaacactttcaaaacataattgtgagaacttatttcctcctaagacacttgaaattaattgcccctctttgaggtctacgtaggtagtaaaaggccagggttgaccaaaacgtgaaatccactcagggtaaagaaagttttatttaaatttcttgtaaagttaaa

SEQ ID NO: 226046 - DNA, 464 bp, Homo sapiens
ctgataattgagttattaaaagatttggtttccttgggcctataaatcaataaacagtaggattaacgcaatagtttgccttttaagtcaagggagacgtttaaggcaagcccctttgagctttgttttcaaaccaaacaggtgagttgcagctctccccccggcccctgcactcttcagacatttggtccctgcccactcctaaacgctcagtcccaaaacaaaatagcgaaagacaggaggagtcaggatgtggcagtgctgccttcacactttccacttcgcaagttcttttaaaggttccaaagatctccagaccattctctgccaaaccctgccgcctcctgcacgtattgcaggtctctggggagcaagaaatgtcctgtttgggtgaggattccgtcacctaaaaagatctttaacttctcccccaaagtgggaaggtaactttctcccccttttcc

SEQ ID NO: 226047 - DNA, 978 bp, Homo sapiens
acaaatgaggttaattggacatgaataattcttagcaaacatacgctacatactgatcatcacttttatttttgtaagtgattctgaccaatcttttaaaaaatgtgatctacaattctgctagacaccaacgtaagttatgaatctaaagttttcgaatttaccatttccccatttttgaaaatggactctgtggcatgcttccccctctccatgacttttccaagattactcccaagtggttttatcatcacactggcatgttctttcaacatgctcaagaattcaggtcacttaaagcagttaggatttagagtggcttaaggaagtgggtaggtgttctgtgtcaactagatggtgcaggtgatgatgtggggctgtcagcaatgcctagtcctggaatatttcatggtatttcatggtcttcgatgaaggtggcattattctcttgtatgatgatatgcccacagatggactctctcagaaatggatgctctgatcagacacgctgagactttctcacctccacataactagttttagctctcacagagtgtgcctttcatgaactcaccattcttaaaacaggttcaacgctaatctaggtgctaacgtaaatttaaaaatatttcacttagcatataaaatactgcaggtatgcactcacaaacaggggattcaactagagaaagcctgaatagcacttgtgacacgcaagaggaaaatgcacaccctgaattaaaaggtcttcagaaaaaaagcagaagaaagttaccggagttcagcaacactaaggcggccatgtgcattaacgagctcattaagagtagggctttctcagttaatatttgaaagccgtagccttctagagtaaatgcataattccttgaactttgataatttggcgctgggacaatgaggcacttttaaatcacttaaaaatctgctttgaaccaagaacctcctctggatcatttt

SEQ ID NO: 226048 - DNA, 485 bp, Homo sapiens
caaagtatttaacattttactaggtggaatcaatgaatgaaccaatgactgccatagaaccattccatttcaaagccagaaggcacctttgagaattatttcattttttttttcaattatttgctttaatccttgtttttttgttagaatgaaaaaatgaatgtccagaaagtcacaaagcaggtttgaggcattgctgggagaagcctccagccccctattggggtaagagtcagctgttctctctaaattgtctggagagttttatacccattgtgcacacctacaaagcatgcacaaaccatagctgatcattctgcagttattcatgtcataggaaaatgattagctgtggtatacccttatatgaggtagtgaaaatatattttaccttataatatattgattatatattcacttcaggcactcatctaccatatataacacaaagttcacttgaattatttgcattttggaaaagcaaa

SEQ ID NO: 226049 - DNA, 384 bp, Homo sapiens
agagttaagagatcagaatttccataatcattttgagacatattgatgccaagttatgcttatgctttaagagtttttcttaatgttttctggggtcataggtgcctttaagagtctgagaaaattttttgtgcagctttccattactatgcctaaccgcaagattttacatatatttgagggtcttcaagattccttgaaggctatcccttggacccaagcttggacccaagcttgggagtacttgtgctaacatgcaataatggctctaacattaaaatttaagctgtagatttggtctgtcatgtacactgctttatccccagtgcctagaacagtgcgtggttcataatcaacactcaataaatatttgttgaatgaata

SEQ ID NO: 226050 - DNA, 515 bp, Homo sapiens
agaacctccgaattccaccctgaaagtggagtctagtctgatcaaatgtgtgggacctgcttatgtggccctcttcctgttcatcacaccttaaccctgaagggcaatgagcaaacacaatgatttgccaaacagcagaagggctcatgcccatttcgtgggagtccccagctggaccctgtacaaaaaactgctttagagactgctttaaggtgtggaaggacttctgtgcaaggttgcagctctgttaggagaagcatattagcactgacctaaatggccatccaagtatggttaattgcattgtcgtatttataattccttgatacagaatgatctctaggttaagttaggcacaagaggaagacatgtacaactctgtgtggtgggccaccttgtgtgttttttgaagtgtgtgaataaatatgtgtattacacatatttacatgcacagaatctttgagagggtaaaatgatgagaaactgtacctttaagaagggaaactaggggcagg

SEQ ID NO: 226051 - DNA, 631 bp, Homo sapiens
aaaattttaataacttaggaatacaacagtcttgttaaaactgacatttaataataaaaatctaaaaagcatggtaagttatggcttaatctcttctgggtagagtgatatttatcacaaagtagtttacatgcacaaggtctagttaaaagcttttaatctcttataaaatttccaagtctggtatcttaagtaccactcccctgatccacaccactgtactttcacgattactaggaataaatcttctgaagtttatgatttctctcagaaacaagagacctctttcagattactgggattcctgaagtatagttatgaactgagtggcctatctagcatcggggacagaaagattcatttctcaaagagattttggggttatatatttttgaccaaattcaccattactcatttggcattttcgaccatcttaacaaatgcagactatgaatcattaaaaagactcactaaacagaagtagggtaatgtgggaaaaacaatggaccacagggttatagtgcttaaaatcctggctttgtcattttctgtgtcatcttagacattatcctcattgagtctcagtttcttcatatgatatatatttttaaaaagatattagcagctgtct

SEQ ID NO: 226052 - DNA, 559 bp, Homo sapiens
cagtggctcacgcctgtaatcctaccactttgggaggccaaggcaggcagatcaagaggtcaagagattgagcccatcctggccaacatggtgaaaccccatctctactaaaaatacaaaaattagctgggcatggtggtgcatgcttgtagtcccagctactcaggaggctgaggcagaagaatcacttgaacctgggaggcggaggttgcagtgagctgagatcgcaccactgtactccagcctggcaacagagtaagactccacccactcaaaagaaaaaaaaaaaattctgctcaccataagctatcattaaggaaatgagtaggcacaaaggactcatatccagaatgggtaaataactcttacaaatcaataattaaaacaagaacaaaacttccaaattgcccaagcaacaaggaccagatttaccctcctgcataaaacaaccaaaaaataaataaataaataaaactcaagaaacaatggtgtatttattagtccattctcatgctgctacaaggacatacccgagactgggtaatttataaaggaaaga

SEQ ID NO: 226053 - DNA, 337 bp, Homo sapiens
tcagcgtaatactgggctcagctgaaactcaaactcaaaatgaattaaagacttaaacataagacctgaaatcataaaactcctggaagaaaacacaggggaaaagctcctagacattggccttggctatgattgtttgaataggacatcaaaggacatgcaacaaaagaaaaataaacaagtaggactacatcaaactgaaaacttctatacaaaaaaggaagcaatcaacaagatgaaaagacttcctatggatttggaaaaatattttcaaaccatatgtcttttaaggggttaatatttaaaatatataaggagctctcacaattcaaaagca

SEQ ID NO: 226054 - DNA, 380 bp, Homo sapiens
cacccatctcttctctcctagtgctgctgggaaaagatgactgtgattacaaagcatctctctccttaccatgagctcttagaagaaaaggtatcacagagaccaggcgtacttgccaagcttgtgaatttgggggaaaggataagtggggagattcctgggttgctgctgtgcgtttacttcttgaggtagctcctctcaccaggtgaagtgcaagccagtttcatttttgtaccttttcccaagctcctgtggctacaagcttgctacagctgcaccttctagactctgaacacccctccacaccttttcttttcttttttttttttttttgtaaaatatatatacatgtacaataaaatgcgaaaatcttggttgta

SEQ ID NO: 226055 - DNA, 291 bp, Homo sapiens
gaggcggccacccggtagcttgggcgggttccgcccacctcccgcctgtatttacagcccccttccaacatccccgactccctgagggcgcccctcattctgctcggccttgccttccccattcggccacatcctcctctctcccaactcagcttcgacccccaaagcctttccctaaccatcggaaccacaggcttttctccggcctctgagtgccagtcttcaactaggtgtcttttaaaaaatcaaaaagcatctcatcctacgggatgtgtgtgaaaaaataaaaat

SEQ ID NO: 226056 - DNA, 473 bp, Homo sapiens
cagtcaatgaatattatctgctattattatctaataaaattgtcataatgatcaaattagattacttttatgaaagaacttataaatccagtggcagccttgatttagctgtgagaactacgtttgaatctttgctctactacttaggcataaatttcgtttagtctctttccttttctggatatcaggttcttcatcagtaaaatgggaaatcatactcatggagtctcatggggtgttctgaggattcagggaattcaatgagaatcatttcttaaactgcaaagtattgtgtcaattttacctcttattattgttctcctgaaaaattacagaacttttccttcaaaatggtcaacaattttattttatattgtcacactaatcagaactggttgtagaatatttgtgcctttgaatgaatacgtttgtttaacttgtactcatattgaattataaactcttgaagaaga

SEQ ID NO: 226057 - DNA, 389 bp, Homo sapiens
aataaaatattactttactagtgctcaaaaaaatgtagactaaaataatgagctacaaattataatcatgtaattgtcagactgaaggcaatgataataaccaatgttgtgagaatgtggggtaacaggcattctcacaaacacgtggttctattttcaggctattgatgcctgataatttggtaccttgtacttagttatctatttacctacttatagaatactttttatcggatctaagtgtgttttagaattccttggatcctggctgggtgcagtggctcacgcctgtaatcccaacagtttgggaggctgaggcaggaggattgcttgaggccatgagtttaagaccagcctgggcaacatagcaaggcccgctgtctttgcca

SEQ ID NO: 226058 - DNA, 400 bp, Homo sapiens
tgaagcctcaaagtgctccatgctgtctgctgaaatgtgttttataatacatttttttccacaaatcaaaataaactagtgtaaatgacaatggaactagaaaagctttgctctttataaaaagggacgtgtgagattctttgaaactgagcgctggcggagtctgtactctctgaccctggaggaagagatgctgttctttgaaatgagggttttctttctggaagaggctttgtgagcatggaacagcaaagcccaggataggaactgagagaggtcaccgaagtgtagacaccctggcctcagtctctggagttcaaaaaggctgcagtcaattgttggaatttcttttcacatgaagaaatctacattctgtgtaaataaaccactttaaaaatgt

SEQ ID NO: 226059 - DNA, 2455 bp, Homo sapiens
caccctggcccgctccccgcgccctccacgggtaacggccccctctctcggtgctcagaaaccggcggtgtcgacaggtggctctcgcttggcctccttgtctgcaagcctttctcctagagatctgtgcctcctggcgaaccatgggagacctgccgccctaccctgagcgccctgcccagcagcctccgggccggaggacttctcaggcctcccagaggcggcacagtcgggaccaagctcaggccctggcagcggaccccgaggagaggcagcagatacctccagacgcccagcgaaacgcccctggttggtcacagaggggcagcctgtcccaacaggagaacttgctgatgccccaggtcttccaggctgaggaagcccggctgggtggcatggagtacccatctgtgaacacgggctttccctcagagttccagcctcagccttactctgatgaaagcaggatgcaggtcgccgagctcaccaccagcctaatgctgcagcggctccagcagggccaaagcagcctgttccagcaactggaccccaccttccaggagcccccagtcaaccccttgggccagttcaacctctaccagacagaccagttctctgaaggtgcccagcacgggccttacataagggatgaccctgcccttcagttcttgccctctgagctgggcttcccacactacagtgcccaggtgcctgagcccgagcctctggagctggccgtgcagaacgccaaggcctacctgctgcagaccagcatcaattgcgacctcagcctgtacgagcacctggtaaatctgctgaccaagatcctgaaccagcggcctgaggaccccttgtctgtcctggagtctctgaaccgcaccacgcagtgggagtggttccaccccaagctggacacgctgcgggacgaccccgagatgcagcccacctacaagatggcggagaaacagaaggcgctgttcacccggagtggaggcggcactgaaggcgaacaggagatggaggaggaggtgggggagacaccagtgcccaacatcatggagactgccttctacttcgagcaggccggcgtcggcctgagctcggacgagagcttccgcattttcctggccatgaaacagctggtggagcagcagcccatccacacctgtcgcttctggggcaagatcctgggaatcaaacgcagctacctggtggccgaggtggaattccgggagggcgaggaggaggcagaggaggaggaggtggaggagatgacggaaggtggcgaggtcatggaggcgcacggcgaggaggagggcgaggaggacgaggagaaggccgtggacatcgtccctaagtccgtatggaagccgccgcccgtgatccccaaggaggagagccgctcaggcgccaacaagtacctgtactttgtgtgcaacgagccgggcctgccatggacgcggctgccccacgtcactccagcccagatcgtgaacgcccgaaagatcaagaagttcttcacaggctacctggacacgccagtcgtcagctacccacccttcccgggcaacgaggccaactacctgcgggcccagatagcccgcatctcggccgccacgcaggtcagcccgctgggcttctaccagtttagtgaggaggagggcgacgaggaggaggaaggtggtgctgggcgcgactcctacgaggagaacccggacttcgagggcatccccgtgctggagctggtcgactccatggccaactgggtgcatcacacacagcacatcctgccgcagggccgctgcacttgggtgaaccctttgcagaagacagaggaggaggaggacctgggggaggaggaagagaaggcagatgaggggccagaggaggtggagcaggaggttggccccccactgctaacgccactttcagaagatgcagaaatcatgcacctggcaccctggaccacccgcctgtcctgcagcctctgcccgcagtactcagtggccgttgtgcgctccaacctctggcccggggcctatgcctatgccagtggcaaaaagtttgagaacatctacatcggctggggtcacaagtacagccccgagagcttcaacccggccctgccagcccccattcaacaagagtaccccagtggcccagagatcatggagatgagtgaccccacagtggaagaggagcaggctctgaaagcagcccaggaacaagccctgggagccacagaggaggaggaggagggcgaggaggaggaggagggcgaggagacagatgactgaggcccaccctctagccactttccccaagcaggtagatagcaaatttccccttagaggtagttagcatggattatattttcactatgtgcttcctgtccccagagggcagggatagaaaaggaaggcaactgcttcaaataaaattcctccacggcatt

SEQ ID NO: 226060 - DNA, 339 bp, Homo sapiens
aaaagttccctcatgcccctttgcaatcaattcactacttctccagctccaggcaacaactggtctgcttcctgtcactataaattagtgttgcctctttcagaatttcatctaaatggaatcctataacatatactattttgtatccatcttcttttactccaaagttcttgaaattcattcatgttcctgtgtgtatcagcagcgtgttccatttgattgttgagcagtattgcattgtgtggatatatcacaatgtgttcattcattcaactgttggtggacatttgagttgtgtccagtttagtgctattctgaattaaagtgatgtgaacaatc

SEQ ID NO: 226061 - DNA, 430 bp, Homo sapiens
cagggttctcatgattttagatggcacacagataaactgagagtgaagagactcagggttcggttgatggaatagaactaaaggagaaggatgtaggaaggaggggcgagggcctctttacattcactgtccgctttacatttttcctagaggcagatgtacccaagagagatattttggcttttggagtgtggccttccctcagtgcatacactatatggaatttaatcactcttagattcttagaaaatatttttaacattcaaaatatatatcaaattataattgctccatctttgatgttttggaatatacttaaatccagagaataacaaaatttagggcagaattttttttttcatatcataccaagagtactgtatagaaatccaaggtactgcatgatggtctgtgcttaactatgacaaaa

SEQ ID NO: 226062 - DNA, 425 bp, Homo sapiens
ggtcttcaaattgtattctgcgtaatacaggtttaacataatgttatcgggacatacagatagtcctcaacaaagtttcaacttaaaacttttcaacttttcgaatggtgagaaagcatacctcaagtaactatacaaccattctgttttcagtacagtgtccaataaactacatgagatattcaacactttgttataaaacaggcttcgtgttagatgagtttgcccaactataggctaacgtaagtgttctgtgcacatttaagtaagctaagcgataatgttccataggttaaatgtattaaatgcattctcaatttatgatattttcattttacaatgggtttatcaaaatataaccttatcataagtcaaggagcacctgtaattaaaaacattaaaaataacatttgtgttaccatatt

SEQ ID NO: 226063 - DNA, 396 bp, Homo sapiens
tttcacagatgagcaagctgaggttcaaggaagaaatctgctaaaggcacacagtctcagcacctagactgagaccctggactcctgctgtcattggccaaggcatactctgactctttatatttccatttgtctcctaaatttgtaattcccatgattacacattgagatgactatttctaagttttcctaaaaataagggtggattacttgagcccaggagttcaagatgagcctggccaacatggtgaaaccctgtctctaaaaaaaaaaaaaaaaaaaaaaatttacaaaaattaaccaggcatgatagccccacgccctgttgtcccacgctatctggggaagagcttccctccattttcttaccggggagatcctcctaaagtccgacct

SEQ ID NO: 226064 - DNA, 431 bp, Homo sapiens
tgagaggtaggcgtatcttatcacctgtcacagatgagggaactgagagcttaatttccccatggttgtggggctaataaatttccaggctacgatttaagcctaaacctgtttgacccaaaagttaggttcctaatgacattgctatgtgttctaccaaacccccagtaggacccttgtgataactaaatgacataacatttgggaaggtactttgctattggtaatataccgtacatgtgtacctcaattaaacaaatattattattaccataatgaataccacaggtttgtccttgggaagaggaatattctgattgtctttccttttgtcccttcactgaccatacagcatatacacgggaagcctttaaagcattgtggttaagcatatgggttttaatttaaataaatgggattcaacttcaact

SEQ ID NO: 226065 - DNA, 367 bp, Homo sapiens
cagctatttcacaggagagtgcagtatcaaatttaggtttttctggtcccaaaccctgatgtttcccccacatcattgtttctcagacttggctgcaatcacctgaaaaattttattaaattctttttttttttttttttgagacagagtctcgctctgtcacccaggctggagtgcaatggtgccatctctgctcagtgcaaccactgcctcccacgttcaagtgatcctcctgctacttgggaagctgaggctggagaatcacttgagcctgggaggcggaggttgcggtgcactccagcctgggcgacagagggaggccctattccaaaataaataaataaaggacacattcttatcagcaaaa

SEQ ID NO: 226066 - DNA, 455 bp, Homo sapiens
ggcccccggttgtgtgtgttgtgtgcgtgtgtatttggagaaagaccattcactgaaaggaacggggccagtccttactccgtggaactcagacctctcctcttcgcccacaatcccctcagaaatgctagagggaatgtctactgagtcgaaagtcctacagatttgtctctgttccttcccattgcaaaaccaaatcgctttcatgtttctgggacccactctttcttcacccagacataaaaagagaaaacgtgtgcagtgacgaccagcggaacggaaggagcactggactgagatttaggaggcctggctcctacgccttgcagtttcttcatgtcgtgtgcaaggtggtaaacactctgcctgttttctcaccttcaaataatacctacctctcaggactgttgagaaatgctgagtatactgagaaaaaaaaaaactaaaaaactgga

SEQ ID NO: 226067 - DNA, 162 bp, Homo sapiens
caaaccatcctccatccccgtcccatagaaaattgatcttccatgaaaccaatccctagtgccaaaaaggctggggattgctgccttatatcatatacaaaaattaactcaaaattaatcaaagacttaaaagagttaaaaatataaaactattagaagata

SEQ ID NO: 226068 - DNA, 467 bp, Homo sapiens
ggactctgcaaggtacccgaggacaggagtcactgcttgcatcccctcagccttggggcaagaagaaggagccagaatccaggaaaggggctttggcgaaactgcacggaaatcattccttccgtttacgtaattttagttttaagtgtagcagccggggagaaaattgtgaaggggagtgagacaagcgttcgattacttagccaattgtagtgcacaactgaagttgcagacctgaagaagccgccgcattgccatggcaacagtacagggactgaatctctggtttatttcaatttcatatctacccggtagaggcccaccaaatacgatccagcccctgctctcaaggagaagtaaggaggacagtcaatcgataaatattggttaaactcctactgtgcaggcaacctactggacacggagatacaattatgaataaaacactgctcttgctctcaagcaaa

SEQ ID NO: 226069 - DNA, 149 bp, Homo sapiens
agaaataagaaaatacaggatatgagtgaaaatttatccaggaaaatagatatcataaagaaaaaacaatcacaatttctggaaatgaaagacacctagagaaacacaaaatgcaatggaacattttaactacagacttgaacaagtat

SEQ ID NO: 226070 - DNA, 300 bp, Homo sapiens
ccatatttgcaaaacacaaaagccttttaagagttaaggggccaatatattatacctttctcccacttttgagtttagagccaattgagagaagtacactggggtcaaatggggcagatcaaataccagcttaattattggtgaagttagaatgggaacccattttgcatttgtagtctgaacagactttctataatcctctcctagaatgaaagtaatcatctggaattgaagctgtccccctgcaggagcttaaaaatgtgtgtgtgttttgagtaggtggatgccagagagaaaaaa

SEQ ID NO: 226071 - DNA, 565 bp, Homo sapiens
gactatagcttattgtaataagtttgtgtacaattagagtatggatcatatgtgtgttcaaagggcaggaaggctagaaatgaatctggagaagtaagacagaacaagattaggcacaactttatatatctttatatatcctcctaagaagtttagcagcatatcttaaaaacaatgaaagcccctggatgcttggataatgctcacctgtagtgcagctactcaggagcctagaatgggaggataccttgagcccaggagctcaagtccagtctgggcaacatagtgagaacctggctcaaaaaaaaaaaaaaaagccattgaaaaggaaaacaaacaaacaaaaatacatttatgattaagaaggagggtgttataataagattttctttttagaaagattagtctggtgtggcagtgtggaagatagactgggtactggggtagagatgggggttgttggaaaacaaaatcaaagccagcagaaataggacacttacaagtaatccaggaaagaagtgataaggactgaaacaaagttagtggctgtagcaagggaggggag

SEQ ID NO: 226072 - DNA, 387 bp, Homo sapiens
agaacttaaagtataattaaaaaaaaaaagaaaatacaaagatcagcagcttgaggtatgtgcatttactgtctaggtagacatgaatgaactctagagttgtacatttctttgtcttcctggatacttacaatggctagtacatttccctttctcttgaccatgatagacacttgtgccgaaaaatagtctggcacacatagatctgcactggcttagagggtggtccagatgagtcccttctcttggcaagcttcgtagaggtgacttatcattttcaagaaggaaacatgaatatgttaatatgtgttataaatagaacacaagccattgcatatgtaatgaagcctttaaatgaggaattgtaagtgctgtaggaattcaaag

SEQ ID NO: 226073 - DNA, 432 bp, Homo sapiens
ctcgagttggagctgcaatctggtcctgcctgccgtctgccatgatgccccggaaatgtctagtactttttaagttggttgctatgagtaaccagagacctttctcctggtgatattccctcctgaattcccccttcttactcttatcctctgtattcattctctattgctgtgtaacacattacctcaagctcagaggcatcaaacaacacaaatgtattgctggctcacagtttctgtaggtcataattatgggctcaactgaattctaagaaagctgtgatctcacctgaggctcagggttctcttctgagttcactggcttttgacagaattcagttccttgtggttgtaggactaaggaccccattttcttgctggatatcaactggagtccattctaagcctctagattccaccagccaaggccct

SEQ ID NO: 226074 - DNA, 491 bp, Homo sapiens
cagctgcgacagcaggggttgtagtttgttccactaatatttctgttatgtttcccccagaatcctggaatggctgttcccaggcttttttcaaagcaagtggatctgagcggggcaaagggtgaaggcaggggacactgtggtatgcattcactcccccaggtactgggttgtcggcagctgatatttcccaactgagacctgctacaggaattgcttgaggctaaagagagccactctcctcaaggccacatcctcctccctaatgagagctacacccaataacccatcatggggataaaaggactcaaccctctttgcttcagtttggaacatctctgaagggccattccagcttcatagctcccagcgcatttgtcagagaactctgttgcaaccacatcacagtccagctcccccctgcctatgtattgcttccttcacacagatgttgatcccaggaacacttcctaatacacccgctttcagca

SEQ ID NO: 226075 - DNA, 457 bp, Homo sapiens
agcgcctctccatgtctctcaaagaaaaagtcaaagtcttaaccatggctccaaggctacgtcaggggtcagcaaactaaagcccacagccacacgcattcaattgccctatctatggctactatctgtctaccacggttcacctgcggctgcccagcactgccacgaagacatcaagtagccccatgaagaagccagcagttaacaccacactgccagctgtgtgaggctccaccttggaacgggggtccccagcacaggtaagcctttggatggcatctgactccaagtggaaactccagctgaacttttccccagcgcctgacccacagactccatggccatcatacatttattttgaaagaaaaataatggtttttttctcatgccactatgtcttgccacagaactgtgtgtaatctccctctgtcataaacatatctgtatacacattgaa

SEQ ID NO: 226076 - DNA, 787 bp, Homo sapiens
caagcgaccaataagcctattaaaagatgctcaaacctcatgagtctagaaaggtgcaagttaaaccacagtgaactattgctagaattgttgctaggttggttaaaatgaaagagactgatgttactcagtgatggtatgtggaaccatagtaactctcatcccctgctagtggtagtgtcatttgctgtatccactttagaaaaccatctgacattattggctaaaagtaaaaatagaaacaccctcttcctcaacagttatattccttgatacagacatcagagaatgtatatgtacatgcaagaatgttcatggcagcatttcttttaatagtcccaaactggaaacaaatgtccatgaacagtaggataggtaaataagtcatggtctagtcatacaatggaatcccaaacagagtttttaaaaggacagagtaccactacagtggaaaaacacagataaatcctatagacataagattgagtgaaagaaaacagtttcaaaggagtaactatgtatgattccagtatataaaatcaagaacaggcaagactagtccatggtgatacaatagtgttaccttttcgggagagagggtaattgggaaggggacccagggggccctctgaggtgctagaaattttctgtatcttgatttgggaggtgggtacataggtatgtatgtgtacaaattaattgagctgtacgttgaagatttctgtaccttactgtgagttgtatttcaattaaaagtaaataaaaaggaaaacattgatacttttca

SEQ ID NO: 226077 - DNA, 561 bp, Homo sapiens
caagcgaccaataagcctattaaaagatgctcaaacctcatgagtctagaaaggtgcaagttaaaccacagtgaactattgctagaattgttgctaggttggttaaaatgaaagagactgatgttactcagtgatggtatgtggaaccatagtaactctcatcccctgctagtggtagtgtcatttgctgtatccactttagaaaaccatctgacattattggctaaaagtaaaaatagaaacaccctcttcctcaacagttatattccttgatacagacatcagagaatgtatatgtacatgcaagaatgttcatggcagcatttcttttaatagtcccaaactggaaacaaatgtccatgaacagtaggataggtaaataagtcatggtctagtcatacaatggaatcccaaacagagtttttaaaaggacagagtaccactacagtggaaaaacacagataaatcctatagacataagattgagtgaaagaaaacagtttcaaaggatttattaattagtgtattcccgcgttacccagtcacgagcgtctgtgcaac

SEQ ID NO: 226078 - DNA, 210 bp, Homo sapiens
gtgaccagaatatgaatgaaggaaggtgtgactggaatgtgatttataactgaagaaaaaaaatgtaaacaggagaatggtttgcctggcacctgtaaaggggagacaccaaactacaatttagtggtattcatttaacattggccaggagagtataccctaaccagcagacaggaattccccttggcatgtataaccccaaagctatta

SEQ ID NO: 226079 - DNA, 554 bp, Homo sapiens
acttataaaaacccatctcagtgatcatagcagacttatacttttcttattctatacacagcaaggtatagtatctctaaactataattcctgcttagacaagattaagagtcccagtgactaaattttaattatgattcatttagacaagccaagacatacaactagacaaaaagtaaactgctgacttaagagatttaataatacaaaaacacaataaagcctgccaggaaacagtatttccctcctcggctttaaatagcaccaagcctggtcactttaacagacctcttcaccccacattttgtatcaccaagaaaaaaaaaaagttaaaaacttgagggcccagtccaggttttctacctaaaaaaggcaaatcatcagcctttgggcaacatagggagaccccgtctttataaaaagtaaaaaaagaaattagccagaagtggtggtatacgcttgttgtcccagctactcacaggtgaggcaggaggatcacttgagcacaggagttcgaggctgcagtgagctaggattgcgtcactgcactccag

SEQ ID NO: 226080 - DNA, 523 bp, Homo sapiens
aacagtctgggttttgccatatctttaccctgctgaggctctcagaggaggatggatgacattccacgtgatgacacaggctgatgaccctctgggcatccaggcacagaaggcaggggctctggaggtgaaagttgccttcactctcatggccctttaacgaaagaccttgtcttacccatgttaaattcagtttggtttaaatgtttcttcatacatagtgaactatcacctaactggatgtgtaaacaggctataaccaactctagtaccaatctctgggtttcagccaatcacagacagccaactcttcaaaccatgttcaaagaaggcaaacgccaagctagaacccatccagctgtttctgttccttacttctgttttccatatgtcactctcttttttctgcccataaatcatcctcgaccacgcggtagcctggaagcatctctgaacctattctgttttggggattgcccaattcaagaaccatttttcactcaattaaattctgttacattta

SEQ ID NO: 226081 - DNA, 338 bp, Homo sapiens
taattttgtttattttttgtagagatgaggtctcattatgttgcccaggctggtctcgaactccagggctcaagcatccctccttccttggccttccaaaagtgttggaattacaggtgtcagccaccaggactggccagctgttgatttttatttaaattttataattaaccatcagactctttttctgttagtttttggttggttctcttgaatttttaaagtatacaactgtgtcatattaagatagtgttcattttgtctcttcctttctgataatgtattcttgtttttacgcttgcttatctgattgcactgagtggtatttcaagcgcaat

SEQ ID NO: 226082 - DNA, 534 bp, Homo sapiens
gagggtgggcggagttcccgcggtggccccgcccctggctgggggcgcccgaagcaacccggcctcgcttgtggggagccctacacccgcggccagtccgcccctgcgggggaaaatgccggagtgaaactggagcgattgccgccccgccacgtgacggtcccgcatcggcgacctggaagcgggtgagctgccgccgcctccaatctctcccggcgcagggggccgggatgcggccatgcggcggcgcgggaggcccgagagcggggctcaccctcctcagactctgcggcggagagccgagtgatgaataaatgagtaaccacatcaatatttaagtgttcactcggagccttggggccagtgtgtcacgggttgggggaaattacaggccctggtggggggttaaataactacttccacccattattaagtgcctactgtgtgccagggcctaagtattaacgtatacttggtttattattgataataacgatgtttagtaattatagatgctgaatttcagccaactct

SEQ ID NO: 226083 - DNA, 628 bp, Homo sapiens
cgaaaaacccgctctgcgcctccaggccaatcccacgtcttccttctaaaagtccctgctccggaaagccctctccgtaaaagggtcccggcccgcagttcctgggatggccagcctcttggcgcggacttggggtgatggggacccccgccgctcccctgaccccgggccgcgctctcccctcctccagtccgcccctgcgggggaaaatgccggagtgaaactggagcgattgccgccccgccacgtgacggtcccgcatcggcgacctggaagcgggtgagctgccgccgcctccaatctctcccggcgcagggggccgggatgcggccatgcggcggcgcgggaggcccgagagcggggctcaccctcctcagactctgcggcggagagccgagtgatgaataaatgagtaaccacatcaatatttaagtgttcactcggagccttggggccagtgtgtcacgggttgggggaaattacaggccctggtggggggttaaataactacttccacccattattaagtgcctactgtgtgccagggcctaagtattaacgtatacttggtttattattgataataacgatgtttagtaattatagatgctgaatttcagccaactct

SEQ ID NO: 226084 - DNA, 282 bp, Homo sapiens
gtgaatttcccccactttctttcttttttttcttctgttatttacattcccacaccatgccttttgggcaaggacttcttaggagctaagccaaatatccaagtggcagacatggtgtggttctcacaatcccttctccctctccaaccctggacctgtgtcctcaagtcatactctggcacttaggatgagtcttttcataggattccccttgatccttcactcaaccttaaaggactcacctctgttatcctgcagacatgtccagatcagctgattcct

SEQ ID NO: 226085 - DNA, 342 bp, Homo sapiens
gtatgtctacggtttgggcgtatgtatgtattaataaaaccacatttatctttcactgaattcttaagaagcttaaatttcccatcaagatcctattcagttatctaaacacttatgttcctatagaaaaacgtgtgggagagagtgggaggcaacccattttgtcatttcacttgtgtaatgtttgggtggaagattgagaagcgtttgtatgaactttcagataactagattgcacttgcttctcagtgtgcatatttaagattttactgtatgcacccagattgggatttgggtgtatgggagggatgaggatggaagtggagtggaagctgttatctg

SEQ ID NO: 226086 - DNA, 474 bp, Homo sapiens
aacaactttactaaggaatgactgacatacaaaaagttgcagatattgaatgtgtataacttgatgtgtttggaaataggtataccatgaaaccatcaaaccatcatcactatccatgccctgaacttatccactatctcccaaagtttcttctcccttccttttttttccttttgtggtaagagcacataacataaagatctagcaaatttttaagcatacaatacagtgttgtgaatcatgggccctatgctatacagtagatctccagatcttatttattttgtataactgaaatattgtataccctttgaccaacacttccccatttctctccctcaacagcccctagtaaccactattctactctctgtttctgtgagtttggctatgttagattgcacatataagtgagcttgtgcaatatttgtctttctgtgtctggcttatttcacttaacataatgccttcttc

SEQ ID NO: 226087 - DNA, 765 bp, Homo sapiens
aggccagcctgaccaacaaggtgaaatcccatctctactaaaactacaaaaattagccaggcctggttgcaggtgcttgcaatcccagctactcgggaggctggagacatgagaatcacttgaacccagaaggcagaggttgcagtgaaccaagatcacaccactgcactccagcctgggcgacagagagagactccgctgaaaagaaagaaagagagagagagagaaagaaagtggagagaaagaaagatggaaagaaagaaaagacggtgtgcttttgtttgctgaatgatgggattcagagcagccagtgttgtcttctgcaacccgcaaacacccatgggaaggagagcttgtctggttagttagatgactttggatagatgaagagtacaaatgcatggcaggaaaaaggttttcaaggcatgatcggttttcctttgtgagctgaacttggactcttcagaagtcctgaggatgggccagcttggcaagttttctccttttcagcttccagtgtgcactccttctttccactctcacctctgaatgctgtgtggaggcgctgatctgcctaagacccaggctgtgagccaagctgtttttaatgaccgtccttaagcttcagcccaacagctgttttacaggtgcacatgattcagcaactagctcactgtgagtgtatgatttaaaaggtgcatgtaaatcatttgaaaaggtattttaaatgctccagtgggctcgctatttaaaggaatccttcag

SEQ ID NO: 226088 - DNA, 247 bp, Homo sapiens
ctgaggagttagggaaagccaatataaattagtaaaaggttaacaataaattttattaaaaagcacagtttcatcattcaagtatgaatagaactttaaatcatgatatgtgttttctcattaggactttttggataatcctgatttaataattaggtaataattccatgcgaactgtctgcaaatgggaatttccaaagcgtctaaaactttattctctttgtatttacaatagctctcctatagt

SEQ ID NO: 226089 - DNA, 1431 bp, Homo sapiens
catccttcagattaaggtgctccaatataatccataccacagcaaacaaaatcctgaagaattctgctgccaatcatcttgcctcttaacctcaatataacaagaacatacataaaagagattaccgatttagtaaatgctatcatctcataccccattcacaccactggcctgtgatattcttcccctgggagagatgtcaagatttaatgagattctatcataacctgtagaaaaaatgagcaacatggaaacattccaattccagtcttaggtgagttccaatgaaattacctgaagaactgaactagtgcttttagttaaggggaaaagtgccctagcttttaaaaaatatgtctataaatctagttttaaaaacatagcaattggctgcatgtggtggctcatgcctataatctcagcattttgagaggccgaggtgagaggactgcttaaacccaggagttcaagaccagcctgaacaaaatagggagacccccatctctacaaaaataattttaaaaagctgggcatggtggcatatacctgtggttccaggtacctggagggctgacgtaggaggattgcctgagcccagcaggccaaagctacagtgagctgtgattgtgccactgcactccagcctgggcgaggagagcaagactctgtctcaaaaataaatacataaaatacagcgtccaaaagtgtgtcatcttctttctcttcacaattttataataagggggtaaaatgcctgtgagtctattcattatggaaaataaaaaagaaacaaccatttaaggctgaggcattttggttttctgctggcttttagattattaactgcattaagcccctcactacaacttcaccagtatcctagaaacaatttgggtttccttttaggcagggacaggaagtattcaaaggacagacatatggacagagttaggcccttcagggttgaagtctgtggtttcttgtgtctcaagactcaatgtcttgagaagttggtggaccctgtcctccatccaagaagtgctgccaaggaaaccaggggacctagcaaagagtcaggagaaaatggccaaaggaattctgacattccatacctgaatgaactgttttcgtgagtgctttgatcaccctatcccctatcaaggcgctgaacaggtggcccgcaggaaatctgctgtcgcaagaggagggctttgacttacttcccctaattgttgagtaaaaagtgattctcttaatttctgtattctgtttttcatatcaccagtagaagggtcctgtggatctaaatagagcacattttaaggctacagagtagtagaaattgatgtttagacaaggcagcttgttcaaaatctgaaaggcacacccagaagctttctctaaacattttggctcccattaaaaaaaaaa

SEQ ID NO: 226090 - DNA, 462 bp, Homo sapiens
tgggagccagcagaaaagccacctgttgtctgtaaggaagtacccacaggcctggctgagctcattacagcagagagccagcaacgcttcctcctcttagattccgtcatgttagacaatctgcctgctctccccactaaccgtcaaagttccatggaatgaacttgccactttttcaggatcctaaccaccgcactttcctgctacctctggcacttggaatttcagagacaaaaccccttttttaggcagcgagccctgattttcagttccaaagctatgggcactgctgagtgggaccagaggagtggtgtgcagtgagctacctggaggggttgcatgagaccatgtcccctctcctggatggaggtgtcttctggttgccaagaaagtattgagtgataatcagaaaaattccttgattttcatggtttgttgctttgtagcaggtcttaaggaaaa

SEQ ID NO: 226091 - DNA, 500 bp, Homo sapiens
acctgaacatagaacatgaccacatgagtccagaagacctgaagagaagtgtacagatttgggttttcttcccaaagaagaagaggtgggcaggagaaacttcttcctgcttgtggatgcagttgtgcgagaatataattcccaaagcaacaacagcagccactttgtgaccacgaggtaaccaacccaaatggaagccaatgtggtaaggaaggcagaacaaaatttgtttaatacagatttttaatgatcttattaagctcttcgaaccaagtttggaactaccttcctcagaatgaaaaaaacaaaaacaactgggaattctgtatccgagatgcttgtagcccgcctttctagcatagggtacattcactccagctggtttacctcttgctatcaaaatacatagggcctttgttggttgtttggatttcctctcagtgttgtgcagaccaacaaaatttgggggtatattaaagtaaatatgctttaaaattagt

SEQ ID NO: 226092 - DNA, 397 bp, Homo sapiens
ggctagggaagctgaacctgaagggatattcttctccctgccccctaacagttaggacgtgacacatgacccaggctcagccacctggccactattctctgagcttggcatcttcagcaagtgacatgaaaacatagagacaattttagaattattcatagcaacagagacagtaggtatgcaacagcagtggggccctggtggggtttgaggggggtggccctgccatgatgagggtggccatgccaggctgtacctgagacacagacttggctgtggttcccgttgccgagcctgcctaggttacagcccattttccatatccgatgctgcagttttcctgtcaactctttgtatcctttcagtaaatttcattttttcttaaatgaaaaaaaaa

SEQ ID NO: 226093 - DNA, 412 bp, Homo sapiens
gataatttcttacattttacatgactatgtatactaaagatgaagtactgctttcaagtacaattttaggtgcctatatggcttcatcctttgaatagcactccttcctccttttctatatatataaaaactatgtcagccttgaactcaaactaaaatttcttccattaaagggtatgttcattatttactgtaagatgaatgccctatggatttttaaacataagcctggaaaataggaaataattcactctggcttgaaaagggtggagatttctttgtttctttttatatttattcaggaaaagctgacaatcgtctcacattaatgaactacaccatcaatcactgtgttgacaatgagcggaaaagcgaggtatatgtcaggctaacggcatattgcctttttcag

SEQ ID NO: 226094 - DNA, 339 bp, Homo sapiens
ccacgcccggctgactttgcccatattctttatctaccttttcattcactttgtattgagttggagtttcaaaacatatggacaaaatacactatcatagttaagagtatggatttagatcagtttaaattcaaaccctacatttggaactgacttaaacgtctctgtcttgatttcctcatccacaaaatgggttattgggaagatcaaatgagctagtatgtttaaagcatatagaacattgtacaaagcatatagcacatagtaatagcatataaggttttctactactattcatagacaactatctcccctccaaattgtcactttagttatata

SEQ ID NO: 226095 - DNA, 233 bp, Homo sapiens
atatttaattttcttgttaaatttaaactcaaaaacctccccaggggaaaatgagtaaaggatgttgtaaaagaaagaagagtcaaaatggaatgatgagagtaccaaaaataggctgggtttagtggctcatgcctgtaatctgagcactttgggagaccacggtggaagagtcgcttgaggccaggagttcaagaccagcataagcaacatagcaagaccccatctctatt

SEQ ID NO: 226096 - DNA, 530 bp, Homo sapiens
agcatgcttgccctgggaatcattcaccaagagactgttaccgtggagtcaacaagggcctggattccaactccagctccctattggacaagctctgaacctgagtttctgcatttgtaaaatcaagataatagtgtgaacttcacaaggtttttgtgaaggttttgtgagacgatattagggtttcctctctttcttagatcatctaacttggctcttcatcattactaggccatcatctttgcttgtaccactcccctttcctgagtatcctcttcattcttttcagtcattcccttccctccttcagaactgattttatccaagagatctaaccccaggctaatcatttcttatttccatattctcctagaccaaattcatctaatctgttagcctatctagtttataatgcattattctgtattcatttatgagtagcatttgtggctttgtaattgtcttttattttcgtgatttgtctttaaggttaaatagtaaattcctcaaggacaactgtatcttctact

SEQ ID NO: 226097 - DNA, 403 bp, Homo sapiens
ccagccttatttttaaaatgcttcttaaatgtctttagagacaatattcatcacttggtatttattgttataagaagtttgaaaaccaacataatttcaaatgcatgttataaaaacaatcccactttaacatttagtattaacatttgaattgaactaccagtagagagtctgtcagctaaaggcatgaaaaagagcttgatatggaacaattcttaattctagaagacactttagaaatagaaggtaaaggccatatttatactgtcaaaatacagccaaagttgagagaaggtgggggatggttaacgggtacaaaagaaacataaataatcaataagatccagtatttgagaatacaacatggtgattatggtcaataaaaattgtacattttaaaata

SEQ ID NO: 226098 - DNA, 317 bp, Homo sapiens
gctatgattaacatctcatgtacattcaaataaacaagcaaactgtagaataaatcccagaaaatgttattagctttttgtacacgttatttgaggtctttgaatattgcgggagagtattggaatagaggacagagtgcagatggcaacacggaaacctgcaattactgatgtttttaaaaatgtgtgtcatagaccaagcttggtggctcacgcctgtaatcccaatgctttgggaggctaaggcgggagggttgcttgaagacagaagttccagaccagcctgggcaacatagcaagaccaaccctgtctctac

SEQ ID NO: 226099 - DNA, 466 bp, Homo sapiens
gcttcatcatggtgggcttttttcatattaggttttgttacctttgagtttttaaattatgtgtaaagcttcgattaaaaaaataaaaattattaaaaagaaactgagacagtctatccacctatctctatttacccagtgctgttgttgtgttacataaaattcaattttagcttcatgttcatgcaatattttcgtttacccttgattcaaccttgacctttaaaaagccaaaaagacaaatacctattttgacactggttctgatctctctgaaattctgtgtgaccaatggtcaagtaaccttgcaggttatttatcatgtctaatctgaaaaaagtcattgtatttactaatattttaatattcaccttataggtaagcattctaaacatgattgtggcaagaaattcttatatgctttacatgttgaaattctgtgtcaaatgaagtacatatgtatatt

SEQ ID NO: 226100 - DNA, 451 bp, Homo sapiens
attattcagaaagtgggtcattctatttggcattttgaattagtatcaaaatgagatctttaaagtttaccaaaataaaggaaaccacctttgtagtctgaaaaaaaaaactattatgaatactcgtgtataagtatttgtgtggatacatgctttaatttttcttgggtaaatacctaggagttgacttgctggggctgggttatatggtagatgggtacacatttagctctacaaaaaattgccaaaaaaggaagaggagggtgggggagaaaggaaaaaataattgccaaaatgttttccatagtggctgtaccattttgtattctccctagcaatgtatgacatttccagttgctttacatcttctattatacttgatatcatcaatttatttttatttttgtcattctcatggttataacaaggtatctcatgttggttttaattt

SEQ ID NO: 226101 - DNA, 398 bp, Homo sapiens
tctgctgattagctgtgagccttcaggcaagttatttaacctctcaggctaagtgtccccatttgctaaatgagtgtataataatgaatatcttcatgagattgttgtagaataaatgagataatgtactgtgcatggcctgtaggaggtgcacaataagtatttgataaataaattaatgcatgatctaggaaaagcactcagcacactccctgcaccttggtaagtgtccaacaaatggttggtatcaacgttgtttaaaagagcatagcactatttctagcagggcatgatggctcatgcctgtaatcccaggaatttgggaggctgaggcaggaggattgctgaggccagaagctcaagaaaccctggtcaacatagtaagaccctgtctctac

SEQ ID NO: 226102 - DNA, 449 bp, Homo sapiens
ggtatggccgtcaaacttcggcatatagcagggttgcctaggaagttgctcaaacaaacaaacaaacatatgtcctgaccctggaaattctcattcagcagtgtcaaagcttgggcatctagctttactttgaacacactctctagtaattctgatacactctgaatttgagaaccattagtgtattggaaagaactcaggccctttggagccatgaaagactggatttgaattctgattctgccatttatttgctatgtgcctggggcaaattacttacctctctgcaccatcatgtctaaaatgccaatcatttgactaacttatcaagtgatcgcagagaagtaggattaagcacatattatgctgttcttatagacaattttgcatttaacaaaattttagttcattttgcatagtaatctataataaatgctaaatgcaacaca

SEQ ID NO: 226103 - DNA, 138 bp, Homo sapiens
agatcctgagctgggagacaagcagggctgacatccattaggcacagtgccgagggcccacagtgcttttgggggcccatggaaatgttttaatttctttgtagaaacaaaacaatatataatatttttagattaaga

SEQ ID NO: 226104 - DNA, 393 bp, Homo sapiens
ggctttccaaaatgatgggattataggcgttaagccactgcacccgaccaactttgttctgtcttaaagtaaagtttattatatttatttgattatgatgcttctttgatttcttcttacttttattcatcgcaaaaatcatttcttgggaaccaaacccagtccctttaagaaaacaacctcgtagaaactgttaaatatagctgagttattttctgttatttcatctggtgagacaatagaatcattcctagaataagggacttaaggtttttctacagccaacatgtgatgggattttttacaaccaacatgtggtgtgttattagtgatgtcatcagagccataattaatatatgttttcataaataataaattttgacaaaacactac

SEQ ID NO: 226105 - DNA, 372 bp, Homo sapiens
aggcaatgggttaatggagactctagacatttgtttcctcaccagtgaaaattaaatgaagacccaggaatcactacagctatagggatgagaaggacatttcagcagctagagtgtggtggcctccttagcagcttctttttccatcaagaaaatatttctggacaaaaacaaacccatagctggttggaagcagggcattgggcccagtgttaaagatttgaataagaaagatgcagaagatattaatcataggcttatcaatgcccctaggagatctgtccccctgattgaagcaactctggcctttggaagttcatacccaagaagtatgatatcaatcttatttttaaataaagtaaaaatttgatt

SEQ ID NO: 226106 - DNA, 523 bp, Homo sapiens
agttagatacttttcatctccttccaattgtgcagttctcgaggaatcctgcattgcctgtttctggactggctgcctgggagggagcctaaatcccttcctgtcttagagcatttgcagcagtggggttggagcctttctcagttttgataagtaggagctgtttaatgttgtatttgcttcacgtgttgatgctgaacgtgggcgcttgaaaccaagtttgctcttggatccatctcggaggagcccctgggtccgtccagggtttttttgcagcgtgtgcggctggtgctgtgtgtcacagcatgcgaagaacccacacggagatgatcaggctcctgaactgaacctcaagaacccagtgaacaagacctacatgaggctcctacaggatcccttctggccctgatcattccttcatcactgttaccagaaacggggaggtgagggtaggaggtggtcagatggtgccgatggctggtgcagctggtggcagaggctttgaaatccgacccctttcaca

SEQ ID NO: 226107 - DNA, 414 bp, Homo sapiens
aaaacagacacggagaaggggtgaggatgagcccgcacctctgaaggtcagctttgcactgcctccgactcccttgctgatgtgctggtgactcacaaaagagctggctcctctctgtgcctctgtttacccacctgccaaggaagagcctgggttgcgtgatgccgaacaccccttttcagctctcgtattggtgggtgcttacagtttattttctcaggaacctctctgatttcttatatcagcaagaaggtttccatcttctcttggaaaaagcccttccagctgcctggccttgcccaacatggggtgggacagtgccccagccctgccttagcagagacagccaccatcgtccagcactgaggccacctctaacagccccagggcagggcattccctgtaaagcaggga

SEQ ID NO: 226108 - DNA, 310 bp, Homo sapiens
ttcccataatctttactgttaatgctcataattagtcactttccctttaatggattcactaaaatttagcactttaatcactgcaaaaggactgcctacaaatagcacaaagcaaaatggaaaagttgtaaggcacaaccattttaactgatgaaggggacaaagggaaataaaattctcataagttatgaacaagttgttttttcatatctcattgactttattatcattaaatttaaaaaacattaatatttaagctgctattttatatcatattataattgcattgtatatcattatgtcatatcat

SEQ ID NO: 226109 - DNA, 520 bp, Homo sapiens
aaagatgtgaaaaaattaatgtttatttatacgatatataagacattgatttttaaatacagcggtaccatccccgtcccccataaccctggttcctccaggcacttggagccattggtggaaggacgtggactcctagaaggtgattcgcaaaggtgccacgtaagcagaggagccgggtaagcagaggcccagtgccacgtaagcagaggaaggcccggagccggctgctgaggtcctgagggagagggaggggcacctgctcagccttgcctgtgtgtgtggatccttctctctcaggggaagctgcctggacatgcgtgcgccttgcagttctgtcctgccaggctgcctgctcttcctcttgaaagcaaaagacttcacttgctgaggatgcaacgatgctctagtgtcccttgcaggagccagtgtcagagccaggagccgtcgtgggcatcccctgctccaaagttacgagttctggtgaaggggtcaggacagcccctttgagagttcagca

SEQ ID NO: 226110 - DNA, 209 bp, Homo sapiens
gtctctactaaaaatacaaaattagccaggtgtggaggctgaggcaagagaatagcttgaaccccggaggcggaggttgtggtgagctgagatcacaccattgcactccagcctaggcaacgagattgaaactctgtctcaaataaataaatagggtgagttgggtttaagtaaacaattgttgcactgctaaaaaactgttcatatgc

SEQ ID NO: 226111 - DNA, 632 bp, Homo sapiens
aagaaatgctgatgaaagtaatcaaataagaccttaataaatggagatgtatattgtgttcatagattgaaaaattcaatattgttaaaatgtcaattcactcaaaactcatatatagattcaacataatctcaataaaaagtcacatttttatatatcaaaaggtaattttagagtttatgtgggttaaaaaattacctaccaggtacaatgttcactatttggctaataggtataccagatgcccggtccctaccaatatgcaatgtacccatgcagcaaacaagcacatgtgccctccgaatctaaaataaaaaatataataaagtttacatggaaatcacaggaactagaacacacaaaataatactggaagagaagagtaaatatcggaggagttacactatctagtttgaagacatattaaaaagtaacacatagattactggaatagtgagtctacgtgtaaatttacacaaatgtgttcaattgatttttgacaaaggacaaagggaattcaatgaagaaaccataatattttcaataaatgatgctagactaattagataaccacatgcataaaagtaaactagaatttatatctcatacattatacaaaataagtcaaaatg

SEQ ID NO: 226112 - DNA, 530 bp, Homo sapiens
ggtagaagttgcagttgcattccatgtgactcaagttgcatagccatgttcctctcaaggctctgaatacagttccaacagctttaagtctgaattctttaatttcacagaagcaactggaaggaaccccaactaagctattgttggaagcgtccatgaagccagatgcatattcccttcagctaagcgtatatactcgtaggtatgttcccaagagaaacctctagcatgtgtctttatttaaacatttttggttgagtatacaattctaggtagtcacttcactctagcaccttaaaaatgtcattccactgtcttccgctcatccattgctgttgagaagtcagctgtgggccaaccttgcctctctggctgcttctaagctacactccactgtaataatcattcttgatgtcctgtaatttggtatcttgaaatcatgagccaaactatagccaggcttgtttctatccttactatccttgtgttttcatgggtgcacaaaaatcatatcacaaaccctctggcca

SEQ ID NO: 226113 - DNA, 272 bp, Homo sapiens
attttaaatacttatatatttacattgcagtgaaattgctccatacgacccttggaaatactactgtacaacatcaacttagggtgcttttttaactcatttgagtgaaaaatggtgatcacaagtctgtattttcttataactgttaatatttcagtgaggtaagaaaaaatacagggctaatttatgaaatgagtgagcttttttctaagtagtgtttgccaggtgtgtagattggtagtttaggaaataaaacaactttccagaatgaa

SEQ ID NO: 226114 - DNA, 506 bp, Homo sapiens
gtttcatgcaaaaggccccgcttggtaaaagctctggccagaaggaaggaagagatttctcaggcagaagcccgtgttctgctggaaaacctgtgcacaaaagaggaaggagctagaaagaatacagacagacaggaaatggacccacagagggaacaacgacagtgaagatagaagcacgtggctgcagggagacccgtagacgctgtgttcaaaagcggagagcgtcaagggcagagagataaatggggcaagctctggttcctggaagggcagcgatgtgcctcttgagagctgtttcctgtagtccttgccccgtgccaggcagccgagtgaggctcatcgcagcatgtcatgcaagggctggcaccaccgccttcagcggtctctgaggactgcactctgttcagtggtgacacgctggggcagagacaccacgccaagagccattccagtggctggagaggacatttagaacagcaaaaagcaaccaaagtcgaagctgc

SEQ ID NO: 226115 - DNA, 436 bp, Homo sapiens
tatccttatgcttattttcttttttctctaagtagctggaataggttttcgttcttgcaattaaaaacaatagctaaaatacatatgttatagaatgagagaagggtaagaaacagcgttggaaattacattttaatgaaataaaatattctcaatcttaaagaaactctgcttcctaaagagaattgaaaacaatagacttggggaaatcaacaactgagaaggctctaaggccacaccctgaatttaggggaaaccgtctgagttggggaggtttctcccaggaccaccaagtgtgtcctggtataggacattttaaaaagttttttgaatggagaactgacttaaaacatcttacaaaaatttaacctttttgattctccgttgtcccagcctctcaccactcattctcttgagacacagaaaaatgagtaga

SEQ ID NO: 226116 - DNA, 417 bp, Homo sapiens
gataaaataactttgttatgctcttctatttgaaaaataatggaagcaatggacactgagactccaaaagcagggagggggaagggaggcaagggttgaaaaactatctattgtgtgttcactatttgggtgatgagttcactagaagcctaaaccctaacattatgcaatatacctatgtaccaaacctgcatatggacccctctgaatttataatttaaaaaagtgactgttcccttcttctgcctctgaataaacttctaccataatgttcccctcccccgcagaatgggcaaagggccaggcatggtggctgacgcctgtaattcctagtattgtgggaggctgaggcgggaagattgcttgagcccaagagtgcgagaccagccaacataacaaaaccccatctctactaga

SEQ ID NO: 226117 - DNA, 501 bp, Homo sapiens
cactattaaccatctttactccctacttgcttataaagtttagagttttgcagattgttctgttattttgtatttttcttaatgccttgcttccacctgtgaaagagatatttttaagccattttggaagtagaaacctaatatgtaatcttgacccaacaggataccgcccttggtgaggctttcctgctaggattactcacagtgattctggaatgccatttcactgttacaggcattcctcatggcttaaaacaggcaccttagtattaggacaatgagctttattgtctgtgataaaaaggtcaacagttgttttattagttgataagatatttcatgtaagatgacaattaaaaagctaaatgtcaaagcttggaagagctgcttacctttgtcctaacaaacctgaggtactaaatgctgaatcgttgaatcactttagaaagctacaaagtaaagaataaagaatataaatatgaataaagcatacagaatatg

SEQ ID NO: 226118 - DNA, 383 bp, Homo sapiens
attttatccttgtcaagcaattcttggttaatagtttgctttgtcgtgccagtatctccataacagaatggggatgtcttggctatataagtagccaagtaagaaagcttcactagtaccagaagggtatctgttccatctcccagcaattgttgataaaagattgatgttctctgttgcatcttttgttaatatgaactaaaacttatttctctttgatgaactagtttctgagcttacaaagagcagactccggaccaatgtgcccagaatccctaaagagttaaccatctcccaagaacccagtactgtcaatggaaatataacatgagccatacatgatagccatttatgtaatttgagttttcgaacagccacattac

SEQ ID NO: 226119 - DNA, 166 bp, Homo sapiens
acacacatttcgcaagttcctgctgtgcccacacctacccttgccaatctgctctacttccccgggggcccgaccggcacactcagggcaggcactcttccgttggtccccacgtcaccctacttctcgtcgacgcggccgcgaatttagtagtagtagtaggcgg

SEQ ID NO: 226120 - DNA, 301 bp, Homo sapiens
tatgggaaagttctagaaaaggcatcttttgcactgtgctgaggcaacaggcaggaatggggtagcaatctccaaaaactaggacttctttctgaggtctttgaccccaagtgctccatagtccaaagcagcttctccttcctcctctccacccaaagctatggcgactcccttgtctgatgcagatcagtgctggatgctgtggggaagagagtactgggctgacagtcagtggatgtggattttgtttcccagttccatcgctgatttgcaggtgagtcctttcccctgcctgagactc

SEQ ID NO: 226121 - DNA, 253 bp, Homo sapiens
gtttatagcatttttgttgccaaattataagtaaattgtaggtatttattaatatcattccaaggaatgactagcagtgcaaaaaataggtactttagtggtaacaattatttgctaataatccagaacctacaaataacagaaggaaacagcacactcttaaataaataatgggacaaggaagaaactacaaagtcaattagaaaatactttaagattatgtagaatgagggcccaacaaacgaaaatgtat

SEQ ID NO: 226122 - DNA, 493 bp, Homo sapiens
tttagtttttagcatgaatttacattttagtaagctgtagtaagccttagctaaagtgatacatcctgctcacataatcatttaggtaaagttattaggattatagtatatagaatgggtggatgattttggtatattcctttatcttataaatcttatcttacaaatctgtatcttataaatctacgaaaataatcatgtatttacttatgaaaactagatcaaatagtgaagttaagtagtgtccgtattgttctaaagaaaattaggttgtagtatatattaaaaacatttaatgatctgccttccttacttttctcatttactttggagtctgggactctactagcttgtatggtttgttggattcttttagtttagtaatttgggaaacaggaaggtaacctcaggatggatgagaattgccattagctatgggtcagtttagtagacttgtggattcataaagatttttgaaacttgatggctgctt

SEQ ID NO: 226123 - DNA, 421 bp, Homo sapiens
ggaaatcggctctgccacttactggttgtatgttcttgggtaagtaacctatgtgtgcctcagtttcctgatctgtgaaatgggagcaatcagctcttacctcataagttgttatgagggttaaatgagttactatttgtaaagggtatagaacaatgcctagcacatggtaagcactatagaagtgttggctgttactaatattatccttcctacagaattttagagtttggtaagaaattattcaaagtaaaaatcaatgggggggagtaaaaaattgaattttaacaaaagatcttaggggaatgtgatttaacttgagtttccaacatatggacattggtgttgagaatcccatcatatcagaagaagtactgctgccgaaatcaggacagtatgtgaataaaacttcataggtaca

SEQ ID NO: 226124 - DNA, 408 bp, Homo sapiens
cccttgttcttcaagagttaccaaagtggtctggttttccactattttctattgccttgtgttaagagtttaagatagcataatactgtcagagatgtatttgcatgtatcttttagggaatttcaagtgcttccacatccttcttgttaagtgccacacaactgcacagatgcttacttttctcttctttctgattaaattagaagagctgcagttttcacagaggtggtcatgatgttatgacccctcctgtgctgcaaggttatcaaatcctgaattcttagaaaaggtggtaggaggtgacagggagagtgtccagggagtgcttagttgagagaaaaaaaccaaacagtcttctcaggaagaaaatagctagttgttgcagctttgctaccagaggctctgat

SEQ ID NO: 226125 - DNA, 589 bp, Homo sapiens
acattctcaggaatatgcatcccaaacccatcagggatagaaatttttatcaaggctactaatataattttgctcatgggtggaataaactaggagacacaaacacaacaaatgaacttttgtcttagcatcttatatccttctagttttaatcaaagaaataaatcggacttctatggattacctgccattaaccaggagactgaatgaaatcttgcatggttcaggccaggcatggtggctcactcctgtaatcccagcactttgggaggctgaggtgggtggatggcttgaggccaggagtttgagaccagcctggcaaacatggcaaaaccttgtctctactaaaaatacaaaaattagctgggcatggtggtgggtgcctatagtcccacccagcatcccttgaacccaggaggtggaggcagaggttgccatgagtcaagattgtgccaccgcactccagcctgtgtgacagagagattcttctctgaaagagagaaagaaagaaagaaagaggaaagaaagaaagaaagaaagaaagaaagaaagaaagaaaggaaagaaagaaagaaagaaagaaagaaag

SEQ ID NO: 226126 - DNA, 541 bp, Homo sapiens
ctcctggtctcatataaccagtattgagtgctgggtgctgattccaaaaaaccatgccctctgcctcccctaatcacagctctgagggaacagcagctgggggtcacatggagaggcaatctaaatagcaaccacaccaaggaaaacctcattgtcctgccccacccccttctcctacctctcttttcatttacgaattcaattatttgtcaggctgaacatttaaatgcactctatgctctctagattctccctactccccttctcattaaaattctaattattaccagaacaagtaagatgtatgatcaaaggaaagcaaagccctagaaacaccttttgttttgaggtgactcatattgcagagaatgcatccagaacagctgtaacagagaacagatgtgaagggctagagatggccagatatgtagaataaggacacatatagctgtggtgacttccctggtgagcccactaggataaagacctgaagaaagagtctccaaattatttagatcatgaactcataacaggtaaaaaa

SEQ ID NO: 226127 - DNA, 336 bp, Homo sapiens
tggaataatgaattatccagcttctgccaaaatgagtcacaccatggccatgaacgaaacttatctctttctgactctttcctcatcttgttcttccatcttcccttgcttgtctcctgtgatctgtcttgccagtggtaattggagcatttctcctttacttaagttctgaagtgtctttgggactcgctaatgtatccaacggctaaacaaggcctgtcaaggacatttatggctttctagcatgggcagttgagtgtagcttacaagcaactttggatatatatgaccaggaatataaatgttcctttttggaaaacaagagaaccccagcca

SEQ ID NO: 226128 - DNA, 402 bp, Homo sapiens
tttttgtagagacagggtttcaccatgttgcccaggctagtcttgaactcctgggctcaagcaatcctcccatctcagcctcccaaagtgctgggattatagttgtgcggcctatgtgcaattctgaaccagacatgaacgcttaaatcagaactagtattgcaatagctgctaatatttccacaatgttataaattgcaaagtgctttcccatctcacttgattaaaccaagctccatgctaacagcagcctcctcccagggctctttgatttcatttttactgcagtccattctcgacacaaaaaccagggtgatctttttaaaatgttgatcagatcatatcactctcttgctcaaagttttccagtagattccattcccactaagaaaaacatttaaa

SEQ ID NO: 226129 - DNA, 509 bp, Homo sapiens
ttttctagctttgtttcctacctgccaaaaaggctaatgcaagatgcatccacttatggtctgtatcaggtgaatagaaaataaccatttgccaagatttggaaagacagagagctctctggacacgggttcgatggagcttgcacctctctgagagctgaagtcaagtctcaccctctctccatactccctggcctagtgtgctctgggcagcaggtaggaagggacagggacctctcatctcaagggctgccccaaagggccctcagggaccatgggcctgttaggaccccagcaccccagtgtcgatcctggaagtcaaaggtcacgactgtggggggccagctcatgtcactgatggcagcaggcagggtttccagcatgggcggtgcgctgctgtctgatacttcattattgtgttgtcatcctagctgtataattaactatatccaaaagccggaagggaaacctgtagctctgcatatggagaaataaaacagagcatatga

SEQ ID NO: 226130 - DNA, 271 bp, Homo sapiens
ttttttgactttgaatcttcaaatacttttttcacagggattttgaagtaatttttattgattattaggtttattcaaggcccttgctttctaatataaattttaaattatttttaatttatatatttaatatatatttaatttatatatttttaattatatatatttatatataatatatataatttatataatatatattatttatatttttataatatataaaaatataatttatatatttttaatttaataaattttaaattattaa

SEQ ID NO: 226131 - DNA, 500 bp, Homo sapiens
caaggaagaaaacggttacctctggttccttcccttgtattagctaaactcatgcaagaagaaagactgaagtctgtcaacacacctgggcagacttttgtcacataggctcaacagactttgtcccagaccattgtatgttcttcattcccattaagttcccctagaaatcattcactaccctcctaaaatcatccacactttccccatctccctttcccataagaaaaaagatacagggtcaggcatggtggctcacacctgtaatcccagcacttgggaggctgaggtaggaggatcacttgaagccgggtgtcaagaccagtctgggcaacatagcaagaccctacctctaaaacaaaacaaaacaaaccaaacaaaaacatgtaaccatctataccccattgcatagtggaaaaatcactctgcgattctctctcatgcatgctaataaatgtatatggcatttctcctattaatttgccttttgttagttgatg

SEQ ID NO: 226132 - DNA, 594 bp, Homo sapiens
ctttaggtaccattgtcttaaagaaatctctgcgacagagtcaacatcatacactctaagctctagagctatattttgtaaaaacaaaaaaggtttccctgcttcactttgcctgcggacccccttctgatgaactccactcaggccttgttcctggagccctcttcctctggctgcaatccagagcaagttgctgtctggacttgttgaaaagctgttgtcctgagacttctcttcaaattctaaggaaaaatttactttttctcaggattctaaacccaatcaaataatcaagtgtaaaggcaaaatagatacaaaatgtaccttgcaaatactctaggaagctactggaagaaaggcttcagcaaataaaggaagtgtatgaagaaagaaagaagcatggcacattgctaccttaactaataaaaatctctgaactttccggtcccatctgaggaagcaaaaatgctacttgctgcaaaaacgacaccatttatcacactgcaacaaaagcaatgtataggcatgccttggggatatgtgagtttgattccagactacttcaataaaatgaatactgcaatgaagtcacac

SEQ ID NO: 226133 - DNA, 368 bp, Homo sapiens
tgcatcagataagtgtcttggggctaggaaggccagaatgggggagcagccaccccaagcctttgtggcccacggagcctgctgaagggacttcagggttgcccatccctcactgtgaagtggcccagagtaggaaaggggtgggagccaggaagccacccaggtgtgcagagcagagctctggtgtagaataggtggcagcagagtgggaggcaaagtgctttgatgtgaaaatgcctgacattctcaagcaaaccacttgttcttttaactgtggatttatctggaagtaatagagtctgcttgagatgttaccaggtgatggaacactggttagaatgaataaaaggttcacgtttgtgtcttca

SEQ ID NO: 226134 - DNA, 933 bp, Homo sapiens
gagaaatatgacttttggaaatgattttatttgggttaggtttttttatttatataggcagatatatatggtgttttgctctgtttacatagctttatacctttttatatactaaattgaaatggataggtagaagcaatattttcagaattggtcattgtcctgaataaaatgagccactgtgttctctcaggcaccatgcaagctcacccaatattcatataccacaaaagggtgtttttcctgcttaagtttatattctatatcatattctgttttttttttctggatatttccactttatattgttctctttcaacattttgtaagaagtagtatttcctattctctgctgttacaaagactatgaaaatacatgcaactcatttaaagaaacaggtggatgtctggaagttttctctacctaacactttcacatataaaatttatgatgtttggtttctatggtatttaacattggcaagaaaaaataactcccaatgaagtaactaagaccacttgttctagttcttcctgtagtggaaagagatagagaagagtgatagtaacaaagtattctcattactctagaacagagattggcaaacatttttctgtaaagggccagatggtatatacttttggcttcgtgggccatagggtctctgttaaaactgctcaactctgtctttggggtgggaaagcagcagtagacactttgtaaatgaatgggaatggctgtgttccaataaaactttatttacaaaaataggctgtgggcagcatttagcctgtgttctgtagtttgcccatccctgctctataaaaagagtaggaaactatgccccagggccaaatccagcctgaagcctgtttttgtttggccacagagctaggaatggtttatgtgttttcaaagagttgttaaaggag

SEQ ID NO: 226135 - DNA, 652 bp, Homo sapiens
tgaatatgtatggcatagtttactatgttatgcatattcctattgcaatgctctgttctgaaataaacatcttttctttgtgatcctctctctgttatgtaggttgacagtaaaaattcaaagtggtttagtgatttgaactttgctttatataaacatttcctttttatatgctttgtgaaactagaaggtgtaataattaatggcatacttagttaaaaaaatttatatgatatgcacatactgcatttggtcctaataatgatctcaacatttcatttacaattagcttattccacagtattaagaaaacataggtttcttcctattttatataaatcagcctttaaaataaaacaaaccagcttttgcaaaattatttacaaagatacctggccttgtcatttgtcatttgaaaataattatgggacctgctttttaaatttactgagggggatctctttctgctgtaaaattttacttctttctgaagtaaaattgtattttaaaaaatgatataatgaaaggccaggtgcagtggttcatgcctgtaaatcccagtactttggaggctgaggcaggtagatcacctgaggtgtcaggagttcgagatcagcctggtcaacatggcaaaaccccgtctctactaaaa

SEQ ID NO: 226136 - DNA, 1155 bp, Homo sapiens
cgggagtggttaaatgttaaatttaacgatgtacgtatttaacccccacacgccccaaacaaatctgacaaaagttaaagaccattccctaggtgtagctctgttcctacatgcaaaattttacatattgttccagggagctcacggtcttctcaggttcatctgtggaaccattcgacaaccaaatgttatggggaagccagtctcatgagctccaacacattcttcagtgcaatcagtggcaatccctgcccacttaggacttttcgaatagtgctcatccctgacttctggataaacttctttgcagaagcccatttgactccaaggacagaaaaaaagagtgcaggttgttattatgcaaagccacagcattaaggagctcaatattcttctagatatctgccctcctgtctgagaatcccatacttagagtatagcaggtcccatctccatttgggatggtggtggtggaaaagggggcgtctctgatgagcagagcatctttaatgcctgctcaggccagagcccctttccaaagacttcgagactgccgtgggcctgctgactcctctcacgctttcaagctacagtgcttcccatcacattgcagaaggccgccttgggtcatatctcgcaaaggaagagctattaacaaatattccatttgtatttcctgcgtggccctccacctggaaatatcttttatctggcaacttttgcaaaatgaaccaaatcttgaaggaggtcttggcaggtttatgctagcctctctatcactccaacaagtcatttccatcctcgccttcacaagggtcaagcaattgtgacttgggttgggagacggggctggcacggaatggtagcaagtcatctaggctctgaggcatctttttaaccctgaaaacgtccacttggagggcaagagccaaatctaaaaaattattatacacactgtctctcagctcaaatatgtatgctctcactccaagttcagatcacaatttacaattccgcattttgtaattgttaagtgcagtctggcttccccaaagacctcaagctcattctgcccaggattaaatccaagagccttcttagcccagtttctggcatgcaggaagcatacaataatggaagggaaagaaagaagac

SEQ ID NO: 226137 - DNA, 487 bp, Homo sapiens
ctcagacggtctttgcatgcatgcagccattggcactcccattgtatggaaggaaaccagcccagggtcacacagctggtcagcagcaacatagctggtctcaaatctaaggtgcctggccatgcctccatgagggaccgcctgcaagggaggttgatcctggctttggggagcctttcctgggctgcacgaataacctccattgttcgagaccccaaactctgctcacatcttcctttccctgtctctgcttgggctatgatcacggtgactctagcaacccttcatggacattatagtactctctgccattcacttttggtctaatctgacttcaacccccacttacttggtctctccttttacaaccaacacaaccgaaatctagggctttttttttttttttttctttttgagacagagtctcattccagcctgggtgacagagtgagaccccatctcaaaaacaaaacaccaaacaaaaaca

SEQ ID NO: 226138 - DNA, 539 bp, Homo sapiens
caagacccaaccatatgctgcctaccagaaacttaaagacacacatagactgaaagtgaaaggatggaaaaagatattctatacaaacagaaaccaaaagcaatcaggagtagctatacataaatcagacaaaacagacttcaagtcaaaatctgtacaaagagacaaaggaggacatcatataataataaaaggatgaattcagcaagagaacataacaattgtaaatatatacatatctgatatcaacactcaaatatttaaagcaaatattattaaatctaaaggtagagatagactctaatacagtaatagttgttgacttcagcaccctactctcagcattggacagacaacctaaacagaaaatcaacaaataaacattggatttaaactgcatgatagaccaaactgcacctaacagacgtttacagaacatttcacctgcccaacaactacataataaaccttctttccatcagcaccaggaaatttctcaaggattgacccatgtgttaggatacaaaataagtgtcaaa

SEQ ID NO: 226139 - DNA, 473 bp, Homo sapiens
tctgggttgaaacgatccttccacctcagcctcctgagtagctgggaccacagatatcaaatctacaatctcatcttccatcttaaagtagaaaaagaagaacaaagccgggtgtggtggctcacacgtgtaatcccagcactttcggaggctgaggtttctgagcaagatgcttgcatgaaagattcaatctaaggccaatgcaaaaatattgtgaaagcagcaggatcagctagccttccagttggcttcttaaatgctgcattgaaaggatgaaacagaacggatgtgaacaagagttccctgagaaaggacagctcttagagagataggataattactggactcaagaagataccaaatcatggtgtgcatttctgcgttgtgtttggaagaggaactaggattgttatgaaaaggaaggatgtgttcaacttagaagaattaaacctcaaccatctgtctcttccaaa

SEQ ID NO: 226140 - DNA, 650 bp, Homo sapiens
tctgggttgaaacgatccttccacctcagcctcctgagtagctgggaccacagatatcaaatctacaatctcatcttccatcttaaagtagaaaaagaagaacaaagccgggtgtggtggctcacacgtgtaatcccagcactttcggaggctgaggtttctgagcaagatgcttgcatgaaagattcaatctaaggccaatgcaaaaatattgtgaaagcagcaggatcagctagccttccagttggcttcttaaatgctgcattgaaaggatgaaacagaacggatgtgaacaagagttccctgagaaaggacagctcttagagagataggataattactggactcaagaagataccaaatcatgaacacttgctctggggaaagccagctgccatattgtgagcagacctatgaaaaggcccacttggtgaagaactgaggcctctggctgatggacacatgggtgaccttgcaatcaagtcttctggcttcaaccaagccttcagctgagactgcagcctcatgaaagatcctgagctagaagcatcctgccatcctaataagccactcttgaatttctgacccttaaaaattgtgagataagcacctgtgctttttttaagtgttagatttaaaaaaccctgaaa

SEQ ID NO: 226141 - DNA, 386 bp, Homo sapiens
tgtccttctcatatgcaaaatacactcatccccatcccaacagtgccagaagtcttaacccagaccagcatcaactgtaagtccaaaatctcatgtaagtatcgtctaaaccaggtatgggtgagatttgaggtatggttcatcctgaggcaaaattcttctccagctgtgaacctttatgaccagacaagaaattatctgcttcccaaacaggacaggcagagtatagacatttctagtttaaaagtgggacattggaaagaaccaagctacccatacggaaagaaccaagctacccatacggaaagaaccaagctaccatacggaaagaaccaagctaccatacggaaagaaccaagctaccatacggaaagaaccaagctacc

SEQ ID NO: 226142 - DNA, 264 bp, Homo sapiens
tgggcaaattaataaagacagaaagtcttaattaataaagtcagattggaagttacccagggctaggggaagaaagaatgggagttattgcttaatgcgtatagagtttctgtttggagtgatggaaaagttttagaaacagatcgtggtgatggttgcacaaccctgtgaatgtacttaattaataccactaaactgtctacttaaaaatggctaaaatctcatattttatgctttatattttaccactaataagaggctaaa

SEQ ID NO: 226143 - DNA, 439 bp, Homo sapiens
cagtatactttactgtcagggcgatgtaaaatctgctctgtcataatgtagtacatattggagttaattttaaaatggttaaataaggataagaaatttcatactttttccattattagtggaaaattttaaaccaaagaacatttcttagaactaataaaaggtagaagaagaaggtgttaattagtgcttaaagcaatatgtatttgattggcttaatttaggatgattgctcttccagaattaaaaataaagaccaacagaaacaaaactttaacataaaagttaattttaagctatagagtttcttgtctccctacgtttcccttatcttatgtgccaaattgaaaatgagaggttcttaatactttttgtgccatggaccccttttccaatctggcgaagttcgtggatccagtctcagaattaaaaaaaaaaa

SEQ ID NO: 226144 - DNA, 557 bp, Homo sapiens
ggcaacaggcctgggagcaccatgagcctgccccccagtcaccatgtgacatcttgctcacattgtcgcccctgctcaagacaggctcagtggttctctggtttcctgccatctacaagctctgccagagagccttccttctggccaacctctgcccctgctgttatcaccgccaactactcctgccattcccacgttgccccacctgagtgtctgcagagctcccagctggacatcatctctgtcatcacaactcttcttgctttggctctcccttgggtcacttgtcactgtcttccctgtggcatggcaggtgttttctttcccttactatactctcttttctggggcactctggctcctcctcatcttcatatgtcccaaggtgctgtgtagggcgggcacataggcagctgctgatgagtaaaaatgctgtttctgagttgttgctaagtgcctctgttgttcatgctaagaatggttggcaggtggtgctgctgagccagacaaagaagcagatgttgggcaagtcccaggccctcagctgtgctgatctg

SEQ ID NO: 226145 - DNA, 473 bp, Homo sapiens
caaaaagcgcaatgagcacttaacgatctgtgagaagtgaggtgtattatgaagacaggaccacttttttgttttgaagaatgtaggagttttcacaatcattttttttatcatgagttaagagcagttgctttgttattagaaagacttgggttccagtaccagctgtaccaattactgtaggaccccaaggagggttctcggcctcttttagcctcagttttctcatctgctaatggggataataagtctactatgtcatagaattattgttaggattaaaaggaaatgtagtaaaaacacgtagcacagttcctagtacatcataaagaaagacaataattggcagcaatttaattaatatttttaaaggataaaaggagaaaaaactcaaataaagacccaatggaaatagatgaataatagatgatagctatcagctgctgcctcagggatcaataatagtaaaaaaa

SEQ ID NO: 226146 - DNA, 497 bp, Homo sapiens
actggatattaccaagtatttggaattggggaaaaaggtctcaggtctgtcttgtataaaaaagaaataatcgtttcctttcaagacaagggaaatgatatatatttgtgaaaattaaatcacacaaaaatataacacaggaaacgtgttcttttcaagtacatactataatgttatggattctattagtgtgggtcaaatgtaaatttttgggtgtgtaagtcaaacctaaattttcaagtgcaaatataatgtcaactaaaaatctggcctaatttgactggattaacactgacattttcccctcccttgctcaggtttttatttagacagcacctgacacccaggcgctgaaccgatgtatgggttcttatgcactgcattttgaatagaaattgtcactttatgatttctgggtccttaattatgttttcctattggatgactatgaatctatttttatgtttccattttgttagtaaaggcaaatctaaatc

SEQ ID NO: 226147 - DNA, 440 bp, Homo sapiens
ccgccgcggacagcacccgggggcaggcagagcgcggcatgggtgcgcagcgccccctgccgaccagacggccccgagcgcgtccgccctccgagctccaccccgccccgtccgcgcgcgcgcacgtccctcctcagccccgccccgtccgcgcgcacgcaaccacacgggcacgccgccgcggggcccgcgagaagggcagctgtcaaggcgtccactactcttgcggcttcctagacctctaccgacaaaaaccacaccgattgttacgtagccctatctttttagataaaggttgggagatttttttaaaccctgacattcagcacaggtgttgtgatgggtaaacagaattggtattattaactactttgctccttacttgttaactctgacctagtcgtctcggaatgccatacaaatagttttcctacacttta

SEQ ID NO: 226148 - DNA, 432 bp, Homo sapiens
gaggctgaggcaggagaatcgcttgaacccaggaggcggaggttgcagtgagccaagatcaaaccacttcactccagcctgggcaaaagagtgaaactccatctcaaaaaagaaaagaaaagaaaatgtatgagagaggaccttactaagccatgtttactaagatttaatttgcatatggtaaagtctaccccccttttaggtatgtatgtactattctgtgaatttggacaaacagtcatgtagccatcttcacactcaacacagaatgtttccaaggagtcctaggcaggtggattgcttgagctcaggagttgagaatagtctgggcaacatggtgaaaccacatctctacaaaaacaaaataaaacaatgtttcagtagaattttcaaagaataagtgttcactcttaattgggaacattaaaactt

SEQ ID NO: 226149 - DNA, 796 bp, Homo sapiens
tttaagagacagagacggtttcactttgtcacccagtctggagagcagtctacgttattttcaaactcaatttcctttgggtattttatacattaaggaaaaacaatttatatattacttcttgtcatgccattttactaaaaggaaaccagtaacaatataatccataaaccacatgctacaaaaatgcatgtttgattttcaaagatttatctccaacctttcaatatgccttttttgtctgtctaaacctaaatcagaaagagaatttttaatgaagtctttaagttcccagtgaatcaaaacagttgtttaatataagcaattatcacattatctgccaaggtagttcagcccctaagaatacttccaagaaaattaatctatcaattgcactaataaaagagcagtagataaaacactttgggttttcaactttctcaatagtttctctaggatattgtacaactatgtatcacacaaaagtacttaatgtcaaacctcaaataaaggacacaatcttaaaagcaagaggaaatctaacaattatgaaaacccagcagagacaataactgatatacaaggtagttggaggaggagggtccaatgatgacgaagacagacatttgactttgagcactcttgactaccaaatttctatataggaacggctcaagggcagtcatatggctgaaactcagggctaaacagaatttttttttttttccttaagagacagggtctctcactctgtcactcaagctggagtacagtgacacaatcataggtcactgca

SEQ ID NO: 226150 - DNA, 1752 bp, Homo sapiens
  misc_feature (1564)..(1564): n is a, c, g, or t
tctctgagaggagatgaagttgaaacacttagattcagcaaattcttacttgaaatattaccataacgtattgatttttaccagactcaattgactgaaaagttgtttgtatagcaatattggccaaaccaatatactagaacaattttgttacccatagtaatcaagtgcatttctgaagtataattatactatcataaaaaataaaaccaagatacccttttccaagcaataaaacaataaaggctataaaaaaaaaagaaaaagcggctaaataaatgagatttttaaaaatgaaatttagtgtctttcaaaaacactactgcctcttcttccttcccttaagccaaggttagcagaaaatgatcaatacttcaatctcaataaactatttcaataatagttaattcgggtggaaactgagtctgaaaatctctgctcagcgacctgtgacatcctgtcatgttggctggatgccaataatacatcattgccataatggatatgagcatgtatgaagttacaggaacatggagaggtggggaaaagcaaaggtgggaaaggtacagagaaccatgagctcaggttcattccttagattcgaatcaataaaatatacattatcgtatgaaacaaacctgtaacaatgaatgctgagagaaggagagaaggaaacatacataattaattttatttgacaaatattcattgattttctgaaaacattaatatccttgcttgtcacgatactataatgcaatccagtcatatacaaatatttaattttgcattaggatgatgtcttgtttgcttctttaaaatatgatcttggctgcaaggaaaagactccttaagtgattagaaatttaaagtcaaaataaatcaaaccatcattctagctctcaggtcaattttaaaaccatttaaaaactactcttaatttacaagatacacatcatgcaaaaatatataaaggagtagggccactaacacagccacaagcgaagctgggtccagacctcttgctccctctttaagtttcacaccttcaggttggttggtgaaagaggaagtcaaggttttctgggtactatgtggttcccaatattttcaccaccaaggactcttttcattctgtttcccctaaggaattccatgttttgaaatattctgtttactaaatagcatttaactagacaatttatgtattttctcattttatacaaatgaccatcagtccttctaattttcattaaataaatcatattactataatgagctaatatgattccagctcccaaacagtaatttaatgttttagttggcctctacagtcaaatcacaagtgcaaaacacaacctaataggccacaggatctcagttaccacctccaaggaccatccccagcccactgcccagcaaatacctctttttagataaggcaacagaaaggaggagagaccagcatctttgagaatgacaattccttccctcctcttattgtctctagataggttcaaattaattcctaagtaatggtatacattcaaccttcaaaacaccntgaaggcagtatatatactacccattgtatcactgagaaaattctacctcaagtccagatcagactcttactctatcctgtgggaaggagctggagatagaaaattcagttttcaaacatcttgagactagattatctggccccaaagctgaaaatatgagtcttggcttgaataactggcattaagg

SEQ ID NO: 226151 - DNA, 289 bp, Homo sapiens
gatcgatgccagtcatggggaggagtggctgtgtggaaattaatggattttcaacatccaatcacagaggacacacatgtatatttagcaagtctaaaacctcttaaataaactgcattgcttttcattttcactttccagttataaaaccagtggatgatgaaaaggccatgtgacaatacagcatgtactctcaggaatgtttgtgtgacggggatattatatctgaagggacagggcaactgggagggtgaactgctcataactctcaattgtccaggtaatgaag

SEQ ID NO: 226152 - DNA, 504 bp, Homo sapiens
tttaattgaaggatttctgtcacatacttgttcttgttgatgtgttcctgggacctggagaaattgcccaccccctcacttctctggagaatctcagggccgcatggatggtctgatgctgcctgggctgaccattgtgaaaatactgctggctggtccctagcagcaggttccatcagcaccttagttagatggtgtttacagaggcatgcccaaaggagatacattgactattcccggttattttttgtcctgtaaatagagacattgttcaaagtcttttttcccctaacatttaaaacaacatgttaggccttttaagtgtttgccaaagaacctggagttttattggagtcttgactaacctgctgaacttttcaagctgaaaccctaagggttacagtataaaaatttagaacctaattagagcagcagtctcctcatgctgttactggtctccttaaagtcagaaacaagatctacagctgctgctgtcggtcacct

SEQ ID NO: 226153 - DNA, 499 bp, Homo sapiens
ttcatctcataaacttaagtttccaaggtaaattaccttaaaaatgtgtcttttactttctcattgtgatgcttcgaaaactgctaaattcattttagtgggctaataatggaactagttttgaaatacacgtttactatttgcctatgtaattgaaacaaccccttgttatttttttagttagcattagagtaagcatccacaatcactaggcattgtcaaggacacaaaaccatgtattactgtatgaaaatattgaattaatatttactactaccatagcctccagatgatctattgtgatgctgtcattgtatgtttctgtgtttcaccactgttttggagggtgagaatggaagaattccacgtaagcagctcatcccctgtgcccttcagcagctcggccgttcccctcatgctggaaatctaatgtcagccaggttgctatatgacaccctgtggagctgggtttccagggcagattaatcaagaaagggaa

SEQ ID NO: 226154 - DNA, 457 bp, Homo sapiens
ttaggatatttttatcaagatttaaatggccatcattagagttatagcactttctcctttggattgtcctagaggcccatgagaaagtattccctaatttcttaggagaacagtttgtgggtagtatgcggtcatgtccagttaaattgcagatatttccgatcgaagatgttccagtcctgagaacttcgtgacattagcaggacttctacaagccatctcttagggtggggcatttactgcagttggctagtactcttttctccttaactttgtcatttgttgatttttttttaactgtccccaaatactgtgggcagagtgtatctagaattgaggcctccaccattgcggagaggacatggatgctgagcagtcccctgagtgaaggttataaagaagcaaatagactacacatgtctgtaaactgctcttgagtgtcccaaatttggggtac

SEQ ID NO: 226155 - DNA, 422 bp, Homo sapiens
gtgctatgtattatgtcagtaatcataataactttatttcatcagcatgatcattatttccattttacagacaagaaaaatgaatcaacccaagaaaaagtcactttccaagatcataaagtaaatggtgcagctgagattcaaagccaggtagtctctgacccaaagtccccaccctttactaagtatggcaagcccctaagaagggcatatgatactcagcatttccaagcttattcagccagggaacctcttcatccagggccccacagagggactttgggaaacactgctctagtttgctcctagaaggcccggccctggctgactttcttttttaaattttttaaattttatttatttatttttttaagatgaagtttcgctctccagcctgggtggcagagtgacaccttgtctct

SEQ ID NO: 226156 - DNA, 586 bp, Homo sapiens
taggctttggtagagtaagagagtgaatatggtgaaattagagagggtggagtataatatattttgaagggattgtcattgaggtgaaaattgagtattgggtttacagatacatttgagctaaatatgttggtgtaggtgaactctaaaataatctgtagcagtatgttctgatgaacataatctctagaaagaatactacagatcttcaagcataagatagaactgtatgtattgacctggaaagccatgataaatatgaggaaacaaatctgaaagaataaattccaaattgttagcagtgtttactaggaggagatttgggagcactctgcctatagtctccagaaaaccagcaaacaagttcctgccaaaagctatataatttctcgaagtttaattaggttttaattaaatatacttaaatctttgtaatcatttctctacctgaagaattactgtatcacttctcagccttttggctaagatcaagtgtagtatctgttttttcagtttaatatctgatatgtcctaaattaaaaataataaaaaataaataaaggggagataagagaaaccagagact

SEQ ID NO: 226157 - DNA, 400 bp, Homo sapiens
tgttgcccaggctggtctcaaattcctggtctcaagaaatcctcctgcctcagccttccagagtgctgggattacaggcgtgagttactgtgcgtgctcacggtgcctggcccgggttccttttctgccagcttggaagggcaaccccatgactgaatgttattctgagggtggctccgcatttgcatccttgttacagtgcatccacttgaaacactgcacatctgaactgggactgttaacacacatgctgatacagtgtggggtgccaggaagtgtctgctgatatttatggcaaaaaaaaaaatctgttttgtttacttagtgtatcaaaagaaagtctggggtgaacagtagtatttttttttaagcagctgtgaaaaaaagttggagatctcca

SEQ ID NO: 226158 - DNA, 394 bp, Homo sapiens
tgagatggagtctcgctctgtcacccaggctggagtgcagtggcacgatcttggatcactgcaacctctgcttcccgggttcaaacaattctccctgcctctgcctcccaagtagctgggattacaggcacccactaccatgccagctaagttttttgtattttagtagagacggggtttcactatgttggccaggctggtctcgaacccttgacttcaggtgatccgcccacctcggcctcccaaagtgcggggattacaggcgtgaacccaataaaactttatgtactgaagcaggtggatggtcaaatttggtttggaggccttatgttgcctatcgctgtcttcaaatattgaataatatttactaagggaatatttattagaaaaaaca

SEQ ID NO: 226159 - DNA, 629 bp, Homo sapiens
tcttgccgcagttttgcctggtcccttaaaataggaacttttaccatctcgggaattttgggaggaaggcttcatgcatcagagaggggctgtagaaccagactgggttatctctcagctctgtactttctagttgtatacctttaggtataactgtatgactttaacttttgtttgggccatatgtaaaattggactgttgataacatccacttcataggttgttgtcaggaataatgaggtaatatatgtaaagcacttagaatagtatctggcacccagtaaaagctcaataaatgccagctattattgctttcttaatatctctcagaggctgggtgtggtggctcatgcctttaatactagtgcttttggaggccaaggtgggaggatcacttgagcccaggagtgtaagaccagcctgagcaacaaaatgagatctgtttctatgaaaaaaaattttttttaactagccaggcacggtagcgggtgcctgtagtcctagctactcccgaagctgaggtgggaacatctcagatgttcaaggctgccgtgagccatgattggctcgcgttgtccagcccggacgacagactgggaccccctctctaaaacaaaaacatctccta

SEQ ID NO: 226160 - DNA, 627 bp, Homo sapiens
ttgtgacaaagttgaagagattattaatgaactagaagagatatttgaggaaagtacttgtcccagaaagacaaagagatggaagatataaaaagagaggctaaaggaaatggaggatagaatgaaaagaccccaactctatatgatctgagttgtgagaaaataaagagaatgggtgcaaatggatgtttgataggagataatggatgaccatttccaaaactgatgaaaactacttattccccagattcagaaagaccaatatctctagcagaataaatatcacaaggaaaccgcaaaacatccaagacaaagaagttattcacaagcagccagagaggaaagttagattgcttatgaaggaatgacaaatagattgatagcattcaatagcggaggctagaagatgatagagtatcatcttttaaaataataaccaacttagaacaatatatccagcaaactatctttcaagaatgagaataaagacatttttagacaaatgaactctgagagggtttacaaccaaaagaccctaaaaccctctcattaaaggagcttctaaaggttgaatttaaagaaggataataatttccaaagaaaggtctaggtgcaagaagaaataat

SEQ ID NO: 226161 - DNA, 863 bp, Homo sapiens
taatatattgagtaacaaaattactcatagtgagagaaaggcaaatcaaagctatgtcaaaatgcaatttttttttaactgtcagactagcaaaatttcaaaagctcttccatgtactgttaatggagctatggagaagaaagctgtcttatactatgttagtggaattcaaagttggaaagctcccggacagggaaatttggtaatacttaagaggactagctgtgtggctaccctctgacacagcaatcccacctccaggaacttactccacctccgatacctccaatatgaaaaaagcatatgtatgagtttaatctttgtaaagctttttaaaaacaattgcaaaatagtggaaaccacctaaatgtccaagcataaaagctgagtatgctctatccacccaatggagtaatctgtattatgcatctgaaacaatgatgaggtggtctctgaatggatgcagagtgatttctagtattgttaagagagaaaagtaagatgcaaggttcgataacatacacttgctttgtaagaaagaaggagaaacattgcaaaagggaacataggaaggataaactagaagctgatgagattggccgctgagggtgaggtgtgatgacgggaaggatggcgcttttttcctgatacacatttctgtacagcattggcatttatgccacattaatgttttgcatactcaaaatataatgctagttccacaaggatggagagataagggagtgtgtataatgcaggcactagagctctgggggaattcaagagaaggagaagagtcacaactctaattattagaatttagggtgctgctattcttcattctagggaaactgtcccttgcc

SEQ ID NO: 226162 - DNA, 433 bp, Homo sapiens
tgaattaaaatcacagaaatttctaaaccatctataataatacactgtacaaaaactgaggtgaagaaaatatgttactcctcctgtaggagacagcttttaaaaaatgaaaatatattatcacttttaagttcctactatgtgacaagaattgtgttaggtaatttgcatgtcatcatatcacaatccttctagccataaagtatctctcttttttcttttacctagttcttactccttgtcattgtgcttgagggaatttggcattgtgtgctatcacttcgattagggaaacgcaagatccttaactaggcaatgtatagaatattgagttgaaaagccatacctcttctctacaagtgtcaggatcttcgaatgggaatttgatttctataataataatttaataaaagtgatttctagcaacaaaatt

SEQ ID NO: 226163 - DNA, 453 bp, Homo sapiens
attcaatgttgcaatatcatttacttccatattatgtcataatacttggtagctttctgacatgacaagtcattttattcagaagataaaatggaatttagccatctctgtgtttaccctaagtcatctatgtaccaatctgcaagaaaatattagttaaatgttagcagaaaatgccagttgtgaagtgtccctttgaaaacataaattttcttgggggaaggggaatgtgtgtgcgggcatgtgtgtgtgtgtgtataaacatacacatctatatgcatacacatctatatacatatgtgtatatattactttattattgaattagctaaataaactccatgttagaaattcaaagaaatcatttgtgtgataaataaggttgcttattactgagcaactatgattatagcagttttatgaaattttaattacattatgcacctactcaaa

SEQ ID NO: 226164 - DNA, 238 bp, Homo sapiens
aaattagacctgaagagtgtatgtgatatataaaggttttaacttttgattatctaattcattttccttgtattcttaaactttttctccctttcagtgtttacatagctttaaaatttggccgggcatggtggctgatgcctgtaatctcagtactttgggaggctgaggtgggtggatcactcgaggtcaggagtttcagaccagcctggccaacatggtgaaaccccgtctccac

SEQ ID NO: 226165 - DNA, 468 bp, Homo sapiens
gatgggtttgtctccctgtattgtgtgtggtctgtttacctgaagtgtggagggcttgtttgcacatgtgaagccctggggacctgggagtaaacatccccattcccctcaccctttcctttgtgtggcatttactgacaggtaagaggagaaaagattagctgcatgttgccttccctttcccagtcttctgtcaggttctctcttgcaaagtgaaataaattaatatttacttctaaaatcctggttcatggtacattttcccagttaaatgaaattgaaacaaataggaaaagatgcaggaaaaaaaaaagctgacatttattttgtgccaattctgtttgccaggcattacagtagatgctttacagacattatctttttttttttttttttttttttgatgcagagtctgccactgcactccagcctccgtgacaaagcaagactccctttggggggtggggg

SEQ ID NO: 226166 - DNA, 479 bp, Homo sapiens
aaaggtgtctgggctgggtatggcggctcatgcctgcagccccagcgcttggaggggccaaagtgggagggaccattgagcccaggagttcgagaccagcctgggcaacagagtgagacttcatctctacacagaaaaaagtaaaaattagccaggtgtggtttctcacgcctatagcctatagtcccaggtactcaggagactgaggctggaggattacctgagcctgggaggttgaggctgcagtgagctatgattctgccactgcactccagcctgggcaagaatctcacacaggttaagaccagcccctggtctgcagggtatgaccggcccctgggggggccgcagatactggggtggaggaggatgggcagcgacccctgggactctggggagaattagcctgcaccccagggctcgcaggttctgggggtggccgggcggttgccgacgctgctctgccgccccacaggacg

SEQ ID NO: 226167 - DNA, 423 bp, Homo sapiens
aaagaatacctggacagcctgccaccctattgctccaaaatgaaaatcctctaacagggtcaactggtggcagggaacaaaaccccgctgagactggctgaaacacaagtggggcctgtgctcagggtgcaggaagtggagcatccaaggggagaggtgtgtccacagcatcttcaccaggattagatttcatctcaagaaaccactctgctcatccgtcatggagatggcttatttccttaaacctcatgaaccaacctctactagcttcagatttttcttctgcagtttcctcacctctgtcagcctccatacaactgaagagagttaagggcttgctctggattaggtattggcttaagggaatgtcatggctggtttgatcctctatccagaccactaaaactttctatcagcaataaa

SEQ ID NO: 226168 - DNA, 341 bp, Homo sapiens
caatttgtatacattctccaaggttgtaattttatatggaaacctcgcaaataactttttgtgtctatatcctcacctggtatatgcttgctgagtgtccagagcaatagtctatcatcgtagaaaatggagatacccttgattagaaaacatagctactgaaagcacatctgaaacaataactatttggtttttaatttatcatccatcttcacatactctttttattgtcaaagtattctagactgctgcattttgttaaaatctaagaacaaagctttattgcttaagaggatgatttggctataattttgtagttatattattccttatcaacttaa

SEQ ID NO: 226169 - DNA, 374 bp, Homo sapiens
gcgtgtggaggacgatggcagcgaggggccatctctaagtttctcaggctgagaaaaaaacatcagtgtgggggaagatttgggacccctgtctgcatctacctggactctcattaaacagatgatgtgatgaagcaatcagaaagcctggccagctgctcacctccagggcagcttcttgggaagacagtgaacaattctgggggttaagaactgtttttaaaagaaaacactagggaggctggggcaggaggatcgtttgaggcccaggagttggacgctgcagctagctatgattgtaccactgcactccagactgggtgacagagcaagaccttgtctctaaaaaataaataaattaacctttaaaaacc

SEQ ID NO: 226170 - DNA, 378 bp, Homo sapiens
gagtgctctccaagaacctgcagctgcaggtgccgttgatcctccactggagccggcttccaccaggagtggggagcaaacaggaaactctgacgctcctgtgatggccccattactccgcgtctgactcctcacccagcagaccactatcgtggcttttcgtgaatttccctcagaccctgtttctaccctgactttgtctgtgaagctgaaggcagcctggggaaaacgtgcagtttctacaggacatgagctggtgacttacataatggcttatataagccccaaactcaaataagctagaattcccttggcccatcagaggcccatcatgaagttcctagttccatcaaatgaagtgtgagaagcccataaaca

SEQ ID NO: 226171 - DNA, 348 bp, Homo sapiens
tagttgattgcctgaaaatacagaagaatagtggttactggatatcaggaaaggttaggggggatggatagccaaattttggttaatcagtacaaaactaaatagctacatagaaagaattaattattttgccttgtagcactgtagggtgacaataagtaacaatgtattgtatattctcaaatagctagaagagtgggctttgaatgttcccaacagaaagaaacaataaatgtttgaaatgatagttatgctaattactctgatttgatcattatacattatatgcatatatcaaaatattacactacataattatctgcaattattatatgtcaattaaaaaca

SEQ ID NO: 226172 - DNA, 526 bp, Homo sapiens
caaggtgctgcaggctaataaagcctggggccccacaggctcgacagtcattgaatctttggagactctatttccaggacaggcaaacccagggactcggaaggtaactcccccagatttctaggaacacacaaagagacgaggtctgcatcaagatttaccatctactccaacccaccggtcccccacctgccctccttgcagagctgagcttgatcggggtggggaggggaaacttgactacctcctcaaaatacccccactcatccagcctgcttcctttgaagcaaccgaagtggacgcttctcgttaaactcgaagctcgttagaaatgacacattttacagctcagctgggttcaccctcctagcgccgagcccaggccgggcaccgatcgctgcagccgcagcagcacgcggcccgggctgttcttcccctgcttggggctcgagccattttcggaagttcccggggaccgcggagcggctagcgcgcccggccccgggttgcaggggccccgcccggc

SEQ ID NO: 226173 - DNA, 664 bp, Homo sapiens
tttcctttgcaaaggttttcatagttacagtcactctgtctgtgcaactttgtattattttctaacttccattttccagttactctccattatcctttttaagggccaggggtattccacagagtgcataatcatagcttacaaaccaatactaagtcatttgaaattttttgttattgttgtaataagttacactttcaggagcctcttttatgtaattaatttttcaaattattaatagattcacaaaattttggaaagcaagtcaaaggttataaatcccaaacagggaagtgcgtcaaatataacaaggctttccaagaatctggaggtacagtcacctcctgtgctgtatgggacccactaccttacattctgtaaactgtggatggcaggagattttacactgctgtgtgcaaatctcatcagtattgcaagttagtgggttttcacttttgctaacttaaaaaacaaaattgcatttgttaatttgatttgcatttctttcctaccagtatttttcagtgtttctattaatttgctgaacttccccccattgaattgttacttatatcatttcctatttatgtatgccagtgttttttaaattcttatgaactctttatataataaagatgttaactctttttccatattgtttact

SEQ ID NO: 226174 - DNA, 464 bp, Homo sapiens
caaactaatgattaatgataatcatatataatcatatctataatctatttttagtataactattcttattctatatattttctttattatactggaagagcttgtgccctcagtctcttgccttggcacctgggtggcttgccacccacgattacctccttgtaaacgtggatgtttgatagggaaagggcacaaggagttggtctgttttgcttgcgatcaatgcccaaaatttgtgaatctaattcattcttataagaataaaaaataattaagattattattgctggaccctcttagaccctatctggcagttttccaaaaggatttcccataaaaggagataattaatgaatgtaaaagctaaaattattaaaataaaaagtaaagaagaaataatatgcatgactaaaaccttgtccactgagaaaataaaaacatagaatccctccagggatttactt

SEQ ID NO: 226175 - DNA, 758 bp, Homo sapiens
ggatcacgaggtcaggagttcaagaccagcctgtccaagatggtgaaaccctgtctctactaaaaatacaaaaattagctgggcttggtggcagatgcctgtaatctcagctactccgaaggctgaggcagagaattgcttgaacccgggaggcggaggttgcagtgagccaagattgtgccactgtactccagcctgggcaagagaacgagactcctaaaaaaaaaaaaaaaaccttctttgtaatggcccaggctaaatagagcaataggatgtcatcatcctgaggcaaagcaaagttcacctacatgaacatgaataagcagaatccggcagtctgtaaatatgaggcttgtcatgcgtgccagaaatacagtgttgagcaaggcaagcactgcccctgccctccttgcatgacctcattctgaaatagtgaatttaacagcttctggagaatggaaaagattggagtggctttttcagactgtaaatcaactccttggagatgggttaaatcctctttaattgaaaatcactttttataatgaaagaggttatttatgggcacatgcagctgtgtgaacagtatagaagcaggaaagaggttgagcacttctagtgtataggatgattaagaaaattatacctattaattcacccatctatgcattcgcccaatcaatttttctcttaaaaaatgggcagagttcacagagaaggaacagaaatgacaataacatatgaaaaatgcctaaatt

SEQ ID NO: 226176 - DNA, 486 bp, Homo sapiens
ctccattagtgtgaacttcatgtgaccaaattatgggtttaagagacaaaaaagggtatgagatacaacgggagcagcaaggacaacatggccaaaatgttctgtgaagttggtaaagactcctcagaacagctgacattttgaagcaggaatatgactttcctggagataaaggcaagaatactagagcaatcactctccatattaccagacaaggaagtacaatttaggcttactagtagcaagaactcctaaaaatggctttctgtgaaaacaagtggtcttgaaattcataataattatagtctactcttgataatccatgttgaagaaggggagtacagttgtaaggaaaacatgaagtttttcacaaattgtaattaaaatgtaaatctttttgtatatacttagatactaaacttgaattctggttgggaagggtatattatttggatgccaataaaatgagatataaatctatgagga

SEQ ID NO: 226177 - DNA, 434 bp, Homo sapiens
agtccatagtttatattggggttcactcttggtattgtatattctttaggttttgataaatatttaatgacatttatctaccattgtaacatgatacagaatagtttcactgtcttgaaagtcctctgttctttgtcccttcatccttccctctaccctaatgcctgggaaccactgatctttttactatctctgtagttttacttttccagaatgtgaccgtcacgtaagtggaatcatacagtctatagcctcttcagattggcttctttcacttagcaacatgtctttttatggcttgctagcttatttctttttagcactagttaatattctattgtctggatgttccacagtttatctctttatctgctgaaagataccgtggttgcttccaaatttggggaattgtgaataaacttgctatgtgcatg

SEQ ID NO: 226178 - DNA, 659 bp, Homo sapiens
gttgactttaagtaaagattacccttgataatgtgggtgggtcacattcagtcaattgaagcagttagagtcaaaacttaggcttcccaaagaagaagttctacctcaagactgtaacatcaacccttgtctgagcttctactccattagcctatgaattttggacttgcatatacccacaaattaagtaaaccaatagcataaaaatatctctctctatctcatctatctacatacatctcacactgtacattctgtttctctgggaaacactaatacatcatcttaccacttaatttttttaaccaattaaaatctgtcactatcttcctaggatttgtatcacttaatattcactagagaggttagtttaatcaattataaaattctcatttaacaagaacaactaagacctggtgaagagagaacttttccaaagtctgactataagctggtaattgaattcaccatcaaattacaaatcatttattttaaagaatctggggttaaaattaacctggcaggcaccaatatttttctgttttgcaaaacagaccacatatttaatgttatttctctaatatttatggtcatctgatcttgccatgatttaaactgtatcttcccaaatctccatcagaacctttgacacacatttt

SEQ ID NO: 226179 - DNA, 750 bp, Homo sapiens
atagtaataatgtctagcaagaattgtacatgtattagctacataaaatcaaaaccaggctggcatgctggcattgctgaacagaaaagacagaattttttataatctttatttttagttaatttcttcattcgctaaaattgccaggttgttttttaaaagttgctagccaaactgctttggcatgctaattagatataaaaacgatggactccgtggaaggggaaagatgaggagggatccagggcagatcttcaaggagagcccagagataaagggcagaacttaaaggagctattttcagtgacttcccttatcaacaaattcattatggatacgtgggatgaagggtcatgttcaaaacatgtaacaactgatatgtcgtgggcatcaacaagtcagaatagcccccagctagaagctactagaacggttgtacgtgagccctgcctgtgattaagccatcagctctgggctcttgcttttaaaagttaatatcatttgtaaagaaaaggggtagaacacagaaaagaacaagggaaagaaaaataccagcacagaagcgaacagcgtgggagtccatgtgtcttccgctttcagcataactccctgatcccgcttcccacccaaacctccctcgccagggaatgcttgtcttctccaaatatcacattttcatgtaacaccctaaagtataagtaccaatgctttaaaaaagattaaacatcactgcaataatcaataacaata

SEQ ID NO: 226180 - DNA, 196 bp, Homo sapiens
aacaacatagagagaaaagaaagcagttaggaaggggattgccttagcaaaccaaagctgtttcacgttacttcattaattacttaaatgggaaaattttctcagatgcacattttagtactttaaaaatgaagcaaatgttttaacatttatgctgtatgtgataggtttgtatagagtgagagaatatacattg

SEQ ID NO: 226181 - DNA, 564 bp, Homo sapiens
ttcatttaggtctttaatccattttgagttaatttttgtatatgtagtgagatagaagttcaagttgattctttcgcatgtggatattcagttgtcttgtaccatttgttacaaagactattctttccccattgaattttcttggcactcttgttgaaaatgaattgaccatagttacaaggatttattgctggactcctaattctattccattgatctgtatgtctgtcctattgccagtaccacttgtcttgattactgcggcttcttgattactgtggctttgtagtaagttttgaaattgggaagtgtgagttttccaactatgttctatttatttatttattttaagagattttggctattctggtgcccttggatttccatgtgaattttaggattagtttgtgaatttctgcaaagaagccagctagaattttgatggggttcgtgttgaatatgtagaccaattaacaatattaagtctttcaattcatgaaatggagtatctttcagttatttaggtcttctttaatttccttcaacaatgcactatagttttca

SEQ ID NO: 226182 - DNA, 308 bp, Homo sapiens
atgtgaaaaagtgaacttagtctctaccttcaagggagggaccattccctctcctctccctctcctctccctctttcctttcctgtctacattattattcaggctttcttgtgtcagcactggagggacaatgagctttcccttctgttcacatatcactggccaaaacttgatctctacattaaaagaggaaagtggacaaggaacaaggaatggtatctacctcatacctgtgttttcaaaaaaaatcttgtttcaattattttaaagggtagcaaatgcttataataaaaatttcaaaaagtaaa

SEQ ID NO: 226183 - DNA, 550 bp, Homo sapiens
ttttctgagcaaaggaatcaattacagggtgtggctcccaagtgaggaagcattttcagaaggcatccaaggcagtttgtctctgaacttcatggttgcacctctgagcttgagacttagagggggagtattttaactttaataacattcatggttttacctgtacttttgtacatatcagatgtgctaattaggaagtcacttatcttttccttaaagtaggtttcctaaggacatgtatttggcaatattggtttagcaagaattactgtatgtgcttgaaagtaactgtacttctttaaaaatatcacccgttcagaagtgttgccagtgaagcctggcctccccccactcctattagttctgattagggaggtttgatgcccgtcactggtgtaatctggaccttcctttgtgactcattctttctctcattttctcagagcaaatacaaatcgcccatcaaatgacaagtgaaagcacagggggaggcgaggggagggaatcagggccgaaatctgttagctatttggagtaattggttatttgc

SEQ ID NO: 226184 - DNA, 542 bp, Homo sapiens
caggggaactgcttgaacccaggaggcggaagttgcagtgagctgagatcgtgccactccactccagcctggtgacagaatgagactctgtctcaaaaaaaaaaaaaaaaaaagaatctaatatatatgtgtatatgtacacatacaatcattcatttgtctattcactcatttagcaaataatcgagattctgtcaagtacaggtactcactatgaacaaaacagcttacacattatcgtgtaaggaaaagaaatataaaatagctaatgacattcgattgtttcattactcttggggtatctgctttgaagaagtgccgggaagcatctgataggccacttgaatctggggaccatggatagcttttgtgtcaataaatacagtccctgaaacatcatacttatgagctgcatagcagttcattgggtagggcataccatgttcttttcaaccagtttcttgttgggcttagctgggtgttctgcagtttgggctgggcttagctggatgttcttctgcagtttgggttggccttactta

SEQ ID NO: 226185 - DNA, 345 bp, Homo sapiens
tcttaaaaggtatgtaatatttttatagtttaaaataataaaatgagcagtcgtgaacctactatccagtttaagaaagaaaacatcatcccatgtgcccctcccagactcatccctccccttccaggtaaccattaccctggagtttgtgttcactgttcttcaattttctgcatagctttcacaaactgcgtgtgttcctaaataggatatttagtcatgcccatttctgaaactgaaatttaaatgtttccactctatatatgtgttttgcaatatgctgtttttgctccatattatgctttcagaaatttacccatcataatgaatataactgttaattta

SEQ ID NO: 226186 - DNA, 302 bp, Homo sapiens
gagcaactgtgttgtgcgagcatagtaaaggtaaacacctaagatgaaaatagtaagataagcaagaaccagatcacatagagtttgtaaaggactgaagtgtgtgatcctcccaagaacaatgggaaataattgaaagtgttttaaagcagaggaataacatgattaaatagcttgagaagactattccacaatagctataggtggaaaacatgttagaagaggtcaaaataagttattaatgttggtgaaaagggattatgtggattcaactaataacacagatagaagtggatagattc

SEQ ID NO: 226187 - DNA, 1028 bp, Homo sapiens
gggtttactcctggactcttaagttatgttccattgatatatatgtctgtttttataccagtaccatactgccttgatactgtagcgttgtattaagttctgaagtaagaaagtgtgagtcatccaacttgttcttttttcgagattattttggctattctgggtaccttgagaatatgaattgtagggttaacttggcaaggtctgtaaataagacaactgggattttaatagagattacattgaatcttttggccatcctaatacaaagtcttctgatccaaaaagatggaatgtcttcccattgatttagatctttgctttctttcagcagtgttttgtagattttattgtacaggtgttaatacttttgttagatatatccgtaagtgttttattctctaatgctattataaatgaaatcattgtctccattttgagatcgtttagaagtacaattgtttttcgtatattggggcacatggcttttactaatagaaaaatcatatgtatacatgcttgtttactaagttttaggcacttggtcaatgctgttgattttctgtttgtaacatttgctcgttggtcatcacttccttttctgattggaaaattattgtagcagttctgctgagcatgtactttgaagtactttatcttctagggaaacctgaaattcttaagcagctcactctgggactcagctgtctgtgctttactctgctctgatagagcagtttaccagatgtgcatgtggccatctgagtggaacagctgtgcagttgagatgaattgctgttagaggtgttgtcctggaactgtctggttgcaggagcaatggtgccttccagtgcatctgatgagattctaactgaatatgtgaatatctggtatccaagctagatttcagtagaaaccgcagggaaagctgtctgctcatttagaatgttggagggctctgtttgaagtttgcatttctctttgaacagatgctccattgcaaaataaaaggtttgaagatttcaaca

SEQ ID NO: 226188 - DNA, 856 bp, Homo sapiens
tcctaaaaccagaatgggactgcagttcccaaaccccctacctcctcctgacctgcatggttaggtgctgcctttctgcaggagcctggatgtcagcatctagatgcctcaggaccagctgtccaatcccccttccaccaatccctgttttaggtcctccatgaactttttcttaggggaaagcagaaatcctatcccatcctgctgcactcacaggaagagtttgacagtggttaagagatcattctcctcattcagcacctcggtgaggtgtgaatttgcacaagatgattcaatatattttctttgtgtattcttcagtatattcatgctgtccggtgaatttttgacatttcggtgtgctgctctaagctgcccgtgttggggacctgatcctgaccctgactatggcttttaagcaaggagagccagaataaacccagacaaatagtcctttgcagtgtgcactggtgcccaggtagcccttggttatctgctgtgttcagtcctccggagggagtgatgaaaagggcagtcggccctccttccaagatagcttgtaagcagtcctgccttgaggctgagggtagacgagatgacccctccagtcccatccagtcttggtatcctgtgatttctcacgtgagtccattttgtgccctgggctcacgtacatcaattaaaaacacaacagtgtatgcttccacaggagggaggaaaatgaaccatagcagtcttcctatccgaaccagaccccatttttccaagtcaccaccttactctcatctgtaaagcgctaaatagcctgagacccagttatctttgtgacaatctctccccaggtgccccatcacgg

SEQ ID NO: 226189 - DNA, 541 bp, Homo sapiens
gatgataggcatgagccactgcacctagcagttatttttattgatgctcaatttttcccttcgttgaatgctggtgcagtgaatgctgggtgcatcttcatgttggtttctgagtccttttgacatgaccacatggtctggtgttgtacgagagagcaaaataaggaaactggtgttctatgcttatcttgtacattttccccacacttggaatcagccattcctccagggagtgcaggttcacagtctgggctctaagagaattataaggtcaatgtggtcatcttttagtattaagtcagatattctaaattattatttacttcctacatttggcccaagagtctaaccagatattttgggaaagagagaaggaattaaataaataaatctcatggttagaactgaagtgataactatactttcacaaggaaatataacttataaaccatgcagaatagaaaattatttttgttcctttagatttctaaaggaatgaaataagctgtgggaagaaactttaactggagcatcttaccag

SEQ ID NO: 226190 - DNA, 473 bp, Homo sapiens
tgaaataattttgtaatggataaccataacaagtaccttatcattgatttaaaaaacaaagcattacgttttctcatcaattgagtggagttttttaattatacaaatatagtgaagaattttaggataaagcacattccagaatacataattctaaaaatgagcaaggctgtttgccacttggaaggtgggaaattagttttaattgaatgattagaatattgccagcagtttcttaaacaaattttaattaaataatttttctcaggtttgccaatttaaatatttctcaaggctgagaaaaaaatattaattctaaaaactaacacatgtgagatcttctgtatgttttgtttttttttcagaaagtgatataaaatgtggtggggaatattcaagaatgtaaaatgtaataaatagcattatttggagtgtacaaattaccagtaacttgagtaaagtaatctttcttc

SEQ ID NO: 226191 - DNA, 506 bp, Homo sapiens
caccccttcagggtagggtcccctccatgcagaccatagagcacaggtgtgccccaaagaggagcagagagaaggagggagagggcccacgagagacttggaaatgaatggcaggattttaggcgctggacttgggttcggggcacctggcctttccttgtgtatttctcctactgtctgcctaactatttaatacaataaaagaaaaccagcccctggttcttgtggtgtttccaccctcccgggtccccgctggctgcctggcttcctcccgcagctcctgctgtgtgtgtatgtgtgtgtgtgtgcacatctgtggggcgtatgtgtgttcgtctttgtaattgaggctgcagagtggagagagcaggggttttctctggggacccagagagaaggaggcgttttcaccacagccgaacagggcaggaccccagcacccgggacccagcgggactttgccaaggggatggacctggctgggccacgcggctgtttgtgtaggg

SEQ ID NO: 226192 - DNA, 238 bp, Homo sapiens
aagatctacattgtatcgggcacttgacctattatctcagttagttctcattgttaccctgtagcagtgattctcaactggcattatcttttcctaggagacatctggcagtgtctggagacatttttggttgtcacaaatcaaaggggttgctactgacttttagtgggtatagtccagggatttgttaaacatcctataatgcctgagacagccctcctagcaaagaatgatttgg

SEQ ID NO: 226193 - DNA, 324 bp, Homo sapiens
atgcaaatgttggttcaactctcttagtgtgtgtggtgtgaggggggcagtgttgacaaaatctgtgctgagagtttacagtttttataggccatggttaacgcctagttgagaagagggttccgaggaacctgactgaagtttagtcaaggtgagagtctttgtcaagtggcacgaaatgtttatctgagttcaacaatgaatgcccttggctctgctctttcagaagcatgggcaccacagaattcatgttacaccaccaacctaaactgactcataacatttgtctgtggcatttcctaataaaggccaaaaatgagagag

SEQ ID NO: 226194 - DNA, 350 bp, Homo sapiens
tgtcctctgctatttcttagcagaattttgaaaatgtgccaagtgttgacttggttcgatcacttgtgagaatggagggacccataatgttaataatcaatgaaggttgttggagttacttacccaaaaccttatgaacttagccttccctagcagattgagtttcctaatttgtccggtataagcaaacactaaagagggattggggaaagttgtgagttgagtagttgggaaaaaggtagtttgcagttttatttacgtctcacagcttgacattttttgtttgccttggagggggtacttttaaaaattcctcttttgaaaacaataaaatcttagattttggataa

SEQ ID NO: 226195 - DNA, 533 bp, Homo sapiens
gatggagaaaatgagaactagggaggttaagtgacactgagttatagaatcttagagttagaaaggcccttaaatgtcaccttgccccactgcccaaggtcgtacagctaattagtataatagaatgtgcctctcgttctgcagccgtgcccattctcaaaccttgagcgctgcacgcatttatctcaagttcacaaaaaggccatgcactatactatttgtgcaagagtgagtctgttagaataaaattgtctttactgctaccctctgggaccctcacagaattgagatgttgatcgtatgaagcaatcttattgaacaaaaaaacttccaaggaaaaaagttgtgtcccctgagccagccagtctctgctaagggggacctgctgctttgcagagtgagcagctgaaagccaggagggaatgattagagaggccaaccattggttaaaattctccgaacataaatgatctccttgttctccctttgatggattcggtctctcaaaaataaaatgcatctgtgaacatcac

SEQ ID NO: 226196 - DNA, 538 bp, Homo sapiens
agaggtgcgcgctgcgcgtgggatcagcccggcgcccgacgggtggctccgaggagctcgctccttcctcgcccccgccccctcgccgcgcggggccagcccggccgctcctcccctgggtgggtccctgctccttttctggcagggtctatttgcatagaggaaactgcccaaagtggccgctgtggaggagctggctgcggcgaagggggcgtgcgcggcgatccgctgctacccggaggctaacccccgcgcccggcggacctcgtgcctcgggctgtcccgcctgctcctctcgcacccagcctctgccccagcagcaccgccccctcggagagtccacgcgcgacgaacgcgccatgggcccaggcgagcgcgccggtggcggcggcgacgcggggaagggcaatgcggcgggcggcggcggcggagggcgctcggcgacgacggccgggtcccgggcggtgagcgcgctgtgcctgctgctctccgtgggctcggcggctgcctgcctgctgctgggtgtccaggcggccgc

SEQ ID NO: 226197 - DNA, 396 bp, Homo sapiens
ctatcaaaatttgttttgttttgttttttatttttagattggaacttttggcagaaagtcaaaactgtcttcatatctgtatccttagaaagaggtgagttacaggtcaggcactgtggctcatgcctgtaatcccagcactttgggaggccgaggcaggtggatcacctgaggtcaggagttcgagaccagcctggccaacatggtgaaaccccacctctacaaaaatacaaaaaattagccaggcgtggtggcaggcatctctaaccccagctacttgggaggctgaggcaggagaattgcttgaacctgggagacaggggttgcagtgagctgggattgcactattgcattccagcctgggtgacaagagcgaaactctgtctcaaaaaaaaa

SEQ ID NO: 226198 - DNA, 446 bp, Homo sapiens
gtccgcccggcttgaggcccgcggggagcgctgctcatattcgtcggcccgcgggggggcggcctcccggcatcttcgcggcgaccaacgactaccaggaaggggagcggctgggatggcgcgtccgcggccccgcgagtacaaagcgggcgacctggtcttcgccaagatgaagggctacccgcactggccggcccggattggaacttttggcagaaagtcaaaactgtcttcatatctgtatccttagaaagaggaagacttctgtgaaaatgtgacacttcagcagagttggatgttctgaggaaaaagtaggaatgagctcagcataatcaaggaaaagcaagaaggcaaatgaggcgcagagtgagcgagctaggacctgggggagaaggacagaagatgaattcagattgatgaactcccagagggcgctgtgaagcctc

SEQ ID NO: 226199 - DNA, 365 bp, Homo sapiens
gagtaatgtagtcctttagaaccctttgctatttttacttatagggaaaacttcaatttagcagtgggaatgattcttattttagtatggtattacataaaatcttatctttatcctaatttttgatcatttacaaatttgatttctgaaacttttagtgttcatgaagattttctgtggttttgtttttaaaagatttttttgtcctctaatcccatgtgcatctatctttacacagtttatgaagtattaactgctgctgtttcccattaaaatcaacttttgaacagaaactaaatatagttgctttctctcctaaaatagaacttttcagaaagctctgggaaagtttcaaaaattaaaaa

SEQ ID NO: 226200 - DNA, 391 bp, Homo sapiens
ttgtagtatctatcagtatgtatggagataccacattttgttaatccatttatcagttgatcagcatttgagttgttttcacttttgcctggtaagaatagtgctgctggccaggagcagtggctcctgcctgtaatctcagcaatttgagaggctgaagcaggcggatcacctgaggtcaggagttggcaaccagcctggccaacatggtgaaactctgtctctactaaaaatacaaaaattagccgggcgtggtggcgcacacctgtaatcccagctactcaggaggctgaggcaggagaatggcttgaacccaggaggtggaggttgcagtaagccaagatgatgccactgcattccagcctgggcaacagagcaaaactccatctca

SEQ ID NO: 226201 - DNA, 376 bp, Homo sapiens
ttatatatactatctcatttattcttcataaaaaccctatatataggcactgttattatcttccttttacaaatgaagaaacaatcataaagaggttaagtaatttgcgtaaagccacaaagataagtgaaagagctgggatatgtacccaggcagtcatatctcatagcttttgctagttaccacctcactgtactgacagggagaaccctggatttaagaggcagaagttcggctgggcgcggtcgctcacgcctgtaatcccaaagtgttggaattacaggtgtgagccaccgcgttcggccgagtaacactttatacccatccttgaaaaagaaaaagggcctttatgaacactgacacttaaaaaaaaaaa

SEQ ID NO: 226202 - DNA, 436 bp, Homo sapiens
gatatataaaagccctttccagtccttctaaatgtttttactgtcaacagggcacagttattttaatgtatctactgttcccactgactcatcgggtctcttgcaaaactcagggtcaggctgaggagatatacgggagggtgaaactgctgttgtaataatcaagctgtacacctgtgatttatgaacttttctgtgtgtgtgtgtgtgtgtgtgtgtgtagctttgcacttaaaaaaatttttagaaagctagcaagcaaacaagccatgggtcctggcattattaaaagttttatcaggcatccaaggaaaaataattcgagtcttctgcagtcagtctctcataaggaatagaaaaccaagtaactactacctcagttttgaggcttttgcaaccttgataaccaaaacttaagaatggcaacatgagatta

SEQ ID NO: 226203 - DNA, 466 bp, Homo sapiens
caatagtcaggcacagacccagcaggcttgccagcgggagctgaatgcaggctctgggcaccaagtccaaagctgcagccccaccccaagccctgtaccaagggggctgctgggcaccaaggatggcaggtgggctctggctgggaaggaaggctgagcctgcacaggtggagagggaagagcaggcagcgggagtcccggcagaggcacagggctgcccaggcccgagagcgcccgattcagaggggctcggacacagcagctgttgggagcccaccccagcgactccagccacctgtgctgtcactgcctgacctctgcccagggccagtgtggacacttaagctaaattggtcaattacaggatacttagatccctccccggggcttcccagcctcactgcattctgggctgcagcaccaggaagcctgttgaatcagtaacctcattacagccggcggccgc

SEQ ID NO: 226204 - DNA, 310 bp, Homo sapiens
gatagggccgtcagaaaatgcttgatcgagtagggcgactggctcccaggatccggcgctttccactccccaaagcccgtcaccctagttgcttttgcctctgatgcttataaaatacgattataagattcgtttttacgctgtgtgaacaagactcctttctttataaccaaactaagtgactttttttctgtctatgtagtttattttatggcagggttttcggacactcttctttactcaggcttacccagcgtaatgctagacacggaggtggcactcgataataaactctagatgatttttctaa

SEQ ID NO: 226205 - DNA, 312 bp, Homo sapiens
gatacattgtaatatcatgcaggattgctagagttgggtctcaaattaatttctaacatctttagaagtaagtcaaagatagaaactcaataaactctaccacattcgtagtgactacaaaatttaatttaaattttccctggacccatagctgtccttggccctaaagcctggaattccatatacttggagttccactctgcagtactattaatacagtaatgaattttacagctatctcttggagcacagctcaaagtaaattaaagagggcggtcaggaaacctgatttcataaaagcatcaaagtacc

SEQ ID NO: 226206 - DNA, 491 bp, Homo sapiens
agaattcatttcatgtcaatgtcagttctagtgattcttgccatgctttcttgagaaagatcctgaagccacatccagccatagcagaaaacagctcccggatctgctacagctgctgagatggagaatggtgacatgcacactggggataagcgttttccccacagcataaagaagttttacagcaagacttaggtataatgtgactgattaattatgaaatgcaactgacatgaagcaatctattctcaaatgaaactagtcctctctgtgtaaaagaaaaacactctgcagacacatggcaacgcagctgtgtatctgagtgaacttgtattttatcatggcaatggataataagggatagtgacaagaggcaatttaaattaagctaccctgaagtggcagtagttagtacacagtaagaaacttttttttgtttgagacagagtctcaccctgtcgcccacactggagttcagtggtgcaatctcg

SEQ ID NO: 226207 - DNA, 349 bp, Homo sapiens
aatccgtagggtcgtgtccccccagtccagtccctggtactaagcccggagctgccggaggtcatgcagcctttccgcgcccaggtgaaaccgcctttgcaaaatgatgactgaaacagtgaaagagatctaactcagccgactctatcttgcttcgagcgtacattcatgtcatgatactttaaaatgtcatctttgctagcacaagaattcagctgactccctgtgatttcctccctgaccaatcggctctcctggctcactggctctccccacccgccaagttatccttaaaaactctgctccccggcactccagcagcctgggcgacaagatcaaaacaatctca

SEQ ID NO: 226208 - DNA, 387 bp, Homo sapiens
atacaagagcgatgcacaagaatgacatagagaattatgtaatgctggccaagcaatgtaaaggatgcaccattttgggagaaaacccgtcaagttgaaatcactgggcgtatgtgaagaatataggcttaaacggtgctactgaggtgaaacatgaggttcccatgaagacccagtgagatactcagggactcaagtttgaatcaccttgggagaataaaccaggccctgtgccccctgtgcccccactaaaaatcaactgattgccaactcaatcctctagactcaggaaatatgaaaataagcactttgattaaagttgaaagatctatgaagaaggtttaaatataatattcctttaagtattgtaattattatttttgcata

SEQ ID NO: 226209 - DNA, 424 bp, Homo sapiens
ctatcccactgacacctgcttactcctgcctaaggcctttgtataatgcctggtctgcctggaaggtcacccccagattcctgcatggccccttccctcacttcctacgggtgtctgcttaaaattagaaaaccctggactgggcgtggtggctcatgcctgtaatcccagcagtttgggaggccgaggtgggtggatcacctgaggtcaggagttcgagaccagcctggccaacatggtgaaaccccatctctactaaaaatacaaaaattatctgggcatggtggtgcttgcctataatcccagctactagggtggctgaggcaggagaatcgcttgaacccgggaggcggaggttgcagtgagctgagatcatgctattgcactccagcctgggtgacagagcaagactctgtctcaaaga

SEQ ID NO: 226210 - DNA, 452 bp, Homo sapiens
agcaaatgcatttaaaaaggaaactatattacttccacaaatgaaaagcttatgttatttgccaagaaaggaggtcttcataaaataaatgcaaaaatattaaaattaacaaccacaatgcacttaaaacctaaactcatcccttggaccacctgaggtgcacacaccacactttccttttattccaccaagcaactcacctcagcccacctttattgctgcaaatctcaccagcgagtcttttccatgtgtatgtatttttccagagttggtcatcttgtacatacttttgtaaatactttaaaatatatatatgtacatatatgtatatatatgtacatatatatctatatacacgtatatatatcctgagcatttccgtatactttcaaatactaaatacttattttctttggaaaggtaattcattaaatgatacaaagactatgcag

SEQ ID NO: 226211 - DNA, 357 bp, Homo sapiens
taagtgcctagagcccaccacagtgacctcagaggagaacacagagcttactagcacaaatctttgcattcaggaagacctggggttgaatgctgcccctctaatttattagctgtgatatatcctctccgcagctcaattaacattgcacaagccttagtttactcatctgtaaaatggggacaatgataccaacctcagttaccgtaaggcttaaaacagacagtgttaataaagaaccaaatataagcccttaagaaatagtagctgttgttttactgctgtaaatggcaacagcacaaggacaatgctgtgtccacaggcacttgtatgtagaaggaaagagccaaattaaaa

SEQ ID NO: 226212 - DNA, 291 bp, Homo sapiens
ggaagcctaggctgatatatgtgtttgtgtcttaggttttaacagaaatgtttaaaaactaaaaaataaaataaaaatttttaaaattgaaaaaaatgcttatggaataagtatataaagaaagaaaatatttttatacagctctacaatatgcttgtgttttaggctaaatgttattacaaaagagtcaagaagttttgaaaattttataaggtaagaatgttgccattagctaaggttattagtgaagaaattattttttaaataaatttagtggagcttaagtgaata

SEQ ID NO: 226213 - DNA, 1273 bp, Homo sapiens
  misc_feature (20)..(20): n is a, c, g, or t
gtcctcccagtcctatcctntccagctgttgagaaacacagtttttgtaaatcatcataaatgttcttaaagacacgtaacagttcccccaaagtgggaattcaacgccatacaacaagtttttggtgttgcaaaccacacagaagactctagaagtagcaattccctgctgatgagcacagcaggactggtccatagaataagagagatttatgcagcccagaagctccagaacaattgtgcatcccagtaaacaggcctgtgtatactactcaagcaactatttagcaagtgggatactcatattcttggacaatgctagcttctcccaaggcaatggctctaaattaagttagttctaggtcttggaagtagcaagtcaaggaagaaacagattggggacccttgcctatggaaccactagtaacttttcttctgatccaggctagaatgggtagtacataaccctgactacagctatcacttattactagatctactgaacactgacatttaattctcacagtaatcctatgaaaacaattgtttgaatctttagtttgaagaaatgaaaatgaggcacagagtttaggtaacttgtccaaggtcacaaaactagtgagttccagaaacaaatcaaggtctgattctaaatcttgtttgtcctcccagagtcagacccagaaaactgtaaaagacaagtacagtagagtcacatcttaacacaggagttaggtccgaaggtcagtgaataaggcatatacgctgtcaaaattacccttgcaaatcctagaaacagctcctaaagaattctcatttttgagatcttttatcacagaataatacattcagattttaaattatttaagtgtttaaccacttacaacacttcatcatttttattactctccaacttttcagctcttcttttcatgttcattattttcattttctgtatataattttatctgtccctctttggtcagtgctactttctgattacttatttaactctctatcttattgatagaggatcttgtggaagcaatttccaattatttccctgcctcctaaataatggcatttcattttatctcagtgagtaagttctgtaagagctgatccattgtccatgaaggtctaggatacagtagctgtcatttaataaatatgggatgaatatggataaataataaggaaacccttaaaatcattaagccatttcccctcaggtgttagaaacacgcactgaggatttcaagcttgatgaggt

SEQ ID NO: 226214 - DNA, 500 bp, Homo sapiens
atgagattgaaaagtaaaagaccacttttttgtaagccagctcagaaaggatgaaaagaataataacccttgtttaagaaagtacagggaactacatacttccatactgctgtacgaaatgtctgaaggacaatttgccaaaatatatcggaagacttagaaaggttatgtatgctcttgagcgtgggaatcccacttgtgggatttttaacctcaacaaaaattaagggaagatatgaggaaagagaaagggcatgagcaaaggacatttttgcagcatgtttatgatcttgagaaaatggaaacagctggggtgtgcggcagaagaagtggggaaaatgacaacggttcattaaacctcacgatcagatgctgacagcccctcacaggttgctgcagacaaaacagggaacgacaggaaaaagatgaccgtgatacgctctgctaaaagcaggtcgcaaaacaggatgtagataatgatcccattttgcttttttaca

SEQ ID NO: 226215 - DNA, 442 bp, Homo sapiens
aacttgagcttattacacccctatttgtgaccctttactgccttttttggcatcactgactcttcttcccaagaaagaatgaaaaaagggcatcaagcgtcataggtctctgaagtcaatgtgtaatccatgacacacaggtttacagattatttcccttctgtttattaagagtatcaaagataaatagcatatattgaaaacagaagaatcaataggttccttgggttggagaatgattattttgaaacttaactttgtgcatttttacttataaaggtttttggattttcttcttcttctaaaaaccaataatgactctattcatggtggcagggtaatctaaattctgaattttcctgaagtttgaagttaccctgaatacgtttctattttaattacattttttggttatattaataaaatttactttccaaattca

SEQ ID NO: 226216 - DNA, 502 bp, Homo sapiens
atagacattagtggaaaaactactgaaatatgaatagtctcaagtttaatagtagtgtaccattattactttcttagttttgacaaatgtaccatggttatgcaagatgctaacaatacagaaaaataaggggtatttgggacctccctgtattatccttatgcccttacttgaaagttgtttcagcaatagaagtttatttaaaatattgtgaagggcctgagtatttttaaatcaactgcagtgactctcttttgtgtatttgtgtacagatgagtttttctgcatcgaattttatctcctttccttgcagaagaaagagaattagccctttacagagataacagttgcctaagccagctcttttctcctctttttgatgttcttctttttctctcagtttgaaaattgtaggttatttgagtttttaaaatgtctattgctacatacacattctagttatattctagtccaaacaatctagtaaaatatctaaaagaaa

SEQ ID NO: 226217 - DNA, 267 bp, Homo sapiens
ggacctgcatggttcaaacccatgttgttctagtgccaagtatacttccataatgcccaaagtcattaattaataagagatgtgttttataagttagaaagaccctggctttgggagtcatataatcctaggatcaagtgctgatgtttacagtctgtgtaaatttaagcaaatgaatttacttaactttagttttaagataaatctcacaaatgggctagtaataatgacctacaagaattttgtgacaattagcagtaagatgtg

SEQ ID NO: 226218 - DNA, 370 bp, Homo sapiens
gaaatgctaaaacatttttcacagcaagtattgctgctaaaacctatcatccttggtcactaaccgtaatatcctttcctttacctgtctatcctttcctgtgttctcatctttgtaactgctcaatgcttcttccttttcccaacgttttatcccacaaacctttccaccgtgcaatttggataacaaactctcccacatccccagcctttttacataacctatcttcttgccttagctgaagcatggttcttgcctgaggacatttaacaagtgaaaactcttaagtaagaggtatttccgtaaccattttgagattgcctcacaaatgatgttaagacaggagcaataaagatagactattcattct

SEQ ID NO: 226219 - DNA, 207 bp, Homo sapiens
agcaaagactcagaagttagttaacttaccccaattaatagtagtactggcagagatgtgtctgcagtagttagaaaaggtagtttattgagctagtaagatttattcaaagcctttaaaaacagagacagtaattaagaaacgtttatttttgatagtttttttaatataataatattgtgactcctggcgtattatacacaagaa

SEQ ID NO: 226220 - DNA, 444 bp, Homo sapiens
aaaaaaaaaaaaaatcattttaacatacaggcccctcctttccatgatgaatgcattgggggtaggcgagtagggaagatgatacagatacatttgaacaacagacaccatgctgtagtaaggattgctcctaccctgccactctgacatacatagccttatttgcctgtttccttaagttgaaatcatctcatatatacatatgtatgtgtgtgtgtgtgtgtgtgtgtgtgtgtgtgtgtgtgtgtgtgtgtgtgtgtgtgtgtgtgtgtgttctgtgacctcctgtccccatggtacgtcccaccctgtccccagatcccctattccctccacaataacagaaacactcccagggactctggggagaggctgaggacaaatacctgctgtcactccagaggacatttttttttagcaataaaattgagtgtcaactattta

SEQ ID NO: 226221 - DNA, 424 bp, Homo sapiens
ggtcctgccccatacctgagaggaaggattgttgtacaaagaggccaagaatcatctaaacagttgcagtctgttcccattaggtcataccctttttgttcaatcacatttccacacagctgtctattctttattgaacccaagcataaaaaatggatagctttattagtcgggcatggtggtatacaccagtagtcccagctactcaggagctgacacaagaagatcacttgagaccaggagtttgaggctatagtgagctatgattgtgcctctacactgtagcctgggcaacagagtgagaccgtctccaaaataaataaataaacaaataaatatagttttccctgtatctttgggtctgcattctgaagtctcccatgtcatataaaagtatgattaaataaatatgttatgctgttca

SEQ ID NO: 226222 - DNA, 575 bp, Homo sapiens
ctataatcttgcaggttatccaactggtagtgctgcctgcacttttcctgttagtgcagcatgtctattttgcaggatggatcagaacatgtgggcaccacctaaggttcttccatgttaatcctggaaccagtagatgttttggacttaattttggcctcatggcagcacagattcccatgatcctaagcactgatagagaaacctccaaaattaaaatagcatttcttcatccttcaaagatgcctgaaagactctggatggcagaggtcacggggttacctccaacttctcaatcagttgtggaatcagtagtcataactcttgacctttgttctttatcaacaagtgtgggtcctaagttgatgaaagtataaactagttcccctattggcacccacttctgcagctgtctacaatatacaatttaggaagagaccctaagctgtgggcatcaatttggaactaatctgaaatctaatgtataaatgagaaataatccatagccaaaacttcaaaagctctagtaacattacaggggaagatgaaccagtatagaaagttacagttgagcc

SEQ ID NO: 226223 - DNA, 427 bp, Homo sapiens
gctagatttttttaaccatgtacacgtattgccttaaaattaaacaatcaccgtggcttctcagtggaacctggactgcgagagatgagaggagatttgggctgggacctgtggcagaggctgcaggctgcccacccaatgtcatttcctctctccctatttcctgactgacagatcctagactgtttgtttttccaagtgaccatttacactgcatgtctcagctaaatgactacatttcccaactacaggaggccattcagaggttgtagagtgggacttatgaggaaacggtttaagagagacatacacagttgcttggaggattgcttgaacctaggagttctgggctgtagtaagctagatcatgcttgtgaatagccgctgcactccagcctgggcaacagaaggagactatgtctctaaa

SEQ ID NO: 226224 - DNA, 526 bp, Homo sapiens
gcttggaaattatagggaagccctggggtggttgaaccaacaaagggatcaccgcagtggtttccaatctggggattcttgaggggtggtaacggggccacagggtctccaggggggtccctgaaaacctaggtggacagcatcatcttcacttcttccccagcagcatccagccagacactcgcacagcagtcactaaatgcatattgaataaataaataaatagacagatctgtgggtaaatcaatccaggaatacatggatgaatgtgctaacccatcagaaaaccccataaacgaatttaaagggtggaactcaatgtgctgaggctgcctttcttacgtctcaatggctccccaattttcctcgaaataaaacccactagtttctataattgtacaacataagtcacatgagatgttaacatcaagggaagcccggggaagagtctacgggaactctgtgtaattttcatttcaaacaaaaagctaaactacgttaaaataaatctatacactttgacact

SEQ ID NO: 226225 - DNA, 391 bp, Homo sapiens
ctcggtttccttggctttatatgatacaaaacttttccccagcttttgttgttgtttgtatgtttgattctatgtaaactaagttctccttatggccattctgatatcttgctggtgttttgtagggttgctatgactacagaacttgtggggggttttgggatttaaacaatgagaacacatggacacagagaggggagcatcacacaccagggcctgttgggggtcggggggcaaggggaaggagaccattaggacaaatatctaatgcatgtggagcttaaaacctagatgacgggttgataggtgcagcaaaccgtcacggaacatgtatacctatgtaacaaacctgcacgttctgcacatgtgtcccagaacttaaagtaaaaaa

SEQ ID NO: 226226 - DNA, 585 bp, Homo sapiens
  misc_feature (571)..(571): n is a, c, g, or t
ggagaggttatactagatgtcttccatttgcctttcagaacccctcttcatcccactctggaccccagcggtgctgacccacatggactgcagcatgaatggctcccttgccctctgacttcagcttctgtttatccaattattaatatccaaagaagatgagaagatataaggaagagatggtcagagtactctggctttctcattgccaggtcacatgggttgtctgtgtccctttagcaaagaccacagctcttaccaagcagccccctctagcttctggctccttctctttgctccttcacatctaggaatagaaagaaaggagaactcgagagctgggtgcggtggctcacgcttgtaatcccagcactttgggaggccgagacgggtagatcacctgaggtcaagaattcaagaccagcctggccaacatggtgaaaccccgtctctactaaaaatacaaaaattagctgggcatggtggcgcatgcctgtaatcccagctactcgggaggctgaggcaggagaattgccagaacccaggaggcagaggttgcagtgagccaagnacctgccactgcac

SEQ ID NO: 226227 - DNA, 339 bp, Homo sapiens
tttctattgattccaggtctttagctaataactctttcaaccaattgtgaatcagaaaatcttttgccaggcacggtggcccatgcctgtaatcccagcactttgggaagccaaggtgggcggatcacctgagattaggagttcaaaaccagcctgaccaacatggtgaaacccctgtctctactaaaaacacaaaattagctgggcatggtggtgcatgcctgtagttccagctactcgggaagctaaggcaggagaatcacttgaacccaggaggcggaggttgcagtgaactgagatcacgccactgcactccagcctgagtaacaaaagcatctc

SEQ ID NO: 226228 - DNA, 385 bp, Homo sapiens
tagctcttgttgcccaggctggagtgcagtggtacgatctcggctcactgcaacttctccctcctggtttcaagcaactctcctgcctcagccttctgagtagctgggattacaggcatgtgccatcatgcccggctaactttgtatttttagtagagacagggtttctccatgttggtcaggctgatctcgaactcccgacctcaggtgatccgcctgcctcggcctcccaacgtgctagggttacaggcgtgagccaccgcgcccggcctgaaatcttcactttttaatttaaaaaactaaatttatcccagagtttagaaaaactagtttttcaccaacccgaaagacccctctgctgagtctcttgaggagttcttcattg

SEQ ID NO: 226229 - DNA, 408 bp, Homo sapiens
ggttgtctgtatttatcaagcaaatacattttatcaagcaaatagaaaagccatagcatttatcaagcaaatccagtcacttttaagacagaaaggaggagttaatcagacaaaacagcaggacagagggcgtaatctgggagattgtgtatatctaggggaggaggacgggggattccagtaaggtttttggtttgagctatacataaatatcctaatgttttcaatataaaacccaatgccttttacatatttataaacccatgaagccaattacctagaacattacacagaatacttccggtgtatgagaatactgctttaaagccgatcgtagtttgaaaaatgagcattaatataattaattaaaaccaaatctcctaaatggaacaagacttaaaaacccag

SEQ ID NO: 226230 - DNA, 333 bp, Homo sapiens
tgaggcagagtctcgctctgtaggccaggctggagtgcagtggcatgatctcggctcactgcaacctccgcctcccagactcaagcaattctgctgcctcagcctcctaagtagctgggattacaggcgtgtgccaccatgcccggctaatttttgtgttttttttttagtagagacagagtttcaccatgttggccaggctggtctcgaactcctgacctcaggtagtccgcccgcctcggcctccgaaagtgctgggattacagatgtgagccaccgtgcccagccgtatctccagttttctagatgactgaataaatcaattttaggttg

SEQ ID NO: 226231 - DNA, 341 bp, Homo sapiens
aggtcccttattagggatatttaaccttagcctagaagacttggtctgcaggtataatttcagacactgtaacatttgatggtaaagggtgaccaaatacttttggtcagcagggagtcacaaagcacaccatgtgaaggcaacggtttacccagctctgtttaacagcaccctggcatagaagctttcactctcttacactaaatttaacctaatctaaacttaatccttagcattatttttaatttctcatctacatctttttcaattttccttaaaattgtagtaaacacagtcctcaattttatttgcatttacaataaacagtatttataagtcat

SEQ ID NO: 226232 - DNA, 377 bp, Homo sapiens
agtgtgtgctgattggtccctgggcaggaggaagtgcgtgctgagtggtccatgggtggacctggaaaaaacaccatttcattggctgaaaggcgtaaaggaaattctccctccaggttgtggattccagctagaaggagcagccaggttttcaggcttcatgctgtgtgtgccctgaaggttgggtttcactggggacctgtcccaatctgcctaggaatttgtctgcctcctgccactatcacaattttatttctgaaatacacaaatatttaaagctgttaggaaggtgtcagtagagagacttggaaaatacaggcaagatgaaagtaaattattctggtaataaagtgacccattcttattagggaaaatga

SEQ ID NO: 226233 - DNA, 598 bp, Homo sapiens
tgaactatcccgtgaatcatggaacataactacattattaggtattgctttagtattggctgtacttaaattcttcaaataatgttgctcatatatgttcaattttatgttcaaataagttcaattttatttagaatattttaaaaatatttctaatttatttataaggatagtttttaaaaataagttcaattttatttagcatatttataaaagtgtcctttaaatatccatcaggaataacacagttcttaggccaagctgtttcattatatttcattcttgttaaatgtgacatttttcctattgtacgtggtgttgttttttaaatttaggtatcttagcttgaggattcatttccaaacttatatatagcatgccagggcttatgattttgttgtatcttttctcacatttcagcactgtggtagtgacgtctgatttagatctgatttgggacattgggagccgtatttaaaaacaaatatatacacctttgccaaaccttcatttttaatcattaaaaagatttttttctttaaagaatgtattgtttatatgtttgaactttctgattctttttgactgtttacagtta

SEQ ID NO: 226234 - DNA, 604 bp, Homo sapiens
tgaatacacagaaaatgtcttttatatttaccctttctcttactccttgtttcttcttccatatgtgagtttctatctggtatcatgccccttctgcctgagtacttttagcatttcttacagtgcacgtctgctgtagactaattctctcagctttggtctgcctgaaaatgtttttattttgtcttcatttttaggggtgtctttgctggatgtagagttctaggttgacattgtttctttcaaggctttaaatgtgtttttttcccattgccttttgacctccattgtttctgtgagaactcagcaatcattcatatctttgttctatatagtctgcttttttcttcactggttttaagatgttgcctttgggttttagtagtttgactatgatgggctttgatgtgctttttttgagtctgtgggttaatatctttcattagttttggaaagttcttagccattatttcttatatttcttcccatttctgctctcctctccgtctggaaagctaataacatgctctttgatactatttgatactattccttagatcttaatgacctgaatttttttaattcttttcacgatttttcctct

SEQ ID NO: 226235 - DNA, 505 bp, Homo sapiens
agccctatgtctttatggctactgggtaaaatagtcaagtgagaaattagctcatccatcctttgggcatagagtttgctgccacaaatttaggtcccctgctttctaactcttcagaaataggagagacatgagatcacttttgtccactgattctgtcctacacacgtttataagagaaatgggtgagggacaaattgctaagaggcaatgccaaggtttgagtagattccaagtgtgatttcggcaggtctgtggagttgctttctctatgggagaaagttgacgctgaatatttattttcaaacaaccgtatgtgtttatattgaagcatctgttagactgttaaatcaaaaatccatgccttttcctattcccaggtcatatacggaattttttcaagttgtaattttttggttacaatatatatactaagaccatatggttttctcataccattctttgtattttctaaatgcatattaataaaatgttggaggcaaca

SEQ ID NO: 226236 - DNA, 408 bp, Homo sapiens
aaaacatgttgaattacaccatgtatattcagtgaacaaaatgctaactgtgggactctaggttaaatacctggattcttcagcagacacgtttaaggaaaagaaagcgtggaaggaatcctgtagacaagagacccaagatacatcaaatcaattgaaaaacgtagttgaggccgaggcaggcagatcacgaggtcaggagttcgagaccagcctggtcaacatggtgaaaccccatctctacttcagataaaaaattagccaggcttggtggcaggtgcctgtaatcccagctctcgggaggttgaggcaggagaattgcttgaacccgggaggcagaggttgcaatgagccgagatcgcgctatggcactccagtctgggggacaagagcgagacttcatctgga

SEQ ID NO: 226237 - DNA, 655 bp, Homo sapiens
ataaaaatcaattaatcaaacaaacacaacgtaaaaaaactaaaacctctcaataattggcctagaaagtgatagaacatggaacgtgaccacattgagcaaactgatttactgtgatccactaaatgtatttatcataaggtaggtgaggtacaaaaagttataattttctaggacaactgggtggagtccctaggctaagccacaggttgtcctttcttgctgctgcaagctgtacacttgacttgtggctgtagcaacacagagaatctggagccaaaagcactgttacagtgctttcagtctttaggaaactctttttaaaaagttaagcattgttgagaaaatctcagggaacaccgtgtgactcttcagtataccacatggtgatgtaaactgcattgctctaaagagggtcaaggaaaattacaactattccaagacttaaatcttgtgaaatgtagttagaaaccaaaaattatagtactgaatatgtatgtctaggaagagattttacatgaagtactaaatgtattttaacaaatgccacccaacatatttgattgtgtaattttctgaaagaattacctagtacagtcatgttttatatatgtctttgttgatccatggacaggacaagccacagataattaag

SEQ ID NO: 226238 - DNA, 467 bp, Homo sapiens
tgtctttgtatgttctctgaatatttctgcaaactctccggcccccaaacacacattagggtgaaagccctaaaaatcactttttctcaatgtgacacattctataccaccacaaattacagccaactatcaaagccaccctgctggagaatgggctgtcttggatggcagtgagctccccaggcaatggagatgtataagaaagagccatttgaccttttggttataggaccctctagcaggggccacagggaaagttctgtagaactaataaccactgcccccagctctgccactaacttgccacagtcttggcttctcttgtttccttcctgtaaaaagagattaatgacttctctcctatttgacatagttgttctgagatttcaatgagatgtgtcattgaaagtgaaagttgtaaataattacctaaaaacaaaaataaaaattcctagatgatctctaag

SEQ ID NO: 226239 - DNA, 388 bp, Homo sapiens
gcatcctacccgttccatagacctgtgcttcccatcccgcccgtgggactctatgccacgccagtgggatatggcatgtaccacctgtcctaaggaagaccagatcaatagactccatgatggatgtttgtttcaaagggtttcctctccctctccaagaaggcaggaccagccaatactcctgttctgcaaaccctgagtgcaccaccctaagcggctaggccggcagggccacacgacacagctgaagtttgttctttaggcggaggcaccaagccttgttttcttggtgtaatcttccaggtgcccccttctcctttcacaaagattggctctgatggtttttatgtataaatatatatataataaaatataatacatttgtata

SEQ ID NO: 226240 - DNA, 375 bp, Homo sapiens
ggggggaatcatgtagccagaagacagtgttatttgcccctctttatagctgaaaagtgtcaaaccagtgtctgaaaagatttcaatcaaggaagggagtttctttttgtgattgttcttgttgataggagtactacatattcttccaagacaattgaaaaaagaaaagcaaaaaggaaataaacactatccattaacctcccatctggagacatctgctataaatatttgtatttgtattcttccagacatttaagaaatgttttcctctctccaaaaacacggtatctactgtgcacagttttgcaatgtgtttctttaatgtaaaaatgtatccaaatcatcttttcatctcattaaatattattctacaat

SEQ ID NO: 226241 - DNA, 395 bp, Homo sapiens
catagaaaaggtacagtaaaaatatggtattataagcttatgggaccactgttgtatatgcagtccatcattgaccaaaacatccttatacagcacatgactaaaaatatcagatgcctggttaaacttgaatcttgggtgaagaatgaataatttttagtcccaaatattatgagacatacttacactaaaacaattatttatttttaatttgaaattcaaatttaacttggcatcctgtactttatctggcaacaatatttgtagggaaattggcatttcacaattgggctgtggccccatcttaattcctgagcctgaagacatgtttctctactgggaaagtttcatttaacagtctctgaaaggaaaactcttgagcaattagagaagaa

SEQ ID NO: 226242 - DNA, 421 bp, Homo sapiens
acccaatgataatatctttcataaaggaaaagtaatttttcaaaacaaaagctgacagaatgtaatgccagcagatctgcattatatgaaatgttaaagaatgttctacaggcagaaggaaaaccaaactgtggatctacacaaagaaatgaagagtgctgcaaatgacaaatatgtagctaaaatactccccccccccctgtttaatcccttaaaaactagttaaaacaatatttatacatatacaaaaataaaatgtatgacaacagtagtataaggaacaggaagaggaaaatagaggcatacagttgtaaggtttttatattctacatgaagtgatatattaagatagactgtgatataataaaatacatgtattgcaaatcttatagcaccccctgaaaaacaagagttacagcca

SEQ ID NO: 226243 - DNA, 196 bp, Homo sapiens
gtgtgtgtgtgtgtgtgtgtgtgttttcaatatctggagtgcccatgtgggatgcacatctacctgtacacgcagacttccctgctacattacttcatttccttttgctttcttcctctccacctgctgctgagcacgctcatagccctgaaggtgtgtatgaggtgctcccaattctgggaaaccacctcagccg

SEQ ID NO: 226244 - DNA, 495 bp, Homo sapiens
atgtacagcgtgaagagtaaacgtgaatgtgcactgtaagctttgagtgataatgaagggtcgagatttaacatcctacttcacaagatgctcatagccttgatccattacagccgctacctcatccatctctgctcatatccttgatccaatacagcagccacctcgtccatctctgctcataacctaaactaatagaagccagagggaagaaatggaagccaacactccagaaagctgtcactcacctaagagtttgcaatttctgtctgggggaaaagaagagaaagttgactgtgaaaataagcattaccatagagccttctctatggcaacatcaaaaatgaaagctgattctcatcttcctaacaatctgcaaagacaagtgaaacacaacctactgagcatcaagttaaagaaggagtgaatttgagtagcacgggaggaaaccatgtcttcgccactagggaaataaatatgaccactgttcctctg

SEQ ID NO: 226245 - DNA, 503 bp, Homo sapiens
agaaggtcccttttatgcttttgaaaaattgtgtggggtgctagtggcctctaaagtggtaaggaaaattttccatcatccagacaaaggaggttaagaagaacagcggcagatgtgcaagaataactacaataattagctaggggaacatatatactgctaacattttaaactttacccaaacaggccatgcacggtggctcacgtctataatcccaccattttgggaggtcgaggtgggaggattgcttgagctcaggagtctgagagcacctgggtgacatagtgagatcctatctctacaaaaatgaataaataaataaaaattagcctagtatggtggtcctagctacttgtgtggctggggtgggaggatcacctgagtcccagagttcaaagtagcagtgatccatgatcacaccatttcactccagcctggactataaagtgagatctaagaaagaaggaaggaagggaaggatggaaggaaggaaggaaggaga

SEQ ID NO: 226246 - DNA, 481 bp, Homo sapiens
gagcagtgcggcctctctgggcacacgctgttctagagtatgctgagttcttcccgctccacttggaaccactgtgttcacacagtgagggaagcgacttttccctttctgggggacagtgctgctatgtaagatgctgtgaaggaggcgtgtgcgtacgtgcatgtgtgtgtgtgtacgtgtccacagcgggtgctggaggatggagtgtgttttcttccctgccttcacgtgtaattcggttgacaagaactattccatgatgtgcgtgcgggcttcagtgtgaaagatgagtatgtacgtacagtcttgctgtgcatcacggcctctcccacagtacacagcaccatcttttctggcaaccaagtttgatgtcatcaaaaagcttctatctccttccatctctgcaccttcttggtcatccccctcctccacctctttcaagttctttctcctttgtctttgaatattgtctcacttg

SEQ ID NO: 226247 - DNA, 429 bp, Homo sapiens
tcgagccggtacctagactatacggtgtccttgatcagttgaatttcagtgactcaaaagagagatcatccttagtgcgcctgaactaatcaggagcgtctttaaaacaaaggggcccttcctgaaggtagcgatttgaagcatgagagagattttcctgctggctttgaaggaggacctgagggcagcctctaagagctgaaagtgagccctggtcaataatcagcaggaaaacagggacctcagtcctacaacttcaaaatctgaattctgccaacaacgtgaatgaccctgaaagatgacgtcttcaaagcagaggtgccagctgagcagctggcagagccactggcctcatcttcgactctgggcccccttctagctgcaccaccctatcctccagagactttaaagttatgggtgccttcctga

SEQ ID NO: 226248 - DNA, 442 bp, Homo sapiens
acaacggcacttgtgtattagtttgccattgtttacacaaaaccatgtttctttcattgtatgaaagacatagggatttttataggtaattttccccacccatgcttgttagcagcttacagaagaatgtaaactcctttacgacccacctgcaccaaataaagggtcacgtggcttagagtcctgaggcctgagctccagcacgaccactgcatttgagctgcataactaagaaatccttctcttttctatgtgttgagtttccttatctgccttatctgtaaaattataaatgtcacctacatcacaagttgggttctgagatttgaatgaggtaaagatttttggaaactgtgaacccctgtgaatgtataataacaacccacctaagtctgtcttgcaaaataataaataattccaacatctctgtaaagtcagcctg

SEQ ID NO: 226249 - DNA, 491 bp, Homo sapiens
ttgctaatttttttaatttatgtttttgtagaaatggagtctcactatgttgttcaggctcatctgggacttctgggctcaagtgatcctcctgcttcgacctcccaaagtcctaggatgataagccaccttgctcaccccctccctactttttattttgaaaattttcaaacctacagaaaagcttatataagaatagtacagtaaggccggctgcagtggctcacacctgtaatcccagcagtttggaaggccaaggtgggcggatcacctgaggtcaggagtttgagaccagcctggccaacatggtgaaaccccgcctctactaaaaatacaaaagaaagttagccaggcatggtggtgagtgcctgtaatcccagctacttgggaggctgaagcaggaaaatcacttgaacctgggaggcagaggttgcagtgagccaagatcacgccactgcactccagcctgggcaacagagcgagacttggtc

SEQ ID NO: 226250 - DNA, 420 bp, Homo sapiens
gcaaagggagaagtatgctgcctaccacctgcaagcacagagaggaccatcctgtacagagtcaactcagagaagacagcaaagcccaaactcatctacaattcaagcaggggccccaccctggaccttgcatcctggtctttcacagcaaataaataataacctcagctgggcgtggtggctcatgcctgtaatcccagcactttgggaggcttgctcgaacccaggagttcaagaccagcctgggcaacatagtgagaccccatctatacaacagataaaaaattagccagtcatggtagcgtgtgcctgtactcccagctacgcagtaggctaaggcaggactatcacttgaacccaggtatttgaggctgcagtgaggtatggtttcaccactgcactccagaccatgtttctaaa

SEQ ID NO: 226251 - DNA, 151 bp, Homo sapiens
ccaggttccctccactccccggtccctcttaccctgcccctcattggtcgggggcaggggctgggttttcttgctgcgggcactggagggggagggtcctgccctcccttctgaccttcgggtgcttttgttaacgtgttctggcttcttc

SEQ ID NO: 226252 - DNA, 238 bp, Homo sapiens
tatcatctttgttctctttcaataaaagagcagagttcgtgatattttaaaaaaaaaaaaaaaccccaggattacaggcgtgagccaccgcacccggcctgtattacatgtttatggtaaaaagatctataggagttgagctcaaactggtaaacatagatcttgtgtcttggattattggcaatgtgctattatctttgttctctttaaataaaagagcagagttcgtgatatttta

SEQ ID NO: 226253 - DNA, 278 bp, Homo sapiens
gggataggcagatccctatgtacggagccagttttgaattacacatgaattcaattaacacatgaattaatgcatgaattgaattaacgcaataacacggagctccttggattacaggcgtgagccaccgcacccggcctgtattacatgtttatggtaaaaagatctataggagttgagctcaaactggtaaacatagatcttgtgtcttggattattggcaatgtgctattatctttgttctctttaaataaaagagcagagttcgtgatatttta

SEQ ID NO: 226254 - DNA, 601 bp, Homo sapiens
gtgaggatgctgttgcatgaatgtgattctccctttttgaacacataaggagtgctgtagcactgaggtttgatgacgtagttatttgtgttcagacattatgaaaacacaatgctaacctggtaagtttggaagttatcatgtgaaagccttttctgaagatgagatttttccaggtctctgagacctaacacaaacccatttttcagcctttgacagttttacagttactcaaaataattgagactgttgtgaagtaagtatattgaaagcctaaatagttgatctcttctggccagtctgcaaaaatatgctggcctgtttctggaaagtatgcccaactcagaggatgggaatggggaagagcagaagcgtgcagagggaaataacagtcaggctgttcttgatgtcaactggaggaagggcagtgctgtatatggcaagaaaatagatgtttttaaaagacatgacatgaaaaatctccctcctgttagtccccagttccttctcccaaattaatctctgtgaaacttttttgggccaagcatggtggctcatgcttatagtcccagcactttgagagacagaggaagattgttcg

SEQ ID NO: 226255 - DNA, 683 bp, Homo sapiens
tcgaggctgcagtgagctgagatcccaccactgcactctcagtgacacagtgagaccctgtcaaaataataataataataataataataattgcgaaagggactctgaagtaaacaaaacagagaaatatgatagagaatgactgaaagttggggaagtagatcagggaaaagatattacaagcggagggaaagcaagtgcaaaggccactggcagaagtgaacaaggcttgggtccctaacagcttaacagtggctcacacctgtaatctcagcattttaagaggccaagacaggagaatgcttgagcccaggagttcaaggctagcctagcaagaccctgtctctgcagaaaatttaaaaattagcgggttgtagtggtgtgtgtctgtggtcccagctacttaggaggctggggcaggaggatcacttgggcccatgagttggaggctgcagtgagccatgcattgcaccacggcactccagtctgggtgacagaacaaaacctgtctctaaaaaataaaataaagtaagctggacacgtctgaggatggaacaaggtgagtgaaggagcgtgtcaggacctgaggtagccagggacctcaaaggccagccttgcttcacccacacagtggcttacagtggtaaggcctctgtggcaagaacagagatgtaggaaaccat

SEQ ID NO: 226256 - DNA, 494 bp, Homo sapiens
actcaaactgccttattttcctgtgtgttagcttgtattcattatttgtggtgatttctgagactgagatgaagatacgtttccaaagagagtatttacatttgaatctgccaaaagcctggggatactgtcaacctgggaacacattcaaataaatgttgggcttaaagttttgtgggctgcataggtaacatgagttccagatccataaaccttcatgagggtgggcttgtggttaaattttcagggaagatgtatttacctgcacccagcatcaagtttgaaagaggttaatttccttgtttattccttctgtagggtagacatcattctattcaactcttacactaaacatgtatgtagctctttaggatcccaactttatgtggagagtctaattagacttcgtatcgttaatgtaccctagaatttatcccctaaaccttgggttcagtagtgtcctggtaaatattttaaagctggctgtccagggc

SEQ ID NO: 226257 - DNA, 318 bp, Homo sapiens
ctaattttccgatacaggtgctagctttttaagataccaatgctcactcaaacttgttgtaacatagtcttcaaagctaatcactgcataaggaagacggtgggagcatcctcacatgtatgtcaggaatagatgttactgttttatcataaagctaaaacaagtataagctcagctttcctcagaatgctgtattttaaatatttaattttcatgtttaatcacaagcaaagtcacaaagtttttaccatgtatgattatttgtccttatacatctctgaggaaaaaaaatgtatagattacatctatacttaatgc

SEQ ID NO: 226258 - DNA, 481 bp, Homo sapiens
tgcttaatcatcagattgttttcctaatttacccaatctgcaggctttgcaataatggcatttggttatttattcatttaagagacatcaacttagtcactaatatgcaccagattgttccatttcccaagagagtcatgctgtggctaaaatttgcaaactgttcaacaggaggactaaagtagggcacccaatctggactggagtggaaatcaaggaaggctttacaggaagatgacaactgtatgaagtctctaaaggcctgtaggagtcagccagttgaagaaggggattgagtgcaaagtcatagtgcaaagccacagtgtccacagtgcagcaggctttatgttcttggatttcaacacagcctagtataggtgatgcaaataaaggagttaaaacttcatcacaggggtcaggccagggatggcttacatttggcaaattaggaaaacaaattaatcctgatagcaacagggag

SEQ ID NO: 226259 - DNA, 559 bp, Homo sapiens
gcttggtcagctcatgtagtcagaaagtaccagacttacctataatgcatcatattaaccaacagtccctccagcttgtcaatacttgttcttcctttcctcaaacttccacatccgtggaggtcaggctgatgtcagttatggaaaggcatgaagactggctatggatgccctgtgaactagacaggagagaggcggggcagacatacagcacaataaagagcaggggcaagaagactggcagccaaatcatttgcactgtcttaacaagcactaattaaatgccctgtttgaggtaaataatagctgaaaatagcctactgcagttgtttctcatcaatgagtagagaaataggtggaatcacttagtgctgtttcattcattaagctgcagcacactaagccttcttcagaggagaggggcaccaagtcgagctagcctctaaagtaccatttgctaaatgcccattctagcaccctagatggtattgtgctgacaagaatcacatccagagagtaactgcatgtactacaaactgaccctaataaacaatttaaa

SEQ ID NO: 226260 - DNA, 798 bp, Homo sapiens
ggacagttaactactatgattttggtgatccaaatttctataaaacaaaattgtccatgatagttaaatatcttaaatctttaactatatccttcttggccaggcgcggtggctcacgcctgtaatcccagcactttgggaggctgaggcaggaggatcatgaggtcaggagatcgagaccatcctggctaacacggtgaaaccccgtctctactaaaaatacaaaaaattacccgggcatggttgcaggtggctgtagtcccagctacttgggaggctgaggcgggagaatggcatgaacctgggaagcggagcttgcagtgagctgagattgtgccactgcactccagcctgggcaaccgagcgagactttgtcttaaaaaataatcattctgcggtcctcttagctgtctcaaattatgacgggcattttcctggtctgtttgtggctagccgtcagagttttcactggaaaagctatagctaattgctatacacagttcttaatgtggaccttctccagggagttgagaacccagggtgttttgaagagttggagctgcagactttttatacttttgcctgttctcagtgatgagtcaaagcaaagaaggagggtgaatgctggatgagggggcggcctcagagagcctgtggctgcattaggctttcctgagtgtaacctatactggaaattgtttatccacaagtgagtaggtagtgcatactgaagagctgactactgggagtgtagtacctataggacaatgaacagaatgtttagaaaattagatcaag

SEQ ID NO: 226261 - DNA, 453 bp, Homo sapiens
aaaatatatatatccttctcctacgtttccctgcatcattaatcattctgcggtcctcttagctgtctcaaattatgacgggcattttcctggtctgtttgtggctagccgtcagagttttcactggaaaagctatagctaattgctatacacagttcttaatgtggaccttctccagggagttgagaacccagggtgttttgaagagttggagctgcagactttttatacttttgcctgttctcagtgatgagtcaaagcaaagaaggagggtgaatgctggatgagggggcggcctcagagagcctgtggctgcattaggctttcctgagtgtaacctatactggaaattgtttatccacaagtgagtaggtagtgcatactgaagagctgactactgggagtgtagtacctataggacaatgaacagaatgtttagaaaattagatcaag

SEQ ID NO: 226262 - DNA, 435 bp, Homo sapiens
gactcctgaatgtttgctcaatgtcatttagctcccattgtttcctgtcaccatagcagtctactgaaatctctcagcatatatttcagaattactctgatagtgaaagatttcctatcctatgtagtccaacaattattggtttattatgtgaaaaataaagcaagtatgtagcatttacagagtaatccagctccactgttaatactgtcatttgaagagttagcaaggaatgtgatgaagactgaatatcttgaaacaaagtttggttgtgcagttgctctgctatgaattatgggtctgattcccctttttatatgtggcttttggattttcttctgcccttgaggtaatctgctcctcctttcattcaccgtgcttttaggtttggtttcagatacagcatcccttctgctacattctttaaagttaaaa

SEQ ID NO: 226263 - DNA, 664 bp, Homo sapiens
ccaccaggccacttccactgaccaccctgttcactccaacaaggacaaactacctgcatcacttccttggtggccaggctttctggccttaggacctgctgttctcttctggcagcattcccagagtccccaccccatacactcaggggtcaactcaccccctctcccctcaagactcaggtagaggtcaaacaaaataacatttcttgatgactcaggttttcactgtgaatttctccattgtattacaatcaggtaaaactctcctagttcaacaaggctttcaaaggtggttttcttcaaagggctttggccttaagatgacagtgacaactattagtcttaggtctgctttaagtgtttttctgtctcttctttgctttcaggtaactgggcagcagtctaaatcagtgattataataagagctctgggtacgttggctcacccctgcaatcccagcactttgggaggcactgaggtgtgggaggatcatcataagtttgagatcagccttgtcaacagagcaagatcctgtctctatgaaaataaaaataaaaaattgggcatagtgttgcacacctgtaattccagctacttgggaagctgaggtgggaggatcactggagcccaggaatttgagactgcagagagctatgatcgcac

SEQ ID NO: 226264 - DNA, 139 bp, Homo sapiens
cttacttgctgtgttaaaatattaagagtatttgctttgtaacagataaccacattaaaaggaactcaaagcaataaatactggtggaatttcatgtattttggcccttgaattcgcatcatgggatcttttaggactg

SEQ ID NO: 226265 - DNA, 351 bp, Homo sapiens
gtcacaaaatggctgccacagcataaacatcaccgtacctcacagatatgacaatgttcagtggaagaagaaaaggaagtttcttcatctgtgtctcttttaacgagcaagaaaatattagagattcctcatcagtctctgtttcattgttcattcaacatttctttggccagtccctttcctaaaccagtccctggcaagggacataggatttctaccatgaatttagtatgggttctgttctacagagtaagggtgctttctgctacatgtcctttgacatgtggcctaggttattattatctcaagaggcaaaactgctttatagtaccaatctgcagtctaataagt

SEQ ID NO: 226266 - DNA, 390 bp, Homo sapiens
catcttgttcaggtcaccttcaggggaaaggaggattttggaaaacagaaggcagagaataagaacatctgggggggagggggtgggggcgggggcgcgggtgcagtggctcacgcctgtaatcccagcactttgggaggccggaggcgggtggatcacctgaggtcaggcgttcaagaccagcctggccaacatggtgaaacgccgtctctactaaaaatacaaaaaattagccgggcgtggtggcggctgcttgtaatcccagctactggggagctccagagtctgaggcaggagaatggcttgaacccaggaggcagaggttgtactaagccaagattgcactacattacactacagcctgggcaacaagagcaaaactccatctca

SEQ ID NO: 226267 - DNA, 427 bp, Homo sapiens
tccacaccattacctacattttgtcattataaagtaatttaagtccttgcctgggatttgttgagcgaaactttaactttgagaccatgtagaatctatagatatatctgtagaaactatataccaatatttgaatattaaagaaatattagttaacctactttattttacatagtttatatagaaattgtagatatagcattgtgtaccctgtttactcccttgagggagcaaattttgggagatagggcagtgaacatacataaccaggtgttacagtcagttatgcaaaccagattcagagagaggaaacaacagtatattcaaagataaaagtttcaggaaagtggtctgtcatgcgtttatccctcgatctaacccactcagtagaagctgggtttcctttgtcagaaattagactgagaag

SEQ ID NO: 226268 - DNA, 602 bp, Homo sapiens
ctccagagtcagagggcaggtgcctctggaaggtataatagctaacgtggattgagtgtttacgaccagcccaagccccctacatggcttaatggatcagagcagccccaggaggtaagggctctttttatcactcacattttacaggtgaggaaactggagagtaatttgatggagatctcacagatagatttcacaggcgattttgaccatgcttctacactggctctgtggccagccccttggcaccagcaccaccactgccatcgatttctggtccacggccagattgctaattctggctccactggctttgccacttgtgagctgcgtgaccttgggcaaatgacttaacctttctaagcatggtctgtgaaatggagagaaggaaacatctccagattttgcccagaggagtaaatggaggtgggatatgtgaagtggctctagacccaggcagtaaacagtgctcagtgtgtgtccttccctattgacactgacagaccctgcctggcaggcctgagcacaacagaagcactagaagtccttttccagaaattccttgctagggcctctcactgtggactgagaggatggaggca

SEQ ID NO: 226269 - DNA, 386 bp, Homo sapiens
aagccccacagaccacgtttcgtcagagcaaaccttgccagggcttctctgcctcttacatcagagtgggccattggggtcgtcggacaacagcctgggcgctggtaattgcctgtctctgttgagggacgggtacaggccacagggaaggtccgcgtttcctacactatctggagaatctaaattgctacaatattttaaatatgcctttagttgcaggaaggtgagggaaaggccactaaaacgtgggttccacaagggaaggagccttttttatttggttctgaggccctagaacagcgtctgacacatcatcattgtcaataaaatgtattaaatgaatgttagctgtgaaataacactaagataattaaataccctaattt

SEQ ID NO: 226270 - DNA, 458 bp, Homo sapiens
gaaaggagcttttccttgtcaatacgaaaatctttgagtacaaatcgataaagctagagattcaaagactgcctttataaaactggagaagatgcactctggccataggcggagggggcagcccggggcccctgtcaggaagccaagaggcccgggacatccctggaaggctgccgagggggcagcgccttctctggggacggcttcgtggagagtccgggacgggcgagacagaaaaccgagccctatttgttattagtattttttttttatactctcaaatgccaccggcacattcttttaaaaaaaattgaaaggaaagaaagaaagaaaaagaaaataagagaggaaaaggtcctgagaaatgacggacgcttgaacctcgggcccgggaagaccagcgccctttggcggctaggcctcgggggcgtgcggagggcgggcccccgcgcggccgc

SEQ ID NO: 226271 - DNA, 437 bp, Homo sapiens
aagagtggatagaatgttaaaagtcccaaaggcattgaaatactgctgctaagggaggagagtgtaactacattcccacaagaggttttggaagcctttgtggaaacttagatgctaaactagggagactataagacatcgtcctttcagggaggagagaagcattgaagttcagtgagttgatatgatgaaatataggttagattaatttttccaacatttcatttattgcatggtgcaatgtatggtatgtagttgatgttaaatattttttgtatagatgaattcatttttcattgagactgaatgatctgacaagggtccagaaagtaaactggaagtgaaagagactaggggcatagttctgtggtatttgggaagctttaggagagtttaaactggatatgattaaatatcttaatatataatgacagtgg

SEQ ID NO: 226272 - DNA, 583 bp, Homo sapiens
ttttgtttgaaatctactgttcatagaaagaagccttcagaggagaaagccttttctctcctgtctgcttcctctctattatttttatttttgcaaaatgtttattttcactgtcacctgggatttctttgcctcggttgaatgtattgaaagattatatcctttatttaaagatgtctcattttacccccttgcactttcacttgatcaggttgaacctaaaatgcattttgtattataattttaaacgaattgtaaacataacatgtgctcattttagaaaatttaggaggtggccaggtgcgatggctcacacctgtaatcccagcactttgggagtccaaggcaggtggatcacctgaggttgggagtttgagaccaacctgaccaacatggtgaatccccgtctctactaaaaatacaaaaaaaattagccgggcgtggtggtgcacgcctgtaatcccagctacttgggaggctgaggcagcagaatcacttgaaccagggaggcggaggttgcagtgagctgagattgtgccattgcattccatcctgggcaacaagagttaaacaccatctcaaa

SEQ ID NO: 226273 - DNA, 195 bp, Homo sapiens
gaaaagccttcacagaaaagggattttcagggctggcggtggggggtaggtaggaggaactggggaaggacagccagcaaaagggaacaagatgagcaaagacacacatgtttagaaacccaatgtgtgattgaaaagaccaagaaaccttgaggaggagtgacaggaggtgagaatgtaccagtgtaaggcaca

SEQ ID NO: 226274 - DNA, 281 bp, Homo sapiens
gccctgtgcccacaatcctacatagcaacaaactgtcgagccaggaattggggcgccctttgaaggagcttgggcctccttgtccaccacagccctgactcctgaggttgatttttctgctcactggactgctatttgttttctgtgccccctctatgccccccaccccacccctgccattagaatgcaagctccacgacgcaagggcttcatgtggttcactggagcccgcactgtgcctggcacataataggtgctcaataaatcgctgttgaatgagt

SEQ ID NO: 226275 - DNA, 274 bp, Homo sapiens
catgtcaccagccccatctttagccattttccttttcattgatttttttctcatttctcatgtgggacagtgtcacccttccaccccagggtctttgaatatgccatttccttggctgaaaaataatctttcacccttgtatgaatgcactgttctgtcttgtccttgagatctcagctcaaatgtcacttccccaggggagtcttttctgaagccccaaagcatcaggccccccttatagattcccagggtgctttccgatttgggataccct

SEQ ID NO: 226276 - DNA, 394 bp, Homo sapiens
gtattctttttgcttccatgtgtggtgcagacaagggctggcctcaggctagaagcgatgaaaatgagaaaatcactcccgccattcccttttaccactggtggtttacttgccagtttctgctaacttttgatcattccccagtgacttccggtagttgttcatttttgtattttctctagagtttatagctactatctgtgggaagttgatctaatggaagctaacttgtcccttaccaggagtgaaacccaagcatgtaaattttgtcaaaattagaaagccttatcctatactcatgtcaaggacaagtttccaaagtaattagacaattctaactagaaaaggtttaccctaatgctttctcaaatattcatttttccaaaaattctta

SEQ ID NO: 226277 - DNA, 407 bp, Homo sapiens
cctgccctttcccttgcaagtatcaggtttttaattgcgtgtgctaatatttattagtgcagtatcattgctgtgatgtagtaggggtaagatgttgagcacactgcacactgtgtatggtaaggccaataaatagtagttagcatggtcatttgtctctgtaaacagtaaaacaaatggtagtaatgtatttctactgtacgttagttagagtacatcatagcccctgccctccagtaggtgaggctgacaaatgtatgactacagagcagattataataggcattttaataaaaataccaagtgtctcgaaataaaggagcaagggaggctaatttaactttctcctcgtccccagtcatggtctatttcctattgaagatggaattgagtaagtgttttcaata

SEQ ID NO: 226278 - DNA, 492 bp, Homo sapiens
atgtattagagtataaaatgtttgccatgtatacacctgtatgtgcacatacacacattacacacacacacagaatgcacatttcacacacatatacttattattcaagttgaaactgcactctaatcaatctgagtctattgctgtttcaactcttaaaatcaatatctcctacattagtagatataaacataattcaaatatttaaatatttaagaggagaaaagtaactagaaaaccaatgaaaagtgaggccatcagaaatagaaaatgcctggcacgaacagtctatctaaattctcaatttcacttcaaattagagaatccataatggactagaatataaattacaaacacatacacacatcttcacttaaagttgttttaagttctttgaagttctgacatgtttttagccagggttatttgttcaggttcttccttgttaggattccagactggaaagttggaagtctcaggaaatgcatgttt

SEQ ID NO: 226279 - DNA, 427 bp, Homo sapiens
agattccagactcagaaagagttggaactgtggtgtggttttagagtgcaggaggagtgagaagggattgggaacagatctggacctgacaatgaaaatgcctctgggcacctccctgctctgtttccccaaagactcagtggccttgcttgcttcatatacacagatatttaactctatgtggcaactggacataaagcattctgaggaaaagcaaattaaaactcccagaaatcaaacagaaagtaaaatctttaagaaaaggaccaaaattaacaaaaaatacagaatttaaaactttggtcacaatgaagagatggcgatatgacagaactcttaggttaacaatgtaaaccttcactttcaatttctcatactttttgtctccagctgaacaaaataaaagctcaggaggaagcgcattggg

SEQ ID NO: 226280 - DNA, 527 bp, Homo sapiens
agtctccaaaacccagagattcagttcagtggctccaatctccttagccccaagggaaacaagagcacgtccagctggggtcagagctcacgggctggccctctgccctcctgtggtcaccacggccccgaagctggccgtgctcctcgctcgttcagccagaattctgcagacgcatcccaggcctacgctgctctgccaggacctctgacaccacccaccaggctggccctgtccccatcaggcccaggagtggctgcaggagccgagggcaggctgtcaaggagacgggctccgagaggcagcggctcaccattcagcaaggcgagggcaaaggaacctcagagcctagccaggggcgcctgccatcagtggagcctctgctctggggctgccggtcgggccgtgtgtgctgtgtctctttaaggaccaggcctcttcaaggcaagttccctctgcagtccagtcctgcctctgcccgtcctgcggcagagagtgggggctccccagcgccatctggcggccgc

SEQ ID NO: 226281 - DNA, 500 bp, Homo sapiens
cactttttcccaaatagatttaatcagttacatgggaatacaaaaaatgactgacgacacaccgatattagtgatcaggggaactgactctaacagtgtctcttacatgttacttgtgttttctgtatcttaaagataatgtaggcattgttcctaagtcatgcagaggggttgtgtaagcatggtcatttgcatcattatcctgcacgtctgatacagccaaactccacgccacctggtttgctgtaagtattggattcatttaagatccataacaatgctatttactgaccctcttgtcaactgatgctgtgacactgctgtaaaatgatccctatgtcaccagatgctgccctgaaacttaggaagttagcatgaaggtaatacttcattagaagtttgcaatttatgggtgaattaataatgcaagagaaaaggaatagaacagacatagagagaagacctttgaggtttacatcaaaccccatcaaaagagattt

SEQ ID NO: 226282 - DNA, 525 bp, Homo sapiens
gggagggtcgtgggcccttatgaaagaaggtgggaccagattgtcatcaagacttgcactgtcagtgctagtaatcctagcattttgagaggccaaaacaggagaatcacttacagccaggagtttgggaccagcctgggcaaaatagtgagacttatttctattaaaacaaaaaaaaaaagaaaagcaaaaagacttgcattgttcagtagagcaatagagtagcaaccagacacatgtgggtcatttgaatttatattcaaattaattaaaattatattaaagtaaaaatgtatgtcttcagttacgctcaccacatttcaagcactcaggagcccatgtggctagtgatcatcatcacagaggaatatttccatcctcacagaaagttctgctggaaagcattggttcaggccaaacaaagaaaccaaacaatccttcatctaaaatttatgagcatgttaagacctcatttaaaccattatatattactcagagtttcaaaaagtcaccaatgcacaaaaa

SEQ ID NO: 226283 - DNA, 343 bp, Homo sapiens
agaatttaggatatgtcagtttctgtgcttctatcccagattttaaaacataatttcctaggcaaatttttagttttgtaagtatttgcaaaatatataattagtctagacatgtgataaacttgttgaaaataaaggcctttctgtcataaaagtcagaagaaggtagtacatgacatccttgctttgttcttctgtttaattttaattattgatgatttttttcataaaaattatatttgtcaaaaacattataagtaatcaattcaaacaaaaagaactttgcgtttttaaactgtggctttgttcttaacctgtttttggaacataaaatagttttgaa

SEQ ID NO: 226284 - DNA, 248 bp, Homo sapiens
gaaagaaagaaattacatccaaataggaagagaagaagtcaaactatctgtctttggtgacaatatgattctatacatagaaaaccctaaagactccaccaaaggactcctggaactgataaatgacttcagtaaagtttcaggatacaaaatcaatgtacaaaaatctgtggcatttctttacatgaataatgttcaagctgagaaccaaatcaagaatgcgatcctatttacagtagccacagaaa

SEQ ID NO: 226285 - DNA, 868 bp, Homo sapiens
ttcaaaacaacactttattaatctccacttagattcagctctttccctccctctacctgttctttcacttaatagtcatattttgggagtctttgtgagggaaaatgcctcttctttaacataatttcaaagccatactagcccagggacagagcaagtgagaaggtggtatacaactgctctgaggctaaagagatggtacttttgaatcatagggctcttcgtagaattcagagtgtgaccttcatcctgaagcatctgcagctgtctctttaattcagattggctgtgaaatttccgaaggaacttacatggtgaatgcagtagtacaagggggtgatggcctttgacttctctcttccaaatccagataccagttacctcccttcactttcatcaccttaccagcgttagtgctttatgtaggttggagattgcagctgcaatcattcttcagctttctttgtacagtttgagtaggctgagttcattagaagagctctcccagatgggctttcatttcaaactcatcagctcttgcttttattcccatttttctaaagttctttttgatcatccggctccaactcccatttacgacctgattgttgatctgttcaagagaaagagacaggcctccagcaaaagggaggaaaaaaaaatgctttggtgagagaaagaagaaaaacacacacacagggtgttacacaaggatgaagtcctcctcacaccattgtcctttggaagacaaagctgaagaaaataattctggaaatagaaaaaaataggaggtgaggtgggggaaagtgtgtgatggaaaagcaaacatggaagtcataaaaaaattcttatgattataattctccaa

SEQ ID NO: 226286 - DNA, 484 bp, Homo sapiens
gggctttattcacacaggggaatggcaagagtgaaaccaaccatggtggtggggcattttgcggagtatttggagtgataaaataaactggaggaaaatatggaaaataaattaaacagaaaacaacaacaggaacaacaacaaaataaaacccagcaacttgaagaagagatacatacagtttacatttctggatttctctgctctcttctatgggctgtgtcctcaccgatgctggctaacatttactgaccaccaaataaggacccgttgacaacatgtcaattgcccaatggcaaggaaccaactctctgagatgatgcatataacttgggggagcagcactcgtgggttgaaagttacgttctgatctgggagggttatcatcaggaccttgtcttgactcacaagagaaaaagccatccttccttcctttcctgagctctttaaaattaaccagtgagttacctgtgggaactttcct

SEQ ID NO: 226287 - DNA, 308 bp, Homo sapiens
taccaccacacagatcaaaagttaagccctacaaacaagttacaaagaatgtcaaaatgtggaagagaaggaaaagattagtttcagctatgaaaatcaaaaagaatttatacagcaggagcagtaagacagaggacaggttttccccacaacgcacacgcacatacatacgcaccatagtatgttttattccttattacaattaggggagaaaagacaaaagtagaaaatgaaaagcatttggactggtgcgatcaagaactaatcctttttttaaaaaaagaaacaatcattaacagcttagctcc

SEQ ID NO: 226288 - DNA, 289 bp, Homo sapiens
cccataaagttagaagccccaatcactcctgggcaagactgactctcttgagtaagcctgcacttcccttccttgagcatgtatttttcactttgcaataaacctctgtactttttctgacttgtccttggattctttctggcagcagtggcaaaggcctggacactggctgggatcaacatcctaatggcatttgggtacctcccctagcccaccggtatcatttcttggagtactgtattttgtgaggctcctgtgcatatgcaggtaataaatttgtatgccttta

SEQ ID NO: 226289 - DNA, 180 bp, Homo sapiens
tttcacccctacaaagggataccatggaatttctcaaacagtgaatacattggctccaggaaaaagggtcgacctcttaaatagaaatagagaactagagaacaataatgaggggagtaccttgcagtcagtaataagaagctgtctttactatcaaatcagacctccagtgggagagtt

SEQ ID NO: 226290 - DNA, 676 bp, Homo sapiens
aagataataagaacaatgcatctgacaaagctgttagatcgtgaggtcaagaacaagtcttctctatttctatatatccaaggactatgcttggatatatagaacactcaattgttgatgaaaaacagaatcagtaagtctcaagtaatactttcttctgaaagtaatattttaagatacctgaaacagtttgtttttaacagaaaatagagctccacatttccaaaagaaaaaaaaatgtttttggtctgcagataaacttcctacctctcgatctttgagtttcatggcgagtaccaactgatgcctgtggttagtgagagcctcccggtaatttcctttggagaagaatgcagagcccagattcccatgagctcggcattctcctgtctggtcacctggattgaattgagaaaaaaaaaaagaaaaaatttctctaagttataatgttatttataacatataatggtcatcttaatttaagagccacagatttattagctaagatttcacttatcttctattagaaaagtatttgtttcttccacaagaccctatgtggggagttactgccctagaatttaaatctctggataacaactgcttttattgtcataacatacaactgcagacagggacttaggtgtcttagaaacaaaaggttaaagaccttaac

SEQ ID NO: 226291 - DNA, 469 bp, Homo sapiens
  misc_feature (29)..(29): n is a, c, g, or t
tgctgcaggtgattcctagaggacccctnaagaggtggtgtctcccagccagtgtccatctggttctccaaaaggccaagaggtcatggtcaggcattcacggagttctaactgactctctggaacagtgtggtgctgcctggggtcagggctattctgtgacccctttgttcctcatccacaacaaaataaatgctgaacccgaaaatcagcgtttggaaatttttatagcaattaagtattgctgcaatattcgagcatgtgatcagagtagtcgtctcatcaaatggggtatagaccatggaggcactatcaaactgttgtgggctgagcacggtggctcacgcctgtattcccagttacttgggaggctgaggcaggagaattgcttgaacctgggaggcggaggttgtaatgagccgaaattgcaccactgcactccagcctgggcgacaaagtgagactcctc

SEQ ID NO: 226292 - DNA, 499 bp, Homo sapiens
gcaatgacctaaaattagaaaaatttctttaatatatattaggaccactcctaaactgcaaaaagtgccttgttgtgtgtacaagtataaccacaaccaaaaaatcgaatgaattcaacaaaatgattgtgcctttacaatcagtttatgtcaaccagatgaccctttggttcacttttatttatgttttaattataaaatgtgtccactgttcatatttaaatacagaaatgtataaagataaaaagtgaaagtgttttctctctgctaatcttaatctgtttaatgtcgctgtattagtccatcttcacactgctataaagaactacttgcgactgggtaattataaagaaaaagggtttaattgactcacagttctgtatggctggggagtcctcaggaaaattacaatcatgggagaagtctaacgggaaacaaggcacgtcttacatggtggtaggatagagagagcatgcaggggaaactgccacttttaaac

SEQ ID NO: 226293 - DNA, 499 bp, Homo sapiens
ccatcccatcacacacacacacacacacacacacacacacactatagacactatatttaaaattggcaggggtgatattatgaactcctgtaaaaccaaattgatttgtgtttgtcaggaatgtgtgggtctgtgtcctggaatgctatatatttccactgtgcactgcccattgaccatttctactaggatgccttgaaggcacctcagactcaacaagttcaatttgaaattcattatgtactccccagttgttcacgctaggagccttcaggccacccgtgacttttctctctccttgagtctctccttagcttcccatggatcagtctctgtaccatgttgattctaccttctgagtatcctttctgctctccctcatctgcacttctgttaccactgcctgagttttggttatgggcttcttagtcttttagtcttttctctcccccaacccagccatcgccaccagcaagaactatctttctaaagcaccaat

SEQ ID NO: 226294 - DNA, 440 bp, Homo sapiens
gaggttgcagtgagccaaggtcacgccgctgcactctagcctgggtaacagagtgagaccccgtctcaaaaaaaaaaaaaaaagttaaatcacttgatatgcattctgaaatatttaaaggaaagtatatcaatgactgcaatgtactttgaaatgcacgatcaggctgggtgcagtggctcacacctgtaatcccagcactttgggaggccagggcgggagtttgagaccagtctggccaacatggtgaaaccccatctctattaaaaatacaaaaattacccgggtgtgatggtgatctgtagtgatctggtgcctgtgatcccagctacttgggaggctgaggcaggagaatctcttgaaccccggaggcagagatctcagcgagcagagatcgcaccattgcactccagtctggcgacagagtgagactctgtcaa

SEQ ID NO: 226295 - DNA, 386 bp, Homo sapiens
gtgaactggttcatcgcaagaggcactttcagctctggatagaggacagctctttgctgctgcaacctgatgtagtagcaggggcatttgacaaagtgggttaagatcccatttgggctagatgtcctatccaatgccaaaattctcaggtcttttctcaaacaggggatccatcactttcttggcctcctgcttctctgcaacaacaggggccagggccaccttcttccccttggccttctttccttttggcatcttgggtggctggaggagtgaaacttaacatttatgaagttgaataatctaaaggaatttcttcagggttaacataaagaagccaaataaaaatattaaatttctccacagggttaaaattttacttatgc

SEQ ID NO: 226296 - DNA, 467 bp, Homo sapiens
tagactgaatttagggcccaacagttagacaattggaacttgataataacgttatctcagcagattgcgtaagtcagaaatgttctccctgtcactgctttctttttccttccagcaagaagtggacattaaggagaaagtgaaggtggcaagttatgagtgatctgtttaagacacagtttagttatggcaatgataacaactcacatttattaggggcttattatgtatcaggctgagcaaagtacgtaagattcttgatctcatttaattctcacagtgtagaggctaatgagtggtggaggtgagaggaggacgcagcctcccttggctccagggcacacactcttagctgtaacactctattgcctccataaagtatgcttaattgtaatacatgttgatgagatatgtgataaacataatttatgtaaaatttaagaacaagatctattgtataaattata

SEQ ID NO: 226297 - DNA, 521 bp, Homo sapiens
cattttattatctctttcctgttcctttctttgaatttattttgttattcatttgtaccttctttagatggatttgctgttagcctgttaatttggggactttctttgaagctacagcctatggttcttgttctgatagttggcttgagcaggaagaggcagtaatgatggggtgatgtgggccatatggctggttaggtgtcgattcttgacaagatcctggtttttgttgtgagtggtgggttaatgggtgctgaccaggtgaagagcagcatggagcagtggtagcagcgtcctgtgtgctggagtggactgctcagaatcctcagcacacttgaggtccacagaagaaagaaaaagaaacataaactaaatagtaagaaaaggtgcatattgcagagtaaaagacttcccatctccgtttctgctctcaatcttacttaaacatgtcacactattaataatttcttataattcattccaaaaagatgtttgtgcacataccagcatctttctgttct

SEQ ID NO: 226298 - DNA, 315 bp, Homo sapiens
ctgcccccatgtgacaggttggggaactgaggccctgactactgtgccacctggcccctgtggcccggcccctccccagtgcacttgccctcccacaggccttgagcgtgagcccatgggaggcgctggcactgagtgctgcgccgtggccttcgcgagcccggctggattctctttccctttaaagtgcctttaggctgggcgcagtggctcacgcctataatcccagcactttgggaggccgaggcaggcagatcacctgaggtcaggagttcaaaaccagcctggccaacatggcaaaaaccggtctttact

SEQ ID NO: 226299 - DNA, 324 bp, Homo sapiens
cctacagctatctgatctttgacaaagccaacaaaaataagcgatggggaatggacttcctattcaataaatggtgttgggatagctggctaaccatatgcagaagaatgaatctggacccctacctttcaccagatacaaaaattaactcaaattggattaaatatttaaatataagacctcaaactataagaatcttagaaaataccattctggacatcagccttcggaaagaattcatggctaagttctcaaaagcaatcacaatgaaaacaaaaattgagaagtggggcctaatgaaactcaagagcttctgcatgcaag

SEQ ID NO: 226300 - DNA, 401 bp, Homo sapiens
ccttgcaaagcttatgacttatgactgtatggaacatggtttacctctggtgaaacagaccgttttgatgaaaatagaggaggatgtaataaacttttgaagaaaatagaggacttgccctggcctacttgcctcttctgattgccttgcaatgcatttattctccactttctctgcaacgtttagttctttccttgcagagtgttggagacaaggtaaacgtgatcagctgcctggtcttgggtaaggtggtattttctctctgttaaatttgtacagattcttacgtttgactgaaacactgcccaatgcaaaaagaaagactggggcaaagagatgaaatattagatataattactttcataatcttatatgtaaataaatctagttgccaaacctca

SEQ ID NO: 226301 - DNA, 332 bp, Homo sapiens
tgttgaactcttgatcagcttgaaggatgaaatttatacatttgaacttcttagatttgggagcagtggagtctattgctgcatttttgtcaacctccagcttgggatgggccagctcttagtgaaaggtatctggcccatttctctcttaggtgggaaagttctaatcatctagaatgattcaaagcttgtgagagactatagctgatcctgttggttggcaagagagccattctctaccctcttctccattgtcccctaggtctcagggtctcagcatctaaactaggtaggcttgtcaaggaatttcctccggaataaaaacagtctca

SEQ ID NO: 226302 - DNA, 164 bp, Homo sapiens
aaaatactgtaaagtgggttgatggtcagtgccagaatgtaagctccatgagcatagagacttgtctattttgttcactgccatattcccagcatattaaatgaacatctgttgtacttagcattcattcattcaacagatgttcatttaatatgctgggcggc

SEQ ID NO: 226303 - DNA, 719 bp, Homo sapiens
ccagttgttttaggatttattcttcaagggagggtttgcacttaaagggacattatctcttccaactaataccaatgaacaagagtaatgaaacaaagaggcataatttctaccaccagaaaactcttacatatgtagtttttaaaatgtacactatgcagtaaaagatacgaaatccaatattagactaggtatgtaaaatcagaaatatttttctccagagacccagagaacttgaggtagtcattgtcctcaaagccctttgcacatcaagatatgcaaggtccaactgcttcacttggaattcaagtcttccaaaatatagtcccagctttatgtgctactaaagatctgcattcaacctttcaaggtccttaacactgatatgattatgatgtctcacctctatcctccataaatataaaacaggatcacaagcataggcaacaaaaacaacactagacaaatgggactatgttgaactaaatagcttctgcacagcatctacacacaatcaacagtgtgaagagacagcctggtgaattggagaaaatatttgcaaactattaatgtgacaaaggactaatatccagaatgtacaaggaactcaaacaacccaacagttgaaaaaaaacccatataatcccattaaaaagtgagcaaaggacatgaatagacatttctcaaaagaagacatacaaatggccaacaggtacatg

SEQ ID NO: 226304 - DNA, 453 bp, Homo sapiens
gaagcccagcattttgtttttctccacatattttaatcaatatttaccaagccataacaatctggctttcactgtcaccctagggttgagtttcatgagtaactaccttttccactggctgcagaaataatgactccatgtatgattggcagaaggtcattcatttgagcataggaaaacaagcagtttcaagaaaagagctggcatctctgcatgagtgaatcagtgcacatctaaaatgcagttactgaaattatagaagcctctcctcggccaattggcctcctttggaagatatggcctcacaccattccatgtgcatgtgaaatgtctagacgtgattatagagttttcttgagagctgatgcatccaaggaacatttaaagtaagaagcaaagtaatgaaaaacgtttctcagaaaataaaaattgttaatatggtcttaccacatt

SEQ ID NO: 226305 - DNA, 190 bp, Homo sapiens
aatcaggaaaataagcaaaatgaactcaataaagagatagaaatcatacaaaagaaccagacagaaattctagagctaaagaactcaatgattgaactggaaaattccatattgcatttcaatagcaaaatagatcaggcaaaagaaagaatcagtaaacttgaacacagatcatttgaaattacccaga

SEQ ID NO: 226306 - DNA, 305 bp, Homo sapiens
aaaagaacagcacccccaccccctgcaaaaaaaagagacgaaaaaggggtggcccatgaggtaggagtagaactaggagagtgtgatgtccagaaagctacatttaagaagtgtatcaagaatgagaggatgggcaacataatgagacctcatctctacaaaaaataaaaaataaattagcttggctgaggtgagaggatcgcttgagccctggaggtcaagactgcactgagccaagataagtgccactgcactatagcctgggcacagagtaagactctgtctcaaaaaaaagtagaaaaaaa

SEQ ID NO: 226307 - DNA, 1298 bp, Homo sapiens
ggagacactgacaacaggcttaactgggaagctgtgccccaaaaggagcttcaaagaagagccccctccacatcctcaggagaaggactcttggttggaaaaggcctggaagtgaccagtatctatggtgcttcgtctctttctcaggcccataaggacagaatttacatttgaaaagaagaacaacacagaaacttttgcaaagggctgccaatactttttctctgaggaacgtgcaatgtgatgaacaaaatttttttcccagaaagccagaggctgggcaaaggcagaggggcctggaggctgctcccaggttgggatttccagttccttgatgaagagaagttacgagactgggcatccttgctttgttcctaaacaggaggtgaaaacattcagtcttctgccattaggtctgccttattattttcgtcagtgttgtgcaggagaatccacttagaagcctgggtaaaattgtattacatgatcttgggtttggtccctgagaaagagccagattaacgctggcaggaaagaaagcaggagtgcccttcaaacacgctgctgaagggcaactggaggttccggggaaatgtgaagaaagaaacgcaaacacccctaggaaccagattgcatcttggaactgaggaggttctggaagctgtacacccaaggaagacattctgtgccggagagagagtgggagagatgtgactgctgctggctgggtgaggacagggcccagaggacagcatcactggcaccacacccctgcatttgggtcctctgcacttcagctcccagcatctgggcctcctccctgctgcctcccctcctcatcaatctgtctccactcaagaggctgatgggcaggtctccctgcttcttcaaatctttcaaagggaaacttcacaaagacaggagccctgacccatccaccttggcctcaccccaccccagcacggaagccaggcggccagtggaggccggtagtgctgaatggacatggggctggatgaaaagacttccgcctgcctctctcagccccggaatcgccatgagctgctattccggagattctatgctacagaagtacaaggtgaagaatgcataccgattacattggcaagggagagaagagcctggtgctagcacttttgcttctttggtctttcaataatgtctttccccttgattatacatgatatattcctattttggaaacttcgaaaactataaaaaagtcaaaagaataatattaccactcagaaataaagatcatcaagttttggtgtaaa

SEQ ID NO: 226308 - DNA, 552 bp, Homo sapiens
aactagtcttttagcattttagcactcaatttttttgtaactacccccttgataaaacacagagtaagtcagctctaaatcagttcattcagttcctagttattaaaaataatgtttttttcaaatggcttttcttatcaaattttaaaaatagaatttgaggattaatggtggatttttgtcacccatgtgatctgtgcctccatgagcacgcatcattgcaagtttactggatatcagcactactctcttcttaaagttttctttgtcccctagtacaaccatgacacatggccacaagcacttgagcaaagatgtggcatcacccaaatagatattgccaagattttctatgtcttgtgagcaaacgacaaacacaaatcacgttggtaaaggagggttcattcaacattcttatatttagcacatggagcaagggtatgtcactgcgcatagcagatctcagaacaacacacatcaaatggtgacgcatgaggcttggacacaggacctctaattttgcaacacaaataaaggccacttgaactgcaa

SEQ ID NO: 226309 - DNA, 457 bp, Homo sapiens
tgtgaggtccccagcaggccccagacaggaacgtcaccttccaagtgatgttaagtactgactagtccaatactgactacaaaagaagtttatttttatttttgaaaagtgtccaggtgccaaagattcacagacttttctttccgttttttttttctttcttttcttttctttctttctctcttttttttttaagagacagggtctcattatgctgcccgggctggtctcaaactcctgggctcaagcaatcctcctacttcagcttcctaaagtggtaggattgcagttttgagccaccaagcccagccagacttttttttcttcctcttcttatttttttggagacaaggtcttcctttgttgccaaggctgaagtgcagtgagctgagatcgtgccattgcactccagtctgggcaacagaactagactcttttttaacaaaaacaacaacaa

SEQ ID NO: 226310 - DNA, 485 bp, Homo sapiens
agggcctggtatggagtcactgctcgacaaagggagcttttcttaaggtgaccgtcttgagctaggccttgagggacagggatgtttgaaaagagggagcgatctttatggctggagaatgcagcattctgattgtacctgggattttattatgactgagtgacaacacagaaaggtcagtgccattgaaagaagttttaggccaggctcggtggctcacgcctgtaatcccagcactttgggagtccgagggcaggcagatcacctgaggtcaggagtttgagaccagcctggccaacatggtgaaaccccgtctctactaaaaatacaaaaattagctgggcatggtggcaggcgcctgtaatcccagctactcgggaggctgaggaaggagaatggcatgaacccgggaggcggagcttgcagtgagccgagatcgcgccattgcactccagcctgggcgacagagccagactccgtctaaa

SEQ ID NO: 226311 - DNA, 737 bp, Homo sapiens
tcaagtgattcccatgcctcaacttcttgagtagctggattacaggtgtgcaccactacacccagctaatttttgtatttttagtagagacggggtttcatcatgttggccaggctgatctcaaactcctgacctcaaatgattcaccagcctcggtctcccaaagtgctgggattacaggtgtgaatcaccatgccagggctgtatttttgtaatttaaaaataaacaattactaaaataggttattcctattctctgatagattttttaccttctttatttaaaaattaatgtaaacccaggctatgaaagtatagggagtaatagaatcacttcctatgcaactgtcatccagtgtgcaaaataaatttgaggtcccttccttctcttttcttccttgacatgtctgtcatttccatgcatgtttttatacctttaccacatatcatggtatagttttgtcttctgttaactttataataaatgatacatgctcttctgcaactttttttgttctatattttgagatttatgtacgttgatatatgtaatttcagttaattcattttgctgcacttcatcagttctagcacatttcctcctaacattttaacatctttgaaattgggatgcatcttataaatatataatttgggatatgagccacacttgtactgcatgctttggattttatgactaagccacaatatccgccttttctgacaattagattatt

SEQ ID NO: 226312 - DNA, 741 bp, Homo sapiens
tcaagtgattcccatgcctcaacttcttgagtagctggattacaggtgtgcaccactacacccagctaatttttgtatttttagtagagacggggtttcatcatgttggccaggctgatctcaaactcctgacctcaaatgattcaccagcctcggtctcccaaagtgctgggattacaggtgtgaatcaccatgccagggctgtatttttgtaatttaaaaataaacaattactaaaataggttattcctattctctgatagattttttaccttctttatttaaaaattaatgtaaacccaggctatgaaagtatagggagtaatagaatcacttcctatgcaactgtcatccagtgtgcaaaataaatttgaggtcccttccttctcttttcttccttgacatgtctgtcatttccatgcatgtttttatacctttaccacatatttctgcaactttttttgttctatattttgagatttatgtacgttgatatatgtaatttcagttaattcattttgctgcacttcatcagttctagcacatttcctcctaacattttaacatctttgaaattgggatgcatcttaaaatcgatgatgtcttgacctaacaattggtatattttctttttttgtggtacataaatatataatttgggatatgagccacacttgtactgcatgctttggattttatgactaagccacaatatccgccttttctgacaattagattatt

SEQ ID NO: 226313 - DNA, 737 bp, Homo sapiens
tcaagtgattcccatgcctcaacttcttgagtagctggattacaggtgtgcaccactacacccagctaatttttgtatttttagtagagacggggtttcatcatgttggccaggctgatctcaaactcctgacctcaaatgattcaccagcctcggtctcccaaagtgctgggattacaggtgtgaatcaccatgccagggctgtatttttgtaatttaaaaataaacaattactaaaataggttattcctattctctgatagattttttaccttctttatttaaaaattaatgtaaacccaggctatgaaagtatagggagtaatagaatcacttcctatgcaactgtcatccagtgtgctccatgcatgtttttatacctttaccacatatcatggtatagttttgtcttctgttaactttataataaatgatacatgctcttctgcaactttttttgttctatattttgagatttatgtacgttgatatatgtaatttcagttaattcattttgctgcacttcatcagttctagcacatttcctcctaacattttaacatctttgaaattgggatgcatcttaaaatcgatgatgtcttgacctaacaattggtatattttctttttttgtggtacataaatatataatttgggatatgagccacacttgtactgcatgctttggattttatgactaagccacaatatccgccttttctgacaattagattatt

SEQ ID NO: 226314 - DNA, 392 bp, Homo sapiens
aatggaaacttttcttactaagtggaattcaaaatggttaactaagtatgagagaggggacatcaaaagtaaggaagagaaatcccattataaaaagtgtgcacaggccaggcacaatgattcacacctgtaatcccagcactttgggaggccaagacgggaggattgcttgaggctaggagttcaagaccagcctgggcaacatgttgaaaccctaactctacaaaaaatacaaaaattagctgggcatggtggtgcacgcctatggtcccagccactcaggagtctgaggtggaagaatcacctgtgcctgagaagtcaagactgcagtaagccatgatcacaccactccaccactccagtctgggtgacaaagtgagaccctgtctcca

SEQ ID NO: 226315 - DNA, 327 bp, Homo sapiens
tttgggaggccaaggtgggaggatcacttgatcccaggagttcgatacctgcctagacaacacactgagatcccgcctctattttgaaaaaattttaaaattatcctcgtgtggtggcatacacctatagtcccagctgtttgagaggctgaggcatgagggtcacttgagccaggaggctgaggctgcagtgggctatgatcgtgccactgcactccagcctgggtgacagagtgagactctatctctacaaaaaagtgaaaaaaagaaagaaaaccgcgcgcaggtgtgtctggatagtgtgaagcagtgggaccctgtctctac

SEQ ID NO: 226316 - DNA, 736 bp, Homo sapiens
  misc_feature (6)..(6): n is a, c, g, or t
gccagngagctgcgcggtcgctgggagggagtccagggcgcagttccgggcgcgtctgagcggttctcgaggcgttctcgcctcggtctctggcgagtgcacggatcaaaagcagcatggatctgcctgtggatgagtggaaatcatatctgcttcaaaagtgggcttcactcccgacgtctgttcaggtcacaatttctacagcagagaccttgagggatatctttcttcactcctcttcacttcttcaacctgaggatgagctgtttctaaaaagactttctaaaggttacttggtgggaaaggactcggacgctcctcttttctacagagaagaaggaaacaaaaaatttcaggagaaagattacacaggagctgcagtgctgtactctaagggagtgtcacattcaaggcctaacactgaggacatgtcactgtgtcatgctaaccgctcggcagccctcttccacctgggtcagtatgaggtgagtatcaggatacctggtatgagtggacaggatccggagggcttcttactggaggactagaccttcatctctgcttcttccatagaacactaaaatcatgtcatgctgctattggttgaattggaagcacattaatatctacctaaagtcggaccgggcgctcattgcctgtaatctcagcactttgggaggtcaaggcgggcggatcacctgaggtcaagagttcaagaccagcgtggccgacacag

SEQ ID NO: 226317 - DNA, 3720 bp, Homo sapiens
  misc_feature (6)..(6): n is a, c, g, or t
  misc_feature (1261)..(1261): n is a, c, g, or t
gccagngagctgcgcggtcgctgggagggagtccagggcgcagttccgggcgcgtctgagcggttctcgaggcgttctcgcctcggtctctggcgagtgcacggatcaaaagcagcatggatctgcctgtggatgagtggaaatcatatctgcttcaaaagtgggcttcactcccgacgtctgttcaggtcacaatttctacagcagagaccttgagggatatctttcttcactcctcttcacttcttcaacctgaggatgagctgtttctaaaaagactttctaaaggttacttggtgggaaaggactcggacgctcctcttttctacagagaagaaggaaacaaaaaatttcaggagaaagattacacaggagctgcagtgctgtactctaagggagtgtcacattcaaggcctaacactgaggacatgtcactgtgtcatgctaaccgctcggcagccctcttccacctgggtcagtatgagacgtgtcttaaagacattaacagagcacagacacatgggtatccagaaaggttgcaacccaagattatgttacgtaaagcagaatgtctggtggccctggggagactgcaggaggcaagccagaccatcagtgatcttgaaaggaacttcacagccacaccagccctagcagatgtcctccctcagactctgcagagaaacctccatcgtctgaaaatgaagatgcaagaaaaggacagtctcacagaaagcttcccagcagctctggccaaaacccttgaggatgcagcgctgagggaggagaatgaacaactttccaatgcctcatcatccatcggcttatgcgtagatcctttaaaaggtcgctgtctcgttgccacaaaagatattctcccaggagagctcctggtgcaggaggatgcttttgtgagtgttctcaacccaggagaactgccaccaccgcatcacggcctagacagcaaatgggacaccagagtcaccaatggggacctctattgtcaccgatgtttgaagcacactttggccacagttccgtgtgacggatgcagttatgccaagtattgcagccaggagtgtttgcagcaggcctgggagctctaccacaggacagaatgtcctctgggagggctgcttctcacactgggtgtcttttgccacattgccctgaggttgactcttttggtgggatttgaggatgttcgcaaaatcataacgaagctttgtgataagattagtaacaaggacatctgtttacntgaaagcaacaatcaggtcaagacacttaattatggcctaggggagagtgagaaaaatggcaacatcgttgagaccccaattcctggatgcgatattaatgggaagtatgaaaataattataatgctgtcttcaaccttttgccccacactgaaaaccatagcccagagcacaaattcctctgtgctctctgtgtttctgcactgtgcagacagctagaagcagccagtttacaggccatcccaactgagaggattgtgaactcctctcagcttaaagcagcagtgacacctgaattgtgtcctgacgtgactatttggggagtggcgatgctgagacacatgttacagcttcagtgtaacgctcaggcgatgaccaccatacaacacacaggacctaaagggagcatcgttaccgacagcaggcaggtgcgccttgccacaggcatcttccctgttatcagcctcctgaaccactcctgtagccccaacaccagcgtgtccttcattagcactgtcgccaccatccgggcgtcacagtggattagaaaggggcaagagattctccactgctatgggcctcacaagagccggatgggggttgccgaaaggcagcagaagctgaggtctcagtatttctttgactgcgcctgtccagcttgtcaaactgaggcacacaggatggctgcagggcccaggtgggaagcattctgttgcaacagttgcggagcgcccatgcagggagatgacgtgctgcgctgtggcagcagatcttgtgcagaatccgccgtcagcagggaccacctggtctctcggttacaggacctacagcagcaggtcagagtggcccagaagcttctcagagatggtgaactagagcgagctgttcagcggctgtcggggtgccagcgtgacgccgagagcttcctgtgggcagagcacgccgtggtgggagagatcgcggatggcctggcccgggcctgtgctgccttaggagactggcaaaagtcagccacccatctacagaggagtctctgcgtggtggaggttcgccacgggccgtccagtgttgaaatgggccatgagctcttcaaattggcccagatctttttcaacgggtgagtccctttcccacttcacagggcacacactgttcctttcctaggctcttctgggtattactttttttctatggtgtttttaaaagcatgttgaaacttctttatttcctctttaggagagatctttgccttctgttttgctaacaaacataacgctttagaatttcctcctgggaggcggagcttgcagtgagccaagatcgcgccactgcactgtagcctgggcgacagagcgagactccatctcaaaaaaaaaaaaaaaaagaatttcctcctgggagatatggggaaagcttttagatctcaagtgagtttcccagagagaacttggccaggcagccccacccacactccagtatagctctccttctggttgttctctggttcgtcacagcccctttggctgtctcattcccagcactctcagctccaggctctctgccttctccctactctgcatcctcttccttttaaagcatttgcttgaaccagggctgattttacccccagacaacatgtggcattgcctggagacttttttttttttttttttgagaaggggtcttgctgtcttgcccaggctggagtacagtggctcggtcacagctcactgcttcctgcaactcctgggctcaagcgatctctggagatattttggattgtcatgacttggaagggggttgctgctggcatctattcgaaagaggccagaggtgctgctaagcatcctcccgggtacaagacagtgccccccccaccaaccccagcaaagaaggagccagcaacagtgtcaatagtgtcagggtcgagaaaccctgcttttttgctgctgttgtttgttttttgttttaaatcccctgttctactttgaaggttaaaaggaaagaacagcacgctgatgagctgatgccaaatccacttttgctactgagaccatttagggcccaatttcaggatttccgggtggaacctccaaccctggtaaagctgcccttggtgtatgtggctatgagaaagtgcttaaagcttcaacctaaggctgtgctgagtgggcctggtacccaagacacagagacattctgtttggtcagagagagagaaaagggctgcagagttaggtcagaggtcagccctaagatggtcaccctaaaatgaaaactgctatgtaaacctgtggtaaataccagatgaaaactttgaggccgggtgtggtagctcacgcctgtaatccagctgcccaggaggttgaggcaggagaatcacttgaacccgggaggcggaggttgcagtgagccgaggtcgcacaaatacctgggcgacaagagtgaaactcttgtctc

SEQ ID NO: 226318 - DNA, 3727 bp, Homo sapiens
  misc_feature (1268)..(1268): n is a, c, g, or t
agggtgttggaatcacagctgggaaatcagggacgccgtcccggaggaggtgccatttgagccgagtcgaagaacgtgtgggaattttccaggtggactccataagccaggatcaaaagcagcatggatctgcctgtggatgagtggaaatcatatctgcttcaaaagtgggcttcactcccgacgtctgttcaggtcacaatttctacagcagagaccttgagggatatctttcttcactcctcttcacttcttcaacctgaggatgagctgtttctaaaaagactttctaaaggttacttggtgggaaaggactcggacgctcctcttttctacagagaagaaggaaacaaaaaatttcaggagaaagattacacaggagctgcagtgctgtactctaagggagtgtcacattcaaggcctaacactgaggacatgtcactgtgtcatgctaaccgctcggcagccctcttccacctgggtcagtatgagacgtgtcttaaagacattaacagagcacagacacatgggtatccagaaaggttgcaacccaagattatgttacgtaaagcagaatgtctggtggccctggggagactgcaggaggcaagccagaccatcagtgatcttgaaaggaacttcacagccacaccagccctagcagatgtcctccctcagactctgcagagaaacctccatcgtctgaaaatgaagatgcaagaaaaggacagtctcacagaaagcttcccagcagctctggccaaaacccttgaggatgcagcgctgagggaggagaatgaacaactttccaatgcctcatcatccatcggcttatgcgtagatcctttaaaaggtcgctgtctcgttgccacaaaagatattctcccaggagagctcctggtgcaggaggatgcttttgtgagtgttctcaacccaggagaactgccaccaccgcatcacggcctagacagcaaatgggacaccagagtcaccaatggggacctctattgtcaccgatgtttgaagcacactttggccacagttccgtgtgacggatgcagttatgccaagtattgcagccaggagtgtttgcagcaggcctgggagctctaccacaggacagaatgtcctctgggagggctgcttctcacactgggtgtcttttgccacattgccctgaggttgactcttttggtgggatttgaggatgttcgcaaaatcataacgaagctttgtgataagattagtaacaaggacatctgtttacntgaaagcaacaatcaggtcaagacacttaattatggcctaggggagagtgagaaaaatggcaacatcgttgagaccccaattcctggatgcgatattaatgggaagtatgaaaataattataatgctgtcttcaaccttttgccccacactgaaaaccatagcccagagcacaaattcctctgtgctctctgtgtttctgcactgtgcagacagctagaagcagccagtttacaggccatcccaactgagaggattgtgaactcctctcagcttaaagcagcagtgacacctgaattgtgtcctgacgtgactatttggggagtggcgatgctgagacacatgttacagcttcagtgtaacgctcaggcgatgaccaccatacaacacacaggacctaaagggagcatcgttaccgacagcaggcaggtgcgccttgccacaggcatcttccctgttatcagcctcctgaaccactcctgtagccccaacaccagcgtgtccttcattagcactgtcgccaccatccgggcgtcacagtggattagaaaggggcaagagattctccactgctatgggcctcacaagagccggatgggggttgccgaaaggcagcagaagctgaggtctcagtatttctttgactgcgcctgtccagcttgtcaaactgaggcacacaggatggctgcagggcccaggtgggaagcattctgttgcaacagttgcggagcgcccatgcagggagatgacgtgctgcgctgtggcagcagatcttgtgcagaatccgccgtcagcagggaccacctggtctctcggttacaggacctacagcagcaggtcagagtggcccagaagcttctcagagatggtgaactagagcgagctgttcagcggctgtcggggtgccagcgtgacgccgagagcttcctgtgggcagagcacgccgtggtgggagagatcgcggatggcctggcccgggcctgtgctgccttaggagactggcaaaagtcagccacccatctacagaggagtctctgcgtggtggaggttcgccacgggccgtccagtgttgaaatgggccatgagctcttcaaattggcccagatctttttcaacgggtgagtccctttcccacttcacagggcacacactgttcctttcctaggctcttctgggtattactttttttctatggtgtttttaaaagcatgttgaaacttctttatttcctctttaggagagatctttgccttctgttttgctaacaaacataacgctttagaatttcctcctgggaggcggagcttgcagtgagccaagatcgcgccactgcactgtagcctgggcgacagagcgagactccatctcaaaaaaaaaaaaaaaaagaatttcctcctgggagatatggggaaagcttttagatctcaagtgagtttcccagagagaacttggccaggcagccccacccacactccagtatagctctccttctggttgttctctggttcgtcacagcccctttggctgtctcattcccagcactctcagctccaggctctctgccttctccctactctgcatcctcttccttttaaagcatttgcttgaaccagggctgattttacccccagacaacatgtggcattgcctggagacttttttttttttttttttgagaaggggtcttgctgtcttgcccaggctggagtacagtggctcggtcacagctcactgcttcctgcaactcctgggctcaagcgatctctggagatattttggattgtcatgacttggaagggggttgctgctggcatctattcgaaagaggccagaggtgctgctaagcatcctcccgggtacaagacagtgccccccccaccaaccccagcaaagaaggagccagcaacagtgtcaatagtgtcagggtcgagaaaccctgcttttttgctgctgttgtttgttttttgttttaaatcccctgttctactttgaaggttaaaaggaaagaacagcacgctgatgagctgatgccaaatccacttttgctactgagaccatttagggcccaatttcaggatttccgggtggaacctccaaccctggtaaagctgcccttggtgtatgtggctatgagaaagtgcttaaagcttcaacctaaggctgtgctgagtgggcctggtacccaagacacagagacattctgtttggtcagagagagagaaaagggctgcagagttaggtcagaggtcagccctaagatggtcaccctaaaatgaaaactgctatgtaaacctgtggtaaataccagatgaaaactttgaggccgggtgtggtagctcacgcctgtaatccagctgcccaggaggttgaggcaggagaatcacttgaacccgggaggcggaggttgcagtgagccgaggtcgcacaaatacctgggcgacaagagtgaaactcttgtctc

SEQ ID NO: 226319 - DNA, 3374 bp, Homo sapiens
  misc_feature (915)..(915): n is a, c, g, or t
tgattttaataagcatgtggttgtaattgttccattttttaataatccttaactttcctttagatttttggaaacattttcagtaaacattgaagaatagggaccaagggtcattgtgggattttctttctgttttcagacgtgtcttaaagacattaacagagcacagacacatgggtatccagaaaggttgcaacccaagattatgttacgtaaagcagaatgtctggtggccctggggagactgcaggaggcaagccagaccatcagtgatcttgaaaggaacttcacagccacaccagccctagcagatgtcctccctcagactctgcagagaaacctccatcgtctgaaaatgaagatgcaagaaaaggacagtctcacagaaagcttcccagcagctctggccaaaacccttgaggatgcagcgctgagggaggagaatgaacaactttccaatgcctcatcatccatcggcttatgcgtagatcctttaaaaggtcgctgtctcgttgccacaaaagatattctcccaggagagctcctggtgcaggaggatgcttttgtgagtgttctcaacccaggagaactgccaccaccgcatcacggcctagacagcaaatgggacaccagagtcaccaatggggacctctattgtcaccgatgtttgaagcacactttggccacagttccgtgtgacggatgcagttatgccaagtattgcagccaggagtgtttgcagcaggcctgggagctctaccacaggacagaatgtcctctgggagggctgcttctcacactgggtgtcttttgccacattgccctgaggttgactcttttggtgggatttgaggatgttcgcaaaatcataacgaagctttgtgataagattagtaacaaggacatctgtttacntgaaagcaacaatcaggtcaagacacttaattatggcctaggggagagtgagaaaaatggcaacatcgttgagaccccaattcctggatgcgatattaatgggaagtatgaaaataattataatgctgtcttcaaccttttgccccacactgaaaaccatagcccagagcacaaattcctctgtgctctctgtgtttctgcactgtgcagacagctagaagcagccagtttacaggccatcccaactgagaggattgtgaactcctctcagcttaaagcagcagtgacacctgaattgtgtcctgacgtgactatttggggagtggcgatgctgagacacatgttacagcttcagtgtaacgctcaggcgatgaccaccatacaacacacaggacctaaagggagcatcgttaccgacagcaggcaggtgcgccttgccacaggcatcttccctgttatcagcctcctgaaccactcctgtagccccaacaccagcgtgtccttcattagcactgtcgccaccatccgggcgtcacagtggattagaaaggggcaagagattctccactgctatgggcctcacaagagccggatgggggttgccgaaaggcagcagaagctgaggtctcagtatttctttgactgcgcctgtccagcttgtcaaactgaggcacacaggatggctgcagggcccaggtgggaagcattctgttgcaacagttgcggagcgcccatgcagggagatgacgtgctgcgctgtggcagcagatcttgtgcagaatccgccgtcagcagggaccacctggtctctcggttacaggacctacagcagcaggtcagagtggcccagaagcttctcagagatggtgaactagagcgagctgttcagcggctgtcggggtgccagcgtgacgccgagagcttcctgtgggcagagcacgccgtggtgggagagatcgcggatggcctggcccgggcctgtgctgccttaggagactggcaaaagtcagccacccatctacagaggagtctctgcgtggtggaggttcgccacgggccgtccagtgttgaaatgggccatgagctcttcaaattggcccagatctttttcaacgggtgagtccctttcccacttcacagggcacacactgttcctttcctaggctcttctgggtattactttttttctatggtgtttttaaaagcatgttgaaacttctttatttcctctttaggagagatctttgccttctgttttgctaacaaacataacgctttagaatttcctcctgggaggcggagcttgcagtgagccaagatcgcgccactgcactgtagcctgggcgacagagcgagactccatctcaaaaaaaaaaaaaaaaagaatttcctcctgggagatatggggaaagcttttagatctcaagtgagtttcccagagagaacttggccaggcagccccacccacactccagtatagctctccttctggttgttctctggttcgtcacagcccctttggctgtctcattcccagcactctcagctccaggctctctgccttctccctactctgcatcctcttccttttaaagcatttgcttgaaccagggctgattttacccccagacaacatgtggcattgcctggagacttttttttttttttttttgagaaggggtcttgctgtcttgcccaggctggagtacagtggctcggtcacagctcactgcttcctgcaactcctgggctcaagcgatctctggagatattttggattgtcatgacttggaagggggttgctgctggcatctattcgaaagaggccagaggtgctgctaagcatcctcccgggtacaagacagtgccccccccaccaaccccagcaaagaaggagccagcaacagtgtcaatagtgtcagggtcgagaaaccctgcttttttgctgctgttgtttgttttttgttttaaatcccctgttctactttgaaggttaaaaggaaagaacagcacgctgatgagctgatgccaaatccacttttgctactgagaccatttagggcccaatttcaggatttccgggtggaacctccaaccctggtaaagctgcccttggtgtatgtggctatgagaaagtgcttaaagcttcaacctaaggctgtgctgagtgggcctggtacccaagacacagagacattctgtttggtcagagagagagaaaagggctgcagagttaggtcagaggtcagccctaagatggtcaccctaaaatgaaaactgctatgtaaacctgtggtaaataccagatgaaaactttgaggccgggtgtggtagctcacgcctgtaatccagctgcccaggaggttgaggcaggagaatcacttgaacccgggaggcggaggttgcagtgagccgaggtcgcacaaatacctgggcgacaagagtgaaactcttgtctc

SEQ ID NO: 226320 - DNA, 2469 bp, Homo sapiens
  misc_feature (6)..(6): n is a, c, g, or t
  misc_feature (1261)..(1261): n is a, c, g, or t
gccagngagctgcgcggtcgctgggagggagtccagggcgcagttccgggcgcgtctgagcggttctcgaggcgttctcgcctcggtctctggcgagtgcacggatcaaaagcagcatggatctgcctgtggatgagtggaaatcatatctgcttcaaaagtgggcttcactcccgacgtctgttcaggtcacaatttctacagcagagaccttgagggatatctttcttcactcctcttcacttcttcaacctgaggatgagctgtttctaaaaagactttctaaaggttacttggtgggaaaggactcggacgctcctcttttctacagagaagaaggaaacaaaaaatttcaggagaaagattacacaggagctgcagtgctgtactctaagggagtgtcacattcaaggcctaacactgaggacatgtcactgtgtcatgctaaccgctcggcagccctcttccacctgggtcagtatgagacgtgtcttaaagacattaacagagcacagacacatgggtatccagaaaggttgcaacccaagattatgttacgtaaagcagaatgtctggtggccctggggagactgcaggaggcaagccagaccatcagtgatcttgaaaggaacttcacagccacaccagccctagcagatgtcctccctcagactctgcagagaaacctccatcgtctgaaaatgaagatgcaagaaaaggacagtctcacagaaagcttcccagcagctctggccaaaacccttgaggatgcagcgctgagggaggagaatgaacaactttccaatgcctcatcatccatcggcttatgcgtagatcctttaaaaggtcgctgtctcgttgccacaaaagatattctcccaggagagctcctggtgcaggaggatgcttttgtgagtgttctcaacccaggagaactgccaccaccgcatcacggcctagacagcaaatgggacaccagagtcaccaatggggacctctattgtcaccgatgtttgaagcacactttggccacagttccgtgtgacggatgcagttatgccaagtattgcagccaggagtgtttgcagcaggcctgggagctctaccacaggacagaatgtcctctgggagggctgcttctcacactgggtgtcttttgccacattgccctgaggttgactcttttggtgggatttgaggatgttcgcaaaatcataacgaagctttgtgataagattagtaacaaggacatctgtttacntgaaagcaacaatcaggtcaagacacttaattatggcctaggggagagtgagaaaaatggcaacatcgttgagaccccaattcctggatgcgatattaatgggaagtatgaaaataattataatgctgtcttcaaccttttgccccacactgaaaaccatagcccagagcacaaattcctctgtgctctctgtgtttctgcactgtgcagacagctagaagcagccagtttacaggccatcccaactgagaggattgtgaactcctctcagcttaaagcagcagtgacacctgaattgtgtcctgacgtgactatttggggagtggcgatgctgagacacatgttacagcttcagtgtaacgctcaggcgatgaccaccatacaacacacaggacctaaagggagcatcgttaccgacagcaggcaggtgcgccttgccacaggcatcttccctgttatcagcctcctgaaccactcctgtagccccaacaccagcgtgtccttcattagcactgtcgccaccatccgggcgtcacagtggattagaaaggggcaagagattctccactgctatgggcctcacaagagccggatgggggttgccgaaaggcagcagaagctgaggtctcagtatttctttgactgcgcctgtccagcttgtcaaactgaggcacacaggatggctgcagggcccaggtgggaagcattctgttgcaacagttgcggagcgcccatgcagggagatgacgtgctgcgctgtggcagcagatcttgtgcagaatccgccgtcagcagggaccacctggtctctcggttacaggacctacagcagcaggtcagagtggcccagaagcttctcagagatggtgaactagagcgagctgttcagcggctgtcggggtgccagcgtgacgccgagagcttcctgtgggcagagcacgccgtggtgggagagatcgcggatggcctggcccgggcctgtgctgccttaggagactggcaaaagtcagccacccatctacagaggagtctctgcgtggtggaggttcgccacgggccgtccagtgttgaaatgggccatgagctcttcaaattggcccagatctttttcaacgggtttgcagtacccgaagccctgagcacaatacagaaagctgaggaggttctgtcgctgcactgtggccccatgggaaccgatgacaatccag

SEQ ID NO: 226321 - DNA, 2703 bp, Homo sapiens
  misc_feature (6)..(6): n is a, c, g, or t
  misc_feature (1261)..(1261): n is a, c, g, or t
gccagngagctgcgcggtcgctgggagggagtccagggcgcagttccgggcgcgtctgagcggttctcgaggcgttctcgcctcggtctctggcgagtgcacggatcaaaagcagcatggatctgcctgtggatgagtggaaatcatatctgcttcaaaagtgggcttcactcccgacgtctgttcaggtcacaatttctacagcagagaccttgagggatatctttcttcactcctcttcacttcttcaacctgaggatgagctgtttctaaaaagactttctaaaggttacttggtgggaaaggactcggacgctcctcttttctacagagaagaaggaaacaaaaaatttcaggagaaagattacacaggagctgcagtgctgtactctaagggagtgtcacattcaaggcctaacactgaggacatgtcactgtgtcatgctaaccgctcggcagccctcttccacctgggtcagtatgagacgtgtcttaaagacattaacagagcacagacacatgggtatccagaaaggttgcaacccaagattatgttacgtaaagcagaatgtctggtggccctggggagactgcaggaggcaagccagaccatcagtgatcttgaaaggaacttcacagccacaccagccctagcagatgtcctccctcagactctgcagagaaacctccatcgtctgaaaatgaagatgcaagaaaaggacagtctcacagaaagcttcccagcagctctggccaaaacccttgaggatgcagcgctgagggaggagaatgaacaactttccaatgcctcatcatccatcggcttatgcgtagatcctttaaaaggtcgctgtctcgttgccacaaaagatattctcccaggagagctcctggtgcaggaggatgcttttgtgagtgttctcaacccaggagaactgccaccaccgcatcacggcctagacagcaaatgggacaccagagtcaccaatggggacctctattgtcaccgatgtttgaagcacactttggccacagttccgtgtgacggatgcagttatgccaagtattgcagccaggagtgtttgcagcaggcctgggagctctaccacaggacagaatgtcctctgggagggctgcttctcacactgggtgtcttttgccacattgccctgaggttgactcttttggtgggatttgaggatgttcgcaaaatcataacgaagctttgtgataagattagtaacaaggacatctgtttacntgaaagcaacaatcaggtcaagacacttaattatggcctaggggagagtgttgaaatgggccatgagctcttcaaattggcccagatctttttcaacgggtgagtccctttcccacttcacagggcacacactgttcctttcctaggctcttctgggtattactttttttctatggtgtttttaaaagcatgttgaaacttctttatttcctctttaggagagatctttgccttctgttttgctaacaaacataacgctttagaatttcctcctgggaggcggagcttgcagtgagccaagatcgcgccactgcactgtagcctgggcgacagagcgagactccatctcaaaaaaaaaaaaaaaaagaatttcctcctgggagatatggggaaagcttttagatctcaagtgagtttcccagagagaacttggccaggcagccccacccacactccagtatagctctccttctggttgttctctggttcgtcacagcccctttggctgtctcattcccagcactctcagctccaggctctctgccttctccctactctgcatcctcttccttttaaagcatttgcttgaaccagggctgattttacccccagacaacatgtggcattgcctggagacttttttttttttttttttgagaaggggtcttgctgtcttgcccaggctggagtacagtggctcggtcacagctcactgcttcctgcaactcctgggctcaagcgatctctggagatattttggattgtcatgacttggaagggggttgctgctggcatctattcgaaagaggccagaggtgctgctaagcatcctcccgggtacaagacagtgccccccccaccaaccccagcaaagaaggagccagcaacagtgtcaatagtgtcagggtcgagaaaccctgcttttttgctgctgttgtttgttttttgttttaaatcccctgttctactttgaaggttaaaaggaaagaacagcacgctgatgagctgatgccaaatccacttttgctactgagaccatttagggcccaatttcaggatttccgggtggaacctccaaccctggtaaagctgcccttggtgtatgtggctatgagaaagtgcttaaagcttcaacctaaggctgtgctgagtgggcctggtacccaagacacagagacattctgtttggtcagagagagagaaaagggctgcagagttaggtcagaggtcagccctaagatggtcaccctaaaatgaaaactgctatgtaaacctgtggtaaataccagatgaaaactttgaggccgggtgtggtagctcacgcctgtaatccagctgcccaggaggttgaggcaggagaatcacttgaacccgggaggcggaggttgcagtgagccgaggtcgcacaaatacctgggcgacaagagtgaaactcttgtctc

SEQ ID NO: 226322 - DNA, 760 bp, Homo sapiens
cttgttcaaggttatgtaactgctaagttattgttgtaagatttgagtctagaacaggctgttgggaaagcctgagtttttctgatatggtttgttacttagggtttgaatcaggctgttgggtttttctgttatagtttgttacttagggtttgaatcaactggccctgtctctatcagatcaagagatatgaggaacatcatctgtcttcttctccttgtcttctacccctaagcatcctaggtctgctatcaaaactcccgttcacttcagacaatgacgtagtctggttttgcgggtagcgagacgggggaggtgggggagcagcatttgtgggggtggagggagggcaatagagtacagaagaacagatttctagttttgcctctgtcactaactgagccatgttgagtgcatctttcccaatctccaggcttcattttttctgcctgtaaaacacagatgcatagcttagttgttaagcagacagacaaaagacagactggctctaccccaactctgctgctcactagccctgtgaccttggaaacatttctcatctctaaaatacagatcatcataatatctacttcatgggactgtgatgagagtgaaagaagttaatacacataacactcttaggagagtgtctggtgtaggtgttttacgagtattgctgtcattattctccttaaatgtgtaattaatgaaattctagtattttcaaataaatatatgggaaataacacagaatttaaa

SEQ ID NO: 226323 - DNA, 484 bp, Homo sapiens
agctgcccgcacaggcctcgcgccacctggccgcagcttcctcccctttatccactccgtatttgtttgtccagcctaggccttgggggttgtgggggagacacaagtacccgtgactggtcggacaagtgcccgttgttgggggcgtgggcgctgggactgacgcgggaggtggctctgatcatgtcgaggtgaggaggaggcgttgaggctcagaaagggcacgcagcgtggacgtgaggacgtcggggaggctggagcagtgaggccgacaggaaggaccttacggggctcacatgctatcccacgacgaggacggactcaggacggcagccctgatagatgcggctgggggctggcgggtcggggtcgcacaccacaggatggaggggcagcggtgcctggctccgccttaagaaacatgggcccttgggggacccggatttctgatacttcaatacacaaatatggatttttattgaaa

SEQ ID NO: 226324 - DNA, 337 bp, Homo sapiens
agggttaggttacctctaatatagaggcatgccttttcagagtctgtgttgaaagcatggggtattcaacaaggtcttttcactctagcttagctgctaggaattttaatgtctcccggacctgtgcttacaagcttaggtagttgtttggttcatactgtttagttgctctttccctagatgttattctttcactggtctgatggagtattgcgtgcacatgtgcagcttagtctctaggcaaagattccggagatctctctaaagatttctgaaactttgtctccacagctcccttcttctagttttgctgctcaaattccagcaaccttagtag

SEQ ID NO: 226325 - DNA, 182 bp, Homo sapiens
gtgcggtcggctggctggggcctgaagagcttcctcctgtgtgttcaactgaacgcagcaaaagtcttgggcagattccatggagcagctgtggaagcactgtgcagggaatcgaagaaggaaacacctccagcgaccacaaaacaaaattgaagaactataaaacaatataggccgggcat

SEQ ID NO: 226326 - DNA, 511 bp, Homo sapiens
cacagcaagcaggttctagagccagcctcagaccatccccaccgtgagtcccccgtgcgagtgccccttgaaggaggttttctaacaggtgagtggtctgattctgtctctgtcctgtgggatggatgggctggcacttgatggctctccttccccctcaccctccacggagaaggctggaaggtgcatttctcagacttccttgcctgggaaatgggaagtgatgcagaggatcccaacgtctcctcggcaggcttggtggtggacgtgctgggccatgttccaggggccagctgctggctccgtgggtgctgagaggaagggggaaggctgtctattttttggccaggatgaatccagcagatgtggtaggtcctggccgcttgctgacccgtgggtctaccgggtgctccggagctaatggtccccagatgctccaccgtcctgatgtggcagaggcatggcattttggcgggccagtttggtggcatcctgggaaccgttttggagg

SEQ ID NO: 226327 - DNA, 408 bp, Homo sapiens
gaagcatgcatattcaaatgtatatgttaaacacactagaatagctgcttatgggaagagaagggaaaaggagtgagaatcagaaagaaagaaggggaaataataacgtacaagagaatcctcacacagaatatagtgctaatgtggtatctactgaggaatattactaacttagcaaatacacaattttacattctaaattctttttgttttttgaggaagcactccaaaaacatttggaatggattaatgaaaagacatcaatttaaaattagcctttagatcaggtgtggtaactcacgcctgtaatcccaacactttgggaggccgaggcaggaggatcatctgcggtcaggagttcgagaccagcctggccaacatggtgagaccccatctctactaaaatac

SEQ ID NO: 226328 - DNA, 450 bp, Homo sapiens
tgggattacacgtgtgagccaccgcaccaggccaatgtgatgattatctatggatataccctgatcatcagcaggaggaaatgaagaggtgctgtcatctatatgatctcagtattttaaaaatcagcttccagcccatgtggtggttcatgcttgtaataccagcagttgaagaggcttaaatgagaggattcctggagcccaggagttcaaaagcaacctgggcaacctagcaagacccagtctctatcaaaagttaaaaaaaaaaagtgggcatggtgatgtgcacctgttgtcctagctattttggaggccaaggtggaaggatcgcttgagcttgggaggctgaggctgcagtgagcagtgattgcaccactgcattccagcctgggcaacaaagcaagaccctatctcaaaaaatatataataaaaatgaaaatcagttctcaa

SEQ ID NO: 226329 - DNA, 609 bp, Homo sapiens
attagacagcagggaaacttttgagtctggctttcttcgcttagtgtaatgctttagaaattcatcaagttctgtgaatgagttgctctttcttttcgttgctgtgtagtattccattgtacagatagatcccaatttgtttatccattcaccttttgatgcatatttgggttgagtcctgaggatggttttcagtcacagaaaagactatttggaagtttatttctggagtaaacaattagtttctatttattaaagttactagttcaaaacactactaattctttcttaaccttaagattcaacctattggccaggcgtggtggctcacacctgtaatcccagcaatttaggcagccgagacaggaagattacttgaggctaggagctggagaccagtatgggcaacatatcaagaccccatgtctacaaaaaattaaaatttaataataataaaatatttaaaaagtataaataaaattcagcttacaaaccttgtttgaaaatctagattttagcaaatgcttctaaggggctttttacaactttatatcttcaaacgtaaatgaataggtttgattttctttttcagtatctcagtgtggaaga

SEQ ID NO: 226330 - DNA, 503 bp, Homo sapiens
agtttctcctagccagacgtgtttcttgtacctgcagctcctcccagaggccacttataagcagccctgccatgtggccacacagcactggtcatgccatacccatgcacagtcatacatgtccacacacatgcacacgtgtgcccaaacatgcatgcacatatatggccgtacttatacatgtgtgcacacatacacatgtatctatacacatacagttaacacacacacacacacacacacacacacacacacacacagagtaacacactctgtcttacctgtgtgctgactgctgacctattttgtaatccctgagctaattcagggacaaaactagttgatttcgtactcaaattccctcaaatccgcatcatcaatgctaccacctctgagacgttgtcatctccatttcttccaaagtccatttttatcccttccttatttttaatgttgcatgactatttactttttccctcttgatcaagatctggcaccaaagg

SEQ ID NO: 226331 - DNA, 477 bp, Homo sapiens
aaaaaaattcttgcagatggattgaatgtgatacacgaaagaaagagtagcagagtcatggcagagaagccctgctatttactgagaaggctaactctgcaggaggggtgggttgaggggatgagaaagaagagctctattttggacatgttaaatgagaaataccaattagttgtcttggtagagattgagattaatatagttcaagttcctgacataataggtcctatctaaaatgttagtttccttagcttcccttttgtggtatttgacgtttttaacaactccctccttctaaaaattctgtttccttagctttggcaacatctttctgtctttattccgtaatctttgacacattttatagttcctcttcttggatactttccttgcacgttgcccttttccagtattttgtttttgaaactcttctcaggtttaacattttgttgcttatcctttcagtcttttacttga

SEQ ID NO: 226332 - DNA, 516 bp, Homo sapiens
tcaagacgtagttcaaatgttacctcttccgtgaagtttacccgacttcctctcccatccgcattccactggaatccccggttcttttatctatatttctgttgatctttgatactactcttttataacacatgagattgtaattaattggatgcacctgaccacaatcaagtcctaccctgggagccacaatatcattgggcaaactttagtctattgtccaaactgtagcatataaaagccgtgtcaaaaaaggaaaagctaaaacatccgctctacctgtgagtgctcttctttgaatgtccacattaattaccctgaacctggaacactttgttttaagacatggatgatcagacggtggaataaaggtcaagatgaaggatagagggaagaaacaaagatatgttctatttagtaggttcagggcaattcgtttcagaaaagtttcttacatttatatactacatgcatgactatatgcatatgatctatttattaaaattgtttttattc

SEQ ID NO: 226333 - DNA, 291 bp, Homo sapiens
tatccggccggcccaactaaggtcgggagttcaagaccagtctggccaacatggtgaaaccctgtctcaactgaaaatacaaaaaaatttgctggacgtggtggcgggtgccagtaatcccagctactcagggaggctgaggcaggataatcgcttgaacccggctctcagctcaggaggagctcatagctgtgcttctgtgtgcattccctatagaacccactcatcctggtaggcccagtgctaaaacgagtttggacaggggaagagtgggggcaactaacttattga

SEQ ID NO: 226334 - DNA, 452 bp, Homo sapiens
cggtgagcggtcgccggaggtccaggtgggagacgccgcgccccgcaccgaggtatgagagctgcagcagcgacaaccaggcggcctgaagtgcagacgcaaaacggatcccggggctaggacacgggggttccgaaagcaggatgacgcgcccggaggggacgagacggtccagagcacgcccgggagagagggcggcccagacggcaccggcctgcgctccagccctccctccctcacacacgcggaatctcaaaacatgcggacatgccagcccctcccgcacacctcgggctgcaccacctgctcccggcgcctccccgcccccggctcgcccgcgccggttctcacgcgcggccagcgcccttccccgccgctcccgcccctttcacttccgcacagcttaggagtcggggccagcgcctccgctcccaccttcccagcccctctgc

SEQ ID NO: 226335 - DNA, 431 bp, Homo sapiens
agaaaagctcaacaaagaaagctgatgaattcccaagaagacaagcctcaaaatatgggttgttttgtttttgcaaaatttcccggctacctgacttcaagtttatattttacaaaaccacaccgcagtggctaaagcactttaacaaatcatttcatcaattcctccttgtttaagtatcaaaatgttactaagaagatgcttttgtctgttattccagcaatctgagtgctgtacaggagcacaccatcacaccatcattcataattttttttttttttagcaacgcacctactataatccataatgttttgtttgttcgtttgtttgtttgtttgttttgcttttgcttttgggtcttgacctccagcaactcattttttgtgatactggttctcaagatataattaaaacataattaaagatcaaga

SEQ ID NO: 226336 - DNA, 372 bp, Homo sapiens
ttttgtttacccctgcatcaccacaaacatatgagtaatgccttacactatgacatcatgacagctaagatggcactaggccataggaatttttcagttccattataattttatgggaccaccatcttttatgtggtccattgttgactgaaatgtcgttatacagtgcatgatggtaatttgatgtggcattctaatacgctggcaaagctgggaactaatatttgagctcaagttactcatcctataattgtttcaagtaaacgtatagaaaagattagacagttttgtggttgatggccgaataattttgctgttttctttataagatttgattgcaacagaaccaatattttgttttcttaaacttca

SEQ ID NO: 226337 - DNA, 391 bp, Homo sapiens
catgcctggcccactaggaagttttatgtaatatccgtttctagtcatatgtaagatacattattgtatcatttactccttcctatatctcacccaactccatagttcatttttctttctgatctacagggttctctaatcaacccacttctctctactgctaccacactagtgaattaccatcatttcttttctgagctactatactactttcctaatgatctatctgcatccattcttgtctcatcacaaatgtagtgagtgaacatttcaaacataaatctcataatgtcatttctctactgaaaacccttccaaagtataagtgagaagctatcatgctctacaaggctcaacatgagatctggctcctacctacctgtgcaatgtc

SEQ ID NO: 226338 - DNA, 869 bp, Homo sapiens
tgggagttgcggggatttttcaagaagcagcagctaccccggcgtcggtcactgggccggggtaggggaaagagcaaaatcccagtgggtttgcgcgagggatcttctagggtcgaggcgggtgtggggggagttggaaccgggagacaccgcttggcgcatctctccctcggtctctacctcctgtcctatgccagctccccctttaatttttttcctctcctttaatctaatttcttccaactccacctttgttgttaccggcgtcacacccggaccagccaatccccgccacgcaatcagcttgtcaaaaagcctcggccatccctaggaaagcaggccgcaggcgctgccccccggcggcggcgggcagccgcgaggggagcccagcacccggttctcgctgccccgggtggcagcggggcagcctccgacaagacgtcccttggttcactgtcctgcaggccggggatgaaaggcctggacagggtccaccacccactctcccactgccacggccgtggttgactgtctttgcctccccttttcagaggaaaggttatcaggacaggacgcagggagccagaagaccatctgaaggaagcctgcttccaacgggcccagcctccagccaccgctcctggggcagcgccattgctcctggctctcaggctgccagtctcccacaccgacgctctactgcccgcatctcggccagctgggtcacccagcccctttcgactctcccctggcacgcagccttctccttcactcggcctgcctcgctgctgctgtaattcctcttgtctcctgggagaaatgagattgctttcccaggacttccacatcccacttctatcaggtttcac

SEQ ID NO: 226339 - DNA, 450 bp, Homo sapiens
caggcgcgaccccgcctggcccgcgcccgggagctgaccccgcgacccctggccgacccctcgccccttccccgactgccgcgtgtgcgcgcgcagtcactgcgctggccccgcgacccaggccgagggactcggttaccgaaagagtccccctcataagacccgcctggccgcgcccgcgggcaagcaggggcttccaggcagggccctccccggtgaccgcgggcagtgtggccccctcgcccagctgggccccggcgcggccgaacaggcacttctgccgcccgaggtcctgggcctggaggtttgggctgttttcggggggcagctgtaactcatccccatctgtgtttgaagtggaataaatacttcgaacaataggaatataccagtagatgctacttagcattttctaccatgtgtttattacagtaaatattttttaatggc

SEQ ID NO: 226340 - DNA, 399 bp, Homo sapiens
acagatgctcttcaacctgctgtggagtttcatcccaataaaccctttacaagttaaaaatactgtaaaatgaaaatgtatttaatatgcctaacctactgaacatcatagcttagcccagcctgccttaaacatgcccacaacactgacattagcctacagttggtcaaatgctgggattacaggcgtgagccactgcgcccagccaatataatgttttccagattcctccacgctgccctgtgtaacagttgttctttcttttttatcgttgagtagttgtctccattgtatggatggataggccacactggtttatttattctcctattgatggatatttgggttgtttccagtttttggctactatgaataaagatgctatgaataatcctgtgc

SEQ ID NO: 226341 - DNA, 254 bp, Homo sapiens
cgtgtcttttttactgttgtattctcagagcttagtacaataactgacacagggtaaacctgtaagaaactgttgaaataatagatgaatgcgtgaatggatgtatgactaataagcaatacatagaactttgtggtcgggcacactggctgacacctgtaatcccagcactttgggaggctgaggtgggtagatagcttcaggccaggagtttgagaccagcctgaccaacatggtgaaaccccatctctacc

SEQ ID NO: 226342 - DNA, 603 bp, Homo sapiens
atggctcactgcagcctccacctacctggtccaagtgattttcccatctcagtcttttgggtaatgggactgcaggcaagcaccaccatgcttggctattttttttttctttttgagatggagttttgttcttgttgcccaggctggagtgcactggcgtgatcttggctcactgcaatctctgccttccgggttcaagtgcttctcctgcctcagcctcccaagtagataggattacaggtgtgtaccaccacacctggctaattttgtatttttagtagagatggggggtctctccatgttggtcaggctggtctcgaactcctgacctcaggtgatccacccccccctcggcctcccaaagtgctgggattacaggtgtgagccaccatgcctggccttgtattttttttgtagagtcagggtatttgccatgttgcctaggcttgtctcaaactcctgggctcaagggattctccaaccctggcctcccaaagtgctgggattacaagcgtgagccaccctacccagccccaagaaagtgttcttagtaaagtgtttttactggagtctctcagttcttttatgctggttacattgtga

SEQ ID NO: 226343 - DNA, 465 bp, Homo sapiens
gacatggagccaggcataagccagccttgcttccggccccaccagaagcaaacatgagaccagagtatttcgaatttgagattttctttttttgaatatttgcatatacatcctgagatatcttggagatgggccctaagtctggattagtctgttcttgcactgctataaagaaataactgaggctgggcgtggtggctgacgcctgaatcccagcactttgggagactgaggtgggcagatcacttgaggtcaggagttcaagaccagcttggccaacatggcaaaacctgtctctactaaaaatacaaaacttagctgggcatggtggtgtgtgcctgtaatcccggctactcgggaggctgaggcaggagaatcgcttgaacccgggaggtggaggttgcagtgagccaagatcgcgccactgccccgcagcctgggcaaaaatgagactacgtcacaaga

SEQ ID NO: 226344 - DNA, 391 bp, Homo sapiens
agggagtcatttaggaaggctggagatatatcttataatattccagggcagagtgtccattgctgctagcagcaattatttttaaaaagatactgccaggctgggtgcagtggctcatgcctgtaatcccagccctttgggaggctgaggtgggctgatcacttaaggttaggagtttgagaccagcctggccaacatggtgaaaccccgtctctactaaaaatacaaaaaaattagcctggtgtggtggcatgtgcctgtaatcccagctactcaggaggctgaggcaggacaatcgcttgaacctgggaggcggaggtagcagtgagccaagatcgtaccagtgcactctagcctgggtgacagagtgagactctgtctcaaaaaaaaa

SEQ ID NO: 226345 - DNA, 281 bp, Homo sapiens
cgactttcctttccaaacccaagtttttgatagagagggctcccacagcgtgtcctgctctgctcctgcacagcacagccaggcgctgagtttggggtccaacattgattggcagccaggagagctggtcctaaacacggaagagaacagagcgctggaatgaatgcagcttcccacaaatgggagggattagaaccagggcttcttgctctaatccaccttttgtgtatctgtttcactgatatatttgttctgtattatggaaagtacagaaaagcaga

SEQ ID NO: 226346 - DNA, 365 bp, Homo sapiens
acctttgtcatactgttttctctttagaaatgtaatattacctaaaaaataacttgaaatgtggattaaatttatgcataaacaagttcattgaatctttattcacaaatataaatatgtatctatttacaacattttaggaatggttaagaaaattatcttatctcaatataacagaatattaaacaacccattaaaaatgaaatttgcaaactaaaaacacagaaataccattgaacataaacttatttaccttccctccctttcatttttagatttatttatgtatcttcagtatttttaccatctttctcaatggaggaaaatgttgaagaagaaaattcaatataccatgatattaactg

SEQ ID NO: 226347 - DNA, 443 bp, Homo sapiens
cctgaaagggcttgttccataaacctgaattaaggactaacttttaagaaggactactgaccataagctggatctccagacaaatcaggcaggaatattctaattaaagtcttcgtatcaagttgaagttggaacaaggaggtaatcatgaccgattactgagagatgctaaattatacctaataataatgataatgacacttacgctgtgcttactacttgccaggcattattctaagcactctctctatattaactcctttaaccctcacaacaaccctgtcgggaagttgagtagttgctacgattttccccactttatagatgttgaaagggagggtaagggacttctctgaagttgcaagcctagaaggtgaaagagccaggattcattcccttgcagtcttggtccagagcccgtgcttttatccactatactataa

SEQ ID NO: 226348 - DNA, 418 bp, Homo sapiens
ggaaagcgccagaagaggggcactgaggcagagggaaagctaagcagcctgtggctcaggggactaccttgcaactgcttgaatgtaaagcaggcagagaaatcctcctgggaacctgaggccaggtgtatgagtgggatttaagagaggccagcgccccttccggggtggccccagcccaggaggagggcgtgagaggcacacctgggaagtgtcagagcctgacaggcgtgagctggaggcctggcaggagagtgctctcaccacctgaccatcctggaaagctgtcaaagtcccagtgcccatgccacaccccacaacaatccaatcaaactctttggaggtaggacccaggcgtctctgatttttaaaatttccaggtaattaaaatattcagccatgcttgaaaaccagtgct

SEQ ID NO: 226349 - DNA, 387 bp, Homo sapiens
tattcattctttagcttttaaattctttttcatttccacctagccttgtttcacttctgcttgttgtgattttttttccctttataaaagaaattttactcttttataaagagtaaaagagtggctcacgcctgtaatcccagcactttgggaggctgaggtgggtggatcgcttgaggtcaggagttcaagaccagcctggccaacatggcaaaatcctgtctctactgaaaatacaaaaattagctggtgtggtagcgcacacctgtaatctcagctacttgggaagctgaggcaggagaatcgctttgaacctgggaggcggaggttgcagtgagccgagattgtgctaccctagcctgggtgacagagccagactctatctca

SEQ ID NO: 226350 - DNA, 339 bp, Homo sapiens
cctgccagaagccgcaagtatcgaatcctgtttcttttcccggaaccgttctgaatgctatcatcagctcacctagattaagccaggggtagcgaaaggtgacgaggctgttttcggagagccaggggtcccagcggcccgctttcctgctagaggagggggcggcgcgtagccggagacttcagcgcggcggctccaaagatctcccttcacttttcacccctgatcatccccaaagctttgagctgcctttaaaaaccttgaccttcaacaggggtatgaaaacaaccccaggcgtttctaaacaatcaccctactacactagcagcaagcagtagg

SEQ ID NO: 226351 - DNA, 399 bp, Homo sapiens
tggtcctctgtgtctgttgtgaaatgtaatactcgcagaatttggtgttgccacttgtatgtgtgttctcagagttcgtgaggtggacttatatgtatttgataaaaatagtttgtggttctgtgtgtatttgagtttatgtggcttctgtgttttgtattctgggagatgtgggaggttcagtgcatgtatttggaaacagagaggctgtgtaggttgtgtttggattcaagaatcatggattcctgtattttagagctgtgggattgtatgtgattctttttctgggtgatgcatgacacaagtgttgtataccttgtgatttttttttttttgagcctatgcctataggattttcattatgtactgttaacaaatctactgaaaaggattttctta

SEQ ID NO: 226352 - DNA, 602 bp, Homo sapiens
catctgcagaatggagaagatgctaacaatacctccctcatcgaattggtgtgaagaattcaatgtcttggtgtttgtaaagggcttaggatagtgtctgacatgtagtccatgggatgtcttgatgcaggtcatcatctcacccttgttcattattggatggagaaaccagggtcccagagacactggccggctggggcaagatcaccactcattcctatcaacagctgggttaaaggtgcagaagacatgcttattcgatttgcaggtgacccaaaactagatgcagtggctggtattttaaatgaccaaacaagagcccaaaatcccctaaagcagatgagatgatggactaacccctctacggatggatgtaaaattaaaattttttgcatgaaagagattttggctgaaggttcattgcacattgagatggttgccccaaatgattgtggtctcaggctgagtctgtagaggtacaggttgacgatgagggaggtgatagctggagggttgtgctcaactctggttgtcgtacatttgaggagacagggagagaccagagtccagtttgtggagggtaaaggatagtgaggaactgg

SEQ ID NO: 226353 - DNA, 457 bp, Homo sapiens
agggaaggataggaagtatggacagaggcaatgaaaggaaatacctggcgtgtgataagtatccaacatatgacagctattattatgctgggttctgtatggaagggtttgtttctttttctctataataagtgagtagaatacatataatccttttatcattttccataacatttagcaagcctggcactatagttgagctcttttagctttgaggtaaaacatatatgctgaaaacttttaaatatttactgcaaaaatttctagggagttagtgaagcttcttcctgtattttgaaaaatagtatcgtatcattatatgttctaagtctgtgttctactgtattctgcagtaattctcaccataggaggaatttattattctgcaggaattctcacagtaagaatatcttccttccttccttccttccttccttccttccttccttccatccat

SEQ ID NO: 226354 - DNA, 484 bp, Homo sapiens
caggttagcatgaggattcagatgaaacaacttgtgagccagtgctgtcatgtatggtcctgcagagtgtgccccgatggcaacacagctgctgttttaacaaatcagtgcattacaagggtttcccaacagatagtactgcagtgttttgaggtagggcacttttgtctaattcatacaagatgctatatggactatccctgctttggttagaatatatttggagactgagggtgaacaccaggcagagataggaaatggaaactggcttaaggctctgacaaaaccaagtaaagttaaaaagccattaaattaaatttgggaacaagatttgcaattagaagctaaagggaagtatgcaggaaaccagtctgaggaataaaaagtagttattatgttgttattattttgctctgaaagataagactttttgtagtgtaagcctatcctaccaaagaataaaaatttttaggtaataataata

SEQ ID NO: 226355 - DNA, 414 bp, Homo sapiens
aattttactaggtagagaatgtgcaggtaggatatattagggtaaataaaatgtatcactaaaattaactccacctgcttcttttgattttagtttggctactagaaaattttaaattatgtatatggctcaagaacatatttcttttggacagttctagccttgaggcatagagataagctattgccgtaatcgaggcaaaagatgatgaatgcctggactcagacaatggcagcagggatcgaggaacagtaaaattcaagagatatttctaaggactgaattgactgatggaggttagtgattacatttgatggggaaagggtgatggagcaggacaaatcaaagattgctccaagttttctaacttggataatattgattgggaggggaagccatatatcacattagaga

SEQ ID NO: 226356 - DNA, 414 bp, Homo sapiens
acagaaaatacttgtgtgtccaaaattaggcactggtaggtaggagttatgtggcacctgagccagaactggcttcccccattgtgagagtgagataggttcttctgctgacatagcacatgaccttggcaagttagttcttctctgagcttcagtttcctcatttgtaaaataggagtaataataatacctaaaggggtgttagtgagaattaaatgagatcatggatctgaaaaatgtttttaaaaatctgtgtggatcattatgtggtactttcaataataataataggccgggtgcagtggctcacacctctaatcccagcactttgggagaccgaggcgggtggatcatcagaggtcaggagttcaaggccagcctggccaacatggtgaaaccttgtctctactaaaa

SEQ ID NO: 226357 - DNA, 578 bp, Homo sapiens
agaaaggagtgggacaatagagacacacaagttgctgggaagagtaggtgcctttgtggagagaaactgggtcaccatgaaacaggggtaaaaagaaaatttgtttttccatttgtaacttttaaattttatacttatgcttatagtgcctattcagaaataaatatgtagacagataaatgaaatttatagttgtccaaacaaaaatatatgtatcagaattgtaaatggaagatcattcttcttgacttgtaaaaatctagtttgggagattctgagtttatgaaattggaaaagctaaagggtttcccagccatcctgtctccattgctcactcctgcacttccgcactccattctatttccttcttttggtcactgtgaggcctctctttatttgtactatggctgctgtccagccctcttccatctctatagcccaactctttgcttcccaagtatcgtggcctgtgtctgccagccacggagccactgaataggcagcactccaaaaacaagcgtctatgaggccccagatcttggtgaatccaggtgccaacatggttttcactacagttt

SEQ ID NO: 226358 - DNA, 460 bp, Homo sapiens
gaggactatttcagatggtgtgtgatgacagaggatgacaaaagcttggatcagggaggtgatgttagctatgaaagcaaacagtcaggatatatttttgtggtaaaattaatggaatttgctgatggcttaactatttgggggatggagaaagatgttaccagcaatgatgcctaagtgtttggcttgagcaccttggttggttgtactgagttggtgtctggggaaataatgaagactttcacttaaattaaaataggaatgctagcctaatatgcaaatcctcattatattaacccaaatcatcaaatcaaatatgcatcactttctaattttttattttatttatttacttatttttcaattgttttaaataataaaaaatataatctattttatatagttatatttttcattaaattaaatttttcaaatcttattaaaataaaatttggctaaa

SEQ ID NO: 226359 - DNA, 565 bp, Homo sapiens
atactttgcccagaaatgtgactaatcactcaagtatgcctgtgaactgtaaagaaatatcagatgctacctatcataggtgttagagagttcagtttgaatctggccaatgtaactgctaaatttattttttaatgtactctttgtcagggagtataatagaatccaggatctctatggcgtatctcacaatgtatgggatacaatccaaaatcagtagacatatgaaggaaaatggaaatgtgattcattcttgagaagaaggcaactaatacagattgattgtgaaatgaagaatttaggattttaaagcagttattataaatagaatataaagggaaatatccttataatgaataaaaaaattagaaatcagagtagagaaataaaactatgtaaaagaaccagatagccattctagaattaaaaaaaacttacatgaaataaaaatttctacatggccttcacagatttaaacataatagaagaagtagtgaacttgaatcagatcaatagaaattatacagtctgaagagcagagaatgaaataaaagaaaaacttcag

SEQ ID NO: 226360 - DNA, 454 bp, Homo sapiens
tgcctccctgctttcatatggacaattgactttttaaaagtctttttaagtgcagttcaaattcaaattcccagttttttggagctagaagcatctccctaaagggatgctgagatggcttcttgccagctctctttctacatacatacatacgtatatatatatatatatatgtttctattaatagatcagtgctaccctaacttcaacctctgtgggaaacacatatggacttgttaaaaatgcagattttggccgggcgcagtggctcatgcctgtaatcccagtactttgggaggccgaaggaggtggatcatgaggtcaggagattgagaccatcctggtcaacatggtgaaaccccgtctctactaaaatacaaaaaattaactgggcatggtgatgcatccctgtaatcccagctactcaggaggctgaggcaggggaattgcttga

SEQ ID NO: 226361 - DNA, 230 bp, Homo sapiens
aatcacattcctgtgtggcctggatctccacacccaccgccagtgccttctccaggaccctcatggcaccaggatccccgcccgcatcatcgatctttccctggctcctggagtcttccagtagcgcttctgtgtgcttacattgctctctcaaatgaaccaacaaagcctgcaaattctgcctggtccctcacacaccaggttgtctctcatctttctccttgtcataa

SEQ ID NO: 226362 - DNA, 533 bp, Homo sapiens
gtaagcacaggtaggtttgggtataaagacaagtgccagaatttaaggagctaatagcttagagcaaaaggaggccaaatcaaaaaacaggcattttggctgccatgacatgtacacattcctacaatctgcccatttgttcattaaaaaataatagggcctcaaaaccgtggcacttcaatcagagcatcagcagaaacaattaaccatcccaataaaagggattgctgggctgactctccaccctactgtcgcactcacccagtgtcacagccggtggatcctttgtgtccttaaaccttgtgtccttttgaaaggtagatctctgagcgcattctcctctgatagagaatggtttcatcaaagttacaaatctaatccaactgatttttgtttttaagtacagaggaagatgaattcagtaaggttgcaggatacgttatcaatatacaaaaatcagtagcatgtccatacacaaataacaacctagctgaaaaagaaatcaagacaacaatcccatttatgatcacatc

SEQ ID NO: 226363 - DNA, 179 bp, Homo sapiens
gctgaggatgagttttgtggaaacatgggggaacctgcggctgtgagggtatcagctcttgccccagccttccttccttccctccttccctccttccctccctctctccctttcttcttctctctctctctctcctcacctccttccgtcactccctctgtgtccctttttttccttct

SEQ ID NO: 226364 - DNA, 496 bp, Homo sapiens
taaaggtggccactagagaatcccaaaggcaaagcattccctgcctcccactatttaggcccttgtgtatttctttctcacatgttatcagagttagtctatacgaccagtagagtacagcagattgatggtatatcaatcctgagtctagattttgacagacaaggcttctgtcctgctctttcttggatcacatgtccactactatgtcatgagaacactcaggtatccccatggagaagcccatgtggagagaaactgaagcttcctgccaacagccattaggaacccaaggcctccagtcagaaattaggcgacattgtggatgtggatccttcagcctcagtcaagatttcatatgactgtaggactggttgacagcttgactgtaacctcatgaaaaaccctgagccagaatcacccagctgtgcagctcttggattgctgaccctcaggaatagatgtctgagataataaatatttgttgttctaaaat

SEQ ID NO: 226365 - DNA, 361 bp, Homo sapiens
aagttatttcatttgctctttattctttatccaaaagaaagtagttctaaagtttaattcagtactgttgaatatatattaccaaagtaattcagtggttccttttccatttcagatagattagtgatatttctgttcacgcttagacatttttatattgatgaccgtaatcctttaacttattttgagccacagattaaaataacttcttaaggttatttgaataaataaatgttatttataatttacataaatttttatgtaaagcatattgccacatgggcaaaaaatgtactttcatataaatcaataagcttcagaaactttggcacatttaattaataaaaatattaaaatggaa

SEQ ID NO: 226366 - DNA, 324 bp, Homo sapiens
gcccaagatgtaggacatcgatgtcaaaggagattgttctggagctttaagatgtaatataatcccagcagttagaaaggccaaggcaatagggtcacatgcgcccaggagttcaagaccttcctgggcaacatagggagaccctgtctctgtgaaaagtaaaacaaattagcctggcatggtggcacacacctgtgatcctagctacttaagatgctgaggtaggagggtcagtagggtccaggagattgaggctgcagtgagccatgatcgtgccactgcactccagtctgggtgacagagcaagactctgtctcaaaaaaa

SEQ ID NO: 226367 - DNA, 402 bp, Homo sapiens
gggctccatccagacttttaagaatcctcatggctctaaaataattgaaatagtgacttctctgttttttatttcatattttatatttcgtagagacagggtctcactctgtcaccaggctggagcgtagtggtgtgatcatagctcactgcagccttgaactcctggcctcaagtgttcctcttgcctcagcctcacaagtagctgggaccacaggcatgcacaagcacgtccagctatttatttatttttaaaatttttggtagagacagggtcttgctgtgttgctcaggctggtctcaaactcctgggctcaagcagtcctcctgccttggcctctcaaagtgctgggattacagatgtgagccactgcgcctggctgaccacttttcttttaattta

SEQ ID NO: 226368 - DNA, 1100 bp, Homo sapiens
taactgtaatagacttatatttctgaacattttagtgcttgccaatatttggtaatatttatgtttcctatatttgtaatgaacattcttcttccggtacattttttgttaaattattgtttgatggataaaagttcaccttttattgtataaaattgactgagattaatttatacacattgacaatgggtaaatagaatttttcagattattaaaagctgaaggatgcccacgtaagcaaaaaaaaaaagaaaaaaccaacaaaaataaacccaaacccctcaaacaatttcgaacacgaaacattcttctgatgccggcatccctgcttgcaggtgtgaagggggcaggaatcagcgaggtgtcctgggctgagtccccggagtgggaagaggtggcaggaaggggatctgaggaggagaacaggggtcctggtggtctgtgcttcttcccagacacgggagctgtagaggagacctctgcagcagatgctaggggggccagtaggcccaggcagtcttgggacttgggtctgtcctgctgtgcatccatagtgggtgctttagaaacgggaggcccacccgaagcccctgttgcaagtgaggacaaagtgtgggaaggccgtgagggtctgcagtccgggatggccttgtcctcaacgtgcagtgcactgttgatgcgctggaatgccgtctctttttccaggtgcaggtcttcagccgtgacccggtaccccagctctaagggaggtggcagcatcaaaggctcccctcgcctgcgtggcagcaggggaatcttgcgtctacggggcctagagtcctgggatctgggggagccacccgttggggcgattgtctgccctggtgctgtatctgcccccttttcacaccgtgtgtgacccaaagagacagcctgaggcctgtcctcactcactgtctttgagtaactgagggtcagctggcagcgggatgaggctggccccctcctctgctttagccccggcaagcctcccgtggagctgtaggagctggagatggcatttcgtttggtgctcgagctcgtccaggatgtctgggatgtgtggttatatctgatttctg

SEQ ID NO: 226369 - DNA, 1082 bp, Homo sapiens
aatataatcttattacctccataaagtacgtagtgttgaagtaagggttttagaatatacatcacctgaaaaatgtacattgtactcattacataatttctcatcatcccctcctcccaccctcctgaaatttccaagtctctgttgtctatcattccacattgacaatgggtaaatagaatttttcagattattaaaagctgaaggatgcccacgtaagcaaaaaaaaaaagaaaaaaccaacaaaaataaacccaaacccctcaaacaatttcgaacacgaaacattcttctgatgccggcatccctgcttgcaggtgtgaagggggcaggaatcagcgaggtgtcctgggctgagtccccggagtgggaagaggtggcaggaaggggatctgaggaggagaacaggggtcctggtggtctgtgcttcttcccagacacgggagctgtagaggagacctctgcagcagatgctaggggggccagtaggcccaggcagtcttgggacttgggtctgtcctgctgtgcatccatagtgggtgctttagaaacgggaggcccacccgaagcccctgttgcaagtgaggacaaagtgtgggaaggccgtgagggtctgcagtccgggatggccttgtcctcaacgtgcagtgcactgttgatgcgctggaatgccgtctctttttccaggtgcaggtcttcagccgtgacccggtaccccagctctaagggaggtggcagcatcaaaggctcccctcgcctgcgtggcagcaggggaatcttgcgtctacggggcctagagtcctgggatctgggggagccacccgttggggcgattgtctgccctggtgctgtatctgcccccttttcacaccgtgtgtgacccaaagagacagcctgaggcctgtcctcactcactgtctttgagtaactgagggtcagctggcagcgggatgaggctggccccctcctctgctttagccccggcaagcctcccgtggagctgtaggagctggagatggcatttcgtttggtgctcgagctcgtccaggatgtctgggatgtgtggttatatctgatttctg

SEQ ID NO: 226370 - DNA, 405 bp, Homo sapiens
tcccgggctcagttgatgcatctcagcgtcccaagtagctgggactacaggcgcatgccaccacacccaactaacttttgtagagacagggttttgccatgttgcccaggctggtgtcaaactccttggcctaatcggttcttccacctcagtcctccaaagtgctgggattacaggagtgagccaccgcaccggtctggttccacattttaaaggatttttagactgtgtttggatcgagtaatcagtttcagattaggagagtgttaagaaagatagttaagttacagtttgtattgtgcacagtttcttggaaatttagtgccagttatttccctagagagattaaaatggagagaaaagataattcagtctgaacaccagtgttgcaaagaacaaagttga

SEQ ID NO: 226371 - DNA, 189 bp, Homo sapiens
gcagtactgcgcggtactctaaggatccctaagaggtggtgtctcccctaaaccttttttcctcctggtgtaactttgtattgtgcacagtttcttggaaatttagtgccagttatttccctagagagattaaaatggagagaaaagataattcagtctgaacaccagtgttgcaaagaacaaagttga

SEQ ID NO: 226372 - DNA, 674 bp, Homo sapiens
gataccaaagaccccagtgcctcagcaccccatgcagagtcctcagcaaagttaaattgtgtttcagctgctctacttaaggggggtagaacactaggaccaccaccaacagtaaaaagtgctggttagccaggatgttcttacagtaatccatcccctgccagcatccagtacacgaggcttctctgtcccggctagaaccattgcctcactgctttatagatgctgagtcttttttttgccatggtcttactgtgtcacccaggctggagtgcagtggcccaatcccagctcactgaagcctcaacctcctgagttcaagcagttctcccgcctcagcctcctgagtagctgggactacaggcacgcaccaccacgcctgactaatgtttttattattttttgtagagacaagcactcactaagttacccaggctgattttgaactcctgagcttaatcagttctcgcctgccttggcctcccaaagtgctatgattacagacatgagccaccacgcttggccctgctgagtcaatctacaggtgtcatcctatgctgtagacagatgcccttatttttttcaaggcaaaaaccctagccatttttctcttccccttcagagtctgaaacatcctctcaacccatccctgttactactgcttggtgctcttg

SEQ ID NO: 226373 - DNA, 439 bp, Homo sapiens
cgggcagatcgcttgagctcaggagttcgagatcagcctggccaacatgttgaaatcccatgtctactaaaaatacaaaaattagccaggcatggtgtcatgcacttctcgtcccagctactcaggaggctgagataggaggatcacttgagcccaggaggtcaagactgcagtgagctatgattgcaccactgcattccagcttggatgatgggagtgagaccgtatctcaaaaaaaaaaaaaaaatctgccttttagcagtctcctcttaaaatggtttttcaataaacagcattaaataaaacttaaacataaagcttttatttagtttttgatgaagtcatagagttcaaacttaaataagtttgtacttatttaagtacatgtttcccttctaatttaaagtaatagagaactcgtttggagattcttttagtt

SEQ ID NO: 226374 - DNA, 403 bp, Homo sapiens
ttttaattgtgtaaataaatgagttcaagttttgtagatgcagttaagaaagtggttataagaaataaagtatataattttaaaacacctcctatttctaatataatattctactgcctatgaattagtactgctgtgtttatgtccactttatttccttactgcctatcaactttgctcaacagtggttgtttcttaatgattattccgtgtgtgagatatctagcttcaactccaccccctacccctgttgctgtgtgagcaggcaaatgatagtagctgtgttagcattaatttaataaaatgtaaacttacttaaacaactggtattcacattatggcgcttcagaatatgtttcaatggaaatgtagagagaagtatatttttatttctaataagtca

SEQ ID NO: 226375 - DNA, 185 bp, Homo sapiens
agccgcccccgtaactgggaagagcttgagaggcaggaaatggcacatatcagtcccatgatgaggaccccaggacttcccaaactttccagagtcttttgtcaccccaccatcatgcagagtttttcttttacagtctcacctctctctagggtagtactccaatgtcccccacagtgattctt

SEQ ID NO: 226376 - DNA, 423 bp, Homo sapiens
tgggcgacagaacgagactccgtctcaaaaaaaacaaaaagaaagaaagaaagaaaatgtacttctaggaattggtgcttaagagataattagaaattctaccaaagatgtataggcaaggatactcatcactgtgttgttcatgatgtaaaaaaaaagaaaagaaacaaactaaatatttgaggggaaaaagccataagtaaataaagtatggtatgtctatcacatggattttttaaatgactactcaatgatatggagaaagtgctcacaatataaagttaaatcaaagattctcaaccagagattattttccccatcaaggagcatttggcaaaaatgtctgggccaggcgtggtggctcatgcctgtaatcccagcactttggtaggccaagacgggtggatcacctgaggtcaggag

SEQ ID NO: 226377 - DNA, 474 bp, Homo sapiens
tcccagatcttggccttgtaattcttcactgctttgtttcctgcccaatactctcaattagacttaaatatatatatatacgtacatatatttattaaatatatatatatataactttaaaagctgttcaaaatgtcctcccccgccccacacacacacgcaaattttgagcagctttttaagttgtcctgaactgggaatttggtccaaattacccagtccacagttattagaagtagtcctaaaaaactgactttgacgttcccattatatattgggaaaaggctgccactctttgaatttagtgttcagaaactgtggcccagctaattgaacattgtcttttgaaaggagttttgtttagagagcagcacggtaatactggttacccggggatggggtggcactcggcagttggcagagagaaagaaatagccacagagaaaaataaattaccgatttctctggctttta

SEQ ID NO: 226378 - DNA, 417 bp, Homo sapiens
atggccagagaaagatgcaggtgctttagacgagggaacaccaaaaaaggtgtggagatgccaaagggcagaactcagaggttgactggacttcactaagcatatggagggctaaggctgtgtctcagtagctccagggcctaggcttttcctgtctcagagttggtcaacattaaatgctttttcttgagtgaacgaaaggaagacttggctatcatatccaggcttcccaagaacgtaggaaacagaagagagaaatgagaggaataagtgagggtccgtgtttgttggttagcagacctctgtttcattactttcaccaactgcactgctatgtatttttagtctatgtaatgtcagttttcttatcaataaaatggcagtcatatcctgttgtgaaggcatgttctaaagagt

SEQ ID NO: 226379 - DNA, 617 bp, Homo sapiens
ctgtcttatttcctgtttctctactaggggcacagcagcctgcagcctaggatatgtcttccttaaatccatgaaggaagacatgtgcttttcaccacaacctccattgttcttgatagtgcctttaggtttgagcttcttcacagactattgtaaatgaaattaattcctttgggaagagattgggagaatctgttttctgacttgcctctccctcttcttttccccttagcaaaataatcagaaccaggtctctggagctaggggtgaagactactgcaggcttctctctgggtgataccacaactctaggagctgagtgctagattggggatagagtagccagaggtcctcttggcttgcctttcccactatggaaccacttcctcatgagccagggcaagacagtcagggttccagtattctcagtgttctgtgcccaaggtagaccctccattccatgagtgggggctgggtcaatgaaggaatccccctcctcttgactgaacttgcctggaagtaacaggtgactggaggctagatgagaaatgttcctatcctcctcttcccagggagaaagcccaccaaatgagagctgtgggatgagggagccctgt

SEQ ID NO: 226380 - DNA, 320 bp, Homo sapiens
gattttaaaaaattaagagattataacagtagaagacattctaaaaatgcatatttccagagtactatattaagctaacagttgaagacaaagtgcaaatcacttataaaagtgacctttatgcgtatacataattttatattatttgactcaaagcaaagttattcataaattatattatcagaaaacagcccgggcaggggggctgacacctttaatcatagtgctttgggagaccaaggcaggcggatcacttaaggtcaggagttccagaccagcctggccaacatggtgaaacccctatctctcctcagaataca

SEQ ID NO: 226381 - DNA, 846 bp, Homo sapiens
gtttcctatgagtatgaatcagcaacatgcagtaacaagcaagtaataatagttctgcgtgtgagtgcctacagagggtaagaaaaatagcatcagattgaaaaagcaagtgcacctgcagaagggacccaggaggctgcagagcacagctcccttgagcatcatctcaaagtgtctcagagcacagtgaccctaattctggcaagtcaggttggcatgagatggatggagcacactgaaatctccagatggtcagacagcccaccctcagctgcccctggagctcggcaaaggcaagctacaaggcactgctacttggccaagagtttaaaacaacagcttctgattctacagtgtctgtggtttcacaaccacttaaccttaagtaaggaacagctagagttagctgaatgaataaatacacgttaacgttacataaagagggaaaaaaagcaatacttgagcacatagacttcaaatagtgtccagctagctgtgtccttggcatcccagtgatctgggtctttatctttgattttctccagcaggtaggcactgagtagatccagggcccagggcgggaaatgcttctgtatcagatgttacctatcaaataaaatgagcctttgaattggccaaaaaaaaaaaaaaaaaaactgcaccacaaaaaaaaactgcgcgggggcctacaatttggcgggggggggaaaaacaggggttttgaaatggggcccagtggcgccaagcgtgttttctcgtaaccccctttttcgttgtcccaagggggaaaattgccggggcccctaaggggaaggcgtaaaaattcaaaagacgggttaccctctt

SEQ ID NO: 226382 - DNA, 495 bp, Homo sapiens
ttagggggtcgccagaagagtattgattggacaaggagagagagccctcttgaagaggaatggtgctaaagtcaacctgaagccttctgaaaattcagcggccctagaactgccccaaatgctatttactgcaaagcagaattctgtatccagaggggttgtcctggactccactcaagaggtttagcttttaaagagcctaaaggattcctggcttatctgttgggtgagtgtgagagtcagatcccaaaggattatatgatatgatggatgatttagcacgctgcttcacaggaatttaacagaaatataagattgctcagctggagcagaattgtctaagagacaaacctttttaaaaccccactaatgtataacctcaagccacaactggattcaattactgcgtggaaagaaaggcattttcttataaagccactctgtttccgtgcctggctgtgagctgggtcagccatgacaaagataagcttgtgt

SEQ ID NO: 226383 - DNA, 856 bp, Homo sapiens
tttaattaactttggaagatgtcttcgattttaattgtgtcttatgctagagttggtagaagaatacagactgacagtgaaagaaagctactgcatttttgaagatctggaacctgaccgatgctatcaagtgtgggtgatggctgtgaacttcactggatgtagcctgcccagtgaaagggccatctttaggacaggtaaggagatggatgctaagggtgcattagaagacaacgctcagttcttcacagactcttgagatcagccagtaagtgtttattaagcacctattgtgtgttgagtgttgtgcaaagtgctggttatacaacgatgacttaagcctggggtcctgttctcaagaagctcatgctcaggtggggagatggaaaaacagaggatcatagaaaatgtgtggtaagggccatatccagatatacacaggttattatgagaacactccagaggggcacccaagttggcctggggcaggggcaggatcggaactgcttccctagaactgatgcctgcagaaaatgctttaaaggatcaataggaagtaatgcgttaaaggaggatattccacttgaaaaagacatgagcagaggcatcaaggcaagaaacagtatggagtgtgcaggacactggaagaagtttggtattatttcttagacttaaacaaaggaaagacaagataagaaaggctaacatagagaggccgtgtttgcaaggtaagaagcttgggctgcgtgtgggtgctgggaacccccaaaaggttttaagcagtggtatttaactggaaatgcattctcacgatgaaatcttttcacagggtattgaagctcatccaaggctgcac

SEQ ID NO: 226384 - DNA, 3524 bp, Homo sapiens
atgaaagtttttatggaccagaaaagggccacaacatattatctcatccagagacccaaagccaaaactcagctgacaggaatgtttcaaaggacacaaagagagatgtggactcaaagtcaccggggatgcctttatttgaagcagaggaaggagttctatcacgaacccagatatttcctaccactattaaagtcattgatccagaatttctggaggagccacctgcacttgcatttttatataaggatctgtatgaagaagcagttggagagaaaaagaaggaagaggagacagcttctgaaggtgacagtgtgaattctgaggcatcatttcccagcagaaattctgacactgatgatggaacaggaatatattttgagaagtacatactcaaagatgacattctccatgacacatctctaactcaaaaggaccagggccaaggtctggaagaaaaacgagttggtaaggatgattcataccaaccgatagctgcagaaggggaaatttggggaaagtttggaactatttgcagggagaagagtctggaagaacagaaaggtgtttatggggaaggagaatcagtagaccatgtggagaccgttggtaacgtagcgatgcagaagaaagctcccatcacagaggacgtcagagtggctacccagaaaataagttatgcggttccatttgaagacacccatcatgttctggagcgtgcagatgaagcaggcagtcacggtaatgaagtcggaaatgcaagtccagaggtcaatctgaatgtcccagtacaagtgtccttcccggaggaagaatttgcatctggtgcaactcatgttcaagaaacatcactagaagaacctaaaatcctggtcccacctgagccaagtgaagagaggctccgtaatagccctgttcaggatgagtatgaatttacagaatccctgcataatgaagtggttcctcaagacatattatcagaagaactgtcttcagaatccacacctgaagatgtcttatctcaaggaaaggaatcctttgagcacatcagtgaaaatgaatttgcgagtgaggcagaacaaagtacacctgctgaacaaaaagagttgggcagcgagaggaaagaagaagaccaattatcatctgaggtagtaactgaaaaggcacaaaaagagctgaaaaagtcccagattgacacatactgttacacctgcaaatgtccaatttctgccactgacaaggtgtttggcacccacaaagaccatgaagtttcaacgcttgacacagctataagtgctgtaaaggttcaattagcagaatttctagaaaatttacaagaaaagtccttgaggattgaagcctttgttagtgagatagaatccttttttaataccattgaggaaaactgtagtaaaaatgagaaaaggctagaagaacagaatgaggaaatgatgaagaaggttttagcacagtatgatgagaaagcccagagctttgaggaagtgaagaagaagaagatggagttcctgcatgagcagatggtccactttctgcagagcatggacactgccaaagacaccctggagaccatcgtgagagaagcagaggagcttgatgaggccgtcttcctgacttcgtttgaggaaatcaatgaaaggttgctttctgcaatggagagcactgcttctttagagaaaatgcctgctgcgttttcccttttcgaacattatgatgacagctcggcaagaagtgaccagatgttaaaacaagtggctgttccacagcctcctagattagaacctcaggaaccaaattctgccaccagcacaacaattgcagtttactggagcatgaacaaggaagatgtcattgattcatttcaggtttactgcatggaggagccacaagatgatcaagaagtaaatgagttggtagaagaatacagactgacagtgaaagaaagctactgcatttttgaagatctggaacctgaccgatgctatcaagtgtgggtgatggctgtgaacttcactggatgtagcctgcccagtgaaagggccatctttaggacagcaccctccacccctgtgatccgcgctgaggactgtactgtgtgttggaacacagccactatccgatggcggcccaccaccccagaggccacggagacctacactctggagtactgcagacagcactctcctgagggagagggcctcagatctttctctggaatcaaaggactccagctgaaagttaacctccaacccaatgataactactttttctatgtgagggccatcaatgcatttgggacaagtgaacagagtgaagctgctctcatctccaccagaggaaccagatttctcttgttgagagaaacagctcatcctgctctacacatttcctcaagtgggacagtgatcagctttggtgagaggagacggctgacggaaatcccgtcagtgctgggtgaggagctgccttcctgtggccagcattactgggaaaccacagtcacagactgcccagcatatcgactcggcatctgctccagctcggctgtgcaggcaggtgccctaggacaaggggagacctcatggtacatgcactgctctgagccacagagatacacatttttctacagtggtattgtgagtgatgttcatgtgactgagcgtccagccagagtgggcatcctgctggactacaacaaccagagacttatcttcatcaacgcagagagcgagcagttgctcttcatcatcaggcacaggtttaatgagggtgtccaccctgcctttgccctggagaaacctggaaaatgtactttgcacctggggatagagcccccggattctgtaaggcacaagtgatccttggctttcagaatttgcaagaacagcgatttgaattttgggggggtctgctgttcattcctttaggtgctatacattattcaaaaagtctcccgcgcatttgcactaatgatggctgcatgcatagcaatcagcatgtgagcaaaatcgacaagaaaaccttgactttacagagcagtgtgtgagtaaacagaatgaaaacaacaacctccactctttagtttatataagtttgagttctttcctaaattaaaagatctacacttgagttgggaaccgaaagagaaaaatggacttccatctgttttactggtaaaggaaatcctctgatggacaggtcagagtgaaggaaggttgtgctggtaagacatctctgacgaagagccatggatgctttccacaaaatgtcacctcgctgcactaaaggatgatgaatcctaatcattaaaggaattgtttcagctgatttaaatttataatgaactcttttgtaataatgtatactgtagaacatgagtctctcctccctaaaattttaaatgtagaaaagtgctatatattagaaatttccattttgttaaataaatggttagagtctataaagccagtcgtgttatgtgaacttactccatgtaacttactggc

SEQ ID NO: 226385 - DNA, 1531 bp, Homo sapiens
aaagtctagtgggatttataggaagctactattaggggctgtttggggatgggtgagaactgggcaatgtggaaggcagagaagggagagagacatcaccatctatatttgatcccttttgggtttttaacacagaatacactttctgatgaaaaattgaaaacagaatcatgccgaagccgtggaagatcacgtgcttctcaggtcccaggaaagcaagctggcattgctccacgactgtcctgactctctttctgcagcaccctccacccctgtgatccgcgctgaggactgtactgtgtgttggaacacagccactatccgatggcggcccaccaccccagaggccacggagacctacactctggagtactgcagacagcactctcctgagggagagggcctcagatctttctctggaatcaaaggactccagctgaaagttaacctccaacccaatgataactactttttctatgtgagggccatcaatgcatttgggacaagtgaacagagtgaagctgctctcatctccaccagaggaaccagatttctcttgttgagagaaacagctcatcctgctctacacatttcctcaagtgggacagtgatcagctttggtgagaggagacggctgacggaaatcccgtcagtgctgggtgaggagctgccttcctgtggccagcattactgggaaaccacagtcacagactgcccagcatatcgactcggcatctgctccagctcggctgtgcaggcaggtgccctaggacaaggggagacctcatggtacatgcactgctctgagccacagagatacacatttttctacagtggtattgtgagtgatgttcatgtgactgagcgtccagccagagtgggcatcctgctggactacaacaaccagagacttatcttcatcaacgcagagagcgagcagttgctcttcatcatcaggcacaggtttaatgagggtgtccaccctgcctttgccctggagaaacctggaaaatgtactttgcacctggggatagagcccccggattctgtaaggcacaagtgatccttggctttcagaatttgcaagaacagcgatttgaattttgggggggtctgctgttcattcctttaggtgctatacattattcaaaaagtctcccgcgcatttgcactaatgatggctgcatgcatagcaatcagcatgtgagcaaaatcgacaagaaaaccttgactttacagagcagtgtgtgagtaaacagaatgaaaacaacaacctccactctttagtttatataagtttgagttctttcctaaattaaaagatctacacttgagttgggaaccgaaagagaaaaatggacttccatctgttttactggtaaaggaaatcctctgatggacaggtcagagtgaaggaaggttgtgctggtaagacatctctgacgaagagccatggatgctttccacaaaatgtcacctcgctgcactaaaggatgatgaatcctaatcattaaaggaattgtttcagctg

SEQ ID NO: 226386 - DNA, 3480 bp, Homo sapiens
atgaaagtttttatggaccagaaaagggccacaacatattatctcatccagagacccaaagccaaaactcagctgacaggaatgtttcaaaggacacaaagagagatgtggactcaaagtcaccggggatgcctttatttgaagcagaggaaggagttctatcacgaacccagatatttcctaccactattaaagtcattgatccagaatttctggaggagccacctgcacttgcatttttatataaggatctgtatgaagaagcagttggagagaaaaagaaggaagaggagacagcttctgaaggtgacagtgtgaattctgaggcatcatttcccagcagaaattctgacactgatgatggaacaggaatatattttgagaagtacatactcaaagatgacattctccatgacacatctctaactcaaaaggaccagggccaaggtctggaagaaaaacgagttggtaaggatgattcataccaaccgatagctgcagaaggggaaatttggggaaagtttggaactatttgcagggagaagagtctggaagaacagaaaggtgtttatggggaaggagaatcagtagaccatgtggagaccgttggtaacgtagcgatgcagaagaaagctcccatcacagaggacgtcagagtggctacccagaaaataagttatgcggttccatttgaagacacccatcatgttctggagcgtgcagatgaagcaggcagtcacggtaatgaagtcggaaatgcaagtccagaggtcaatctgaatgtcccagtacaagtgtccttcccggaggaagaatttgcatctggtgcaactcatgttcaagaaacatcactagaagaacctaaaatcctggtcccacctgagccaagtgaagagaggctccgtaatagccctgttcaggatgagtatgaatttacagaatccctgcataatgaagtggttcctcaagacatattatcagaagaactgtcttcagaatccacacctgaagatgtcttatctcaaggaaaggaatcctttgagcacatcagtgaaaatgaatttgcgagtgaggcagaacaaagtacacctgctgaacaaaaagagttgggcagcgagaggaaagaagaagaccaattatcatctgaggtagtaactgaaaaggcacaaaaagagctgaaaaagtcccagattgacacatactgttacacctgcaaatgtccaatttctgccactgacaaggtgtttggcacccacaaagaccatgaagtttcaacgcttgacacagctataagtgctgtaaaggttcaattagcagaatttctagaaaatttacaagaaaagtccttgaggattgaagcctttgttagtgagatagaatccttttttaataccattgaggaaaactgtagtaaaaatgagaaaaggctagaagaacagaatgaggaaatgatgaagaaggttttagcacagtatgatgagaaagcccagagctttgaggaagtgaagaagaagaagatggagttcctgcatgagcagatggtccactttctgcagagcatggacactgccaaagacaccctggagaccatcgtgagagaagcagaggagcttgatgaggccgtcttcctgacttcgtttgaggaaatcaatgaaaggttgctttctgcaatggagagcactgcttctttagagaaaatgcctgctgcgttttcccttttcgaacattatgatgacagctcggcaagaagtgaccagatgttaaaacaagtggctgttccacagcctcctagattagaacctcaggaaccaaattctgccaccagcacaacaattgcagtttactggagcatgaacaaggaagatgtcattgattcatttcaggtttactgcatggaggagccacaagatgatcaagaagtaaatgagttggtagaagaatacagactgacagtgaaagaaagctactgcatttttgaagatctggaacctgaccgatgctatcaagtgtgggtgatggctgtgaacttcactggatgtagcctgcccagtgaaagggccatctttaggacagcaccctccacccctgtgatccgcgctgaggactgtactgtgtgttggaacacagccactatccgatggcggcccaccaccccagaggccacggagacctacactctggagtactgcagacagcactctcctgagggagagggcctcagatctttctctggaatcaaaggactccagctgaaagttaacctccaacccaatgataactactttttctatgtgagggccatcaatgcatttgggacaagtgaacagagtgaagctgctctcatctccaccagaggaaccagatttctcttgttgagagaaacagctcatcctgctctacacatttcctcaagtgggacagtgatcagctttggtgagaggagacggctgacggaaatcccgtcagtgctgggtgaggagctgccttcctgtggccagcattactgggaaaccacagtcacagactgcccagcatatcgactcggcatctgctccagctcggctgtgcaggcaggtgccctaggacaaggggagacctcatggtacatgcactgctctgagccacagagatacacatttttctacagtggtattgtgagtgatgttcatgtgactgagcgtccagccagagtgggcatcctgctggactacaacaaccagagacttatcttcatcaacgcagagagcgagcagttgctcttcatcatcaggcacaggtttaatgagggtgtccaccctgcctttgccctggagaaacctggaaaatgtactttgcacctggggatagagcccccggattctgtaaggcacaagtgatccttggctttcagaatttgcaagaacagcgatttgaattttgggggggtctgctgttcattcctttaggtgctatacattattcaaaaagtctcccgcgcatttgcactaatgatggctgcatgcatagcaatcagcatgtgagcaaaatcgacaagaaaaccttgactttacagagcagtgtgtgagtaaacagaatgaaaacaacaacctccactctttagtttatataagtttgagttctttcctaaattaaaagatctacacttgagttgggaaccgaaagagaaaaatggacttccatctgttttactggtaaaggaaatcctctgatggacaggtcagagtgaaggaaggttgtgctggtaagacatctctgacgaagagccatggatgctttccacaaaatgtcacctcgctgcactaaaggatgatgaatcctaatcattaaaggaattgtttcagctgatttaaatttataatgaactcttttgtaataatgtatactgtagaacatgagtctctcctccctaaaattttaaatgtagaaaagtgctatatattagaaatttccattttgttaaataaatggttagagtctata

SEQ ID NO: 226387 - DNA, 1610 bp, Homo sapiens
cagctcggtacctgcattacgtccatggcggagcacaagatgatcaagaagtaatgagttggtagaagaatacagactgacagtgaaagaaagctactgcatttttgaagatctggaacctgaccgatgctatcaagtgtgggtgatggctgtgaacttcactggatgtagcctgcccagtgaaagggccatctttaggacagcaccctccacccctgtgatccgcgctgaggactgtactgtgtgttggaacacagccactatccgatggcggcccaccaccccagaggccacggagacctacactctggagtactgcagacagcactctcctgagggagagggcctcagatctttctctggaatcaaaggactccagctgaaagttaacctccaacccaatgataactactttttctatgtgagggccatcaatgcatttgggacaagtgaacagagtgaagctgctctcatctccaccagaggaaccagatttctcttgttgagagaaacagctcatcctgctctacacatttcctcaagtgggacagtgatcagctttggtgagaggagacggctgacggaaatcccgtcagtgctgggtgaggagctgccttcctgtggccagcattactgggaaaccacagtcacagactgcccagcatatcgactcggcatctgctccagctcggctgtgcaggcaggtgccctaggacaaggggagacctcatggtacatgcactgctctgagccacagagatacacatttttctacagtggtattgtgagtgatgttcatgtgactgagcgtccagccagagtgggcatcctgctggactacaacaaccagagacttatcttcatcaacgcagagagcgagcagttgctcttcatcatcaggcacaggtttaatgagggtgtccaccctgcctttgccctggagaaacctggaaaatgtactttgcacctggggatagagcccccggattctgtaaggcacaagtgatccttggctttcagaatttgcaagaacagcgatttgaattttgggggggtctgctgttcattcctttaggtgctatacattattcaaaaagtctcccgcgcatttgcactaatgatggctgcatgcatagcaatcagcatgtgagcaaaatcgacaagaaaaccttgactttacagagcagtgtgtgagtaaacagaatgaaaacaacaacctccactctttagtttatataagtttgagttctttcctaaattaaaagatctacacttgagttgggaaccgaaagagaaaaatggacttccatctgttttactggtaaaggaaatcctctgatggacaggtcagagtgaaggaaggttgtgctggtaagacatctctgacgaagagccatggatgctttccacaaaatgtcacctcgctgcactaaaggatgatgaatcctaatcattaaaggaattgtttcagctgatttaaatttataatgaactcttttgtaataatgtatactgtagaacatgagtctctcctccctaaaattttaaatgtagaaaagtgctatatattagaaatttccattttgttaaataaatggttagagtctata

SEQ ID NO: 226388 - DNA, 1667 bp, Homo sapiens
aaagtctagtgggatttataggaagctactattaggggctgtttggggatgggtgagaactgggcaatgtggaaggcagagaagggagagagacatcaccatctatatttgatcccttttgggtttttaacacagaatacactttctgatgaaaaattgaaaacagaatcatgccgaagccgtggaagatcacgtgcttctcaggtcccaggaaagcaagctggcattgctccacgactgtcctgactctctttctgcagcaccctccacccctgtgatccgcgctgaggactgtactgtgtgttggaacacagccactatccgatggcggcccaccaccccagaggccacggagacctacactctggagtactgcagacagcactctcctgagggagagggcctcagatctttctctggaatcaaaggactccagctgaaagttaacctccaacccaatgataactactttttctatgtgagggccatcaatgcatttgggacaagtgaacagagtgaagctgctctcatctccaccagaggaaccagatttctcttgttgagagaaacagctcatcctgctctacacatttcctcaagtgggacagtgatcagctttggtgagaggagacggctgacggaaatcccgtcagtgctgggtgaggagctgccttcctgtggccagcattactgggaaaccacagtcacagactgcccagcatatcgactcggcatctgctccagctcggctgtgcaggcaggtgccctaggacaaggggagacctcatggtacatgcactgctctgagccacagagatacacatttttctacagtggtattgtgagtgatgttcatgtgactgagcgtccagccagagtgggcatcctgctggactacaacaaccagagacttatcttcatcaacgcagagagcgagcagttgctcttcatcatcaggcacaggtttaatgagggtgtccaccctgcctttgccctggagaaacctggaaaatgtactttgcacctggggatagagcccccggattctgtaaggcacaagtgatccttggctttcagaatttgcaagaacagcgatttgaattttgggggggtctgctgttcattcctttaggtgctatacattattcaaaaagtctcccgcgcatttgcactaatgatggctgcatgcatagcaatcagcatgtgagcaaaatcgacaagaaaaccttgactttacagagcagtgtgtgagtaaacagaatgaaaacaacaacctccactctttagtttatataagtttgagttctttcctaaattaaaagatctacacttgagttgggaaccgaaagagaaaaatggacttccatctgttttactggtaaaggaaatcctctgatggacaggtcagagtgaaggaaggttgtgctggtaagacatctctgacgaagagccatggatgctttccacaaaatgtcacctcgctgcactaaaggatgatgaatcctaatcattaaaggaattgtttcagctgatttaaatttataatgaactcttttgtaataatgtatactgtagaacatgagtctctcctccctaaaattttaaatgtagaaaagtgctatatattagaaatttccattttgttaaataaatggttagagtctata

SEQ ID NO: 226389 - DNA, 2732 bp, Homo sapiens
atgaaagtttttatggaccagaaaagggccacaacatattatctcatccagagacccaaagccaaaactcagctgacaggaatgtttcaaaggacacaaagagagatgtggactcaaagtcaccggggatgcctttatttgaagcagaggaaggagttctatcacgaacccagatatttcctaccactattaaagtcattgatccagaatttctggaggagccacctgcacttgcatttttatataaggatctgtatgaagaagcagttggagagaaaaagaaggaagaggagacagcttctgaaggtgacagtgtgaattctgaggcatcatttcccagcagaaattctgacactgatgatggaacaggaatatattttgagaagtacatactcaaagatgacattctccatgacacatctctaactcaaaaggaccagggccaaggtctggaagaaaaacgagttggtaaggatgattcataccaaccgatagctgcagaaggggaaatttggggaaagtttggaactatttgcagggagaagagtctggaagaacagaaaggtgtttatggggaaggagaatcagtagaccatgtggagaccgttggtaacgtagcgatgcagaagaaagctcccatcacagaggacgtcagagtggctacccagaaaataagttatgcggttccatttgaagacacccatcatgttctggagcgtgcagatgaagcaggcagtcacggtaatgaagtcggaaatgcaagtccagaggtcaatctgaatgtcccagtacaagtgtccttcccggaggaagaatttgcatctggtgcaactcatgttcaagaaacatcactagaagaacctaaaatcctggtcccacctgagccaagtgaagagaggctccgtaatagccctgttcaggatgagtatgaatttacagaatccctgcataatgaagtggttcctcaagacatattatcagaagaactgtcttcagaatccacacctgaagatgtcttatctcaaggaaaggaatcctttgagcacatcagtgaaaatgaatttgcgagtgaggcagaacaaagtacacctgctgaacaaaaagagttgggcagcgagaggaaagaagaagaccaattatcatctgaggtagtaactgaaaaggcacaaaaagagctgaaaaagtcccagattgacacatactgttacacctgcaaatgtccaatttctgccactgacaaggtgtttggcacccacaaagaccatgaagtttcaacgcttgacacagctataagtgctgtaaaggttcaattagcagaatttctagaaaatttacaagaaaagtccttgaggattgaagcctttgttagtgagatagaatccttttttaataccattgaggaaaactgtagtaaaaatgagaaaaggctagaagaacagaatgaggaaatgatgaagaaggttttagcacagtatgatgagaaagcccagagctttgaggaagtgaagaagaagaagatggagttcctgcatgagcagatggtccactttctgcagagcatggacactgccaaagacaccctggagaccatcgtgagagaagcagaggagcttgatgaggccgtcttcctgacttcgtttgaggaaatcaatgaaaggttgctttctgcaatggagagcactgcttctttagagaaaatgcctgctgcgttttcccttttcgaacattatgatgacagctcggcaagaagtgaccagatgttaaaacaagtggctgttccacagcctcctagattagaacctcaggaaccaaattctgccaccagcacaacaattgcagtttactggagcatgaacaaggaagatgtcattgattcatttcaggtttactgcatggaggagccacaagatgatcaagaagtaaatgagttggtagaagaatacagactgacagtgaaagaaagctactgcatttttgaagatctggaacctgaccgatgctatcaagtgtgggtgatggctgtgaacttcactggatgtagcctgcccagtgaaagggccatctttaggacaggtaaggagatggatgctaagggtgcattagaagacaacgctcagttcttcacagactcttgagatcagccagtaagtgtttattaagcacctattgtgtgttgagtgttgtgcaaagtgctggttatacaacgatgacttaagcctggggtcctgttctcaagaagctcatgctcaggtggggagatggaaaaacagaggatcatagaaaatgtgtggtaagggccatatccagatatacacaggttattatgagaacactccagaggggcacccaagttggcctggggcaggggcaggatcggaactgcttccctagaactgatgcctgcagaaaatgctttaaaggatcaataggaagtaatgcgttaaaggaggatattccacttgaaaaagacatgagcagaggcatcaaggcaagaaacagtatggagtgtgcaggacactggaagaagtttggtattatttcttagacttaaacaaaggaaagacaagataagaaaggctaacatagagaggccgtgtttgcaaggtaagaagcttgggctgcgtgtgggtgctgggaacccccaaaaggttttaagcagtggtatttaactggaaatgcattctcacgatgaaatcttttcacagggtattgaagctcatccaaggctgcac

SEQ ID NO: 226390 - DNA, 414 bp, Homo sapiens
gatggagttcctgcatgagcagatggtccactttctgcagagcatggacactgccaaagacaccctggagaccatcgtgagagaagcagaggagcttgatgaggccgtcttcctgacttcgtttgaggaaagtaaaatgggctcaaacaccttgcgcccactctggcacatctacttttaaagcttcatttttcactattccttaagattatttatatctctgtgtgggatttatataattctggcatttaaacattatttgggcatgcctgatgcctatagaaaaggcccagcaaaccctgaaagcctcaatgcccagatccagctgaaagatacagctgaaagagacagcctgcagcatcatcatccattgcgtcccactggattcattggtcactgtctaagagggaggga

SEQ ID NO: 226391 - DNA, 998 bp, Homo sapiens
tttttttatgtttctcaaatccccctttattttttattttttgagacggagtcttgctctgacgcccaggctggagtacagtggtgtgatctcggctcactgcaacttctgtctcccaggttcaagtgattctcctgcctcaggctcccaagtagctgggattacaggtgtgcaccgccacgcccagctaatttttgtatttttagtagagacggggtttcgccatgttggccaggctggtcttgaactcctgacctcaggcgatccacctgccttggcctcccaaagtgctgggattacaggagtgagccaccatgcctggcctgaaatccccctttgaaaatagaaatacatgtcttctgaaagtttttttaaattatttttttccagaattatatttttgggattttgatcttttgggattgtaattttcaggattttagactttagggcttttgatctttcaggctcagaaggaaagaaaacatctcccaggaccagatgtggagtagatgggagttggagagaagctgaagcccaggcccagcaacaggctgggggcccaggtgcttcgggggtcccagccattaacagagcttcgtgcaggtgggcagctggagccaggggggctcactctcttgtgaaacaggcagaaaaacaggccaaactctgctgggggctgcagcctttagggagcagctggtctcctgaggcaaaaggacacatactttgttgaggccaggaactggaccagcctgtcgggggcttggtaactccatccagaacatcctcagggtctccacaaggcagacacagcacagtaccacaggagatggctgggacaaagaaccaggagctggaggggtgaggcggtaggggggcagcaatcctgaaacaatgagaacatagagaagagaaagaaaagtcataccagctcggaagagcttgcaaaccgatgttccaaaacacgcccagaattctaatgttcacaaagttat

SEQ ID NO: 226392 - DNA, 554 bp, Homo sapiens
ccaacaaaaagctaacaataaaatggatccctagagcctgtaaagaagctctaagctgttcccaccggtggcctgggagagagagatctagtaagaggagtcccaaagtaacacgagatatctagaaggtggaaagtaggcaaaagcagtttctcaaactttagaacacaatctcttttaaaagaaaaccaaagacacttcacaagtgcggacattatttttattataatgttctaaaatatatccaaatccactttaggttcagtttaagctcctgaagcttttaattttctaaaacaataaaaactaccaatacagtttaaattaatattgtttttaacaagatgaatggtggtgttttgatgaaactaaattctttcttatggactgctacaatgcaaattcttttgagttaacagtctattattttgtgttgtgggttgattcagttctctccttttccatattcaagcccctagaaagttttcctatagcttgctgatgaggtccattgaccttcccttggtttaataaatacttcacttacatacaaa

SEQ ID NO: 226393 - DNA, 430 bp, Homo sapiens
cagtattcaatacatgaatataaggaaaatctggtaattttttccatttctttaagaattcattttatccttgctcttcaatttgtgctggaaatgtagatagcatcagattaaacagttgttactggctcaacttagctccataaatttatttttagtgaagtcagcaatttttttagggcaaggatgtaattatttgtttagattcggagtcatgtttctgaaggacccactgttcatggactccctagaagatatccttggatcttttggcctgggtgctaagaatctcagtttgaaaaaaaaagcattaaagaaactaaagtataatcaaacaaatttcatttaaactttgaattattactgcacagtatgttttcttattatattattattaaaattaaaagtttttaaaaatgtaatttttgta

SEQ ID NO: 226394 - DNA, 428 bp, Homo sapiens
tgggtgatgccacgttactttatatatcaataagataatgtttaaaatgttgccagttataaatgtaataaataatgaattgtaaacagtattccaatgttaggagatgttaatatataagagaatagtagcttatataagagaatagtgagaaaatgagcatctgagaatgactgaaatacaacgatacatctaatctttaatagatacctcaatgtagatatgattgtatcattttacttaattaaaatgtctttgtaaaaattagccgggcgcggtagcgggcgcctgtagtcccagctactcgggaggctgaggcaggagaatgtcgtgaacccgggaagcggagcttgcagtgagccgagattgcgccactgcagtccgcagtccggcctgggcgacagagcgagactccgtctcaaaaaaaa

SEQ ID NO: 226395 - DNA, 338 bp, Homo sapiens
accggttttgtgaggggctggcgcagacggctgtggacaaggagcttgtaaaatgggaagcggcgaacagtcccaccacctcaccctgagacactctccaccgaggaagcagccttcagtttggcttttagtgcgctgtaggatagggactgtcgtgtccctcctgtagtcctagagcgtttctgttgaaccctaatttttaggtctcaaagagtgggcttcagagataaagaggtttaggcagggacagggcgaggagcgtggggtgtactttcactttccgataagtgaggtaatccaggaaagtgagttaatttggccaaataaagcttgttttt

SEQ ID NO: 226396 - DNA, 468 bp, Homo sapiens
taatataatctggaaaggatggaatcaaacaatatgcaaatacttcagtgcctgctatcaaaactgctttactcagtgattccttcctaggcctccaaccatatggccgacagccaacctggtgctactcaaagtatatagaagccttagaacaggagagaattcttcttaagatccaagaagaactagaaaaaaagttgtttgcaggcttgcaacctctcacaaattttaaggctagctcttcaactatgtctttgaaaaagaatatgtctgcccacagcagccagaagtgacagcattcttgtgaatgtttacatcctgctgctgataggttcaaggaattctttaaaccagattctgctgacatgagaagctccagtgatttgtttttttgaaggtctgtatcagagcaagcctaacatctaaataaagtttgattctggattttccaggtgggaaataaataaa

SEQ ID NO: 226397 - DNA, 632 bp, Homo sapiens
aaactattttaaatatggcctgactttgggaatgaaggctttacttggacatggatatgactgtaggcattttcctttatattcctttataacttactgttatgcatctactagcagctgttaaggtcactccaaaactgacattctctccccatgtttgcttccactaaaacccatctggtgatggaactgtgcataccttcatcaagtattttgaaaacaaaacaaaacaaaataagcaaaaacaaagtaaacaaaagacagatatctgaatcagacagaattagttttggatcccagtctgtcaccagttacttgtttaaaatggagcaggttacttaacaactctgagaaatatttacttaaaacactcaagtataatatgtattttgcagacattttgtgataagtaaatgaggtatgtgtgcatgtgtgggcttgtgtataaaataaactctcttgattggcctatataactgtctttttcattcaggatgaatggtgggtaacttttttactcactcaagctacatcgtattctattcagattaatctaatttcttatctgaaatagttaaaatatgtgatatactttgacaaatatcaaggtaataaacatttgaaaaaggaca

SEQ ID NO: 226398 - DNA, 341 bp, Homo sapiens
cagccaacgttggaaggggtgctgtgttactgaggcgcagcacacaaaagcaggagacactcagcagacattggaaggggcgctgtgttactgaggcacagcacacaaaagcaggagacactcagcagacattggaaagggcgctctgttacttaggtgcagcatggtaccatgggaagggcagacaccagggtgaatcctggctctgtgatttaggcagcttatttcatcaccctgagcctcggttttttcgtctgtaaatgagtatgagaatacctccctcacaggattatatgtgacatgattagaaaatgcctagccaaaaaaagaataaaaaattt

SEQ ID NO: 226399 - DNA, 793 bp, Homo sapiens
tgcagtggctcacgcctgtaatcccagtactttgggaggccaaagctggtggattacttaaggtcaggagttcgagaccaacctggccaacatgatgaaaccctgtctctactaaaaatacaaaaattagttgggcacgatggcagctgcctgtaatctcagctactcaggaggctgaagcacttgaaactgagagatggagtttgccgtaagccgagattgcaccactgcagtccagcctgggtgacagggcaagactccataattaatacatacatacatacatacatacatacatacatacatacatacatcaagggggtgatgtctctgtttgtgaatggtaccagcatgtgtacaagtctctctgccctataccctgggcctcagcctgggatgaccatgggcagaaggcacatttcttgggaagatctgaactggctccaccccacctctgtccttctcccaggatggtaaagaagaacctgggtatatggtgatccctaccctgggaccctgaatcatgtcttaataataaaaattcactggaaaagtgagagaggcggggaagaaaactgcagcagcagggagtaaaagaacctcacttagatcattgtgacaggcctgggaggttgttgcccaatatcctctctcactccttcttcccagtaaaagaatacataagttttagctaaatacatatcagaaggaagactatgttttccagcctcccttgcagctaagtggggtcatgtgactagttcaagccaaaggacatgaataaaagtattag

SEQ ID NO: 226400 - DNA, 247 bp, Homo sapiens
gacttggtcaagtttgatattgtgggctacggtggctttgggatgcccctgcccaaattggggcaagaggaagccctttaccaggcactgaagaatgcgtaccctcacctccacatctacaagaaggaggggtttccaaaacacttccatctcgctaaacatgaccgggttctgccaatcgtgatgtatgccaactttggttacagtatcaatggggtaagttcattctaaaatgaataaagtcacc

SEQ ID NO: 226401 - DNA, 436 bp, Homo sapiens
aaatcaaaatcaaccatatcttgggccataaaacaaacttcgacaagttttaatgaattggagtcatacagagtgtgtttcttgaccacaacagaatcaaattaaatattaaaacaaaatacaacaggaaaatctccaaacactaagaaataagtacagcataatttgtaataattcgtgggttagagaagaagtctcaagggaatttacaaatacattcaactaaatgaaaatgaaattatagcatatcaaaatttgtgggagtagctaaagagcacagagagggaaatttatacaagagcaaactaaactcaaaccaagctgaaataaggaactaataagaataaaagtagataatgattacagtgaaaacagaaaaaatcaagatggataatgctgatgaaataaaaatcttggctttatggagattaataaa

SEQ ID NO: 226402 - DNA, 216 bp, Homo sapiens
ttcttccttcctatttcaggccaaattcaagcctatctactttaaatctgggcacaactacagtcatcctaactggtgtggctataggttattctcccccagttgatcttatgcagcaccctaaaccaactgctatcatttaccattccctactttaaaacttccaaatcctttttatttcttttacaatcaaatccaaaactcaatgtcttctgc

SEQ ID NO: 226403 - DNA, 379 bp, Homo sapiens
ggaacatcacacaccagggcctgtcatggggtgggggtagaggggagggatagcattaggacatatacctaatgtaaatgatgagttaatgggtgcagcacaccaacatggcacatgtatacatatgtaacaaacctgcacgttgtgcacatgtaccttagaacttaaagtataatttaaaaaatcataactgcttaaaactcactgtagtacacactgtcctgctggaatattgcagctgcctcccgttgctttcgtggtgggctcaagtgtcgtgactatccaccgaaaacgttgtgtgacgctcatcaggcatctctacttgcacagttcgtctctccagtaaattgcactgaagtaaaaagtaatttccctcaaa

SEQ ID NO: 226404 - DNA, 611 bp, Homo sapiens
cattattgaataccaggggtaccacacatgagctgatgaggccaggctcctcccctgcgtaaggtgcgaatcctagtgactccgccccgttcccccagcacgcacacgaggatgcccaggtaaaccataggtagtatcggaaaaggcaacatttgattggttaaaaggcattattcggaaagaatcaattgggaaagggcagacaaacgggcagacgttctgcccctgggtcgctggtttcatctgggaccagcaatctggtctttcagacttcaggctgttctgggcttgaaggtgaggtctcaccggggacccttccctatctgcctaggcatttgtctgcctcctgcttgtatcatcattttcttaattgcctgcagtgactttatcaagccccctcctgagctgcgtaataataatactgtgttaggattttcagtgttattactcatcatcagcccggacagcccagaattccaggccttcttcctgttaaacgaacggagagcagagcctttgagctccacagttcactatctctgtgtcagccttaaccatcccattggcctgttggggctgaagataaatccccaggcattaagcatattcca

SEQ ID NO: 226405 - DNA, 513 bp, Homo sapiens
ggagaggagaggattggcattattcaagttacatttttaaaagaatcattctggctgttctgcatggagaataactacaagaagagaaaggtggaagcagggtgactggttaggggctattttagacataaaggtaaattcctggacaagggttttagtggtgaaggtaatgtttggattctgaagattttttgaagccagagctaacaaatggataatgtaaggcttattttttacagaattttaaattatgcctttttaaaaaagagtcaggcaatgatataaaatagataatttaatttggaaaatgattttataaaacgtatttgctcattccgtgtcatggtgccttattttttaatggttaatgggctctttgaaagtgaagaatttgggttgcatgaaataggggaagcatgttttgaatttgtgttattctagccaattttgatcagttaattttattattatctggtatcaattggcaatatggagtaaatgctccctaattct

SEQ ID NO: 226406 - DNA, 545 bp, Homo sapiens
tgatcaattctccatgttgctaattgttagaaatcaggagtagagggcttgtcttcattctggagtcctgtttagagttttgaggaatcactttagcataaaggatggtactgtattgtcaggaatttgtatttccagcattctctttagaaccaatgtgccagtttttgccatcttagtcacatgtacaggtagcaaggtaaacatggattatggtctatatgtttgtacggctgctttgtgggggatcagtttttgataactagaaggatgacatgacgtatgatgtactcagtccttaaaggagcatttagtttaattttctttagacctatccaccaaactataagatccatggggacaagtttgtcaatttagctcatcatcatgcgatgcctggcccagcaaaaatgccatatacacatctattgaatgaaatggaagtaagtgggagtagtgttaagatatttgaaactgaaattttccatataaaccagtagctttctgttcaaaatgtaaaaataaaaatgtctatccatacaata

SEQ ID NO: 226407 - DNA, 615 bp, Homo sapiens
ggcgtgtcggctgtagggtgccccgagagcctgcaggaccttcggaaccatctggcgtctgactctcctcagcgctggcgcggccccgaatgaaaacttggaaggcgtagccgcttggtcccgcggtgggcggggcccctgcctgacgtggacctctcgggatgggcctggccaatcctgttttcttcccaagattgttagggataattcagtcattcgtttcgcaacccatcttttggcccccgttaggtgtaagtcatacctgtgatacctttgtgactagtttaaaagttcttcgaagcatgtaagaagatctagtatatttgtgatttaagtaaaattgcagatgaggccaggcgcggtggctcacgcctgtaatcccagcactttgggaggccaaggcgggcggatcatctgaggtcaggagttcgagaccagcctgaccaacatggtgaaaacccgtctatactaaaaatacaaaaattagcccggcgcggtggtgggcgcctgtaatcccagctaccagggagactgaaacaggagactcgcttgaacccgggagacggaggttgcgctgagccgagatcagccactgcgctccagactggggatcga

SEQ ID NO: 226408 - DNA, 308 bp, Homo sapiens
ggcgtgtcggctgtagggtgccccgagagcctgcaggaccttcggaaccatctggcgtctgactctcctcagcgctggcgcggccccgaatgaaaacttggaaggcgtagccgcttggtcccgcggtgggcggggcccctgcctgacgtggacctctcgggatgggcctggccaatcctgttttcttcccaagattgttagggataattcagtcattcgtttcgcaacccatcttttggcccccgttaggtgtaagtcatacctgtgatacctttgtgactagtttaaataaaaaaatttacaattaa

SEQ ID NO: 226409 - DNA, 398 bp, Homo sapiens
aatctgtccctcccgaggctgtgtcccaggctggagaggctaagtgggtgacaaccaacttggcctcctacaagaacccacagggaggtcgggtgcaatggcttgcatctgtaatcctaccactttgggaggctgaggcgggcagctcacgtgaggccaggagttcgagaccagcctggccaacatggcaaaaccccgtctgtatttttaaaaaatacacaaactgttgtattttctatttgtattgtattgtagtggacagggcctgttatcccagctactccggaggctgaggtgggaggatcacttgaacccgggaggtggaggttgcagtgcggccgagatcacaccactgcactccagcctgggcgacagagcaagacatcatctaaagaaaa

SEQ ID NO: 226410 - DNA, 466 bp, Homo sapiens
catactaatgcccttcctgtggcagttccccagtttctcttctttgcaagcaaagtcatctcgtttttcttcaggttgtgtaccacgtgtatgggtacgtgaacaacacgtttttgttcacttgtttttaacatcatgtaattggaatcacgctgtttgtattcgtttgtgacttgccttctctctaaaaagagtatttttgaggttcatgcatgcagataacatagctgcagtaactgtggtccatttatttgcactggtatataacttactgttatgaaattattctgtaactttttcatttgttttattattgatggacgtttgggttgttttcagttttttgctttcaacaatttttcttccaagttttcttgctaagaatgtgggtatacatgtcttctggtatagctgtgcaagcatttcatttggtctcatacctaagtaaaactgcagtgtcaaatta

SEQ ID NO: 226411 - DNA, 330 bp, Homo sapiens
atcatattaatgtccgctctcactatccctttaagcatcttgaagacttcagccatatttgctcttaaccacctttttccccgtgagtacagccctagttttccttagctctaaataaatctgattgccctttattggtgtttttcattcttcggatattttattctggcctctttgtattcaaatagtttgtgtgcctaatctgttccttgactaatacttttcgtgccttttgtgctttatgatgaactttgtattttcaatgcactgtttagagaatttgtggggattctgcaactcctttatatcttaaaaaaaaaagactgtaac

SEQ ID NO: 226412 - DNA, 207 bp, Homo sapiens
acaataatttttcatggttctgtggtatgactgggctcagctaggtggctttcacttggggtcttacggttgcagtcagatgttggctgcagtcgtctcaaagcataaccgagctggatgttcttgatggctcacatgactgacagtgatgctcactattgtctgggagctcagctggggctgtcaaaataggacatcttcacatgg

SEQ ID NO: 226413 - DNA, 531 bp, Homo sapiens
tcatcattcctaatccaaaaatctgaaatcctccaaggagcattttctttgaaaagttttagattttggagcattttggatttaggattcttgggttagggatactcaacctgtaatttttggggggtaaaataacagttattaatgtacaggagcaagtgtttttattaatgaggtctttaagtgaatctgacgtctgagcagataattatgaaataaaccatgctagttcttattttatattgtaattattataaatactgacatcaaggagtatatttagagtacggtggaaggaattactgacgagtgtgaaagacatttcccagaaatggtttgaggttactctgggtgtgaggaacttctatgttatttctgattccagctgtaaatctgttttctagaaaatgttttatcaaagtgctaaataccttgaaacatgatatattttacatttcatgaatttttcttttcttaaaaaaatagcatttagcactagaaatgatcttgaagtaaacctgaattataaat

SEQ ID NO: 226414 - DNA, 445 bp, Homo sapiens
acgcctacacatttcctctctgctgaggccgcctcaggcacaacctacttcagaaaggcagcatctccccctttcttgggtgtagacccgatggaaataccgacaggtggtggcatttgccccatgccctcaacgcgtgaagtcactgctaatttcacaggagtcgctggtgacattgggctctgattgccatgggctcagtgacgggaaggcgctgccttctatcctccccagggctgccttcgagggtgactttcaccacgattggaaggaaacagccagagactgcagggcctgagctgactcagtcactcagtcaaatgtttgcgaactgtgagctgttgaggggagcccggagagtgttgcccccagtaacttccccaggagctcgtgatccagctgaggagcccagaggataaaataattctttaattcactctgcaga

SEQ ID NO: 226415 - DNA, 488 bp, Homo sapiens
acgcctacacatttcctctctgctgaggccgcctcaggcacaacctacttcagaaaggcagcatctccccctttcttgggtgtagacccgatggaaataccgacaggtggtggcatttgccccatgccctcaacgcgtgaagtcactgctaatttcacaggagtcgctggtgacattgggctctgattgccatgggctcagtgacgggaaggcgctgccttctatcctccccagggctgccttcgagggtgactttcaccacgattggaaggaaacagccagagactgcagggcctgagctgactcagtcactcagtcaaatgtttgcgaactgtgagctgttgaggggagcccggagagtgttgcccccagtaacttccccaggagctcgtgatccagctgaggatttgctgaagaattggatgagggaaagactcagagaatggaatactgagaattctacaataaatatttgaatcctagaatgt

SEQ ID NO: 226416 - DNA, 492 bp, Homo sapiens
actgcaaaagttatggccacagtgcatggtaagtgcttagttacggtagaaaagacattacatttgttggtggaagtcatgaatcaggccgcacagcaggaggtgagtggccagtaatggagaattactgcttgatctcagcctcctgtcaggtcagtggcggtgttagattctcatgggagcacggaccctattgtgaactgcacatgtgagggatctagattgctcactccttatgagactctaactaatgcctgacgatctgaggtggaacagtttcatcctgaaaccaaccctaaccctgctgtggaaaaattgtcttccacaaaactgatccttggtgccaaaaaggttgaggaccgctgctttatggtatttacccaccagtactgatggcatttcacatcagtattcacagttatgtggtctccttatcacagagtttttgggagcaccaaaggaaagatgctaattgatctttaaaaaaaaaat

SEQ ID NO: 226417 - DNA, 431 bp, Homo sapiens
gtcattttcttcctctaatgcagtcttgtttccacctatctcctttgtgatattaatgacaaatatattacatttctatatgttgtaagcccgaaactacaattggatatatattgttttatgcatttaaaaaaacaggagaaaaagtgagaagaaatgtgcaattattatgtctcttatgattacttaaattaattatctttatcagtgatctttatttttttatgaagtatcaaattactgcctactgtaacttgcttttagcctgacctacctcttttagtatttctcaaaaagcaggtctgtctgtatttgaacttcattttttaaatttttttttctggatatgggattcttggttgacaatttttattttctttcagtactttgaatatgtcatccaactaccttctggcctccatggcttctga

SEQ ID NO: 226418 - DNA, 273 bp, Homo sapiens
cttatcccctctactactgaatatgctattcccagtttcttcactcttctaaacactgaatttatattcttattttttaaaagtatttgcttacatctgattattttagattgctagatacagcgttcttgacacatagcccaactgcatgcatattgccttactgtatgtctaatattctattttggatgctatctgcctatatccctcaaaaataacccttagcctgggcactgctttagagccttgctcaatactgactatacaatttgc

SEQ ID NO: 226419 - DNA, 456 bp, Homo sapiens
tatatttttttgaactatttgttgggggttacatatagatgaaaaatgttaaactttcattaatataaaaatgtatgacaaagcaacagcaatcaagacaatatgatactggcataaggatagacatatggatcaatgaaatagaattgagagttcaggtactaactctcctgtttatagtcaattgatttttgacaaggtagtctagatcattcagtggaggaaagaatagtattttcaaggaataatgctaggatgactggatattcccatgcaaaagaatgaaggaaaatgcctaaatcatatcatatgtaactcaaaatggatcaaagacctaaatataaagagctaaaactataaaaatccttgaagaaactataggtgaaaatgttcatgatgtttgattaagcagtgtttttttagatatgacaccaaatcacaaaaactaaaaagaaa

SEQ ID NO: 226420 - DNA, 469 bp, Homo sapiens
tatggccgtcaaacttcggcatatagcagggttgcctaggaagttgctcaaacaaacaaacaaacatatgtcctgaccctggaaattctcattcagcagtgtcaaacttgggcatctagctttactttgaacacactctctagtaattctgatacactctgaatttgagaaccattagtgtattggaaagaactcaggccctttggagccatgaaagactggatttgaattctgattctgccatttatttgctatgtgcctggggcaaattacttacctctctgcaccatcatgtctaaaatgccaatcatttgactaacttatcaagtgatcgcagagaagtaggattaagcacatattatgctgttcttatagacaattttgcatttaacaaaattttagttcattttgcatagtaatctataataaatgctaaatgcaacacaatgtttgattcaccatcttgtca

SEQ ID NO: 226421 - DNA, 166 bp, Homo sapiens
ggttttagaatgtgtccttggataagtagggactatttattgtatgtggcaaaatagttcatccagttaatttcattcttttaaagctctaaaatcccaccatgtttgtattttcattgtatgcataatacctggaaggaactacttactggtgaatcactcaaac

SEQ ID NO: 226422 - DNA, 202 bp, Homo sapiens
acagtgactgtgtatagtttgctcaccagtctgacaaagagtggttaatggattatgtaactacatatttggatgatctcttaaatgtctattctttttacaaatacctaagctaattcagtgtttataaaccatagcttcgtgacaccccaggacagtggttttcaaagtgtgaactctgaaccagtagcatcagcatcac

SEQ ID NO: 226423 - DNA, 344 bp, Homo sapiens
cagctgggattgcaggcacgtgccaccacccccagctaatttttgtatttttagtagagacagggtttcaccatgttggccagtctggtctcgaactcccgaccttaggtgatccacctgcctcggcctcccaaagtgctgggatcataagcgtgagcccctgtgccagccgtatttctctattttactaaattaacacacggattatgatttttgttcaatcagttatacttcatttattgtccttatttatagatttcttcattttattttatttattttttaagacggagtctcactttgttgcccaggctggagtggcacgatctcagctcactgcaacc

SEQ ID NO: 226424 - DNA, 982 bp, Homo sapiens
gtggtaacctcttatggagaggcaagtaaattctgctgtttttgttattcacagaaaaacactggctcgtgtgggttgggaaggtgaaataccagaagtatttcatctggttatttctacccatgcaactcctataatattgaaatgcataggttagcatttttggccaatttactcagcattctgggttaaaggcttttatttattttatttatttatttatttatttttgagatggagtttcactcttgttgcccaagctggagtgcaatggtgcgatcctggttcattgcaacctccgcctcccaggttcaaactattctcctgtctcagcctcccaagtagctgagattataggcacatgccaccacactgggctaatttttttgtatttttagtagaaatgagatttcaccatgttggtcaggctggtttcgaactcctgacctcaggtgatctgccctcctcggcctcttaaagtgctgggattacaggtgtgagccaccacgcctgccctaaagtcttttaaaattcacttgtataagttgacttagttttctttaaccttgtagaaaaatacaaaaatggcaatctcttttatcacacaaataatgtctttttaatggagtgatttttttctaattgaggtattatgtacttttcttttactaattattgtttacatttgaagtgttttatgaatgaatatttaattgcatagatgaagattactagttataggcattttactaaccaatactcattaagcatagcgtggattcatatgacatcaaggagctattttatttggtaaaatgaaaaagcacaagaatgaacgaacgcaagaactgaaacagtggagacacctagaatgacttgtctaagatctaaatcattttgttgtcttcccagcgtacttattatcctgatcattgtcatcagcattgtttgggtccttttagcacagatttctcaaaatggg

SEQ ID NO: 226425 - DNA, 257 bp, Homo sapiens
ttcacctcccatgaccacaggcagtatcctagtattcctgatggcaggaagtgtcatcagcctggatctgggagaggctgacacaagagcagcacgccaggcaaccaggaatgcacatgtgataaaaatgtatacacttgttgtgtgttttttatgttttaaaaattagttcaatgaagtacagtagggaaattgtcaataatttattgtaaatttcaaaataaaagatttgtattgttcctagcacaaagataaat

SEQ ID NO: 226426 - DNA, 430 bp, Homo sapiens
aagaaatctgcttcagctcggaatgcttttcattttctttaaaaggtagaggaaaaatagtataatgaaaaatatattgctttggagttgattactttttaataggaaaagaacactgtattctaggtgagaattagctgcatgcctttgtaaagagcagtatcaatccaggcatatatatttgtatgaaacatgtttagaaatgctatgagctagctgtggtatttttgttgttgtcattgtcattattgttatgccctggcttctgaggatggaggcaagggcatgtgagttagagttttgtctccataagaataaatgtttgtcccttagagatttcccattttcaacagcagagcaggctgaagctggaaatattaaaatacacatgacttctcgaagacagttggatgcctttagcaaaaaaaaa

SEQ ID NO: 226427 - DNA, 649 bp, Homo sapiens
gtaagaaaaattggaaggccttaatagctgcttaactttctaaccttctcttgtttctcttcccacaaccccagtgcagagggaggctgtttctgaaattttcttatctgactaaggaaacttatttccaaaagaaatgcaattgtcttaagaccccctcctcaggaatctcatcaaataaccaggaaaggttaaccactggagaagaaactaaaagtcatcaccatgcccaaacaggatttttatctattcttctgagggcacctccaaaagtctacctgggagcctttatctgcatgataagataatctttgctgacagtgaagacctgccccccaccttcctgtcacctccctcagagctcagatgaactttgccttaggccattgtcctttgggctcatccattttcctctgaaaatcattcaccatccctcacaatctcctatgttccccccatttctttctaccctatcaagagggtattgaagcctcaagcatctgggccttctttgaatctcacattttcaggactgtcatgtttacatatacgtaaataaatttttaagcctttttctcctattaatctgtctactgtcagtcatttcagcaaaacatcagagaagacagaaagaagctttccttctgtc

SEQ ID NO: 226428 - DNA, 458 bp, Homo sapiens
tgagagaagccctgaagacatgagagagcagccatacagctatctggggaaagagcaaatgaagtgtctctgaggtgggatcttgcctaatgtgttcaaggaacagcaggggggcccatggtggatagggcggagcaagtggggagtggtaacaggagcatcagggctgggcacggtgctcacgcctataatcctagcactttggaaggccaaggtgggtggatcacttgaggtcaggagttcaagaccagcctggccaacatggtgaaaccctgtctctactaataatacaaaaattagctggacatggtggcacacgcctgtgatcccagctagtcggaaggctgaggcaggagaattgcttgaacctgggaggcggaggttatagtgagccaagatcgtgccactgcactccagcccgggagagacagagtgagactctgtcttaaaaaaaaaaa

SEQ ID NO: 226429 - DNA, 601 bp, Homo sapiens
ttcgagaccagcctgggcaacatggtgaaactctgtctctaccaaaaaaacaaaataaaaatcaaccgggcatggagcacatgcctatagtcccagtggggctgagataggaggatggtttgagcccaggagcaagaggttgcagggagctgagatcatgccattgcattccagcctgggagacagacctggaccctgtctcaaaaaaaaaaaaaaaaaaaaaaaagaccatacatatacattattaaaaaatcaaaataatccataaaaggtatatagagaagagtgttgctttaacttgtaggaccatttgcccctttcttccccttgccagcctctatattcacaataggaaacaacttttagtagtgttttcttacagtctttccatttttctttatgtaaaaacaagcaaatataaatattcttatatgccctctggagctctttccatatcactgaagaaggtgcctcctcattttggtaaacatctctgtggttttccgttgtttgtttcacaaacgggagatttaacaaatctcccattttgaagtgctcttgggtcacttccagtcttctattacaaaaagcagaactacag

SEQ ID NO: 226430 - DNA, 321 bp, Homo sapiens
cagcccgagaagtttgtttcagtcgatgtcttctccagggagagtagatttgctcctggaaactaaatctgtttctaaaccttttccccagggtttagacacttaggtaataatacaatttatagtgagtcaacctccaaaataaaaggaattctttaagggaaataaagacttttccaaaaacttagttaacagtaggaaaaggggctgggtgcggtggctcacgcctgtaatcccagcactttaggaggacaaggctggcggatcacgaggtcaggagatcgagaccatcctggctatcacggtgaaactgtctctact

SEQ ID NO: 226431 - DNA, 505 bp, Homo sapiens
atgattgtgttatattatcccaggtaagatgtgaaggggacaaggaaggaaggggaaacattggtcctagggtgggaatcacagaggccctggagcaagacaggcctgggctcatgtcttggctctgccacccaccagctgagcgaccttggatccatttttctgcttctctgagactgtgttccctcatcagcaaagtgggaagcagctcctcaaaagcccttaggtcacagcttgcagcggaatcagctctcgttaaacggaagctgccatcgccatagctgttatcatcactggaaggacagagaggaggaagcaggtggcagacgggcttgcacccacagggataaagcatacctggcctcctgctgagaatccctgtccctgctgaggtggagagagaatgcgaagaggagcaagcttttcacagcaaggatgcaacttctcaagagtctgagctgctgcttcaattaaaggaaaaatctgcaatttagaaaaccaaaag

SEQ ID NO: 226432 - DNA, 472 bp, Homo sapiens
cattcaaggtgcgatttgggtgaggacacagagccaaaccatatcacttgctaatgaggaaactgagtcagagaggtctagtgatgtacccaagtcacccaccagctgagcgaccttggatccatttttctgcttctctgagactgtgttccctcatcagcaaagtgggaagcagctcctcaaaagcccttaggtcacagcttgcagcggaatcagctctcgttaaacggaagctgccatcgccatagctgttatcatcactggaaggacagagaggaggaagcaggtggcagacgggcttgcacccacagggataaagcatacctggcctcctgctgagaatccctgtccctgctgaggtggagagagaatgcgaagaggagcaagcttttcacagcaaggatgcaacttctcaagagtctgagctgctgcttcaattaaaggaaaaatctgcaatttagaaaaccaaaag

SEQ ID NO: 226433 - DNA, 142 bp, Homo sapiens
tacaatattattttgtacaaataacgacaatttgctctcacacttctttttgtcatctcaatgcattcaatgagaatgtcagtaaatactgcctagccacctgcacccttgttttctgaatttaataaaagttatttcaaca

SEQ ID NO: 226434 - DNA, 226 bp, Homo sapiens
ttctattggagttggtatttttcttattgatttctacactaaagacattactctcttgtctgccacattttgcagatattttccttaacacatcattttcttcttcagttttttcgcagcctattttatttcataaacctgtttttcctctgtggcttcctccactgctcttatacttaggaagtgttttttccttatgctaaatttgataaaaatttatcttttt

SEQ ID NO: 226435 - DNA, 524 bp, Homo sapiens
tattttattatttttaagtttggggctttgaaatatcttcatttagattgagatgctatttaagtaccaactgtgaaaggaatagtaactaggtaggctgctgtgcccaagacagtgagcaggcctagttacaagaattgtggggtatgcagatcactcggtgtaaatggttatgacttgatattgtggctgaaacaagccatcattgaggaaatggagatgttcggctttagatttaggtggagcgagggtggaataaaagttttgagtcttctgtgttcatttaatatcctcagtaggcctgtgtggtatatattgttttcttactacgggtaaaaaaacttaagtctcagagagtttaaacagtttaccagtatcccacacaaataagcagtagataagattctgaccaaagtctctgtgactttaaagcccaagctcatccctcattctcccactcttcagtctagaagaggtaaaattcttaagagcagctcttaggaaaaactttttaaaacataaat

SEQ ID NO: 226436 - DNA, 266 bp, Homo sapiens
ttgcttattttttttcaagttctaatctctcaccctaaatttctcttcgctgaaaaatctacattttttgtctattttccctctcagttacgtatctacatagaaaatataatctttattttattttacgggaccttcaagaagaatgaattactcatattctttgaagaatatatttgttaaatctgaaacgtcgttcattaatcacaaaactgtaattatgaggtgacaaggacactggaactttggttatggcagtcaagcag

SEQ ID NO: 226437 - DNA, 371 bp, Homo sapiens
ggacatcgagcgaggcaggtgttccaccccactttcttgtttgaggggagaaggaaaccaaagccagtagaaatggaatttatggcctccgtgctctcagagggagaaaaaaattctcactcatcagcctaaagagaaaccctgtcttatcccagattaccaccatgggatttaaaattcagtgagaagactgcttgggaaatactgtctccgaactgccggtacagacactgcccattggtacaatatttttaggtcatctgtcaattgccatgtttgcatttctttcatgcaatacaagttgaaatcataatgaatttcttgagtttcaggaatatctcaaaataaacttcttcatcctcaacaaatga

SEQ ID NO: 226438 - DNA, 408 bp, Homo sapiens
aagtaacatttattgtgggatttttttaattgtaaaagcaaatatgttaattgtgctgcatttggaaagcacagaaaagtataaaagaatataattacccataatttcaccaaccagcaataacaactattggcaccttactgttaactgcctgcaagttgatgccagttttcaccttctcaagcctattttgacagctctattgaaaactggaaccatatcgactgctcttcatactccctttctgctttattttttcctccataatatttatttcctccttagaaccttaatgtgaaaaaaaaaatttcctcctaatgtatgattcatttggttagctgatttactgcctggctctcagtgggtggggcttctgtatactttattcactgtaataaaagtgcctag

SEQ ID NO: 226439 - DNA, 431 bp, Homo sapiens
tatcctgtgtagttaatgacaatttttgtaagttagctaagagtattgcctgtagaattgttaaaaatatgaacaaaaccataattaacctttaaagataacttgcagaatctgggggatgagtaggaagggaggttgctaaaatgtcatttttacagataaataatttggggagtattgaaatattctctttagcttttggttttgtaattcttagctttaaggaaatgtgatatgtaaagaaaagaaaaatattccttttctttgatactttgagcaatggtgacatgttactctcttccatctgattatactcccatttagaaaagaatgaggtgatgccagttataaataattataactttagtgctttccaaataggattaacagtcgagttaattaatgctctttaagaaaccaaatttccactt

SEQ ID NO: 226440 - DNA, 3940 bp, Homo sapiens
  misc_feature (453)..(453): n is a, c, g, or t
  misc_feature (678)..(678): n is a, c, g, or t
  misc_feature (1732)..(1732): n is a, c, g, or t
  misc_feature (1818)..(1818): n is a, c, g, or t
  misc_feature (1825)..(1825): n is a, c, g, or t
  misc_feature (1858)..(1858): n is a, c, g, or t
  misc_feature (1864)..(1864): n is a, c, g, or t
  misc_feature (1867)..(1867): n is a, c, g, or t
  misc_feature (1884)..(1884): n is a, c, g, or t
  misc_feature (1945)..(1945): n is a, c, g, or t
  misc_feature (3123)..(3123): n is a, c, g, or t
  misc_feature (3575)..(3575): n is a, c, g, or t
  misc_feature (3636)..(3636): n is a, c, g, or t
aagaaatgtagagttggaagatgagggaaaatgaaggatggtgttacagaaaattagagaagaaagtatttcagtagaaggctgtaaataactgataaatgttaagaatgacagaataagataagatcaggctacacaccatggatatggcaagaagaggtcattagtgacctcctaagaatgctttcaagagtagagaggtgaaagatgttctgaaagacagctgaaaaggaggctattggagatgtaaggcacaaagtcaagagagattttaatgtgagataaactacattaaaacattggtagatgggagtaatactaatggagagagaatgaggatgttggagagagaatgagcatgttggagagaataaggataaactcaagagtgaagtcaatgaatgagtcaaaaggaatagaaactatttcaaatggacagggaggctttagttntaagcctggacagttagcctactttagtttgagaatgcaaattatttgtggaaagaagtcagtaggaatatttgataaaaggaaaacaaaactgattcttattttaattatttttctttgaattattagaaaagatcactagctgaatatatgacttggggggaaatagtaaaactttcagagaatttttagggtagcatagtaaatagtaagcagtagactgcntcaggaatttatggattaaatgagtgttcatttggaatttatgatcacaagcataaattgaatttagtcagtagggatttgtgattttctgtagcaatgtctcactgactgggtaaaattagttttggaattttgatgaaagagctcaaggtaggggacatggagggatttacgcatgttgacaaggagtgcacactaattacagagagtctacatcaatctagaaaataagtggggtcatgaaacaggtaatgaataaggaaaaatggataaaaaccagtggattactggcaaaggggttttggagagaagccataaaagtaagtattctggaatggtggagagtgatatcgggagagtgggctgttccaaatgaagattttattggaagagcaacttccaataaaaacaggatacatctatgcatgtagaaggctaatgtgaagtgataaaaaaggaatttggcgtatagaggttctgggaactaagaggcagggtgttggacagatgaaggatgaggacagaatgcacagccaagtagtaaataaatgagagagagtgaccagtagcatagaggtaatggtgagagaggtgcaggaggagggagagaaaagaagaggtttgagaataggaaaaaagggtatgaaaataaaatggagagtgagaggtatatgtacccctctttaggctggaagtgtgtggtatgttggaggcaagcctattttaaagaagactgtaaggaaaaccatgtcatttggagccacttggatttcaggtggatcaactaggttatcttggcaaaaaggggtcaaatattggaaaaaattactgataactgatcttgagtactgttctctcatattttgattttgaaatagatattgagatactcttacaaattagtataaaaaccaatatttgaaaaatattttgaaaataatacgatagtctctatggtctctatgttcaggcttgcatgaaatttaaacactttcatttaaaaatgggacatttatttatttagagacagagtcttgctctgtcatccaggctngagtgcagtggtgctatctcagctcactgcaacctctgcctcccagggtcaagagattctcctgtctcagcctcctgagtagctgngattacnggtgtgtgccaccacatctggctaatttttgtntttttngtngagattgggtttcaccntgttggccaggctggtctcaaatgcctgacattcagtgatctgcctgcctcagcctcccanagtgctgagattacaggcgagagccaccgctcctggccaaaaaataaaaataaaaaataaataaataaaagggggggcagcttttagattacaaagaaagaagaaaactcatattcatcaacacatattgattgggcatcatttatgtgttgaatatttacctacatgctgatgatacattattgagtaaagttaataaatgaactagctcatctatactttttcaagttaaatgactagcaagatatagaaccaaaaaacaaatttaaaaacccttttatttctgtgacatttactggattatgtccatagtactctgaacagtagcggtcattgcttgtcagtatccaccaagaatatacacggcagccagtggggatttacgctaaacctgagtctgttgagttcatttgtaaatttgtttctatgttatggtcgttttgtgttggtgcaattcaattaaatatgaaataaactttgagaggtgcttattctatgaaaactaacttgaatgctataagaaatgcggtaaagaaaagtcactaacaaccattgttatgtagaattaggtgtggccgtcacagctttaaatgattgggtaaaagtactaaaaaagcagattcttgtctcagattccctggatagagtgcagaagttcttgttcctcttttaggaattaaaatacgggtgttcattaaagaataagtgaaactacctttacaggttttacgttaaaaagttttttaaaatattatttacattaattcatgaatttctgctttaatagacattatagaataattgaccaattacaagttccagtctcctattataatcaaacaaatatataattctaaactataaaaggggctttaaaagaaagtgtctggcgttatgagaggagatagtaaggtgacaggtggaatccattgtgtaaggtattcaaagaaacttcgaattgacatctgagaggtaagcagatgctaactaggtaaaccagaaaagaaattgctctagaaaatagaaatattacaaaaatttggccagtataacagaaaatgggggttagaaaacaaaacaaaggaaaataaaaagttaaatactattatgaaagtataaattaaaggctatcaaaataaatgtgaatgaattaaacaatttatagcaaggtaatttancaatgtcctttttatgaaagacataccaaaagaaataccacagaaatatcataagcaaaacaataaagaaatattgactagctaaaaaatggaaaatataacattactttagatagaaatattatatcaagaaaagcagaattcaaggctaaaatttgtcaaatagcattgatcattatgttataaggatcaactgtgtaatctttccttaagacataccacaaatgaatttttctatccaatgacttggaatcaacattgcaaataaaataaaaattcaagaagagtctgggcactgtagctcacgcctgtagtcccagcactttgggaggctgaggcgggaggatcacaaggtcaggagatcaagaccatccttgctaacacggtgaaccccgtctctgctaaaaatacaaaaaattagccaggcgtggtggtgggcgcctgtggtcccngctgcttgagaggctgaggcaggagaatggcgtgaacccaggaggcggagcttgcagtgancagagatcgctccactgcactccagcctgggcaacacagcgagactctatctcaaaaaaaaaaaaaaaaaaaaaaatcaagaagaaacagataaaatcaaaattacagtggaatatattaatttacctatctgtttttgtcatatcaaaaatcacaaaaacatggatattagaatttaaataatatcagtaataactttagtatttatatgttaaactttctaccctttatcaaaaaattaatttcaagtatgcatggagtatttttatataagtttatatataaggtcacatagaaattatca

SEQ ID NO: 226441 - DNA, 1759 bp, Homo sapiens
  misc_feature (453)..(453): n is a, c, g, or t
  misc_feature (678)..(678): n is a, c, g, or t
aagaaatgtagagttggaagatgagggaaaatgaaggatggtgttacagaaaattagagaagaaagtatttcagtagaaggctgtaaataactgataaatgttaagaatgacagaataagataagatcaggctacacaccatggatatggcaagaagaggtcattagtgacctcctaagaatgctttcaagagtagagaggtgaaagatgttctgaaagacagctgaaaaggaggctattggagatgtaaggcacaaagtcaagagagattttaatgtgagataaactacattaaaacattggtagatgggagtaatactaatggagagagaatgaggatgttggagagagaatgagcatgttggagagaataaggataaactcaagagtgaagtcaatgaatgagtcaaaaggaatagaaactatttcaaatggacagggaggctttagttntaagcctggacagttagcctactttagtttgagaatgcaaattatttgtggaaagaagtcagtaggaatatttgataaaaggaaaacaaaactgattcttattttaattatttttctttgaattattagaaaagatcactagctgaatatatgacttggggggaaatagtaaaactttcagagaatttttagggtagcatagtaaatagtaagcagtagactgcntcaggaatttatggattaaatgagtgttcatttggaatttatgatcacaagcataaattgaatttagtcagtagggatttgtgattttctgtagcaatgtctcactgactgggtaaaattagttttggaattttgatgaaagagctcaaggtaggggacatggagggatttacgcatgttgacaaggagtgcacactaattacagagagtctacatcaatctagaaaataagtggggtcatgaaacaggtaatgaataaggaaaaatggataaaaaccagtggattactggcaaaggggttttggagagaagccataaaagtaagtattctggaatggtggagagtgatatcgggagagtgggctgttccaaatgaagattttattggaagagcaacttccaataaaaacaggatacatctatgcatgtagaaggctaatgtgaagtgataaaaaaggaatttggcgtatagaggttctgggaactaagaggcagggtgttggacagatgaaggatgaggacagaatgcacagccaagtagtaaataaatgagagagagtgaccagtagcatagaggtaatggtgagagaggtgcaggaggagggagagaaaagaagaggtttgagaataggaaaaaagggtatgaaaataaaatggagagtgagaggtatatgtacccctctttaggctggaagtgtgtggtatgttggaggcaagcctattttaaagaagactgtaaggaaaaccatgtcatttggagccacttggatttcaggtggatcaactaggttatcttggcaaaaaggggcaacacagcgagactctatctcaaaaaaaaaaaaaaaaaaaaaaatcaagaagaaacagataaaatcaaaattacagtggaatatattaatttacctatctgtttttgtcatatcaaaaatcacaaaaacatggatattagaatttaaataatatcagtaataactttagtatttatatgttaaactttctaccctttatcaaaaaattaatttcaagtatgcatggagtatttttatataagtttatatataaggtcacatagaaattatca

SEQ ID NO: 226442 - DNA, 528 bp, Homo sapiens
acatggacttagaagctccaagttgatgaagaatttctacatttcactgttagaaggatgcttggttttcctaccaagccactacattggctgaatctaagggctcaaagtttaatgcaagaaagaaggaaatgccagttttcaacagaatggttggatttaagaatcctaagtgaaacaatggaggtggagagaatccaaactggtaaaccaaactcaagtgaggacaacatgaggtatcaaattacagagccaagaaattcaggtgtaagaacaacttcaagttacaaggtccaagacatagactaaaatatgttaaatgacaagatcaaacagatggttcatataggtgtattaggttgaacaatggccctgcaaaatgtccgtgtcctaatacccagaatctgtcaatatgttaccttacatggccaatgggtcttcaaagatgtgactaaatcaagtttcaagagatggggagattatcctggtttatctgggtgagttcaatgtaaccactagggtccgtat

SEQ ID NO: 226443 - DNA, 369 bp, Homo sapiens
tgcctggcctgaagactctagtccttcagaataacctaatccccaaagtgtgtccagagttatgcaacttgacccaggtgacaatactaaatctgggaaacaaccttttagaagaagttccggaagagatgaaatatcttacatctctgaagaatctccatttatctggaaataggatctgtagatttgcacctggagcctgtggtaatttaatcaacaaggaacaacattatagcatcaaatttaatctctcatatttaataatatgagactgaaatgaaaaagaattttgcatgtttaatctttttttgttggagatattaacacccccctcttgaaatataggaggagacaacaattttaaaaaaa

SEQ ID NO: 226444 - DNA, 470 bp, Homo sapiens
gtgtcccagcccagagaatctcaagtaaccattgaacttgttcaaagtgactctaaactgctagtgtcaaaaacaatcattctgggaagaagataatagcatcctaggcctcaaatgcatctagcaaacaagcaaaaataatcaagccccagagaggcgagattgccataagaaaagcagaaacaggccaggtgcagtggctcatgcttgccataccagcactttgggaggctgaggctggggaattacttgagctcaagagttcaagaccagcctgcacaacatggtgaaactccgtttctacaaaaaatgcaaaagtcagttgggtgtggtggtgcacacctgtagtcccagctactagggtggctgaagtggatggacggcttgcgcttgggaagcagaggttgcaaagagctgagatcatgccactgtactccagcctgggccgtagagccagaccttgtctcaaa

SEQ ID NO: 226445 - DNA, 431 bp, Homo sapiens
atgcaggctggggaagaatccacgtgggcaaagaacatcctgattaaaaatccaaacgttttcatggtgagacttctatgtgtcaggaccatctgctggtggaattaagaagcctgaggtgctaatttgttaaagaaaaagtagatatctggaagtgagaacagagaactgaaaacaatctctgatggcacaagtaaaggtgaaaaacctaattagaataggacttggtgctagcctaaggactgtagctattcctgcttctacatccttcaaattgagtaccagggtgcaaattttttcaaaaccattccttcctttggaattttgtattgtactataagacaatcatgcttatctcctgttttgtaggtaatagatgtgaatataaatatgtttcagaatgagaaatattaaacataaatgacagtgaa

SEQ ID NO: 226446 - DNA, 344 bp, Homo sapiens
gttctatttaatgtagattataaggcctttagtatgtctttctaaatataatgccagaaaaaatgaacagcactcaaataacttacttttttttttaactgcgttaaaaaatactgagttatcagcatagcatttggtagtggttgagtgagtagggataggtgatggggatgaggtcagcccacactactcacatgaagttgtgaagaccaggactaattcctatgtagggtatctttacgctgattaagcagtactactttgagtttctattaattaaaatattacatgtattatcttggttttaaaatcctattttttattttttcttttttacaggtttg

SEQ ID NO: 226447 - DNA, 330 bp, Homo sapiens
gcctaattttaattaatagaaggataagcaatgtttattatcaagctagcatcttcatagttttcttctgaaactttcttaaaaaaaagtactgatgctcatttcattccgatttcttttcgcctgagagttcctttcctcctgcaccattttgcatgtctaagttcagaagataatgatttatttcacctttcttatttctgtctgctcaattgtcctatgaaagaatttgaatattaagtagaaaatcttgaacctaggttaaagccttatgaggatgattgtgaactttttccctaaatcattaaacctcctcatgtaaacttacaa

SEQ ID NO: 226448 - DNA, 563 bp, Homo sapiens
cgagggttgtaaacgtagtttggaaattctgaccagccaaggagtgattcctttagatggttcagtgtcgaagcgataaagcaaacatgccattctgagacacatagtaattcctaggactgaaacccaagggagatatttccccccaatgagtttgtagagggtaaggaattttagtgtattataagtgatatacaataactcagatatgcttgaatatgcaagactgtctctgagctcattcttcaggaccccatatacaaaaagaaagatagcagaatgggaatcaaattactacttgattaatagattctcaaccacttaatatctccccagtccaaagctgcctggctttgaaagttaaataaccaaacatgtatttccaatgaaaatttaatgtctgaattgagatatgctgtaagtgtaaaataaacacctgagtttgaagactccgttaaaaaaagaatgcaaaaatatcttgttaaatttcctattgattgcatgttgaaattgcaatattttggatatgatgggttaaaatatattattaatttcatctgtgt

SEQ ID NO: 226449 - DNA, 452 bp, Homo sapiens
gcagcagtcaaacctggtctatttatgccgaagcccaagtgcaggtgctcagaggagctcaagggcagaagaattagtcagggcacagatcttccggatcgctactgtatggggaccataacatcactgtaaggcccctgtgctgagccacaaaccccacttggaacaaagaaaactcccagagagcagagctgtgaggagggatagatattatgctgtggtgcagccagacaagccccaccttgttgtgcctccagaagaagcacattcttggcctgggtggtaacaataacatctggatggaaatatcaagtggtatcaggcttccagaccaccattcatgaaagagctaaccttacatatgcttgatcaaatgacgaaaagcttcagccagaaacagttttgcctgggttctgaatcttccctgagctcttaaattctacccagtgagc

SEQ ID NO: 226450 - DNA, 599 bp, Homo sapiens
gggagtccgtgaacaaagtcagagttattagctgggtgaaggggaggaggggcctttctctggagagggtggagcctgaacaggaagcaggaagcttcctgtggcggggtaggaaccagtgcaggtccctgctgcaaggattgagtgggtgacagtggagaggaacatgggttctcagatgttattggggggctcggagggtagggcagagggacacagggcaatggagttagattctgggggctggatttgagaaatgtgtgtgaaataaaatttagaaagcttgcagaggatgtaggagatgaggagaggggacagttaagcctgaccctcagcctggagtgcagggtgttgttgccaattgggggtcaagtgggagagaaagatgaaggattcaggtttggatatgcagatttgaccgtctgtggagatgctccagaagcagtggggggtccagacgaggctcagtgtgatctccaacatggacagtggtgggcctactgatttgctctgtgaaagttggggagagcagctgggatttctgggaatagattaggcaggaaggagaggttcttcctattcaggcaaattgaatctga

SEQ ID NO: 226451 - DNA, 194 bp, Homo sapiens
gttatagaaactgtcagattttattagtcagtacacaactgagtggtataatatattctttaaattttttaaaatttatttttatttagagatggggtcttgccctgatactcaggctgaagtgcagtggtgcagtcttggcttacttcagtcttgatcttccgggctcaagcagtcttctcaccccagcctct

SEQ ID NO: 226452 - DNA, 280 bp, Homo sapiens
gctctgaggtggcgatggtgacggaggaggacacactcccccatggccgctctctcggaccacagagccaggccaggttcctgcccacccctccgccctgcgcctgctgccatcggcactggcctaggatgcctcaggcaactcacttcagctctccacaggttctcctgtacccccacccacggataactgagagaggagaccgtgtgtctatggtgatggggcagtaaccatgggcaaactcagggagggagggtgactgtgtgcaggctccgggaag

SEQ ID NO: 226453 - DNA, 655 bp, Homo sapiens
aaaacgacaaactagaacggcaaaattacactcaggcacattggagtactcttctctcaaatcactccacagagaacttcatcatttgctccgccctctaataactcatgcaagaaaagttcagcaccatcagagagaaacaagacagagagaattcatagaatggctttagggcctttcctccaggcggtaagaggatctgcgtgtgtccttcgcaggggtccaaagggagagaacctaggcctagggtttcggggataccgacacccagaaacagattttctctcaaagaagtttctgccgccatccctatcttatcagcaggaggccccggcgccatcgtctccgtctttatgattttattatggggaggtgggaaacgccaccctggattcttccaggcctcccctattcagcttgggggttccccctcattcttccctcaaagcctcagtccctgaggtcctcctcagcaccccccgcttctggcggcctgtcccccgtgaagtgtaaaggcacggccgaacccaccggccttgccgtgaaggcgggagggcccgaacccgccagggccacggcgatggctccgaggggcccagaaaggggaagggcaggccggggaccggggcagaatgacctggccggggaagaaagg

SEQ ID NO: 226454 - DNA, 758 bp, Homo sapiens
tgtaacaaggattatcaaataataaggtcttggatgtgaagtctgctttacacaagaattcaagaaagataggcaggacttgagtaattatgttacaacttcatattactttccaaatgaatacccattttcttctcatgtcaacttctagagatgggatgctgaggcagagaaatatttttatgagactctggagtacatactaaaatgtgcttccttattatttaagaatgtgtaaggtatggacctacatttgtttgctggtggtcataaaataaattcatagccattgtggccaataagcaatctccttcacgctttaaaagtttttggtttataatcccacctggattgtattttcactattctgtatcaccctcctattgcaatattttggttctcaatcttatgtaaagcaaacctcagaaatgatcgtttccataaaattgtgcaatggcaaagccacagaataatattttgagtccatatagccgtgcatgctcatctatatagctcttatacagttttctagctgattgctttggtatttcaagaaataggaagcagtagctacctattttaatgaaagggtaccatttcataagaattctattttcactgaaaaaattggtctggcacattattcaatgcaaaagattataatattactttcacgtgtgttaatctgtttagtataaaactgctagggtgtcttaaccattaacgcgttttgccacactactttcaaatggtgatct

SEQ ID NO: 226455 - DNA, 337 bp, Homo sapiens
gcaagagggatgacttttagaagcttttagattctcaaactgtatccctaacatgctgaaatttcacattgtactttgtgttctttttatatccattgttctgagcacttggtgggcctttgaagtctcggctacttggctacttcaactctgggaactatttttggcattttttacttgataatttcttcctctccttccccccaccccacccccatgtttctggaactcctagttaaatctggactcctgggttaatcctttgattttgggggtaggatgtgactagcattatcccatcgctcattttctgagatttgtttggcttgctcttcca

SEQ ID NO: 226456 - DNA, 101 bp, Homo sapiens
taatgcatgaattaagatcagaaaagagaactagagaaagaggctagatggctgcgagaagccagaatattaagaagttggtccaggtgaggtggctcacg

SEQ ID NO: 226457 - DNA, 579 bp, Homo sapiens
tgaaaagtactgtactaatctcaataagtacatggagtgttacaatttattgactcacattcctctactccccaccccaagaaaatgattagggaggatgattcagttacaaacttacactgcaaaaggaaaatgcatactgatcttggattagggttttttttccccaaatatttacaaaaggatgattataccagtgttttaggggatttttattccaggacttcacctttcaacataaatggtaaaatgtgcacgtgtcattttatatattttatttgccaaaaagaggtattaattaatcacattattttctgccctgaaatcccaaaatactatcttaaatgatgggtaaagatcttctctgaaagatggtggctattttttcaaggatgaaagaaataaagtaagacaatattcttcgaagactgagcagaatcattgtcataccccggagagatgaaatgccatattgatacagctgctaggagaacacagagttgcaaactgtcactacactatttgtacacaactccacagtgatgtcttccatgatgcatctctaagcagtatatgagg

SEQ ID NO: 226458 - DNA, 351 bp, Homo sapiens
agccagtctattttcatggctgttaggtacaatttgtatgcttgggagctgtggagttgctgtattctgtcataagggcagatcagcagagaaagctaaagcaagaggagaatagtaacatggacacaaggcagaaatgcagagatcaaagatggaaagagaatatatcccagattcctaatggctttccaaaactgatccccttctttcttgttccccaaatactgccctcttcatatggcccttaaattcttgtaataaattctcccttctttgtttaggccatttcaaattggtttctgtttcttgcaaccagacaccttaaaaaaaataaactcaaattttctttca

SEQ ID NO: 226459 - DNA, 574 bp, Homo sapiens
tatcgagccttcctgtgccacagcaacagagctccagttgtgtcttgtaagaattggtcattgtttcatggggacgactggctcctttgggtgggatctgatggcatctcatggagttgaggttgtctgccaacgctaactggccagctctgacaggaggtgcgtggcccaggaggagccatcaggccagttctctgggatactgctgtgtctccagctctgcagtttgctctgcgtcactcagcggcagacggagaggcagacacgagccccttgtgagccctcctccttaccgtcatctcacaatgctctgaaataaggaggcaaatggctgaggtcccctcagttgtagatgtgattgagttctatctaccagaagcatatgcctcctggaagcctggttctaacacctcccacaaaatccttcaagcacttttttctgttccaaggtttgcttatgggggacccagtgaagtgcttcagagccctagagatttgctgagtcatatgaggggtcagcaaacttttcctgtaaagggtcagataataaacattttaagctttgtagactgta

SEQ ID NO: 226460 - DNA, 541 bp, Homo sapiens
ttaagagtcatccccactccctaatctcaagtacccagggacacaaaaactgcggaaggccgcagggacctctgcctaggaaagccaggttgtctgccaacgctaactggccagctctgacaggaggtgcgtggcccaggaggagccatcaggccagttctctgggatactgctgtgtctccagctctgcagtttgctctgcgtcactcagcggcagacggagaggcagacacgagccccttgtgagccctcctccttaccgtcatctcacaatgctctgaaataaggaggcaaatggctgaggtcccctcagttgtagatgtgattgagttctatctaccagaagcatatgcctcctggaagcctggttctaacacctcccacaaaatccttcaagcacttttttctgttccaaggtttgcttatgggggacccagtgaagtgcttcagagccctagagatttgctgagtcatatgaggggtcagcaaacttttcctgtaaagggtcagataataaacattttaagctttgtagactgta

SEQ ID NO: 226461 - DNA, 712 bp, Homo sapiens
aattgctgagcatcattccatggtatggatgtaccacagtttaactatttacatgttgaaggacatctaggttgtttcccgattttaactattacaaagctgctatgaactttcatgtacaggtttttctgtgagcataagatttcatttctctgggagaaatacccaagactgcaattcctgggtcatagggtttaacatgtttactttttaaagaaactgccaaactgttttccaaagttgctgcaccattttacattcctgccagcaatgtatgaatgatcaaatctctccacatccttgccggcatttggtgttaccagaatgtagaggaaggggagaaaacattatttaaaacatagattaaagaacctaagaagtaatacagtcaggactgtttggtataggagaaaacagtcccacctattcagtaacttttgaacttatgatacagcaatcactgttcacgagttcagcttgattcgtactaatagaataaaataatgccaagtagattttttttaaatcatggcttacagtcttcactgtgatcataaaatggaatcatgtagaaagcaaatgaacctggaagtggtaccaggaatgtgtgtcacataattccaaagatccagaatctctttcttttcctttcctcttctttttgcctctggatcctgccactttcaaatcaaaatgttcaattttttttcct

SEQ ID NO: 226462 - DNA, 437 bp, Homo sapiens
caaggctagaaaaagttcagttctcattcaaagagagaaacatttattcatatagtttcttaccttttattcatatagcctaaaggctaccaatggggaaatggattagtaaactaggatatatctatactgtagaacatcagaagacattaggcatatctatatgttttgacatggaataatctttaagttacattgttaagggaaaaagcaagtcagtacagtgtgtacagtatgactctatttttgttaaaagaggtatgtattttgatatatacatgagaaaaagttgagtgctatatatggaacttttaatacttgtctctggatgttgggattaaacagaactttttatttttctgtgatgtttgactgtttttcttagttgtgttttaatttttgtaatcaggattaataaagataatttttaaaatggg

SEQ ID NO: 226463 - DNA, 434 bp, Homo sapiens
taccaggggctgggaggacaggtaaagccagatgcaaagttaacaggaaacactgttttccaagatcatgcagcagccgtaaaatgtcgcaatggtcccctctttgagcaattgctgcctttttacgagtgcgcatacccgctttgccacacccatccatgtactactggggataccgaagatcactctctccttgtgacaacgcccaatccctagctaatccccactactcctaaccccacctcagaaacaccaagcaatccagaactgatcctgcttctcttagagattcctcagaatcctcgaatgggaacccaaaccttacaaaagacagttctctccagcctcttgttgaactgcatttctccgttactctggaatatcctgtcacttcatctatgtattaaatctgattttgctttgttactggtggt

SEQ ID NO: 226464 - DNA, 295 bp, Homo sapiens
aaaatagaagatctatgagaagagagactttgcctacatatccttagagtctacaccataataagtattccaaaacgtattcattaaaagaatgataagtgttctctcttaaatccggtgctttaccattcaggatgcaatgtctctgtcaacttacaaagagtggcatttctggtctagcaattgtaccttgaagatttgctgccaccaatgagaagaaatgctatctaatctccttagacagagacactgtcccagagttttcctttaagtatcctaaatggcaatgaactgt

SEQ ID NO: 226465 - DNA, 1582 bp, Homo sapiens
cattttgaaaaaaattataacatttatatatcatcttttcctcgatgcataacactttttacaaagtttagtggtagataagtgaggggtaactcaaatcagagaaacaggggtgcagacgtttgattaacttgtctcatatcataacttttcaagatttcattatcattccacaacactgccctcaaaaaagaattttgtaattaccattgagtgacaaaataccaagtagtgacagaggtgtatagacgaactcaaaagttattgtaggaggacactgataaaatgttggggaaaatcacaaaagacacgagaagataatttagagctctatgcccaaatcacatgactccagtctctggctctcttagccagaacagcgaatcttttacaatttacctcttgttgccaataattttctattatcttcaaataataataggctggagtatgaacctagtttatcaatacttttttaaaaaaccgacattcctctcttaaggagtccatgcattctccccattttttagaaaattgttccatgaagaggaattaagtttattcctttgaattctagtctgcatcccagcttttagaacacgggatgcagaaccagttgatttgccacaggccaagtcctgagtctccagcgaatcaagcaattaaccagtcacttggcctttttgcagaaatccacaaaacgtgtagactcgcttaattccatctcctcctggcctcttcacacggaaattggctgctcgggcgaatgttgtttttctccgcagccatgtgtcgaagggcgattaacattcgctcgacaaaaccctgtcccgggccatttgggagttgcacgcgttcacacccggggctcagcccggtgcgccttcacgcgcagcctttttgtttatgcggctagcagggagaggggcggagaggcagcgaacctctcaatgtgcagcaggccgcgagggctatataaagctcgggtctcggacctactggaactggtcaagattgcccgcgagctggcagcggccttccgcccagctctgcggcgtcatggagaacgcgggaggcgcagagggtacagagagtggagctgcggcgtgcgcggccaccgacggccctacgcggcgcgcgggcgcggactccggatacgcaggcttctggagaccctgggtggacgccggaggcaagaaagaagaggagacgccgaaccacgccgcggaggcgatgcccgatggccctggaatgaccgcagcctcaggaaagctttaccaattcaggcacccagtcagactattttggccaaaatcaaaatgttatgattacttatatcaagaagcagaagctcttctgaaaaattttccaattcaagccacaatttcattttatgaagattctgatagcgaagatgaaattgaggatctgacctgtgaaaattaatctgattagctacttttgattatatccaaagcttgtggggtttaaatttagtgtacaaatgtatcataattattttaaactaatttatttgtatataaattattaataaaatgaaatattttgtaaaattctggta

SEQ ID NO: 226466 - DNA, 1738 bp, Homo sapiens
cattttgaaaaaaattataacatttatatatcatcttttcctcgatgcataacactttttacaaagtttagtggtagataagtgaggggtaactcaaatcagagaaacaggggtgcagacgtttgattaacttgtctcatatcataacttttcaagatttcattatcattccacaacactgccctcaaaaaagaattttgtaattaccattgagtgacaaaataccaagtagtgacagaggtgtatagacgaactcaaaagttattgtaggaggacactgataaaatgttggggaaaatcacaaaagacacgagaagataatttagagctctatgcccaaatcacatgactccagtctctggctctcttagccagaacagcgaatcttttacaatttacctcttgttgccaataattttctattatcttcaaataataataggctggagtatgaacctagtttatcaatacttttttaaaaaaccgacattcctctcttaaggagtccatgcattctccccattttttagaaaattgttccatgaagaggaattaagtttattcctttgaattctagtctgcatcccagcttttagaacacgggatgcagaaccagttgatttgccacaggccaagtcctgagtctccagcgaatcaagcaattaaccagtcacttggcctttttgcagaaatccacaaaacgtgtagactcgcttaattccatctcctcctggcctcttcacacggaaattggctgctcgggcgaatgttgtttttctccgcagccatgtgtcgaagggcgattaacattcgctcgacaaaaccctgtcccgggccatttgggagttgcacgcgttcacacccggggctcagcccggtgcgccttcacgcgcagcctttttgtttatgcggctagcagggagaggggcggagaggcagcgaacctctcaatgtgcagcaggccgcgagggctatataaagctcgggtctcggacctactggaactggtcaagattgcccgcgagctggcagcggccttccgcccagctctgcggcgtcatggagaacgcgggaggcgcagagggtacagagagtggagctgcggcgtgcgcggccaccgacggccctacgcggcgcgcgggcgcggactccgggtaggcttccccgcgctgctctgcgcctcccagcttcccccgtctctccctcctgcgcctccccagctcctcccctccaactctccatcccccactgcccggtgccagcgctcggcttcggtggattctcccgggtctgggctcacgtctcctctgcgcgccttgtgctcccctatcccgcagatacgcaggcttctggagaccctgggtggacgccggaggcaagaaagaagaggagacgccgaaccacgccgcggaggcggtgagtgagccacgcgtctcaggccgcgcctcccacgggtgcagaagatcgaccagggctctcgggacgcagggcctgagagagacatgcgagacaccgggtcctgcctctcgcttaacatcccgcctgccggtggccataaaggtgccgacgcggcggatgtgtcctctggagcgatgggccacaggcacccagccgggagcgaggctgctgagagccctggggttacattcccagcgggcacgaggaacactgggtcgtgcacgtttccactttctagaaggaggtgggtgataactggattcacttcctttcctctcca

SEQ ID NO: 226467 - DNA, 1765 bp, Homo sapiens
cattttgaaaaaaattataacatttatatatcatcttttcctcgatgcataacactttttacaaagtttagtggtagataagtgaggggtaactcaaatcagagaaacaggggtgcagacgtttgattaacttgtctcatatcataacttttcaagatttcattatcattccacaacactgccctcaaaaaagaattttgtaattaccattgagtgacaaaataccaagtagtgacagaggtgtatagacgaactcaaaagttattgtaggaggacactgataaaatgttggggaaaatcacaaaagacacgagaagataatttagagctctatgcccaaatcacatgactccagtctctggctctcttagccagaacagcgaatcttttacaatttacctcttgttgccaataattttctattatcttcaaataataataggctggagtatgaacctagtttatcaatacttttttaaaaaaccgacattcctctcttaaggagtccatgcattctccccattttttagaaaattgttccatgaagaggaattaagtttattcctttgaattctagtctgcatcccagcttttagaacacgggatgcagaaccagttgatttgccacaggccaagtcctgagtctccagcgaatcaagcaattaaccagtcacttggcctttttgcagaaatccacaaaacgtgtagactcgcttaattccatctcctcctggcctcttcacacggaaattggctgctcgggcgaatgttgtttttctccgcagccatgtgtcgaagggcgattaacattcgctcgacaaaaccctgtcccgggccatttgggagttgcacgcgttcacacccggggctcagcccggtgcgccttcacgcgcagcctttttgtttatgcggctagcagggagaggggcggagaggcagcgaacctctcaatgtgcagcaggccgcgagggctatataaagctcgggtctcggacctactggaactggtcaagattgcccgcgagctggcagcggccttccgcccagctctgcggcgtcatggagaacgcgggaggcgcagagggtacagagagtggagctgcggcgtgcgcggccaccgacggccctacgcggcgcgcgggcgcggactccgggtaggcttccccgcgctgctctgcgcctcccagcttcccccgtctctccctcctgcgcctccccagctcctcccctccaactctccatcccccactgcccggtgccagcgctcggcttcggtggattctcccgggtctgggctcacgtctcctctgcgcgccttgtgctcccctatcccgcagatacgcaggcttctggagaccctgggtggacgccggaggcaagaaagaagaggagacgccgaaccacgccgcggaggcgatgcccgatggccctggaatgaccgcagcctcaggaaagctttaccaattcaggcacccagtcagactattttggccaaaatcaaaatgttatgattacttatatcaagaagcagaagctcttctgaaaaattttccaattcaagccacaatttcattttatgaagattctgatagcgaagatgaaattgaggatctgacctgtgaaaattaatctgattagctacttttgattatatccaaagcttgtggggtttaaatttagtgtacaaatgtatcataattattttaaactaatttatttgtatataaattattaataaaatgaaatattttgtaaaattctggta

SEQ ID NO: 226468 - DNA, 650 bp, Homo sapiens
gagaccctgggtggacgccggaggcaagaaagaagaggagacgccgaaccacgccgcggaggcggtgagtgagccacgcgtctcaggccgcgcctcccacgggtgcagaagatcgaccagggctctcgggacgcagggcctgagagagacatgcgagacaccgggtcctgcctctcgcttaacatcccgcctgccggtggccataaaggtgccgacgcggcggatgtgtcctctggagcgatgggccacaggcacccagccgggagcgaggctgctgagagccctggggttacattcccagcgggcacgaggaacactgggtcgtgcacgtttccactttctagaaggaggtgggtgataactggattcacttcctttcctctccagatgcccgatggccctggaatgaccgcagcctcaggaaagctttaccaattcaggcacccagtcaggtgagtgacaggcctcgccgaaggtctcccgctcctccagccccagggaggagccaggggcatcgcgcagcccagctccgcagctggtcctgcagtctctctctctctctctgaaaatctggcttcaaggttacttatcttctcactcatcaaattgaaaaaggtaggggctcacggtcccacgtaaagggactgttg

SEQ ID NO: 226469 - DNA, 522 bp, Homo sapiens
ataatgagaatgatatattctcgtcaatactttgtaatctttagcaagttatttagcttttctggtcttcaaatccttataggagtaggggttggggacagcttggcattgatctctactgtcttttgcaataattttgtctctagctgcatgtggaatcacttctattttaatttatgtttctttctttcttttttcctatcttccacagacatgaaagccatttgcagcaaagactgaaccaaccaacatttaaataaaatctgagaacaaggccatttctaaaataagatacaaaaccaggtgaaaggccagtattgctctgagaagagaccaggagaaaaagaaaacactcggcactaagaatcattcttgtgccaaactatgaagagaggaaagctatataaggaaaatccatgagcttggagttaatgtttagtataacaaaagtacattcaatacacatcaacctagatagctacaaaaatggctctttggaaaataaaaagcaaaattgaaaaa

SEQ ID NO: 226470 - DNA, 462 bp, Homo sapiens
cttccaaaaatgtgatgctgaccctacctagcatttgctgaatgtgcagtattagctgtcccgtaaacaccagctgggttattcattacatactcagctgtatacagtagctgaataaaacaggttttttaaaaaaaaaaccacacaggaaattttctgcatgtttttctcttccttgaagattaaaatgagttgttaggattgccattgtagcaaaagggaagttgtacttccttttttgggggctttatgggtttatttttgaatatcttttcaagttcttttacctttgtcctaaggaacctattttcacagcttaaaggactaatgtttctcttctcttagtttccttgaaatcagattgtgtgtttgttgtaagaacatttagatcaagcttgtccaacccatggcctgttggccccatgcgccccaggatggttttgaatgtggcccaacacaaat

SEQ ID NO: 226471 - DNA, 500 bp, Homo sapiens
aacccactgcacttcctccatgaagccttccctgaccacacctccctgccttcttggggactttgctcttcagctctctcgtctgccagactctccccagaagcatcgtgggtgcagcagaaatgacgtctcaggagcagtgagcgcgcctggggctcaggtcgtcctttctaagcaccatgctccacaaactaaccagggctcccggaggcggtggaaaggctgcagagggcccctaggcggctagaaaggggctcagaacggtggagcccccgagaaggcccggggtgctgggggtggctgcctagtgggccccggttttccttcaggggtggtggagatattcgaagctggataaaattcggggggcggggggcagacagcactgtccaaggtgctcggggcctctgaattggacgcttgataatgtaactttatcttctgtaaacttcacctcagtaagttaagaagaaattaagaggaagtcagctggagaccca

SEQ ID NO: 226472 - DNA, 303 bp, Homo sapiens
tgcagtgaggtaactactagctacatgaaactattgaacatttgaaatgttactactgttactgaggaactaaatttttaattttacttcgtttaaatgtatatagccacagtgtaggtctagtgcatgatatggatgaacttctctacagagaccatttgtatctatctttaggtcttcatagttaagacatttgcctcagttaaaatagccccctagcagagcctaaggaggttgaggctgcagtgagctgtgatcgtaccactgtactccagccagggcaacagaatgagaccctgtctc

SEQ ID NO: 226473 - DNA, 640 bp, Homo sapiens
taaaattgtacagaaggaaaaagaaattcatgctaattttgctgtcatacctcaaactataaaagttatggccacagtacatgataagtgcttagttaagatggaaaagatattcaatttgtagatagaagatgtgaacagaaatatgttccgattgatgacaatcaggtttggtactatctgtggtttcaggtatccactaaaggtcatggaatatataccccttggataagggggaactactgtatagatagagatggagatggagatagagatggagatggagatggagatagaaatagagagagagagagatagaagtataggtatacctctctttgtgctttgcaaatgtgttttttacaaattgatggtttgtagcaactgtgtgtcgagcaagtctatgagtgacagttttccaacagcatgtgttcactttgtatctttgtgtcacattttggtaattctcacaatatttcaaactttttcatgattattgtatctgttatgatgatctctaatcagcgaccttgttgtgactattgtaattctcttggtgcaccatgaactgcactcatgtcaaatggcaaacttaatcaataaatgtatctgttctgactgctccaccaaccagccattc

SEQ ID NO: 226474 - DNA, 355 bp, Homo sapiens
gcgttggcaggcccggggtcagatcctgattcagccagttaattgctcgtggatggcagagctgtgtgttgtccgtggtcagacacacaggaagtctgaattgttatcctgttctgccactgaaatgtgtaaaatatagggggagtgtcccaagtcattttcctaaaagcatcatccaactatgagctgaacactgccccgagaatgcaacagaacttcagctctgtcccaaggtcgtcagccacagctccaagtttcttagcatcagctttttctgaacaaaatagtgcatcctgctggaatcactactgtaaactgagtataaaggaaaataaaccctctttttcttatccac

SEQ ID NO: 226475 - DNA, 303 bp, Homo sapiens
ccaattgccattttgagaatggtatttaaatgatgataaagttgtgtaagcattttgatcaaatccacagccaaatattcttttttaattcaactgaatcatctagtcacttcataatctcgttgctccattggggaattcaaccaaagggttgaaaatacttgagtacctacattatcttagctactgcagataaaataaacaacgataaaggaatacaagaagtgacagagtagagtgtgtacacaaagtcagtgttatgaataagatccctgatcatgatattgaaagcgaaagaaaaaa

SEQ ID NO: 226476 - DNA, 286 bp, Homo sapiens
tgggggccagcgtgaggattgaaggatatactgtgtgtaggtatatcctacaatataggatcatttgaggtcaggagttcaagaccagcctggccaacatggtgaaatcccatctctactaaaaacacaaaaactagccaggtggtagtgacacacgcctataatcccagctactcagaaggctaaggcaggagaatcgcttgagcctgggaggcagaggttgcggtgagccaagatcatgccactgtactccaggctgggtgacagagcgagaccctgtctcaaa

SEQ ID NO: 226477 - DNA, 188 bp, Homo sapiens
cacaaggaagggaagttagaaggaagggccagttgttttttcaattttgaatagggtggttgggtcaggctgggaaggcgacatttgagaaaaggcctgagagaggtcagggtgtgaactgtgcaaatatgcaggggaagaacattctaggtggagaattcattcagtgcaagggccctgaggcattg

SEQ ID NO: 226478 - DNA, 328 bp, Homo sapiens
tgtatgttagttttggatcattaagccactttgttactgcactggcttcctgaaaagccaaaaaagtgacattcacaagtcatgcttcgttgtactagcaaaggaaggacatgctgtaacctcacgtctggcgtcccggcactttgggaatgtcaacatttatcagccttgttcacatctagtcctcctccaacaaagtaagcaattgtcccctgaactcgggaatctcatgccagtttgatgatttggcattggaagctctgggtgccatagccactagttgtgtaacaccgactcaccataaatagcaccatttatttaggatcta

SEQ ID NO: 226479 - DNA, 262 bp, Homo sapiens
cgcacccggcccctcattttatttttattgtctcatttgagccctcacataacagatgacatagataggttagggtttcttattgtgttttctttatagatgcataagtggaggctcatggagcttatgttatttgcctaattgcatgcagttggtaagttgcaaagtcaaacttaaaactagaactatgaactccaaagtcagcagtcatgctctttctaactgcattataccatctacaagaaaagatacaggctgaaaa

SEQ ID NO: 226480 - DNA, 650 bp, Homo sapiens
gaaaacggccgccagtgtggtggaattccataagcccaggagttcaagaccagcctgggcaacagaatgagacaccatctcttttaattaaaacattttttaaattaaaaaataaaatagagctggaatagaaacaatgccagaaaggtaaacaaaagacaatacctgaaacaaaattcgtcctactactgaattttatttttgggggttggggaggttggatttgtgtattttcatggcagatggctaaactgtgagtgattagtcatcaatctggaaaaaaggctcttgggaaagtatggcaataactaaagaaatctgtaatcccacaaaagttgatcaaaacagaaaactttagtaaatattccaaggtaataaagaccctgtgtggcatacgtatttgcaatatacaaacattcaaataaaatcaagttaccaaaccccatacttatactggactttcttagcagttcttctacattaactttaggaaacgtatacagccttactcagcatcttacttcatacgtgatgaaacagaaacagagatcttattaatacaccttagaatgtaaaatacatgggaaaaaactgacttagtacaagaacctgaagtagaaaatgctaatgaagggaagtaagctgccttg

SEQ ID NO: 226481 - DNA, 583 bp, Homo sapiens
tgtctcacaaccaagaaaattaaagagccatgaacacaagggtgaggttggagtgaaacttcaataagtgaaaggagaaagctctccacaaagaagaaggggcccaaaagagggttgtttttctacaattgaatacatgggcttttataaacaggctagtagggcgagatatttcatttacataaggagcaaaaaactggttaggactaggtgttcatttgcatagagtgcaaattccatgtccttttagcatgcatgcgaactcttagcctaagttactttatattgtttaatttccctttctgcgcatgtgtgagggggtggaattttcattgcaaacgtgctaggttctgtgttactcctcttaggcatgtttaagcaagtctcccacctcccttccctgtgcaaactcccttacctgtgtatgtccccaaaaaaagggaaggaatgtgcttactgaatcctaccatgtatacatgacccttgttagttacacagaaggcatctttatggtggaccttgcctccttatccatccttgcctcctgatctttcaggctgttcctttgttagaaaaaaaaaaa

SEQ ID NO: 226482 - DNA, 306 bp, Homo sapiens
actaagttatcacatccttagaagtgtgcctagcactgcataaagccttctagatacttccttccatggttttgttcaggtttcctctctcagctggaggggtgccagctttactcactcactgctgcttcaagctgctctgagcaaggatcaaaccttggcttctccaggaagaaaagatgtgttatcagatttgcctttgaaaagatctcatggggaatctaaggtgtagaagactcccaaacgatccttcctgggaaggctaccacttattgaacccaactcaataaatgccaatttgtacac

SEQ ID NO: 226483 - DNA, 499 bp, Homo sapiens
ccactatttaacctcttaactaagtattaccatttttatgattgtcgggaatttcagatgaacagtatagtctcatgatgaagtcctatttttcccatatttaggcaggatttattaaaataagcttgtctatgctagacaacattggaaatgttagtgaagatataaaacatatttacagttttaaaatacttggtatttataaagcatttttcttttgtaaagattttaaaaatatattgcagacctctaaaaaaataaggcaactgatatatcttctgtagttctgtgtaagaaaacccttgagtggtctaaagattgaaaacaaattgaaaaaaaaaatttgtctttcggataacttattaaaaatagggtttcccaggaaattacagctgcaattgaatatttccatataaggcagttgaaaaatatatttaaactgtctcctcccctcaaaagcctagatttatggtgaaaaaagaaaaatgtaaacaaaacc

SEQ ID NO: 226484 - DNA, 157 bp, Homo sapiens
tctaattagatgagaactaaaacatcctttggatttggtaacagagttacaactgcatttttattgaaaatgaaaatgcttaattgagagtgtatataaacttctaggtaaagatggcaaattgaactcatgcatctaattttgcttgttcctgatg

SEQ ID NO: 226485 - DNA, 361 bp, Homo sapiens
gcagccatctagattcttctggttctcattaatctgattctccttcaaaacagatttatagatccttataggaacattctagaagagaataatatacattatgccaaacacatctacttatattttgaaatgttcccactgtatttttttatttgctgcctgtggcctgtgtgtccctgtgttctctatgggatgccctttccctcttccacatcagctgcttttcctctgatgttttcttatttgccgtttatcctatatgtagaatgcaagaattattcacttccttctttatgccccacaggtctttgctcatactagaatagcatttattatcccatgttgtagttatttaaacaca

SEQ ID NO: 226486 - DNA, 517 bp, Homo sapiens
atcatttggtctcaggtctacaatgctaagccaaaaagcaagacttaagcatttggcattaggcgctgggaaattcagagaattaaaagtatcttctacctatgactccttcatattaggaaagaagactgatattctttagtatgcatagatctaatgaaacttaatggctcagataaataaaataaaaacaagatcataagccaatttccttccagaagacctaaaaaactccaccaaaattaaagaatggccatgctgttaaaattccgttgtctacaaacactcattgtttcaaaaacattgatcagaattgtacttggccaatgttactggaaacattttttcaagacaaatcagggtttaagaggcttctaataagttagttgtagtatatgaattgtttaagcccttattaattataaggtaacattaggttggtttattttcagagtcatcaagaatgcttatggaaagttgagatttgcataagcattcttgatgactctgaaaaaaa

SEQ ID NO: 226487 - DNA, 415 bp, Homo sapiens
cagctggggtgaggacccctcacgtggggagggaaagtgggggaatattagtttctgatacaacgagagacaagagaataattctacgaggccgtgtagaacaagcagagagagaaaagctctttgagtgcaacaaggaatggggttttaaaatttcatttgcacagcggcaggtcttgccaattggatcctttccagaaagcaatctgctaagtctgacagtcggaagaaatgccgggctgctgagcgaggagaggctgggtttttttaagggtttatttttcatccaggtcctttgtgagcaatggctttttttttttattccattttaaaagaaaaagacacgcagcgatcctctttgtgaggcgggaaagggcttccctgaccatctgggcctcagagggactcggggaga

SEQ ID NO: 226488 - DNA, 518 bp, Homo sapiens
gttgtcatttctcttgttgcttatgcattttcctctagtagtcttctcttccctgtcaggtttatgagcactgtttttagtggtctaggaaaatcacataatctagcttagtatttatagcattatttttaaattcagccagtagtcaactttgagtaggatttctgagatgttttctggagagcaaaagaggtgtgtatcttagtacgaagatcatacctttaattatgtttcctcagagtctttttgagtagtcgttgtttttagatttctttctggctatttggagttgtcaaataagtgactttgagtaaataaaacgttaatatatttattacaaaaatattagccatttctgttattcaagttaagtgctcatttcgtaagactggtgctcatttagatatataaacatatctttagctgtgcaaagtaagatatttacctcagtgctttatctgtcagaccacaacatatcactactggttaaatttgaaatgctttttaacctttttaag

SEQ ID NO: 226489 - DNA, 186 bp, Homo sapiens
agttacttgtatgcagtgacaaaagggaaaataccttacactgtctttcttttaccactgagtccatgacatacctccctctcctctgatgcctcagcctcccactgagactcaccagtggccttggtatgttcaatcaccaaggctctgggataccacctcctgccacaccatctctggccatgc

SEQ ID NO: 226490 - DNA, 619 bp, Homo sapiens
gtgcctccatagtatcttttaggcttaaattatatcattctaaaagtatattaattttaataattattaaaatttaattttaattaagtaatttaataattttaataactgctggaatctaacattgaaatttcctgaataaaatttgacccctagaatataaacagattttttaaaaaatgaattttgaagagtatttttttttttaaattaagattagagtatagcatacaggcttgttctagctctaaaagtccaaggctttgacccctggaatataaacacattttttaaaaaatgaattttgaagggaatttttttttttttaattaagattagagtgtagcctacaggcttgttctagctctaaaattcccaggctctaggactgttttttgtaaaaaaaaaaatatacttgaagcttgtcttttttgaattagtagttgtaactatagagttaatggaaaagatcttaattattagtttcatgttgtcattagttatatgtttcaaagtataattttaaataatattagagcataatgtagaaaatagtatacccctacctttaaatggcattatattgaagatacacagtaaaaatttagaaataaatgga

SEQ ID NO: 226491 - DNA, 909 bp, Homo sapiens
cattacagcctcagataaaggtaccttcagcccgggcacagtggctcacgcctgtaatcctagcactttgggaggctgaggcaggcggattccctgagctcaggagttcaagaccagcctgggcaacacggtgaaaccctgtctctactaaaatacaaataattagctgggcatggtggcatgtgcctatagtcccagctacttgggaggctaaggcaggagaatcacttgaatctataaggcagaggtggcagtgagccgagatcacaccactgcactccagcctgggcaacggagcaagactctgtctccaaaaaaaaaaagaaagataccctcagtgtgccaggcctctaagagctcacctgccaggcttcctcctgtgctccactgtcccatgtaattccatatatgaagctaccactgtacatctctcttttccggtgcctgttgagttgcatagaagcacagttgtgttctattttgtttttagggttgccatgggcaatttccgtgccacttttaagcagtgttgcactgtgaagagaatgtaggcaagtttatttctggaatggtttcttcttacaatcagaatagttaggatgtaatatatttttgggtgggcatttaaagtgaaaaggtacatatttacatagacacaggtgataatgtatctatgtaaatgccttttgattctgcaactgcaggatactctcatcaaagacacagataaaaagcctctgtgtttccaaggccttgccctatacctaacacataatatgtccaaatggatgaagaggaggcaaggacaaggatgtgatgacaaaacattctgttatgcacttgtagcatttatgtttcttcctgggggattttataatactaaaagaatcataatataaagagatgatt

SEQ ID NO: 226492 - DNA, 252 bp, Homo sapiens
agcccacgttctaaaccattaggctcattctgcctctcttggagaagacacaagaagtcccagtcttggctagcctggctagttccagagacctccatagctaaacaaggtgtagaaatagaatgtcccgtcacttagctatacttctatccttcccaccttctacacaactaccattaccattgccaccagcaactggtaaatattgatggagcttcttttctttgccaggcaccatagatacaaaaacta

SEQ ID NO: 226493 - DNA, 481 bp, Homo sapiens
tcactgttccacaagggctgacacacaggctttagccaatgtttgttgacgaaagaaatgagaaggggacaagaaagagggtgatggcggagtggtggaccaggtgctgtccagagggtgatgacagagtggcaggccaggtgctgtccagagggtgatggcagagtggcaggccaggtgctgtccagagggtgatggcagagtggcgggccaggtgctgtccagagggtgatggcagagtggcgggccaggtgctgtccagagggtgatggcagagtggcgggccaggtgctgtccagagggagagccggggtggcaggaggggtgcccatctccacatcctcctctgagctctgtgacccttgggggctcagccgctccttcacaggcacttctagaatgttgttccaaatcattcttgtaattcttctttctagtatatgtttaaaaattgtcataataaaaagtgtgataaatcaat

SEQ ID NO: 226494 - DNA, 450 bp, Homo sapiens
cagaagagttttcccagtgtcccgggagccattcaacacagcatcatacagaatgactgtggatctgctgtgcttagtttctttacttgtgaaaacagagtaatagtagcacctacctcacagggttgttctgaagattagaggggttctttcatgggaagctctagagcagtgcttgagacatggatgaaatgccctgagttgggtttagcaacttgaagaccattggaaagattgtccctacaacaaaaccttcaatctacaagatttctccctccccaatggcatgttgtgtatccctggctgccgtggactatttctggacttgtttcatgaaactaacccctagtagaactaagaaacattttaggagagaagtttacaacagattaaatgataaacctaaaaaatgaataaaacatattataaaaataaagaggatagacaaaa

SEQ ID NO: 226495 - DNA, 409 bp, Homo sapiens
agcatgatattcagagtgcgccggcgtccagcgcgagcgcatcctacgacaaccccgtctcccgctggggtccgcagcccgcggactccggggtccccccgcccaaatgcggcggcgcgaccgcttcgtcccgcggccagggcgctccgcgtctgctccggccaccccagcccacccgcgcagcgcggacgccaacgcatcccactcccgctgggcgccaggggcgcggggttcagtggggccgcggcccccgcacccggctgggatccgagggcggggtggtcgcggctgacgtgggctttgcggctccgggccagagagcagcctgggggacggtgggtctctttccggcttgggagggaacgggggcgcccgcgcgggaggacggcaggcgagggacggcggccgc

SEQ ID NO: 226496 - DNA, 519 bp, Homo sapiens
gatttgagggtaccagcgattgaatggagacacccgtatttattgaccatgataaaatggttgtgtgagtgaaagaactcaaacatctggtacctccctcacagagctcacagaaaaataatgatgagaaccgtatcttgtgcttggtgttaatgtggcaacaagttgtacaggcgttcagtagaggaagatcaggtgatcacagtatggtgctggccaaaggcagcttccttgaggtggtgagattctaaggctaaaataaataaaaagttatatgctcagtatagaaatcttggataatttttaaaaagcctaaaagaaaaaatggagtattatcccaccaaagataactgctactagtattttggtacatgctcttccagttactttttactgtattatataatcaaaatgaaatcttattatatatttgttgttttgaaacttttgtttttagcaatatgatattttcctgtcaataaatcttcaaaagcataaatttttttacaatgaaaattg

SEQ ID NO: 226497 - DNA, 682 bp, Homo sapiens
gttggtttacaaccacaggtacatgacctcaaaaaaatccaatatgtaaatatttaatacaggaaatctttaaccaactctatgagctccctaaacaccctaacactgcatgcaaaattttacttatgtatgatttctttctcagaagaatgccatactttttatcagttctttataaatgtgtgtgactggaaaagatgaggcaccgttaatttatagaggtacttactcacataaaaggacagtctttccttactaacattctatacattttctctaagtaacctttaaagaaaagcacattaagatattccttgactctaaaaagttgaaatagaacagtacacaggtatacagatactttgttctctcaaattcccactccctacctgaaacaaattcctgctctagaagaccttattattcttaatgttaggctggatcagtacacacaagggcctcacctgcacagcagatgaagaatggcttacctccacactcctacctcttttttgtcatgaattgtcttgaattatgtgcatgcttatatacaccactgtttcacaaaatgtaggtattgtgattcttgaaaaatttaagtaaaattattttcaagcttacgtttttttacggtcatgtgttgcttaatgatgggcaccgttttgagaaatgcatcctttgg

SEQ ID NO: 226498 - DNA, 130 bp, Homo sapiens
aattggaccttataatctatctgttaagttcctgttatacctagattatatcttggttcttctgcttgaatctcaacatcacatatttgtccatttaaagtcctttcaaactgagctcttttgcaaacag

SEQ ID NO: 226499 - DNA, 517 bp, Homo sapiens
ccagctttgaatgtgacccaacacaaatttgtaaactttcttaaaagattatgagatttatgcatggaccttttttttttgagcccatcagctatcgttagtgtattttatgtgtagcccaagacaattctaatgtagcccaaagaagccaaaagattggacacccctgctaggccacctttttcagaatgggtgcctgataaaaatacagaggacttcctgggccccgtgctgctgaaacctccgggcctgctcctcccggggaatctgtatttttcaccaccaccctggtgattccaaggtctactcgagttggagacccatttattcaagggctgtcaagtgagctgtctatacaggactatcaggcccgagaacacccccggaagttagcagggccaaggcgaagggattaggcctgggcttcgcgttggcctccccggtccacggacgaggttcggggcgtgggggctaagcggggcggagggaacccccaaatccccgggggcgcggccgc

SEQ ID NO: 226500 - DNA, 460 bp, Homo sapiens
ccactccactgcacccagtgtggccgtacacctgtgctgaacggccagagacttcctggtcaatactcccacagataaaagactgcaggatctgcttatacacaaatccatctttcgctgggaacccacaactcataacaactctcctaatgccaagtcatcaaggcctcttgaaagagaatcataaaaaacaaagaatttcaaacttggaaggaaacctaaagtttactggtgaggagcttgaactgagtagaagcaaagaatcatactccagatgagaaacgccccatgcactgagctgagactggaactctcctcttcttactctcagtccagtaagtttgactacagagcactcattatcattgtgattattatgttcccgcatattttgtcgttcttagttaggcatactcctttaacactattgtaataaaagcaaaatctggaagatctttaa

SEQ ID NO: 226501 - DNA, 640 bp, Homo sapiens
ggacccacaagtaaggaaagtattgctaccattcaattttcacattagtcaaccgtatacttaggaaagaaaaactttccttttgttctatttactaggaactaaaatgattttactggagaagacattaataaattagtaagtgctcacatattccatatatatgagatttcatactttcctaccatattttggttgagttatatttattctccaaatttatggcaacctgtgcagaaaaccacaggtaatattatgtattagagccaagattttttggcccagaaatggtaaaatcctcctcattcacacacacacacacacacacacacacacacacacacacacacgcacgcacatagacacacatatgtatttgggattattaaatatcttagctatatagaattgaatgaacatactatgatactatgaacttagggtcttaatgaatcaaaggatgttgtttctagacatgttatataaaacataattatttaaaaacaatgaaaaataccgtaaaccacttataaaataccaaagaagtgtgcgaaaccatctgtgacgtgaatgagtgtgaggtggaacattcttaaatattgtttttccttgagaagttatcaacaatattgatttccta

SEQ ID NO: 226502 - DNA, 270 bp, Homo sapiens
agccacatgttgaaaatcatgagcctacattagacttagttgcctgcacagaggacagttccctcatccccaactccttagccaattgggcaaaataggaatacaaaatcaacttctgttatcatatggcattaggactcaagggtttatttattactagcattgctggtaataaatatacaaatacaaaaaaatacaaatacaaaataatgatacaaataatacaaatatatttgtaataataataaatacaaaataattaaaatacaa

SEQ ID NO: 226503 - DNA, 354 bp, Homo sapiens
ggacattaactgtagcctggaagtactctacatgtacctgtggtggtagtggccgtagagtgaggttcctctgcctttgaaatggggaggaaagagtaagaaagactgtatctagtggtttgagtcccagctcatctgcagtacaacagaatacgaggtaggcttctaagattattgaatctagtcactgactctgaggcagcacctctggactgctcagggactgggggatctcaccaccctgaagggaaaacaggcctggcttgcattgccacctattgattgtagagcctcatggctttgattgaatatactcattggacagggagtgattacagcagaccataaataaaa

SEQ ID NO: 226504 - DNA, 524 bp, Homo sapiens
agctttttttcttctctcctattttttcaccccaccctcatttcattatgaaaaattcagacataaaagtaaagagcataccataatatacctaccaccgaagtttagcagataatattatacattattggctgggtacggtggctcatgcctgtaatcgtagctcttttggaggccacggcaggtgtatcccttgaggccaggagttccagaccagcctgaccaacatggccaaaccccgtctctactaaaaatacaaaaattagccaggcatggtggcatgcacctgtaatcccagctactcaggtggccaagactcgagagttgcttgaacttgggaggcagaggttgcagtgagccgagatcaacagagcgagactgtctctaaatataaatgtatataaatataaatatatatatatataaatataaacatacacattgcattatttgcttcatttgtttaattttttttctggagaatctgaaagtaaattacaaataaccactgcagcttacatctc

SEQ ID NO: 226505 - DNA, 328 bp, Homo sapiens
gagatggagtttcggtcttgttgcccagtctggagtgcaatggcgtgatcttggctcaccgcaacctccgcttcctgggttcaagcgattctcctgcctcagctactcaggtggccaagactcgagagttgcttgaacttgggaggcagaggttgcagtgagccgagatcaacagagcgagactgtctctaaatataaatgtatataaatataaatatatatatatataaatataaacatacacattgcattatttgcttcatttgtttaattttttttctggagaatctgaaagtaaattacaaataaccactgcagcttacatctc

SEQ ID NO: 226506 - DNA, 362 bp, Homo sapiens
aactataaaacaaaaatcacatttttgatgccttagagctggatttttcagtatttcttagaaatggaacgcttcgtcacacggaactgtatggaatgccactagcaaagagggagaagacaagtcccctggtgaggagccggagcccttgtattcgcttctgcctgctgctgtgtggcccctctgttgcctccaaatgtgaggctccccggggtgcggtttaaaaactagtgcccgttttcaaaattcataccagcagaaccaaatgcaatttatagccaatgccaaagcaaagtggtattttattaaaataaatatatgaaaccaaagtgaaaatttaataaagtaaaatttagtttaca

SEQ ID NO: 226507 - DNA, 212 bp, Homo sapiens
tctcttagatgagtgatgtgcaggtgtgtttgggagtggaaatgggaggctgttacaaaacttaagagcaagaatagaaggcatagagtacgcattattaaataaaaggcagtaggcatcagaaggatatatgtgtttcagtgtatctgatacttgagtatttgagtaaatttgtttttgattactgatatacaaatatactataaattctg

SEQ ID NO: 226508 - DNA, 198 bp, Homo sapiens
ctttcatgcaacaaatcaaaaggatttacaccattattatactacaaacattcatcatgctctttaacacgcccaataactgagaaggcacacaattgcgacgatgcttcagttgaacttatacttcacatctcttccgtggaagtgtcctacattgatcaccttggatacctctttgcgtcgactacctagtacata

SEQ ID NO: 226509 - DNA, 183 bp, Homo sapiens
acctgcagttctttgattttgatttttgcattttctttactgtttcatgtggactatgggctgtaagctgcttacattgaatctttcagttttgcttctgtctgaatttgtctagatgaaaaatactagactggctcatatgaaatgataaaattgtagaccagggtagcaaactatggcctg

SEQ ID NO: 226510 - DNA, 104 bp, Homo sapiens
gagggaacattggctttatacggcagcaagtaatcaaaaaagccttcacttgtgagaaaaaatgcttggtatggtacaccttacttaaataccagatgccactc

SEQ ID NO: 226511 - DNA, 828 bp, Homo sapiens
tgctgtaccttgatagaaatagaaaggtcatgtttatggtaattgggacagggtaagagatagaattaattctatattgaacatttcaaattatgatgaataattttgttatactaaatggacaattggctatacttcttcctctgaggctttatttttctttgttttttctcctctttcaggctgaagtcatcgatgtgagttatggaatggcagatgatttaaaaaggattaggaaaataaaaaacgtaacaaatcagatcgcactcctgaaattaggaaaattgccactgctttataaggttggtccagtgaatgttattcagtggtttggtcaatattttgccttgttttgttggaattatatgcttttgtgagtgtggagtgtgtgtgtgcatataggtgtgtgagagagagaaggggagaggaagaaagagaggcagagagtgtcacagaaagatggcttttccacattagaacattttaatttaagatatttaagaacaatatatttatgcccttatttctttagagagaaaataccttaagtcaggtaacactgagtttgtgggaccttaataaaattggcatactcttcataatggtacctatctggaatagtaaaaaatgagaaccaccctgtgttcatcttatgacatatgtgaaacttctaatctattatcaaatggactaattatcatgttctctatgttagacaagtatctagatgatttacaccctttagtgattattttgtcaactatacaactacagttactaactgtgatcaggattttaattaaaatataattgctaagagtagcagaa

SEQ ID NO: 226512 - DNA, 721 bp, Homo sapiens
tgctgtaccttgatagaaatagaaaggtcatgtttatggtaattgggacagggtaagagatagaattaattctatattgaacatttcaaattatgatgaataattttgttatactaaatggacaattggctatacttcttcctctgaggctttatttttctttgttttttctcctctttcaggctgaagtcatcgatgtgagttatggaatggcagatgatttaaaaaggattaggaaaataaaaaacgtaacaaatcagatcgcactcctgaaattaggaaaattgccactgctttataagctttcctcattggaaaaggctggatttggaggtgttcttctgtatatcgatccttgtgatttgcctaagactgtgaatcctagccatgataccttcatggtgtcactgaatccaggaggagacccttctacgcctggttacccaagtgtcgatgaaagttttagacaaagccgatcaaacctcacctctctattagtgcagcccatctctgcacccctcgttgcaaaactgatctcttcgccaaaagctagaaccaaaaatgaagcgtgtagctctctagagcttccaaataatgaaataagagtcgtcagcatgcaagttcagacagtcacaaaattgaaaacagttactaatgttgttggatttgtaatgggcttgacatctccagaccggtatatcatagttggcagccatcatca

SEQ ID NO: 226513 - DNA, 984 bp, Homo sapiens
atcattttttatggctgcatagtattccatggtgtatatgtgccacattttcttaatccagtcgatcatgttggacatttgggaaaagtatttttaatgtttttatcctaaacccaaaataagaagggaaagctgtaaacatttttgctttaacaaaaaggaaatccctttcttagcttttctttcacttctagttgcagttcaggaattttctgtaagtggtgcttgtacctttatcaaaagttctgttaacagttggtgaggcaagaaatatttgtatcaaaaatgcaaagatatgacagcttaataccagatctcagtgttcagaagtttagtccatataggattgtgtatgttatctattttttaaatgattaaatgtatgttttaaacctcaagtaagacacatgttgaaaatatggctgaattgaggctagcatttacagttttgattgatgaaatctgtattttttgatacatttaatagtgccttactgtggtatattcatgtggtaatagcgccacttctggttatatcattgctaaatttaaaatttggaaatttggagtctgtttattgcctccatcgtagaaaattagataagatatgtgattgcctaggatagttttgaaattaatataaaattcaaactaacatttacaaattataaattttttatttagagatgattgtaggttcacatatagttgtaagaaataaaactttccaaactttcaaaatggggaatatttagtatttggtcctatttggaaagagctttaattatttccaagaacttacctgggtttagaaaatgaagttttggttttttaattatgtcctacctgtcaatttctgtttctgtaagaaataatgtagacccacacgcctgtagtcccagctattcaggaagctgaggcaattggaacacttgagcttaggggtttgagatcagcctgggcagaataatgagacaccatctc

SEQ ID NO: 226514 - DNA, 366 bp, Homo sapiens
gagatggacttttgctctgtcgccaggctggagtgcagtggcgtaatctcggctcactgcaacctccgcctcccaggttcaagtgattctcatgcctcagcctcgcgagtagctgggattacaggcacctgccacaacgcccagctaactttttatattttagtggagatggggtttcaccatgttggccaggatgctcttgatctcctgactctgtgatctgcccgcctcggcctcccaaagtgctgggattacaggcgtgagtcaccacgcccggccaatttaacatttttcaacatgtgatgttttcaccttctcccgcatgaatgtaaacaccttgaggtgaactccctgtctgaagttctc

SEQ ID NO: 226515 - DNA, 611 bp, Homo sapiens
acttcccccttgctattcttctgatagagcgctcacaagatctgatgattgtttggaaatgtgcagcgcttccccctttgcgtgcgttctctctctcttcctcctgctccaacatgtgaagaaggtgcttgcttccccttcgccttccgccatgattgcacgtttcctgaggcctgcccagaggcggaagccttgtacagcctgcagaaccatggggcaattaaacctcttttctttaggaattacccattctcaggcagttctttatagcagtgtaggaacggactaatatgccaaccctgtctgagtatgctcagcaaagcatattcggctcagcaaagttgcagtatccaagatcaatctgcaacagtcggttgtatttctacaccctagcaatgaataacatgaaaataagattaaggaaatgattcattttacagtagcatcgaaacaataaaatgtcgaggaataaatttaactaaaggtgtacaagatgtatactctgaaaatttcaagacgttgctaaaataaattaaagaagacctaaataaatcgaaaggcattttgtgttaacggattgggacacttaatattgttaagatgcccataat

SEQ ID NO: 226516 - DNA, 527 bp, Homo sapiens
agctttattgattcaatttataatatatactatatgaactgagatgacagattcaaaatctaatgtcagtagaacttataaatactaagaatagtaattttgagccatcatgctcaaagcattgtacacattaaagataaccaataataatagctaccgaatgtctctctgtatagggcttttattagttcaggtcttacaaaataattcaaaacaaagcccctgaactataacctcatttgaaaagtccatctttgttttcaaaaggaatgggagtctccagaacagtcagcaaaatgactgttagcacatatttgaacatcattcatattgtcctgattgtcctatgctgatcagccttggctatggacaaagaagatattaaagcaagctggaagacaaggcatggttgacagttaaggaagatgaagtcaacaagagttcagggaaaactgagaccacttgagtcagggaagacttcacataggaaggggggagagacagaataggctctatagaataaatta

SEQ ID NO: 226517 - DNA, 402 bp, Homo sapiens
ccataatctgccttctcttcactctgtgattcaaggccacccctcccacttacactagattccatccccaatgactttttcaagaatttaactccagaagttaaacattatttcctgcattatgaatctctacaccacccccaagcaggataattcattttaggtagaaatatgtggtaatagttctcatttaaaattctgtacatttccagctactgcctcatttactcctctctttatagaagaaagcatcgtttgtctttattcagcatctccactttttctcttgcattcttttgctgttgttttgtttttctgggaaagttctttaatgtttttaatttgttataaaatatttcagactttaaaaataaaaagtaaatatattgtgtcataaaaaat

SEQ ID NO: 226518 - DNA, 171 bp, Homo sapiens
acgtgatgctgtacagaaagatagatggattcttagggtgtgctgagctgtggggactcatgaccccaaatccaccatgtctcaggttacacaggtttagatctgctccctaaagggcagactaactgccctgctgggtcaagttgtcatcagttacatccattagtgctt

SEQ ID NO: 226519 - DNA, 174 bp, Homo sapiens
tcccattcccactagtgcactgcctatattgttctgcctcacctaagagcttcaggactgagctattaggaaggaaaaggaatgaggacaggaggagtctcaatatcatcttaaactcttttgtgttttataggcaagattaagtttcaaaaaaggaaccccaactaatacaca

SEQ ID NO: 226520 - DNA, 361 bp, Homo sapiens
agtggggtggcaggagaggaggctgaggactcatcttacagggctttggtaacaaaggtctgctaaagaactgcagacctaacccataggtacaagcaggttttcaaacagaaaagctacatgatctggtccttgtgcgtgccacgtaggaaagataactagacagcaaggtggacgggagacagtgaggagggagggaaattactgaaaagaccatgacaacagtctggagaggaaaaggaatcaaatgtgattccaagattactttgtaaaaccttggttgattagacgccagctgatgccatcataaaagcaagaggcggagaagaaacaggctcagagggacccttgtcctgctgcc

SEQ ID NO: 226521 - DNA, 451 bp, Homo sapiens
cagttttctaagacagccacaaagtgaacccaagagattaatacgggagggcggtccagagggcttagtctctgagtgaattctgtggtcatgaattgaaagtgtaacaaatcaccaagtcctgtaattctatctctgagtatcttttgaacctgcacccttctctcctccccaaatcccctaccttagttcaagcctcacgtcctccctccagcccagcctcacggcttccagtcttggctcctcgtcattcactttctactcgatggccagagggagcattctaacatgaaatcttttcatgccactctctggcttcaaacatatccacagcttccatgtccttctgatgacatccgaagtcctctccatgctgtggtcctgcttgcccctcagatctaatctcatgcctctcttcttttgccaccctctgcctgatgagagccagaca

SEQ ID NO: 226522 - DNA, 475 bp, Homo sapiens
  misc_feature (17)..(17): n is a, c, g, or t
actgaaggttttttctnttgggaaggccctcttggttttggagagaaagacaagttatgagtagctgctacccctggaacggtgggcagagagcctactaggaaatgtgcagaataaactattttttgaaggaaaaaaaaaaaaaaaaaaccccaccacccctcaacaggcaccggtgtgtgatgtccgccttcctgtatccaagtgttctcattgttcagttcccacctatgagtgagaacacgcggtgtttggttttttgtccttgcaatagtttgctgagaagacagggtctctcactctgcgtctcaggctggagtgtagcggcaccatcttggctcagtgcaacctccgccttccatgctcaaatgatccttccacctcagcctctggagtagatggaactatatagtagatggaactataggtgcttgcctccatgcccagctaattttttttttttttttttttttgg

SEQ ID NO: 226523 - DNA, 479 bp, Homo sapiens
ataacataagggatgagagggagaattggggaatattctgctataaggtgcttgcatggtatagcgctagtagaaagaggacttaggtaagttgtaagtgtatagtgcaaacttcagggcaatcactaaaaacgttttttaatttagaagtataattgatatgataagagagaagagaaaattgaatcgtataaagtgctcaattaaaatcagagaagggagaaaaagagaggaagactagaaaagaaagaacaagtgcaacaaattcaaaatgaaacaaactcaggatggatcatggatctaaatgtaaaatgcaaaacaataaaatttctagaagataacaaaggagaaaatctaggtggccttcagtttggtgattattagaataaacaccgaaagcacaaaccatgaaaaagaaactagataagttggactttattaaaactaaacatttctgttatatgaaagaatcattaagc

SEQ ID NO: 226524 - DNA, 936 bp, Homo sapiens
cagtctatgtgtaaaccaaagggttccaagggttttggccttccaactatttttgtgtgtgtgtgaatatgacagcactgtgcacctcacctgcatgctgggaacagtgatgtgcccctgttctgccccaagtactaagttgggtccctctggccaacttagtacttaattctcctgccctggctgctccctagaaaccctggctctgattgctgggcccacactgccacctagcggtgccccctctcatgccctcactagccaaatttccatagattcttctcttctaggataatccctctcctgcaccccaggattgaacttactgcaagattcccctgccactccctacccagaacaatcacaagatgaatcacaagaatacacagcagtgccttcccaaaagtctcgctcatttggcctccatcctctcaccatgtacagcctcccctctccagtaaggacagagtgtgtgtgtgtgtgtgtgtgtgtgtgtgtgtgtgtgtgtgtaggatttagcccccctcactttaagctattccaaagtctctgtccccttggacacacagctacatgaagggctgtgtggcagagtctgccatcatgaacccactcctgaccagacctagccatcctgcatgccaaatcctcccatcattgtggaggggatgctgcaggtggttgctggaacatgagcactaagggaaaccacatattctgactttcctgggctaagtgagtagtttcaaggcatctctccgatggacccatgtggggaatgcgtgtgcctgtggaagcatggacactggttatagggactgggaggggagaagcagcacctttgccttacttttcatacttctgtataatttgaattaattacaatgaggaagttttacttatgcaacttaaaattttaataaaagagaccagctt

SEQ ID NO: 226525 - DNA, 352 bp, Homo sapiens
ctgggcgggccaacagagccaatgtgatgggagagaaatgctacgcacctggggcttaacctcgagcagctgtgtgggctttatcaggccaacacgacgctgaagaacaacagaagacgtttttgacattcggctttggacttggcaaacagggctggactgaacacgtctcagggacacactctggccacatccttgctacatccaagcaaaggctgcctggagctgctgtcagggtctttgctgggtctctagctattcttgtgccactcacaccatgtttttaaaaaacattttttctttaaactttcttacttaaataaaatatattttaaaatgaaacctaaattac

SEQ ID NO: 226526 - DNA, 434 bp, Homo sapiens
caggaatacaaataagatgaagttcactaagttctcagacccaggagtgactagggacatggaaaagagagcagtgataatcaaactctccatccctccacatctggtaaacctccctttccacaatgccatgattttgtgcaattagagaagcagaaacctgcaaattcactgtctgcagataaatggggccatttcaccttccctggtacctcacagatcaggtagcaagtgatggagcatttctacgtgtatccaaacctttgcaaaatgggttgccatcatttccttgtaatggatagacaaagtccaggcacttctttggcacccttatagctttgaaaagctgatgctgatgacttcagtgaagatagcattgttgcataatgtccacaaatcattgataataaaaatataaccaagaacatgacata

SEQ ID NO: 226527 - DNA, 683 bp, Homo sapiens
ggagcgtcctgtgagggaggggctgcactgccactttactgatgaggaaattaaggttcagagagatgaggtcatttgttagaggccagacagcctcctcagcccatttctaaggttgtttctgtggtatttgccataaagccataggttcattgatttgttcttaagtagttctgagcccttcctgcatatcaggcagggacaaacaggaaagtccctgcctttggcaagtgcgggggaaatgaaatgattctgctcagcctcatccattggtctgaacaatcacgtctcatgaccgcagggacacggcttcccctgaacgcggatcctagaggccaggcagaagcagcatgggtttccactcacacgatttatctactgctcgtgaaatctctggatttaactctgatgaaagactggaggctgaaggagaacttcaatatcatatattttaaaggttgattcacagtttggagcaagaattaaagaaccacgaacttcaaggtgatgtaaaattctcaaacaatgagatagataaaaagtacgcagccaaaaagttcaagaagaagtgttatggagatggagcaggcccttcgtaaaaacacgatgttggttttctggattttgtatgtttgcttttttttttcctcatcctaaagaaatattcactgtcatacctaatt

SEQ ID NO: 226528 - DNA, 585 bp, Homo sapiens
tgcaatttcgtctggagtccgcagacccctcctcatccttcccagggttgctctgaggccattcctcgtcatctaggaggggtctacataaaagcatttataaacacctccaaatgggagccaggcgtgcccacctttggagcacttttctctactgcaaatttatctactgctcgtgaaatctctggatttaactctgatgaaagactggaggctgaaggagaacttcaatatcatatattttaaaggttgattcacagtttggagcaagaattaaagaaccacgaacttcaaggtaaaacgggcaacggcgttggggcaagcctctctgcatctgcgtgtccagcctctcctgcatgccagaagtccccaggcaggagtgtggtgggacatccggctgggtctggataaagtgcttcatgcctgtaatccaagcactttgagaggctgaggcgggtggatggcttgagcccaggagtttgagaccagcatggaaaacatagagaaaccccatctcaatataagaagaagaagaaaaagaaaaaaaaaatcaaaaacgaaaacaacacaaattttagagtaagt

SEQ ID NO: 226529 - DNA, 381 bp, Homo sapiens
cggggtcgggggaagcagcacgggatcccagcctcaggcctgcccggacggtgttggttgggagacgaggtctcactatattgcccaggctggtcttgaactcctggccttaagcgatcctcctgccttggcctcccaaagtgctggagttacagatgtgagcctctgtgctcagcccatccttggctgttcaagtgtagaggtgatgtaaaattctcaaacaatgagatagataaaaagtacgcagccaaaaagttcaagaagaagtgttatggagatggagcaggcccttcgtaaaaacacgatgttggttttctggattttgtatgtttgcttttttttttcctcatcctaaagaaatattcactgtcatacctaatt

SEQ ID NO: 226530 - DNA, 908 bp, Homo sapiens
ggttaggtctgcctgccacacatcacagccagcgtttctccaggcacttgccaccttctcttcctgtcccctggagaaggtgcagggggttgggggagattcgtctccctccattggtttctgggccagtgccctctgagggatgatctgtgactccactttaggaccccgcccgataggtgtttcataacagctttctctgagatgtgattcatataccctcaaatcaccctttaaaatgtgtcattcattggtctttagcatgttcacagaattgcgcagccaacaccatgatctaaagttggtgcattttcatcccccagaaagaaaaaccgtctttttagcagacaccccaccgtccccggtccctgctgtctgtgtctgtggatctgcctcttctgggtatttcataaaagcggaatcaaaacacgtggcctctgtgacgggctcttctttccgcgtggtgctgtcaggacgtgtcctgctgttgcgagtatcagcacttcactcccgtggccagatgaggtgctggtgtgtggatgtatgacgtgctggtgtgtggatggatgacgtgctggtgtgtggatggatgacgtgctggtgtgtggatggatgacgtgctggtgtgtggatggatgaggtgctggtgtgtggatggatgagatgctggtgtgtggatgaggtgctggtgtgtggatggatgacgtgctggtgtgtggatggatgagatgctgttgtgtggatgaggtgctggtgtgtggatggatgagatgctggtgtgtggatgaggtgctggtgtgtggatggatgacgtgctggtgtgtggatggatgagatgctgttgtgtggatggatgagatgctgttgtgtggatggatgaggtgctggtgtgtggatggatgaggtgc

SEQ ID NO: 226531 - DNA, 825 bp, Homo sapiens
tctaagccgggaatggtaaccagtcaaatgaagagtctgctgtgggtggggagggtgcaaacagattccctgccctgggcccaaccgctggaggaggacatgaccatagccttacagtgggacccggaagatgctggtgactgaaagtctgtctgcggttattggcaagagtgactggaaactgtgaaacactaaaaacaccagcatctggtgtttgcagagcattttcctttgacgaagaaagaaaaaccgtctttttagcagacaccccaccgtccccggtccctgctgtctgtgtctgtggatctgcctcttctgggtatttcataaaagcggaatcaaaacacgtggcctctgtgacgggctcttctttccgcgtggtgctgtcaggacgtgtcctgctgttgcgagtatcagcacttcactcccgtggccagatgaggtgctggtgtgtggatgtatgacgtgctggtgtgtggatggatgacgtgctggtgtgtggatggatgacgtgctggtgtgtggatggatgacgtgctggtgtgtggatggatgaggtgctggtgtgtggatggatgagatgctggtgtgtggatgaggtgctggtgtgtggatggatgacgtgctggtgtgtggatggatgagatgctgttgtgtggatgaggtgctggtgtgtggatggatgagatgctggtgtgtggatgaggtgctggtgtgtggatggatgacgtgctggtgtgtggatggatgagatgctgttgtgtggatggatgagatgctgttgtgtggatggatgaggtgctggtgtgtggatggatgaggtgc

SEQ ID NO: 226532 - DNA, 691 bp, Homo sapiens
aatttctgtggtgtacatacatccttcatggcctactttaaacttccagcagtttaacaactgacttgcaagatgcctcataagctggcacaaggcaactctagcacaccaatgaccagttgccacagttatcatatgtagttctgagatttaattccttttgtggcagaattaccacaggataatgatgttgtaaaaacatcacagctttaagtcaatctatgaagcactgccaccattgcctgatactaccatacatccaaacatttaacgcacttcttcagtccctattatgtcccataaacaggtcagaaggaacagcctataaactttttagaaaatattttcacagaaaatcttttccctcggtctttatatccattttggcactcagcttccacaaccactttggctttgaggcgtcacagtaagtagtgccattaagttttatttaaaatgcaataaagtgctactcttaagtagctgaatctatggcatactgaccaaagtataattattattaggattttgctagagagtcattacatggcaatatccagtaactaatagcagtagatgtgattcagtggagaactgggctgtataccaagagcagtagtgaagtgttagggttttaaataggtatactgtaatcaagtttccatttttgtatcacccaactgcttggtgg

SEQ ID NO: 226533 - DNA, 465 bp, Homo sapiens
aacaagacccagccttgaacctgcctctcacctctctacccagctgctcttctcccagagtggagatgactgccccaggcctgataagtaaatggtgggacaaagcaggaaccccagcctccagcttacatacctcctgggagggaagatcactaccttcccagaggcaactctttccaccttcacagaataaatgtctggaaggtctggcagaagattgggatgcgtccaacttgcttcttctctccccagggacccagctgtgccctgcgcaggctctgcccagctatgaggctgtggtgggacccctctgtgctgtttctttcgggctgagtccctgcattgtcctagcaacttattctgctaagtggcagagctcacttgtgggaccgccaccccgctccagggattgtctgtatttttttgtttgttttttaaagggttggggggtatctcaccatgttg

SEQ ID NO: 226534 - DNA, 306 bp, Homo sapiens
aaaataaggcttttaaaggtgttacctatgggctctcaaagagaattaaagtaaaacgtaccttagtaaggattttttaaaatattttttaaaatgttcaaataaaaacaaaagtagagtaaatagtataatgatctctcatgtacatgtacccaccactgaacttcaacacttactaacatggtcaatctgtttcattgttcccccacccattttggaattatgctgaacaaagcccagatagcccattatttcatctgaaaatacttcagtgtgtacctctaaagtataaagaatcttaaaaca

SEQ ID NO: 226535 - DNA, 511 bp, Homo sapiens
aaagggctccacgttcgcgcccgtccacgagcgattcctcgccaagcccgcgcgcctctggctgccttccgctttgccccagccgcggggactccggggaggagccaccgccccagcgctggccgggtttctcccgctcctccctgccaggctgtcctcgacaacctctgggccgagtccaagagatcccgcaagtcgctcctgcccgcatggggcttacagaacctgaaaggcgcattttgaaaaagagttgcagaaacagttcatggggagaaaacaaagaaacaaaccaacaaaaaactgggactagggccggtgcggggatcaagcccgcgaccatggcggtatcagcaccacgcgctcaccaactgagataaccgaccgcccgaccatctagtgctgcccgagcgtctgaaagggctccgtgttcgcgccggcccgcgactgatttccttgcagagcccgcgccactggctgcctccccgcttggccccagctgcgacttctgacc

SEQ ID NO: 226536 - DNA, 640 bp, Homo sapiens
ttggcttctcccttcttctgcctgctttattttagcctcgctagcagttgattagatggtgcccacccacatggagggtagatctgcccctcccagtccactgactcaaatgttaatttcctttggcaacaccctcacagacacacccaggaacaatacttcacatccttcaatccaatcaagttgacactcagtattaaccatcacactgggatttctctgcatttctggagacttgaacagaatcttatttttgggcaagaattttcatttatggtgttgtgtacttcctccagtgtcacaacaggaggatgtaatgtctggttgtgtcattttgtgatgttaggattgatctgtgagtttcgatattgccagtctaatctatgcattgtgagattcctcatcagttttttacctaatgacttcagcagtcattgatgcttgatttctaaatttattatttaattaggagttgcaaaattgtaatattctaattctattgttccttctgcatttattagatttttctacaaagtactttcccttttcatgtatttgggtactctggggtatagtttttataggaaaggcagaataaagagaaaagagtcaagcactgattaaaaatttttcagactaa

SEQ ID NO: 226537 - DNA, 469 bp, Homo sapiens
cctgtaatcccagctacttgggaggctgaggcatgagaatcgcttgagcctgggagccgagattgcaccactacactccagcctgggcaatacagtgagactctgtctcaaaaaaaacacaaaaaaacaaaaaccactgtcccccgacaaaacgtgctgtctgtctgcttctcgccacttcttggtgaataagacaccccagcttggagagccagtatactttttgcctcttttcctctaaattgtttcctgcatctctttcctgcttatagaaccagatcctattttccatggttttttctgatccttttccttccataactgcaaactttgacctttgtacactgggaagggacctagctgaaacacttgaattgctaaaccttaaagtctcagcccaggaattgacactggtgcttggggcttttctccacagtcatccaaactcaaacccccgctctcactaaat

SEQ ID NO: 226538 - DNA, 590 bp, Homo sapiens
tgagacaaagtctccctcggtcacccaggctagagtgcaatggcaagatatcagctcactgcaacttctgcctcccgggttcaagtgattctcctgcctcagcctcttgagtagctgaaattacaggcatgcaccaccacacctggctaatttttgtatttttagtagagacagggtttcaccatgttggtcaggctggtcttgaactcctgacctcgtgatccacccgccttggcctctcaaagtgctgggattacaggcgtgagccattgtgcccagcctcactgtctttttttaaaaatcatttttcttaagatgtcagtcagtcaaattgctgctctttaaaagtattgtgtcttcccactgctcaccatggctattttaaatatttttttcctagtttaaaaactttgtcatagtttccatagtcttatattgacacccaaaggtgtgtttcatatgtattcattctgcttagggtttcctaagctttcaactctgttagctgctgtctttcatcattttgtaaaattcttagtattatcttttcaaatattgcttttgccctattctctcccttctctttctga

SEQ ID NO: 226539 - DNA, 448 bp, Homo sapiens
cgcgggagtctgaggcatgagaatcgtttaaacccgggaggcagaggttgcagtgagctgagatcaagacactgcactccagcctgggtgacagagcgggactgtctttaaaaaaaaaaaaaaaatcatttctttatgtattttgagtctatattattagatacatatagattttaaattgttttctcatcttgctgaattaaatctttaatgtttccagccatgggttggttgactgcaataatttagcaaaaaaaaaaaattttgctaaattttaatgtcactttttgatatgacgctttggatcagtccaactttgtgttccctgcttttccactcaggttatcagttgattgggagccactcaagggtgaagctttgcaggttttttttgtttgtttttattcagtatgtctattacatgcaacttttaaatagctattattat

SEQ ID NO: 226540 - DNA, 339 bp, Homo sapiens
gcaagctttctcatgtccccagtgatctgtagactgcttgtacaaggctatacacaaactcaggagaaaccaaagtgggctttagcactttattcttccctagttgaaggtgaagccttgcatgtgcagaaagtaaaagccagggtaggcttgtaacctgcccaaactttaaatgcattccccaaaccatgtacagatccatcaggaaaagggtgtgaatgttactggctaaacacaaccagtaaactgctgagagcacaacctctcagcagtcattggctgaccagtaagttaggctcaccccaagaaggccaagcttaaaaataaaaacagataata

SEQ ID NO: 226541 - DNA, 539 bp, Homo sapiens
ccatgctctggccactccccctccctgcctgagggtaacagggaaatgggagggcctttgggctggggacaaccctgctgcttgcactctgcatagagaaagcatgaggagaacagaggaagagagagcaggaaagaaacagaagatgcaggctgatggttcagaagatcgggcaggaagcagcctcaatgagggtctatcacagcctacagacagcacagaaaccgtcccaacacagctgccctgcaagctgggtactgccacccccattttgtgggcaggaacacagaggctcagagatgttaagtgactttctctggatcacacagctggctatggacaaagctggactctgtccacttgactccaggctcttctgggtgttggggcacgacagtgagaaaagataagatgacggaggaagaagggtggtctgaggcctgcgggctctccttccctgagggcctggtcaggctcagtctgacatctctgggtgtctcaaggcttgtctgctatttccagccctctcctcatcctcc

SEQ ID NO: 226542 - DNA, 421 bp, Homo sapiens
cagagatggggtttcactatgttggctaggctggtctcaaactcctgaccttaaatgatccccctgcctcagccttccaaagtgctgtgattacaggcgtgaactaccacacccagcgactcacctcattgttatggttgtataacatggatgtatcatagtgaattcatttattcaaatacttatttatggctgtttagattggttctattccttttctattaaagcaatcaccattccattcattttaaattcgtgttcttatttttatccatataccatcattcaacatacaaaatcatacccattccattctacattttagcatctcaaaagatagcacttcatcaaatcaggatatatacccatattccttttcagtgaatcctgaaaagcccctaccaagtactttcaggtgaat

SEQ ID NO: 226543 - DNA, 329 bp, Homo sapiens
gcctacccagtggccctggccccgcagggcgacagcggctgctccctcccatttgcgtcccagaccgcgcggcctcgcttagctcccgggagccgacaggcgcttgccctggtgccagcgcagggcttcccgggggcttggggtaggggtaggggtgcgggggggaaggggagaacgtaatttccttctgcaggagtcgtggagacgtgagctgcaaccagccaccgcgctctctccaggcttgtttaccagttttaggtcatcattgtgcacgaaacattctttcatccaaataaaagcaaatgcagaagaacacctgatcccaaaca

SEQ ID NO: 226544 - DNA, 304 bp, Homo sapiens
cattctattcgttttcaagtatgtaaagtctgcaatactttcaggaggcaggttcctgggactggagctttaaacagctggaacaaaccgcttaactgtattccaagcgtgtctatttaagcttggaggatagaagccttcagcttttgtacgtaaatcttggtagagctgaaggaatttgtatgaaaagatttgtggtagagtgaatcaaaatcgctttggttttatgctcttctgcctgcagtcgaagctgttagaatgtggtttagaactgagtgaacacaaaacttgattttattctagt

SEQ ID NO: 226545 - DNA, 442 bp, Homo sapiens
agaataatgacaagaatatgagtttgtgcatgcttggtacatacacaatcatccttttttttccttcaatatctttgatctatggttgattgaatccatggatgtgtaaccaactcttacaaaggattgactatacagtcataactaaaagacatttgcaggttctatttcaaactaccacaatgaagcaaaaattgcaataaagaaaggaacacaattgttttgatttcccagtgcatataaaagttatgtttatgcactgtggtagtctaataagtgtgcaaagcattatgtctaaatagcaatccacatactttaattaaaaataatgaattgctaaaaatgctaacgaacatttgagcctttggcaagttggtaattgtttagctggtggatgatcttaccttgttaccaatagctgctgactgatcaggatggtggt

SEQ ID NO: 226546 - DNA, 540 bp, Homo sapiens
attctgagactgctgtacatgtatgcagagactgaacaaataagtaaatggctggtacatgctcactctcagggagggaggccacagataaacaagaggaagaggctctaatgtcatgtgtggttgtggattagaaccagaaacataaatatgaactcatgtttagattaatatagatattaatggattgatatagaaataatgatgatatgggtatatatacaggttagtatacagtcatatatttcttatccctatccactgagagggcctagaaacaacaatactccagtagcaacacacacatctcgtgcccatatcttgatttcttttgccatttcctaacaaaaggagccaggacttcttggagaaatggctgattctaagactgggtcagagagtataccagatgacgctggcacatcttctactgctagaaagtaaggaaatgctcaaaaaataaaaccacggagatatttcaaaggaacacagaagccaagtggaacagctcccagtggccaaagctggaaaaattggggc

SEQ ID NO: 226547 - DNA, 239 bp, Homo sapiens
gtgggagattcgcttgaacccaggaggtggaggctgcagtaagcggagatcgtaccattgcactccagcttgggtgacagagcaagactctgtctcaaaaaaaaaaaaaatagctaggcgtggtggcacattcctgtagtatgagctacttgggaggctgaggtgggaggatcatttgaacctgggaagtcgaggctcaaagctacagtgagccaagattgcacccctgcactctagcc

SEQ ID NO: 226548 - DNA, 515 bp, Homo sapiens
taatctaacaaactttattctccgtaatatagaagtataagtattttgatgattccatctttaatcacatacatcaatctttccaataccaaagaaagttttctaagtcaaaaatgagcaagaagagggtgaaataataatggaaagtatgcaaggcatgctgagcattttgaagaaaatatgttcacattttatttttggaattatttctggactctttcagctttttcaagtttctcccagataatttcagtatccttcataaatttttgatttctcttgggccataattagtctttaaaaaatgtttcagggtaattattggggtctgtgttgtttcaatgtctcattctttgacctagtaagactggtatatatctgagcatgtcactttttcatacacaacttcttcaggctgtctgaccctaagaaccagagcaatttttcttagtagacattgggaatagtctggttttgagaataggtgtttgacgcagagttttcctttaaaaatg

SEQ ID NO: 226549 - DNA, 419 bp, Homo sapiens
ccattcaaagttattttaaaaatcttggaaaccctccccagtcggctgtgggtgtgcctgaaaacagagacctggagagcatggtgcaagtgcgggtggacaatcggaagcttctgcagtttttggagggacagcaaatacatcctacgacggccctgtgcaatatttgggacaatactcttcttcagcttgttttggttcaagaagatgtctctcttcagtatttcattcctgccttgtaaaaattcagccagcttagattttttttttaaggttttgatcttttcaaaactaaaacagaccctgagttaattgggttgaaaatttggaccttcactgacttatgcagggcgtatattttgttgagcccttcctcctttgcaaaatttatattaaagcattggtaaaacagttgggta

SEQ ID NO: 226550 - DNA, 912 bp, Homo sapiens
  misc_feature (440)..(440): n is a, c, g, or t
ggcacgaggaaggaactacgtctgataactacattctttgtaacttcatggaagcagtgcctaacacttaggaatctttttgagccccaaatttgctatttttttcacacacttggatatgtgttcttcgcattaataatggaaatgatagtgccattcctgccgaccttacagttgacagttgacactaaatgtgagactaaatgtgacaatgtgtatgaaaatgtttctcaaacttacatttgtatctaaaagcaagatattagtagtagtagtgtcatccaatgtggtgtaaaccacatttgggagcccatccatgggcattgcagagagtggtggggtggaacaaaagccacagatgaaaattttgccatcctaagaactggataagtatctgggaaagcaggatacctggggtagagtatgctttctttgctttncagttaagtcttcatttcagtgaccacttgtttatggtagtttagaggtgcctgccagtaaagccaggatattaattaaaatgcaaaaattaaatttttttaatggggcctggaggaaaattaaaggatttataggagaaagatgggatccagagggtttttttttgtcactagtttgaaaattggtggtggtggtgtagacaagttgaaggatgaagccaaaatttcaggcaaaatatcagattcaaactcaaggcaatgactattctatatttgccattttggtgcagctaaagatctctggggagtaaagtgatgacaaatcttcaaaacaggtgattgaggctgggcgcagtggctcacacctgtaatctcagcactttgggaggccaagattggcggatcacttgaggtcaggagctcaagaccaggctggccaacatggtaaaaccccatctccactaaaagtaca

SEQ ID NO: 226551 - DNA, 399 bp, Homo sapiens
catagtgttgtacaactgtcaacactaattccataatattttcagctcctcaaaaggaaacctgttacccattattctgaatattagatataaatagaatcaaactgtgtgactgacttctttcactttcaaagtttcatgttgtagcatgtatcagtacttcattttaaaaaattgctaaataatgctacattgtattgatacaccacatttttttcactttgattatttatttatttatttttttattattatactttaagttttagggtacatgtgcacattgtgcaggttagttacatacgtatacatgtgccatgctggtgtgctgcacccactaactcgtcatctagcagtaggtgtatctcccagtgctatccctcccccctccccccaccc

SEQ ID NO: 226552 - DNA, 435 bp, Homo sapiens
gaggagaactgaggggtatagaaggtttgggataatgtgaggaggccagttccagacggtccctggcacacacccttcatgcaatctctgaaataaaagtgtgtgctgtttgtctgcaaaagcattaaattaatttctaggggaactgaggagacctctgaggcacctctgaagcttctttattttaggtctaaatttcttgctatttttttgttttcttagtgtgtatatttttacatacttgaaatgactgtgaaactaactttttgaattaaagtttgaacacagttactatttcattataatgctaataattccatagttacatattattcttttatatttaatagttgtgacacaaattacctcactttcccctttgatgacctttattatgacattgaccaaaagttgaaaatgtatgtttctggttaa

SEQ ID NO: 226553 - DNA, 598 bp, Homo sapiens
  misc_feature (78)..(78): n is a, c, g, or t
  misc_feature (82)..(82): n is a, c, g, or t
  misc_feature (99)..(100): n is a, c, g, or t
  misc_feature (109)..(109): n is a, c, g, or t
  misc_feature (123)..(123): n is a, c, g, or t
  misc_feature (132)..(132): n is a, c, g, or t
  misc_feature (182)..(182): n is a, c, g, or t
ttcgaattggctcggttcccaagcgcacgcggttcaaaatgcgccgccgcgcaccgcgccgttatgcttctccgggtncccnggttcgtccccaacttnnccgtagtcngctccttcttggancgctacggnccgctgctagacctgcctgagttgcccttccctgacctggaacgggttcntcaagggccccaccggacgtcggcaacggagaagtcggtcaggaaaccgtgcagcagctctggctttgaaggttaccggaaaaacacgcgtggagctggaggtggcagttcaccgaaattgaatcactctaacgagccgcaacataaaatccctggaaaaggtgtgtgctgacttcatcagaggagcagaggcaaagaatctccaagtgaaaggaccagttcgaatacctaccaagactttgagaatcactacagaaaaagtccttgtggtgaaggttctaagacgtgggatcctttccagatgagaatccacaagcgactcattgacttgcacagtccttctgagattgttaagcagattgcttccatcagtttgacgcgcggtgcggcgtggggatactctagatcgacccgag

SEQ ID NO: 226554 - DNA, 766 bp, Homo sapiens
  misc_feature (78)..(78): n is a, c, g, or t
  misc_feature (82)..(82): n is a, c, g, or t
  misc_feature (99)..(100): n is a, c, g, or t
  misc_feature (109)..(109): n is a, c, g, or t
  misc_feature (123)..(123): n is a, c, g, or t
  misc_feature (132)..(132): n is a, c, g, or t
  misc_feature (182)..(182): n is a, c, g, or t
ttcgaattggctcggttcccaagcgcacgcggttcaaaatgcgccgccgcgcaccgcgccgttatgcttctccgggtncccnggttcgtccccaacttnnccgtagtcngctccttcttggancgctacggnccgctgctagacctgcctgagttgcccttccctgacctggaacgggttcntcaagggccccaccggacgtcggcaacggagaagtcggtcaggaaaccgtgcagcagctctggctttgaaggttaccggaaaaacacgcgtggagctggaggtggcagttcaccgaaattgaatcactctaacgagccgcaacataaaatccctggaaaaggtgtgtgctgacttcatcagaggagcagaggcaaagaatctccaagtgaaaggaccagttcgaatacctaccaagactttgagaatcactacagaaaaagtccttgtggtgaaggttctaagacgtgggatcctttccagatgagaatccacaagcgactcattgacttgcacagtccttctgagattgttaagcagattgcttccatcagtttgagccgggagttgaggtgaaagtcaccattgcagatgcttaagtcaactattttaataaattgattaccagttgttaaaaaaaaattataaatggcagacttgatcccattcatcattagactactttcatgttttgctcagaattaagtaagttttaatattcatttaaaaatacttatcaaataaatttggtttctctcaaagtaag

SEQ ID NO: 226555 - DNA, 493 bp, Homo sapiens
gtatgtgagtgtgggcagagcaacaggtaactagtgcacaaggccggcagctccagtcctctcagccaggtcgccgaaccctgtgcctggagcactttgccaggctgacgttttacactaagaaaagcttactgggcaggtgctgtggccctcacctgtaatctcagcacttcgggtggccaaggcgggcagatcgcttgagctgaggagtttgagatcagcctgggcaacatcgtgaaaccccatctctacaaaaaatacaaaaattagccaggtgtgtggtgggtgcctatagtcccagctacccaagaggctgaggtgggaggatggcttgagcccgggaggtggaggttgcagtaagctgagattgcgccattgcactaagcctggatgacagagccagaccctgtctcaaagaaaaaaaaagaaaagagaaaagcttaatggcttgtgtttattcacttttgtgtgtgtttcttcttttttttttttt

SEQ ID NO: 226556 - DNA, 508 bp, Homo sapiens
ttaagcaaaggttcttaacctttttcttaatctttggtagtctggtgaagcctacgtatttaaacgcataaaataaggtatgctgtgttacataggaagaaattgattatactgaaatatttaaaaattgtaatatagtaatatatgtgttccttgatgcatgaaatattaagatctagcagtgatctaaggactcccagaatttcaaagtagtgatgaatagaaacaatgtcttgagatagctacaacatatcatgtggtatgaaaatatctgtgatttctgttggtgacaaagtcacaagttctgctgattctactgtggtttcttgcctatatccatattttaagaaaatgctaaatttgagttaaaggttaataaaaataaagatttaattttttctccaagttcatgggcctacaggccaagattgctcagttcaggaattcaatatttgtcagtttccctattgtaaaataaaattaaaatatattattcatcccaactgca

SEQ ID NO: 226557 - DNA, 90 bp, Homo sapiens
gtcttccttttctccttccctctttttcttccttttcctctttgtctctttctcaccctgtttttttctctccctctctccctcacccct

SEQ ID NO: 226558 - DNA, 626 bp, Homo sapiens
gcggtggctcacgcctgtaatcccagcactttaggaggccgaggcgggcgaggagattgagaccatccaggctaacatggtgaaaccccgtctctactaaaaatacaaaaaattagccgggcatggtggcgggtgcctgtagtcccagatattcgggaggctgaggcaggagaatggcttgaacccgggaggcagagcttgcagtgagccgagatcacgccactgcactcagcctgggtgacagagcgagactccatctcaaaaaaaaaaaaagacagaaaagttactttttagagagtggcttacaagaggagtattatagaaatatatttagttaatgacatcttctttacaagctgataattctactggaaagaatcatgtttcagagttctgacatcttccaccagttcactgttacctagatttttactggatttttgccagtggcatgaatataccttatcctcctttcacaatctctttttctccaaacatttcctaccaccttacaccttaaagattttgttaatgtctttcttagtagaatgcaatttccatgaaagtagagatttttgttttgttcactgctatatccccagcccctagaacagtgactggcaggc

SEQ ID NO: 226559 - DNA, 570 bp, Homo sapiens
agatgttatctgcttcataggttatgagaattaaatgagatgatgtacttcaatttacttaatgtatttaaaatacctagcttaccatttgactcatggtaggatgggaccaatctatatattttaatataatatgtatatacacacacatgcatgtacgtgtgtatgtatatatgtatgtatgtatataaatgtgtgtgtgtatatatatatataaatgttttttgacttcttttagtatagaaaatgctaactttattcccaagtaagtgcaagacattttaagatgcctgtggaagttcagacatcataattccctgcctgggactgtgtgaaggtagatagaagactttagttcacagaaacaaatggttacctgtggtaatgtagatgttaacaggatctgttattaatgaatctgttgactggttttccttgctgtggcttgttctaacctttgaaatatgtgttatgagaaaaggggtgctatttttttaatgatgctaacttcattaaagctacctgtaatgttcttattttgtgattataataaacattttttgggataaa

SEQ ID NO: 226560 - DNA, 481 bp, Homo sapiens
aagcagagcaagggtctgtctatggtcaagtcatcatttctcaaagggtgtctcatgggtcaagtccgtctggagaaagctaagtgaaggtggaaaatgttccattactacagggctgcttggaggcatgccagcatgcaccatgaatgcctcaggcagcatttgccaaaagtgttggactaacaaactctgttttcatggggtatctttgtagagcttgaaaatacacaaaatgttgggccccaccccatagattctgatccagtaggtctggggtggggctgagaatttgcattaaacaagcttccagatgacactaaagctgccaacagcaggcccaccccagagaggcactgtttacggctttcctcagaaggcctgcttctaggccatgcctcagaaggaaactaacatgataaaacaggcaatgataagcacaaacttttgtaaaaacaatgttaattaaaatagcgtttctaga

SEQ ID NO: 226561 - DNA, 391 bp, Homo sapiens
aggttcaagcgattctcctgcctcggcctcctgagtagctgggattacaggcacacaccaccacacccagctagtttttgtatttttagcagagatggagtttcaccatattggtcaggctggtcttgaactcctgatctcctgattcgcccgcctcggcctcccaaaatgctgggattacaggcgtgagccaccacgcccggccaggattggctgcttcttggccaacctaggacttggggaaaaaggatagataagagaggttgaggggttttgtgggagcaaactttcgatccagtctactcacaggacctcccaaaaactccatgccattttcatctctgaaattgctttgaacatgcctctggtctgtgaatcccacctgtcttta

SEQ ID NO: 226562 - DNA, 575 bp, Homo sapiens
cttgagctcagggttctgggagagtgtggggctgatggtggtgaggtcattttgcacggtccccagggtttgcctgcatacctccgcctgctcccctcagagctcagccacccgccccagctccagcagcctctcctgctcccagttcaggcatttcaagtcctcattgtcttgcatgtgggcccactggagctgtcctgctagactttccagctcctcccacaggtgctcagcctctgcctgtagctgctgctgcagctgcagaccccagaacttggtgtctgcctcccacggcactgggaaggatggaggcagattagaaaaatcatcccctctcatccacagccatcaaagcagggctctggctcacaggtcccctcagaagtgccgcttcacatgagggctgcgccccctgctgggggctccaggggtgggattcagctgagaaaggaagcagacaataacggcctctggattctcaaaaacaccctcctcttggtacacagctcctctcgggctccccagacttggcctccctgctaatgattctcaaaaaaaccctctgcattctcaaa

SEQ ID NO: 226563 - DNA, 580 bp, Homo sapiens
gctcatgcctataatcccagcactttgggaggccaaggcgggcggatcacgaggtcaggagatcgagaccatcctggccaacacggtgaaaccctgtctccactaaaaatacacaaattagctgggtgtggtggcacacacctgtaatcgcagctactcgggaggctgaggcaggagaatcgctggaacccaggagttggaggttgcagtgagccaagattgccactgcactccagcctggcaacagtgcgaggctctgtctcaataataataataataataataataataataataatttttaaaaatgtctaactagtttcttctgttgtatattttgcctttaaaattaacttgctatctattgagatggatgttcagttttagtaaatgctctgtgaggattttttaaatgttcatttcttatttaggggaagttcaaagttacatgttatatcatgttattaatagtgctattccaaatggtctagtacatcaacttatttttctactttatctgttttcttagaatgctatcttcacatacaacattaaaaatgaatttttcaaaattgtcttg

SEQ ID NO: 226564 - DNA, 428 bp, Homo sapiens
tgcagaatgttcaaatactaaacaacaatgaaaaattacagatatgtgaattacataaatgaatctcataaacatatgttgaacaaaagaagccgacacaaaatatttatatatacttatagttcaaaaacaaggcaaaatccatctgtggtgttagaatagtggttacatttggggagataaaagaatagtaattgggagaggtgtggagggacacatggtgttttatttcttaatttgggtttgtaatgatatagtggtatgttgactttttacaaactttgcatttgtagagttgtgtactaattatttgtgtatttttctatgtgtgttttatatataaacagaaaagtttaaaaaatcttaaattgtaatacagaaatgatttcttcccataacacattaaaaatagttcatgaagaaaaaaa

SEQ ID NO: 226565 - DNA, 1290 bp, Homo sapiens
tctcgaaacttggaaggctgctgcttctggccttacccctatgcccaatcagttgtcagtatagtcagttctcccgtgaatagctgtacactctatatactgcctgtcactgtgcactgccaccaactaagaccaagccactgctgccatctctttcctaggttacttaaagggcagttgcaccccctacactttctccagtctaacatcctatgctgctattggcctcataaaatgtccatctgattgcatcatcctttgcttaaaatgcctcattagagttttgataaaatctaaactttttaacagggcttataagatccttaataacctgttcccaagctggctgcatttcttggagtttctcggaaatatctgcctccctcaagcacattcccaccccaccctgcatacatacacatctctggccacttgtttgtcatttaccctagagtctaacatagggcacagtaaggcctcaataaatatttgttaaataaaggtaggaaggcagtggtcctggattttaattgtatgtcctcacattttaatttaatttaccttaaaaatgtaaatgattccagagtcaaaagttgctgtttgttttatagtgctctgtatgtttccctccactctgtagtttccagagggttattaaaaatggactaaaagaagcatgtgggcttctgttagcaaatcagttgtaatctgtgttctttggctgagtgctgagcttaggaggctgccagatggggacacaggaaccaaatcatctttgcttcccagtggggaacaggggcataaattggctgaatgggcttctgcagtaaaactccttcaatttgagcttgtgtaagccaggatcaaaatacctgagacttgttgagacttgtctagaatgtttgttaaactttcaaacctgtttgggaagaaggcttggaacaacagtgggtttgggtcttgtgaagtaaatcttatttaaaggaaatagacaaaagcttaatcatgtttaatttgtaacattataggtaagactgttggttgctgttgtaatgactctaaaaaagaatagagaatatttttttccttagaagttccaggttcaatgatgaaaccccatctctaccaaaaattcaaaaattagccaggtgtgttggccagtgtctataatcccagctactcgagaggctgaggcaggaaaatcacctgaacccaggaggtggaggctgcagtgagccgagatcgcgccactgcactccagcctgagccacaaagcaagacgccatctca

SEQ ID NO: 226566 - DNA, 455 bp, Homo sapiens
agtgagtgtggactcagggtatgacgatgaaactactttttaacatgtcagaagatttaagggagtatgtcattgatcattctagtaaaaataaaagcatcacagggatttaaaagagtgtgacttataaattatgttttaaaagtagggctttgaaaaatcttaagggcattgtcccaaagcagtctcacaggggacccacaatagttaaaggagttttgaagatttttatgcatgtttctttgtctaatagagtgaattcgtgaattccaataagattcctggaaaatccactaagttttaaagagaactgtattgaaagagtatactgacagcttggactaaaagggttagatacagtataaaagagggctttgaactcctgaaattctacggggagggctaaaaacactgtgtgacaattactcagctataaacagaggctatttcttgtg

SEQ ID NO: 226567 - DNA, 399 bp, Homo sapiens
ctggattactccatggagccggggcctgtgcagaccctcaagagaggtcttttgcacccaacctgttgggcagctgccctggtgccctcaaggtgcccccctttctgtgcccacctcatctttggggcctcacagtgaggatgtggccagtgacaggggctggggaagatacaccagggtagagaggtggacactccgggcttctggttatgatgatgatgatagccagactggtgattcccaaactggagggtccttgggatcttctggcaaggcaaaaagtccagcatgccatatccaccgactcctgagtcagatacccggaaagaacctgaggttatctatgtcaggctctctgatgacgattttgtgttgaataaagtttaaagcacagatcca

SEQ ID NO: 226568 - DNA, 269 bp, Homo sapiens
catgacccaggacacgacagattacagatttttttttaaagcaccaatttaaacaagcttagtccctagatttgctgtgtaaaggcatgtcccttagaaacacttagcaaatgacacaaagctatataaaggcatcacaatgctgtgaaaagtttggtagtatggtaaaatgtagttaactggctaaggcaagcaacatcatgagactgctcaagattacagcaccactaatgtttcctgctttgttgtacggtgtctagcttcacatg

SEQ ID NO: 226569 - DNA, 388 bp, Homo sapiens
tcatagtagtaagtcagaagtcagcttccttcccctttgtgttaggataccaccatgcgtaatcatcctgaaacaaaggtgcgggggaggatttggaaaacttgttcctaaataagctgttttctaagttgagctccccttctctagaaagtttccttaggaacattatgcatattggagacaaagataaaaccctttttattaaagtaaaaaaaatgttgatagttgttggtgatgtccaaataatattttcaagtcatattataatgatggggtttcccccagtactttggattgaaataaacgggttagaatggagaacagatgacaggagtcttctctgaaatttctgagaggccacacaatcttaggttgaataaagaaggaa

SEQ ID NO: 226570 - DNA, 496 bp, Homo sapiens
atctccttgagatcctgatagcctgttacaggaatgaagtaaaggtcagttttttttgtattgattttcacagctttgaggaacatgcataagaaatgtagctgaagtagaggggacgtgagagaagggccaggccggcaggccaaccctcctccaatggaaattcccgtgttgcttcaaactgagacagatgggacttaacaggcaatggggtccacttccccctcttcagcatcccccgtaccccactttctgctgaaagaactgccagcaggtaggaccccagaggcccccaaatgaaagcttgaatttcccctactggctctgcgttttgctgagatctgtaggaaaggatgcttcacaaactgaggtagataatgctatgctgtcgttggtatacatcatgaatttttatgtaaattgctctgcaaagcaaattgatatgtttgataaatttatgtttttaggtaaataaaaacttttaaaaatttgttat

SEQ ID NO: 226571 - DNA, 543 bp, Homo sapiens
atcatctcagtgcccctgttgaaggccaaattatgctgaactattagtgtgtgtacagaacactgtgggctttctcataagaaaagatgggcacggggccaggtgcagcatcttaggcctgtatcccagcacttgggaggctgaggtgggtggatcacttgaggtcaagagcctggccaaaatggagaaacctcatctccactaaaaatacaaaaactagccaggcatggtggcacgcacctgtagtcccagctactggggaggttgaggtactagaatgcttgaacccaggtggtggaggctgcagtgagcagaggttgcatcagtgcactcccgcttgggtgacagagtgagactgtctcagaaaaaaaaaaaaaagaatggtgggattacaggcagaagccatcatgcccagcccccttatttcttactcagtctaatctcagtctttccatctgtaaaatagtatcagactctgcaatgtcctctgaaaacatgaggcaaagatgggagtaagtgaataaaatatgccatatgcttgct

SEQ ID NO: 226572 - DNA, 463 bp, Homo sapiens
ctatgctaaaataatacagagtattaaataaagttggccttgtagtggtcagaggaggagaccacaaatatgttctggatttttagagccccagaaagacccttaaaatctgccttaaaatgtgttttccatttactagtgaaggctgaacattcttttaaagatgtctttgtccttgtacaatacaatatacccagaagggaaaacactttatagcccttatggactaacttggtctgctttgaaatttggctcaggtaggccttaccatggagttacctggtagctattaaagaagtttaagtacagaagttttcataattacttccttaatttcttcctcatagtttgattttaaattagaagagaattactggaatacatgtatcctcctcaatcactacccctagcaagcttcattagtctttgaaatgtttctccctgtaaagaacagtggcaaaaa

SEQ ID NO: 226573 - DNA, 407 bp, Homo sapiens
attttggcttgctctcagcggtgtggcattcattgcacagggcttcacacagataatccatggtttttttttcttaaactctatttcagcagaactcatgatttagcttcaatgctaagctgttatctttctcactttctttagcctaatgggtccatttttccagaacactttaagaagagtttaaatttagaagagaatggaaaatgagaataattgagggagaattttctttttaaaatgaaatttataatcaagtgaatcagtgaagtaaagaagggtggcacttcagaaaaattgactttggacagggcaaatttgattttaattcagcaagttcatatcatctaaattgatgcaagtgaagttgctagcccagagcacaccattgtgtctgcttttccttt

SEQ ID NO: 226574 - DNA, 996 bp, Homo sapiens
aaagcagagaaacttttcaggaataatgagggctgctaaataattatgattgtcaattttccaggggaatattgtcccaagtgtatatgagaacatagagcttcaaagctcataaacaaaattggatacgcaaggtaaaaacagaaaaatccaattagagttgccgacactaacactcctctctcggtaattggtagacttagtagaaaacaaatcagcaaacatattggagaattaaaccataccatccagtaatggacctattaacttcataatgcaaaataaaaatttaggtagaaggcaaagacaaaagttaaaagaaaagatcatgttataaccaggaaattaagagtagtccagcatatagaagagtgctattattggaagagttatttagttattttgagacattttttgaaagagttatttagctggaaatgacagaaagactgaaaatggtgaatctggaggtggatcttcccttgtccatatttattttgtctttttttgaggtctagggtgtctatacttcctctgaattacctacagtgtctggcacagagcatctccccagtgaatatgtattaaatgagtagaaagtaatttatagattcaaaagaattgggcaagaataatgttcattatttgacaaatccttaaatgtagtgtttgaaggaagacaataagtcaaagttgacttgaaaggtaagcccaagtccagactcttttctgtaatcccagcactttgagaggccgagatgggcagatcccgtgacaccaggagtttgagaccagcctggacaacacagtgaaaccctgtctctacaaaaagtacaaaaattagccaggtgtggtggtatgcatctgtagttccagctactcaggaggctgaggtgggaggatcgcttgaatccgggaggcggaggttgcagtgaacagagattgcaccggtgcctggacaacaaagtgagaccctgtcataaaataaaataaaat

SEQ ID NO: 226575 - DNA, 324 bp, Homo sapiens
ctagttcactgcagtagaggagaaaaacagaaataatcagaagagaaattccacagattccaccactaaatctaactgccaaccgattaatcgctcctcgaattctggcttcctcctgtgtgtcagcaggtgaatactgtgctcctttccaaggtgaacccctccatggtgcactgggtgcctttccatttcactactctaaagctttgctccttttccccacaacatggattttaccttttgttttttttttctcattagcaaacaaatattctaaaatagctcccaccttagaaacaaaaacaaaaagaaaaccccgccttt

SEQ ID NO: 226576 - DNA, 404 bp, Homo sapiens
atgtgcagccatgttgagacccactggtttggtatccaaataggagcttcctgagaacaccttaagtggatgagaatctggtctttagctgtctcctaactcaactcgtgctgagcaagtaagtatctgaatgtcaaatcctggttatcttttatcttcctaagttctgaagtcacaaaaggctaaagggctatcacccctgctcactgtttgcgtgtacttcaccatcttaggagaacacggtaggttgggcttctaaatgcaataataaattacgctgactgtggtaacttagccaaagtaagatactgattaagccgtatttttctgaagtgcttccattccaggttttgctttctgaggcattacattgtttttgagtatagattacattttattaacta

SEQ ID NO: 226577 - DNA, 784 bp, Homo sapiens
cactttgaattccttgtctccagggaccagcaggagaaaagagtcaccatcgtgacagggggaatccatcctcatcagcccgaggaagtggatggcgctagggaggaagatgtgtggaacccagatctccttgggcgtttcctggtactcccttgactcactggaattagggttggatgtgtatagtgctcctggcctgagaagggtatgactgcaaagggctcagatccacaaggaatgaagatttgggtcacgtcaccacataacatttctcaaaaaaacatcaggacttgctgaggtgatagctaagggtgagggaaatgggccatgcaaaagggacaggatgtgaaccaggttgggcctgagaactggccatagtttgtcctattaacctatcacttctaagcttcccttcaggaagagcagtccatggatttgtggagaggctgctccctgagcatgcatgcagaggtggatctgtgcagtccagtgtgtgaaatgtggccaccatgaaagtgcactgctcagatctcctgctgtgggagcatgactgactgacagccccagctgttgcctctgtgcacacaccaccatgtttgcacagagctgggctttccataccaatgacagagcatggcaggtatatgaaagctggtcagttcttttggggtgcagtggtgcatgcctatagtcctagctacagaggaggctaaggctgatcacctgaggccaggagttcaaggctgtagtatactatgatcactcctgtgaatagccactccac

SEQ ID NO: 226578 - DNA, 717 bp, Homo sapiens
gggatttgaggagatgtgatgaatcagaatttattatgtgtttggaaggaagacattctgaatgctgcttaaaagctaagtattaaattaataacatatgtcagccattgtggctgctggatagcctcagttatgaccaaattttacttagctgtgggcaaactgtctaaacagttttttcagctttaatcctcccacttgcctaggagtttacagggcagttgatttagattgatctttcacattatccccttggactcttagaggattcatgatgacagttgtttaccagaggattttcagtgacatatgagaaataagatctgtcttctgtgtggagatggtttctctgtgatgttccctgaacctcatgttggcccttgccagagatctctatttttacagctacttgcgtcattgtcatttccagctgatagatgattgaatgcaacttcacatccttcctgtcttaggacttgtggggctttggctcaggcagctggatagacagcagagaaggtcactgagaataggaggttggactattagttctttccttgtccccacatggcattctaaactgtgataaaattatttgatacaaccattgaacccattcctcctgttgccttttctcagtcttcagatccccatagtgtttctgtagcatttgaaatctactcttcacccagattttcaaaactgtgtacttctttg

SEQ ID NO: 226579 - DNA, 444 bp, Homo sapiens
tgtgtgagtgtgtctttaattcctctagtgccaatgggttagggtctccacaaccgagctggtcttggcagaaaccaccccttgttttctctatccattgcaaccgagtatctgttaaatgtctctcacaggcctctcattacactttatattttgcaactctggaaaatgtttttctttaatatttcccaaaactcaagaagcaaatttattataggctgtgtagcttataatcataccttttaatgtatatccttgaatctcgtgatcatttttagtcatctttttaaaaaatgtggcaacatacatgcaaaaaattttgcatatatatgtatacattgtattctttatatatttattgcccagtgtccctacacactagaaatgatggttcatgaaagaattaaatgtgtatctatatatttttcattacaattcccagtt

SEQ ID NO: 226580 - DNA, 427 bp, Homo sapiens
gataaaaagccagattcagtaagaagtgacttgcccaaataacctatttatgctaaaccagaactggaactcaggtccctgcagggtggccaaaagagtctttgctctacagccttcactgatacctggtttctacttcacatgtagaagacaatccagtgttttaatctacataaatatccatccttgtggataaatgtgaattaacaatatagcattatcccagatcataatactttaccttgtccaaaatatcacttctcatattttaaaacgtaaaaaacttaaaaacttatagaaagttggccagacgtggtggctcataactgtaattccagcattttggggggctatggtgggaagatcgcttgagaccagcctgggcaatatggcaaaaccccatctctacaaaaataaataaatacat

SEQ ID NO: 226581 - DNA, 254 bp, Homo sapiens
atcacagaactgacttgtccttgagggttttttctcttcaggataaatatagctcaatcccttcatctgatgatcgtagtcattaccacatgaataaattataatgcacagagcactgacacattcattagtttgttctcattcattagcttgtttgatttgatctttcaacagttcatcaaggtaagtattattggacaaggaagggatttcaaatcaggacagttgaggatgaattccagatgtgttcttta

SEQ ID NO: 226582 - DNA, 433 bp, Homo sapiens
atacacaatcatattcccacaattcaaagaatagcatgatgttaaaaatggtaaagggaataacctacagtctagaagaaaaggcattttacttgacactggactttaagatacgttcaattcacatttcatcttgaatgtcaaagagcatgtatttgattaccaaatgataagaaatcattgtacgtgggtgaaaaagagtgaaataattatacacatccataaacctttcaacaacagccttcactcactccccacttcaacctttatgaagttgcttttagtttttagtaacagtcaccttaacagacccaattttgaaacccattaatacaaaattgattaaacacttaaaaaaaagacagggaaaatactcacatcacaggtaaataaataaaggaactttacatttcacattatatatatctctgtt

SEQ ID NO: 226583 - DNA, 364 bp, Homo sapiens
actatagtgtcttctattagcagcactagaaagcaagcaatctgagaagccacatgagagatgagaggaagggaatttcacttggagtcagaactctctgctgagatacctatagatctttcccgagtttgctgactttatcaccctatttagtactagtggcatgctttaaattaatgatttgcagctaatatacagaatgatagaatctggattcaaagattgagggagtgaatctaatgagacaaaatttaacccagaaaaaattagaagcttctatacttgagttaaaactaaaaagatttacagaagtggattaacagcttgaagtatgaaataagggaggggtctagttgactgcaac

SEQ ID NO: 226584 - DNA, 451 bp, Homo sapiens
actggttcttgggaatttcaagaagaaacttgttttcttatcctcacctataaagacccttcccagctgtaagaatttacagctacaatccaagaaatgagattgcattttacaagaaaagaaaactgatgattcttgcccaaaacatgagaagtagaaggaatgtgagagaaaataatgtagattccgtccaggaagtgctaggtgctttcctggtgggtacatttacaaattagggacattttaattaatctactggatttgtgattctgtctgctactatcttctttttcttgaccttatgaaagatttatagatggcttcaactgaaactacaggaaatgactcatggttatccctgaagatattagagccagatttccattccttagggctgatgcatagcagctctttgataaatatttgctaaataaatgacaaattttagaat

SEQ ID NO: 226585 - DNA, 335 bp, Homo sapiens
aaggtggggtctcgctctctcacccagacgagtgcagtggcgtgacctcggttcactgcaacctctgcctcccagcttcaagggattctcctgcctcagcctcccaagtacctgagattacaggtgcatgccaccacacttggctaatttttgtatttttagaaaagacagggtttcaccatgttggtcagactggtctcgaactcctgacctcaaatgatccacccgccttggcctcccaaagtgctgggattacaggtgtgaaccactgcacctggccccttttttctctttcaaaagcatacgtactttctgtaaccagacagtggtaataa

SEQ ID NO: 226586 - DNA, 448 bp, Homo sapiens
agatggagttttgcttgttgcctaggctggagtgcaatggtatgcaatcttgaatcactgcaacctcctcctcctgggttcaagtgattctcctggctcagcctccctagtagctgggattacaggagactgaggcagaactgcttgaacccaggcggcggaggatgcggtgagctgaaattgcgccactgcactccagcctgggtgacagactgagactctgtctcaaaaaagaaaaaaaaaaaggagatattagatacagcaataagtaaaacgaaacaaagacccatgaagaccagaactttaaattgtcaaaatatcacaccttcagtacaataaagtgctaattatttacttgaaagtatggtttggtggccaggtgcggtggctcacacctgtaatcccagcccaaattatattttttaataactaatacaaaggtgaagtg

SEQ ID NO: 226587 - DNA, 643 bp, Homo sapiens
ggagtggcggcagggattttctcccattgtgccaggtaaagggttgttcccattcagcttcttggcacactcaatactcttgctagtgtggggcctgaaataaagccctgaccgaagggagctcctcagcagcctcccctacctcttggtggctttaaaatctagaacctgcatctcttatagaagaccctttattagaggcaaggcttaatcccacagttcttggtgccaagctgaaagaagggaacattttgacctttgaggtggtgcttaaatggtcatatttaatggtcatatgtgtccttcaaatgggctctgggattcccttcagttatttacatctctcagcagtcctttactcctccgttcccaggaatctctggatctaggaaatactggcttatccactccctatggctcaacaatagtctaaaataattagcctctccctaccattctggagcgttggccagtaaagaaactatgtgcttagccctagcaatcagaagagtttaaaagcttccttccaaacacagcagagcaaagggcatccagatcactacaatccgtatctcccagcctcataggaattgacccctttacctgacctattcctgcttttccacagccagttctaccatca

SEQ ID NO: 226588 - DNA, 462 bp, Homo sapiens
agatgaacgtagtcttcactgtgctacctgctctgaatatatccatgcagtttcattcaatttttctggaggagaccgatcagcaattttcataagatgggggcgagtagtagcgtgaatgaaccctgtctaaagcatgtggaagacgaggaggaacgcaaagcccttaacatcgaagctataggacaaactggctgtatactttgcttgaagaattatgaatcatgataaaagtaacctgtaatgcccctagaaatagggctcttgtttaatctctgcttaaacattgactaaagacacaatggccacatctagcaatgtgattctggagacagtgctgcggtctgcaacgggacatgaatggccaagccaagcttgcaaacatgggatgctgtgcgtggggacagacctatggagtcttgcactccagcctgggcaacaagagcaagactccgtctccgt

SEQ ID NO: 226589 - DNA, 255 bp, Homo sapiens
caaattaagggctgaatttattgataaggtgtacacacctgggaactgggaattaatgtgttggttcaagtgcctgggggaggcaataatatttgtttctaaaattcttttcctctttttcactgtgaactttaaaatctcattttactttagtgattttttaaatggtatattacaaatactgttatgatattgggcctctttatttgtgtagtatactttatcattaaagaattagtcatggttgttccattt

SEQ ID NO: 226590 - DNA, 327 bp, Homo sapiens
agaaatccagggaggacaagggattgacctgggtagtattgagctggaaggtaaaagcaatgaacaaaaagaggttcagattccttattttggagcgacagtgtcaacaagaaacatctgccaaaccacaaggaccatgtagaagctggtgtcccaggaggtaagattttctacctttcctccattgcacaacaagctataaccatgcctggtggagaaaatggatgaataaggaaggttagctgtgagtgaatttcaattctgctaatgttttttgaaccattaccagataaccaggccctgtgtgggacctaggtgggagccaaa

SEQ ID NO: 226591 - DNA, 520 bp, Homo sapiens
aggacaatgaccttatcagggtacaggtgaaatgagctcagtgagagagataaagagttgtgtaaggttcatgagttgctaggtgcatacacgtggtcctttctctcacagcatgtaaaaaatcagctcaacatggattgaagactcaacatagacttgaaaagacctgaaaccatacaactacgagaagcacatacaaagataaagctttggacattgacgtgagtaatgatttcttggctatgacaccaaaggcacaggcaataaacaaatgggaaaatagacaagcggggctgcattgaacgctaaagcatcttcatagcaaaggaaacaatcaactgagggaaacggcaacccagaaaatgagagaaaatgtttgcaaagcctacgtggtagaaggggtaaatatctgaatacataaggaagtcaaacaactcaatagcaaaaaacaaacaacctgattgaaaaacagacctaggacctgcagaggcttctctcacaataaaataatgttttaaga

SEQ ID NO: 226592 - DNA, 1133 bp, Homo sapiens
acacacacacgcatcactcccatacatgcccacctgtttaccagccaatcacatttcttggggcaactcgtctgagttgcttctctttccagagagtttttgcataaagaagcacaggtatttctgcgttaccatgaccctatttcccagtggttcctagccagttgactctcctgcactggataccatcctggacagcattccttagggaaatgagccccctgttttttcccaccatggcacagttggtcctttgcatggatgcaccattattgcccctgtctcttcttggtggaccttaaggttttctccatccttttgctgtaacacacactgctccaagtgtgtgagcatatcagtaggaaacgcttccaggagtagaactgctaggtcagagggcgtgtggatctgtaacctgacagacctagaccggcttcagtttggttttatccagtttccatattgattattcatataaaaggaaacagacaaacataacgctgtgcatgtattctctcttagaccagaacaggcatagggtgcacttttaatttgtccatttcgtagagtagaaattgtttttgctgaaatgaacaccttaggatgctgaagaatatgacccgtcccatggaaaacattcaaaaatgtgtgtagcgctttcttcccaagggtgtgtgtgcgcatattttaacactaattcactttctacttccgttgctatcctttctgtgagtctttctcagaatctcagaaaagaaactaaattgttcactctagttatcaatgctgtactctatacctggaatttgctaaaagggcagattttaagtattctcaccacagaaaagagaaaagaaaatggtaattatgtgacgtggtggacatgttaactagctttattacggtgagcatttcacagcggatatccagtcatcacgctgtacacattaaacatgtacaattgggttttgttgagacaaggtctccttctgtcacccagtctggagtgcagtggctcagtcatggctcattgcagcctcgacctcctgggctcaatccatccttccccctcagcctcctgaaaagctggggccacaggcatgtaccatcatgccaggctaatgcatatatat

SEQ ID NO: 226593 - DNA, 1174 bp, Homo sapiens
tgctcctcccctcttttgctgagcacatgcagtccaattggcctacattaactgcaggtgtgacgcagctccttagtaccttcatcagggactgcacactctactgccatcatttataagtcattcctccaaccccgaccccatgagctttgtttcccacatatggctcgagaaacatcagtaagtgttggctggaattattttcctctataccctaagactcctgagtcccccttgtctccagcatgctgcatagatgctgaatctgtgagagcatcagcctagagggcctggacttttctgtcctgcttcacgcatggcctctgtgacctgatggacacctacccatgaccttggctccagcctcattagtcactaaccaagctccaaaagtctggctgcctcttggacagctctggatgtcccatggacccctgaacacagcacatctgccagctcttgtccctttcatccatgtgacaaacctgctccctcctccttttcctgcctcagtgattagtacaaccacccaccgtctaagccagagatctgggaagctaagttctactccagctccatctatcccattcagtcactgactcttacagtctatctccttagtatttgtccattctacacctttctttctattctcactacaaatctttcaacccttctcacctagcaagactgtaaaactcttttgcccccaatcacgtcccttaaatgcattttccacaattgcaggggcttttctaaaatgtacatctgattgtgtcacaccctgttcaacagtactgcttgaatacttgctcccacgatcacccatgaactgaagtccacattccttagtagggcactcaggcccctccctcggcagccctgcctgtacccctgcaacgccctttcctcttcacatgcaacacaccaggaactggactcctgcatctctcccgaatgactaatgccctctcatttctgggcctctgtatttgttactcctattgatcaatatcctctcttgtcctcagtacaaccaactctgaagccaagggaccacctttgcacatgagagacagtcatcaggaagcccaactgatcaatatgaaatcagtcatccacggccgggcgcagtggctcatgcctgtaatcccagcactttgggaggctgagg

SEQ ID NO: 226594 - DNA, 1012 bp, Homo sapiens
tgctcctcccctcttttgctgagcacatgcagtccaattggcctacattaactgcaggtgtgacgcagctccttagtaccttcatcagggactgcacactctactgccatcatttataagtcattcctccaaccccgaccccatgagctttgtttcccacatatggctcgagaaacatcagtaagtgttggctggaattattttcctctataccctaagactcctgagtcccccttgtctccagcatgctgcatagatgctgaatctgtgagagcatcagcctagagggcctggacttttctgtcctgcttcacgcatggcctctgtgacctgatggacacctacccatgaccttggctccagcctcattagtcactaaccaagctccaaaagtctggctgcctcttggacagctctggatgtcccatggacccctgaacacagcacatctgccagctcttgtccctttcatccatgtgacaaacctgctccctcctccttttcctgcctcagtgattagtacaaccacccaccgtctaagccagagatctgggaagctaagttctactccagctccatctatcccattcagtcactgactcttacagtctatctccttagtatttgtccattctacacctttctttctattctcactacaaatctttcaacccttctcacctagcaagactgtaaaactcttttgcccccaatcacgtcccttaaatgcattttccacaattgcaggggcttttctaaaatgtacatctgattgtgtcacaccctgttcaacagtactgcttgaatacttgctcccacgatcacccatgaactgaagtccacattccttagtagggcactcaggcccctccctcggcagccctgcctgtacccctgcaacgccctttcctcaaaaccgcacaactacatggaaactgaacaacctgctcctgaatgactactgggtaaataacgaaattaagtcagaaatatataatgttttcggtaccga

SEQ ID NO: 226595 - DNA, 586 bp, Homo sapiens
tgataggatctcagaataatggcagccaggtgatagctcttagcatcaaacgcaaggagggccataattaccatatgggtagaaggcttagaatagaatctggggagattgatcttcagaaatctatggttctggctcatagcacatgagtttgccaatggcaagtcatctgcttccaataagagtaaacttattgagacaaggggttgctccgttgcccaggctggagtacatggcatgatcacagctcaactgcaaccttgaactcctgggctcaaataatcctctcacctcagcctcccaagtagttgggactacaggaagctgaggtaggaggactgcttgaatgggaggttgaggcttcagtgagccatggctgtgccactgcactccagtttgagatgccatctcaaaaaacaaaacaaaaaaaccagacagtaaatataggtgttgtggccatatagtctctgtggcaactactcagctctgctgtagtgaaaccaaagcagtcgtagaccataaatgcaatgtgtcactcagactttataaagcaggtagcgggctggatttggtttttataccctgc

SEQ ID NO: 226596 - DNA, 947 bp, Homo sapiens
tgataggatctcagaataatggcagccaggtgatagctcttagcatcaaacgcaaggagggccataattaccatatgggtagaaggcttagaatagaatctggggagattgatcttcagaaatctatggttctggctcatagcacatgagtttgccaatggcaagtcatctgcttccaataagagtaaacttattgagacaaggggttgctccgttgcccaggctggagtacatggcatgatcacagctcaactgcaaccttgaactcctgggctcaaataatcctctcacctcagcctcccaagtagttgggactacaggcacatgccaccacacctggctaacttttttgtttctttgtagagatagggtctccctttgttgcccaggctggtctagaattcatgatatcaagtgatcctcctgcctcagcctctgagtgttggaattacaggcaggagtcatagtgcctggcccaaacttaactaaaaaacagagaaggcaaggtgcattggctcacacctgtaatcccaggactttgtgaggccaaagtgggagaattgcttgagtccaggagtttgagaccatcctgggcaacataagaaaaccctgtatctacaaaataattttttaaaaattagcctagcgtggtggcacatgcctgtggtcccagctgttcaggaagctgaggtaggaggactgcttgaatgggaggttgaggcttcagtgagccatggctgtgccactgcactccagtttgagatgccatctcaaaaaacaaaacaaaaaaaccagacagtaaatataggtgttgtggccatatagtctctgtggcaactactcagctctgctgtagtgaaaccaaagcagtcgtagaccataaatgcaatgtgtcactcagactttataaagcaggtagcgggctggatttggtttttataccctgc

SEQ ID NO: 226597 - DNA, 639 bp, Homo sapiens
  misc_feature (163)..(163): n is a, c, g, or t
  misc_feature (531)..(531): n is a, c, g, or t
  misc_feature (540)..(541): n is a, c, g, or t
  misc_feature (567)..(567): n is a, c, g, or t
  misc_feature (581)..(582): n is a, c, g, or t
  misc_feature (592)..(592): n is a, c, g, or t
  misc_feature (607)..(607): n is a, c, g, or t
  misc_feature (613)..(613): n is a, c, g, or t
  misc_feature (618)..(619): n is a, c, g, or t
  misc_feature (624)..(624): n is a, c, g, or t
cccgggctgcaggaattcggcacgatgccagcacaaagagagcgggcaccagtatctgggacccaggagaaaaacaaaattaggcctcgtggacagagagattcaagctattattgggaaatagaagccagtgaagtgatgctgtccactcggattgggtcangctcttttggaactgtttataagggtaaatggcacggagatgttgcagtaaagatcctaaaggttgtcgacccaaccccagagcaattccaggccttcaggaatgaggtggctgttctgcgccacggcatgtgaacattctgcttttcatggggtacatgacaaaggacaacctggcaattgtgacccagtggtgcgagggcagcagcctctacaaacacctgcatgtccaggagaccaagtttcagatgttccagctaattgacattgcccggcagacggctcagggaatggactatttgcatgcaaagaacatcatccatagagacatgaaatccaacagtatatttctccatgaaggcttaacantgcaagttnnacctactggctctgtctctggatggncccagagtgatccnnatgcaggatnacaacccattctttncagtcngatgnntactnctatgggcttcgttt

SEQ ID NO: 226598 - DNA, 626 bp, Homo sapiens
tagagatggggtttcaccatgtcagccaggctggtgttgaactcctgacctcaaggaatctgcctgccttggcctcccaaagtgctggggggaattttttttttatttttaatgcagaaacaagaaaaaaaagtaccttatattaagacctatcattggctgacccgatcccctcaagaacagtcattgtgggctgggcacaatggctcatgcctataatcccagcacgttgggaggccaaggtgggcgcatcacaaggtcaggagattgagaccatcctggctaagacggtggtctactaaaaatacaaaaaaaaaaaaaaaagtagtcgggcatggtggcatgtgcctgtagaaccagctactcaggaggctgaggcaagagaatcgcttgaacccaggaggtagaggtcgcagctattttgctttaagggatatttccctttctttcctgaatgaaagaagatagagatctaaaccacaattacagaacagttggcattaagcaagtgttacagtagttaccataatgatctttttgttttttgcttacaatttttttcaatatattttttgaccaaatttcttaaaaacaactgaaatgcaagactagtttttatttaaaga

SEQ ID NO: 226599 - DNA, 464 bp, Homo sapiens
gaaatcaaagaagacaaataaatgttgggatacaacatgttaatgtattggaagattacgagtaaaaatattaattctccacaaattgatctataaacaacgcagcgccaatcagaatcccagcagttttgtcctgctggaaactgacaaactgattctgaaatatataagtaaatgaaaggctcagaaatagccaagagaatatttgaagaaaaaagcaaagctggaagacttacaataccaaatatccagactgatggtaaagctgttgtaactaatgtagtgtggtatggccttaccaatggacaaatcaatggaacaaaatatggagtccaaaaagaaaataatatactcacttgatttctgacaaagttaatcctgtggtacactggagtatgagtgatcttttattaaatgttgccttgtcaactctatgtagataaaataaatctgtgttaccagat

SEQ ID NO: 226600 - DNA, 421 bp, Homo sapiens
gtctctataaatactacataccactactcactgctgggaaaaagtaatcaataaccaatgaagctgcaaggcaaataaatttatctttcacagactacttcaacatcagaaacactggtccaacaagacatctaagggggactggaagccctggagttgcgtgtcatctatgaatactcagcagtgggaaccagagcacgaatcagaccaaaagtgcgagaaggatcccagagaagcaccaaaaccatcatagacaacactggagaaagtatttaatccaaatcaacaacccaaatcaatgctgagcaaagattagatttacatctagttatgtgttgggatcgacagagttaattaattgctctgaaaaagcaattaacttcattctatcaattaactcagatctgtttctaaagttaaa

SEQ ID NO: 226601 - DNA, 530 bp, Homo sapiens
tcagggacccagcacaaagcaataaatttagaaattgttcaataagtaacaatttgttcaactgagcaaatgaacaaacaccatcttagagcaaatgagttttcagatctttccctgccagcttgtttgtgatgggggcactaagcaaaccagccaaggagtaaagaggcctaagacacagcagtttgccaatgtcttcatttccttgggctggccctgagggacgctaaccaaggctggattctgactcctgtacctcaggtaatccaactaataaaaaccttccattaaccaagatcctccccttttctctattattagaaaaaaagaagttataagaaaacagtagggattttatcttaaataaaatgacttctcagggttggcctttaactgggtataaattcaactcaacctcctaaaccttctccagcaatgtttcccaaaatgtgttccaaggaaactatggaagactctctgagaaaagggatccactaaagtccaaaattctcccctcctagcgatccatt

SEQ ID NO: 226602 - DNA, 409 bp, Homo sapiens
cagggcagggttcgggccagcgcctgggctaggcctggtgggcccggcgcctcacatgatgtcgtccagcaggttggcgctggccacccagtcgagcgcgcgcggctcggaggcggccatgatcatgcacatgaaggggcggccggtgcgccggtccgtggggtagatggtggtgggcgtgaagcgcctgttggcctcgacgaactcgcaaagctgctcgtagacgcgcgggaactcgtggcgcaggaagacgccgcgcagccgcagctcgcgctggatgtggatgaaggccacctcgcgcgcgcgccggcccgcctcgccgtcctgatccaggcccgccgtgcccggcggtggcgtcaggatcagcgtctccatgtcgggctcgcggctccgcgccgggggcggccgc

SEQ ID NO: 226603 - DNA, 212 bp, Homo sapiens
attgtacccagaaagaactggagttagttgaggcactttaaaaatattcaagaaactcacaaattaaccgtgtcagtgcccaagttttgttcaggaaaaaaaaaaaaatccctttaaggaggaagtacttgaacaagaattttcatgagagttctaggatcaagccatttagaaaactgatattctcagaagcttgggagaaatatatctaa

SEQ ID NO: 226604 - DNA, 474 bp, Homo sapiens
ctagacaggtgaagttacttgaacaggtttacatagctaatgatggaagatccagaactggaatcaaggtctctatagactctctctcctcatctctaaaatattataaaaaatacatttctgatacaaatagctgtgtcacctagtaggttctctgttgatgttggcagattctgaaccctaatgcctttacagttcctgggatgcatacattcctgaaacagagcaccagccctggaagagttcatggtgggatagtggaggcagacatgtctgtctctcacttatttcatcctcttcccaggctgtaaataaccttggttgggccaggcgcggtggctcacgcctgtactcccagcactttgggaggccgaggcgggtggatcacaaggtcaggagatcgagaccatcctggctaacatggtgaaactccgtgtctaataaaaatacaaaaaattagccaggcgtggtaaa

SEQ ID NO: 226605 - DNA, 433 bp, Homo sapiens
gaaaatatccaaaagtgcgtccaacctacacaaaagaatgggcaaaagggacacatatcaatcaaattctgtatgagaaatatgaacgatagagctgcaaacctcaatctacagcacatatcaagcaatcaactttttcttgtaatgtcattacttttctccgctatttgagaccacttccaacatcactagtgacactttgtatgggtcccagagtgttattcaaggtttacagtattgcactaaacacaaaaaatacatgagaaccacaagagatcactttttactcactgtacaatttactggagagatgaactgctcacgtggaaatgattagcgtcgcatggcattttaagtggatactcacaatacttgagctcactagaatagcaagaggaggtggctacgaactattatagtacagtaggtagca

SEQ ID NO: 226606 - DNA, 292 bp, Homo sapiens
cactttggaaagcagtctaaatgttaaacatagactaagttaccatgtgactcaacaattttattcctaggtatccacccaagaaaaataaaaacatatgtccattcaaggttcatccatgttgcagcatttgtcagtacttcattccttttcatggctgaataatattccatcacatggatataccacattttattcaaccatccatcagcagatgaacatctgagtcatttccatcttttggctattaagaataatgctgctattcatgtacaagtctttgagtcgacgc

SEQ ID NO: 226607 - DNA, 542 bp, Homo sapiens
gtattgtatcgatttgtggtgtttggatatagtttttccatgatcccctacgaaaatatgcctctcatatgtaagaatcatgcctcctccgtgtacacttttcagacactgacaaggaagggtgttcaatacagtactgaattttcatatagcttttctgggggggccaaaataccaaaatcaacccatttcctacctttattctgtccataaaattgttagaaatatcaaaatcccatttcattccctgttaaatacatgtgaacgttgtctagacgctggagagcaaattctaccacctcttttgttcagcagtacatcagacgattgcatagacgtgccagatggaaccaaataataatgcacatggatttgtcataatccgtacaagtcattgacgcccacactgagccaggtgctgtgggagacaggaccatgtgtgaaagagaagacatgcttgcttctataaaagcatcggtgttattgaggagacctgacattaatgcagaatagcaaatgaccatgcaaattaattcactact

SEQ ID NO: 226608 - DNA, 448 bp, Homo sapiens
ggtggggcaagattcagtagctagttttgtctttttaaaaatgtctgtagtaactcacctttgatgatatgtaaacgtcttcaggcttgtcaacctccctttattatcaaaagttttacttactttttttacacgtaagactatcttgaaggtgatataactgaaatgaatgggcattagcagcctgaaatgtacagaaccaatattgtagtctatattcaaaatcttaaatcaagctttgattttcctataaaatgatcttttgattcctggccttcgaagaataacccatccttgtgttttagagataaaagtataactttcagttggtgcagagatcacagtgtagtagaactttatacctggaaggatcttagttgttcttagtccagttctcattttacagatgaaggcactgacatatgtttagaaaaaatgtgatttgtcc

SEQ ID NO: 226609 - DNA, 400 bp, Homo sapiens
tggagcctcctttataagcgtactaatttctttcatgagggctgcgccctacgacctaattacctcccagaagaccctacctcctaatatcaacaccttgggggttaggatttcagcatataaatttggaggtttggcattcagatcataataccatgtagccatattttcgtgcacattaccatttcaagcaaattgcctcttttgaaaaaaatggctgaattggttataggatatgtcagggtaagtttctgactttttttttagaatttagtatttattttgtatttaaaatcttgagtttttttcaggaacattgaaatatctctgaggagacgctttttaatgattttgcctcaaatgtaaaaatttaaaaattttagcaagatctgcataaacg

SEQ ID NO: 226610 - DNA, 388 bp, Homo sapiens
ataatccagccttatcccaaccataaaataaaagcagaatggtagctggattgtagctgctattagcaatatgaaacctcttacatcagttacaatttatatgcagaaatatttatatgcagaaatattgctattgccttaacccagaaattatcactgttattctttagaatggtgcaaagaggcatgatacattgtatcattattgccctgaaagaaagagattagggaaagtattagaaataagataaacaaaaaagtatattaaaagaagaaagcattttttaaaattacaaatgcaaaattaccctgatttggtcaatatgtgtacacatattaaaacattacactttaacccataaatatgtataatgattatgtatcaatt

SEQ ID NO: 226611 - DNA, 459 bp, Homo sapiens
gagtgtgtgtgtgggtagagaaaacagtgtgaatgccctgagataagattgtgcttgatgtgctttcagaaagtacaaagatgtttgggtgctggaaggggtaatcatgcaaataatagagagataccagggggccaccctacataaggccctgtaggccaaggtaaggattttggattttactcttattgacgtagaaagctattttaaacaagagtgccatgattgtcatgaattaaaaaaaaaaatcactctgacctctgtggggaaaatacactgtatagggtggggagagaccagtaggatgccattgccatgttctggggaagagaaaatggatgctttggactagggcagtggcaaatggaggtggtaaaaagtggttgtattctggtatatttctttttttctttttctttctttcttttttttgagacggactctcgctctgtcgcccaa

SEQ ID NO: 226612 - DNA, 463 bp, Homo sapiens
gtatgtaggtttttcttggttatcagaattaccatcctcttcttggccacttcacatttgaggttgctagccagggaaggttctcctgagtacagagtctccttgacctacagtggagttacgtccagataaacccatcgtaacttgaaaacaccctaagtggaaaatgcatttaacacgcttaacctactgaatagcttagccttgcctaccttacatgtcctcagcaacttaaagtagcatagagttaggcaaaatcatctggcaacacagtgcactgtagagtaccggttgtttaccctcacaatttcatggccacatgagagctgtggctcactgccactgcccagcatcacatgagagcattgtactccatacctgtagcatgggagaaaatcaaaattcaaactttgaagtacagtttccactgaatacttacagcttttgcaccgatataaaggta

SEQ ID NO: 226613 - DNA, 412 bp, Homo sapiens
gaatatgttattaaagttaatatcacctgtttctttttacctttatttaatgtgggtactagaaaaaattaagttacctttgtggcttgccttatatttatattggcagcactgatatcaaagctcagtagctgggcgcagtggcttatgcctgtaatcccagcactttgggagtccgaggcagggtgggtggcttgagcccatgagttcaagaccagcctgggcaacatggtgagaccctgtctctacaaaaactacaaaaattagccaggtgtgttggcacatgcctgtagtctcagctactcaggaggctgaggtgggaaggtcgcttgagcctaggagattgaggctgcaatgagccgtgattgtgccactgcattctagcccaggtgacagagcaagcccctgtctc

SEQ ID NO: 226614 - DNA, 200 bp, Homo sapiens
agagttttcagtttaaaattgggtaatatgtgcatacagaatttacctaaaaatgaaatacaaaaacctcagactgggccgggcacggtggctcacacctgtaatcccaacactttgggaggccgaggtgggtggatcacgaggtcaggagatcgaggccatcctggttaacatggagaaaccccatctctactaaaaaa

SEQ ID NO: 226615 - DNA, 220 bp, Homo sapiens
agtgaagaattaggctggttttgtaggtgctaagagggtcagtggaggaacagcagctccgcggaggtgggcttcagcccagctgggattttgtcattttcttcctggggtgcacaaggcttgctcgaggacctgtggtggtgagtgctctgtaactgctcaggcggacaggaaaccgccgtggagcacgcagcactgcctggcggtggttgctttggga

SEQ ID NO: 226616 - DNA, 461 bp, Homo sapiens
gctcaccccccagtgggtgcatctgtcccagccacacactcatggcacccaaaacacatcttggtcccatcctcccccgattgccagaacacacgttcaagtaccccctcaacatctcacgggcatctcaagcttatcatggacaagccgaacttttgagccacaccatccacaccgagctgccctacgccctgacaacttctcctagcaccctgcatctcagtgagcacagccccagccaccagctgcccaggccaaaaaccttgcaggcttcctcagctcctctccttttctcatgcccaacatccaatccagagacaaactcttttcaacctacctccaaaaagaaacttgggcacatgcctgtaatcccagcactttgggaggccgaggcgggtggatcacctgaggtcaggagttcaagacctgcctggcccacatggcaaaaccccatctctact

SEQ ID NO: 226617 - DNA, 447 bp, Homo sapiens
acaattttgagaaagaagtacaacatggaggaatcagccttcctgatttcaagacttgctgtatagctacagaagtccagaattttgtagtattggtcaaaggatagacattatagatcagtgaaacagaattgcagccccacacaaatatgcacaactgattattgacaaaggtgcaaagataagtcattgggggaaaaaaccttttcggcacatggtggcagagaaattgaacatccctaggcaaaacaaaacaaaagcaaaccccaaaccaaaaaacaaaaaacccatataactataaaactttgagaaaaaaacatagaagagaatctttgagatctagagctaggcaaatagttctcagatttgacaccaaaaacatgatccattaaaaaaaaaataagttggatttcatcaaaattaaaaactttttaatgttttaagaag

SEQ ID NO: 226618 - DNA, 740 bp, Homo sapiens
gtctttaacggtatttctgacacaaacacaataagcctcttgggactgaggcttgtcattttcttaatataaactgagggtattacacaaagccagttcattaaatacaatttgatgaaggtccaagaaatgcactctgaggatgcacaggaccttgtggaggtccagcttaacccaagggtagaatttagatattgagaagtataaaagaattgtcttcttatgattcagcttttgattaaaacagggcactggatagtttgagattagattgtctaacagcacgcggagtgtccttagggaagatccgtacagttaatgtgacagtgtgacagtcgaggtaagttgataggttcttaaaatcatagaaagcacctaacaagggctcctacctaatgtggcagccccaccaccatagcaagaaagtctacgctagtcttcattttaagaaatcactattatatgttcactgatgcccccctcccctctcaaatatagcacaaaattatatatactcatctggaaataagatacttatctattaagatactttaaaaaattaaataataaagattaacaaagttctataagggccattcagttgcaaatttgaactttagaactcaggttttctaattcctcgcccagtgttacttgcactgtttaggtcttttttttgaagtatgatacacctacagaaaagtggtaaatgtaaagtagatttagagattcaaaaagaa

SEQ ID NO: 226619 - DNA, 437 bp, Homo sapiens
atcttcctggtgctttattttcctgtgactggtcttgtgtccaatttgcaagacataatcctctgtactcttctcttgccttcctctaaagagaaggaacgtgtccatgtgctgcattgcctggagttgagggagtggtgatgcaagtactcttgtgggctgctgcaattggtgttacactgggtcacaccccaagcccactgctatggacatcagaatagcaccagggcttgcccaaggactgcagtcactgtgtcctgactgccactcagatttatttgggccctcaggccatttaattagctagtggtgaagatgactgggacttggtttcctccttctgaagcagaggacttccctctggccccgggctgctgtatatgctccttccatgggcactggtagaattctgtctggtaatgaggaggaaattaaag

SEQ ID NO: 226620 - DNA, 444 bp, Homo sapiens
ttgcagccaactagcaatatctcattcccagccccgtctcctgcctctgttaaaagaggtgggaaaagtgagtagttttcaaggtccgtttaagctctgctattctctggactggttgttcagctgacctttccctggtgggagagtcagaaattcctgtgccagccttagcatctttctgatacaatcctttgaacctctttgacacagtggtttccccattgttgatgagcagtgcatgacacaaggcttctctaacagcagcggggaaagacctctgcatttactgtgtttgtttatttctcttgttctgaaacagtaaatgctgttatttcagggtgacttacctaattcttacagtgtttatataacaccagtaaacatccatggaaaacatctttaaaagagatcattaaacacacttaacatctgtgcctaattaat

SEQ ID NO: 226621 - DNA, 513 bp, Homo sapiens
atacaattgtcactggataccattaattacacagcttgataggaaaactaatgaatatagaatatgtagctaatctataactttttaaaaattcctggaaaatgtgtaaatgaaactatgttgttggttattagttatcttaaaaatagatccattttctctgattttctcttacataggctaactgtagttatgcaactattcttaatgagaatttaatattatgagctattaacatctctaaagagttgtttttgagtgaaggtgctgtttattagcatcattggaaaagttttgcagccaaataagttcttgggattttacctgtagctgcaagagtttgcatgaatagtactgcttaaataagtccacctatgtataaacaaagtgttaaggtaaagtaagggataaaaagaggaaaacttctccagcttttggtgtatttgaatgaatgtactcttttgcactgtttcaaaatatatttaaaatacaaataaatatctaaaaataaga

SEQ ID NO: 226622 - DNA, 444 bp, Homo sapiens
ctgggaactggggctgtactttgcttataggaaaaaaaagtgtgctccttatgaacagaagcagctgctatgttggaaacttcatcgaacagatttcctactgtttggctgctttcagaaaattctgcctacttgaaataagagatcaaagattctatcaaaactcatttcaaatttaataatgaaatctagtcttcaatcaaacacaaagaatatgtaacttgaaagcaccacataatcagtatatacacatatagctcttaccatagtgaatactctagactataaattctgagccagagaaaagtttctgtgaatattgcaaggaaacaaaaatatctctaaatgaattcttagcaaatggttttaaaaatatacaaaattttaatttaaaaatacctaagaagctttgaaatatttactcaaaaacttagaaacataccc

SEQ ID NO: 226623 - DNA, 570 bp, Homo sapiens
cgtggtggtgggtgctgtagtcccagctacttgggaagctgaggcacgagaacagtgtgaacccgggaggcggagcttgcagtgagcagagatggcgccactgcactccagcctgggcaacagagcgagactccgtctcaaaaaaaaaaattcgctaagtgtggtggcgggcacctgtaatcccagctattagggaggctgaggcacaagaatcgcttgaatgcgggaggcagaggttgcagtgagccaagattgcatcactgcactccaccccgggtgacagaacgagactgtaacaaaaaacaaaacaaaacaaaacaaaacaaaaaacaacaacaaaaagagatttccccataggccttgggaacagaattcagcacccattctcagaggagttataccctactggcgtcagccacactgcaagtaccagaaaaacagaaagctttaaaaatgttttttggcaataatgaatgtgtgacatctttgggagacaagaatggagaaaggggacacgacattattattgggttaataataatggcaaaactgtcatgacaaatataataa

SEQ ID NO: 226624 - DNA, 436 bp, Homo sapiens
tggttttcttatctccttttctgttggtcacactgaaaccacctccaataccacattgttaatggaaattcacacacttattaggtttttccttctgtagaacccttccaactcctcattgttcttaccaaagaaagaagatgaactgtgagattatttgaggccccccccccctttttttctggtggaagtaagcaaagaacggaaagatctcacctttctatggataaagtaaaactccaacatgttatcgttttttaactgagttatttcataatgttgaaacatgaataataacaaaataattagattggttcttagagaagggattttaaaatataaaagctcattaaagcacttttcttgcttagtgtttaggtagaataagttcgctttaattccagtttgtgtcacttcctgtctctctctgaatagt

SEQ ID NO: 226625 - DNA, 246 bp, Homo sapiens
ggggacagcaaattattgaaggcactgtgtatcatccaacagccagctgatcccaaaatagttgccaccatgtaagaagtgcctttcacctccggctgtgattctgaggcctccccagccatgtagaactgatttattgttcctggtgttttcagacttcacagtgatgaactcagatgtggatccttatttcctgtgccaggatgtttcatcttgaagactggtgagattgggaaattccttttg

SEQ ID NO: 226626 - DNA, 266 bp, Homo sapiens
cttggaggtacttagagataggaattcaagatgaattttgaaggatgcacaattcagcactcagcccataacagacatttggatccctaaattacataaaacaacaacattggtcctattaattatttcattcattgacaaaatatatgtccataggttatgattatatattcctttaaattgtatagcacgtatgtaccccaatgatataaatatcttctctttccattctactcctatcctcttcttcatcgtatcctttttcc

SEQ ID NO: 226627 - DNA, 395 bp, Homo sapiens
ataatatgggtgaataatgggtgaatctactttgcttggatgaatggagaaggcttttgcaagactgagagtttgctagccagtgatttcctcatttagtccttacaaccataccctttagatactattgtcctcattttctagatgaagttactgagactcagaaaggtagggtaccttgtccatgataatggaactggtcattgaactgaaaccctggaaggcaacctgacagtatctataaaaacaaacaaagacaaaaaacaaacaacaactaaacatgcatagaccctgtgtcttagaaattccggttctaggaatgtatactacaaatgtagtttcccatgcataaagatgtttaaataaaggcgttgattacagcactgttgctagcg

SEQ ID NO: 226628 - DNA, 476 bp, Homo sapiens
atatgtgccacattttcttaatccagtctatcattgttggacatttgggttggttccaagattatgtatttattgagttctaattttctctcggacatggtactaagacatggtgtgatgggagagagagatgttagaaagacacctctctgaggaggtgacctttacgttgaaattctgaagaaagtagggcaggtaagctctaagtagaaggaaaatatgcaaagacctagggcagaaaggagtttggtccgttagacaaactcagagtaatcctgtgcagtgggagcttagtgaatgaagggaagagaagtgagagataagtttggaaaagtgagaaggaatcagtggggcagtctttctcccagatactgtcactttatcataaattaacttagtgaaactacactagagctaaaactgttactttaccttgaatataaagggagaaaatgctaagaacatttgattactgt

SEQ ID NO: 226629 - DNA, 611 bp, Homo sapiens
ggaagagctttgctcaaaccagccccctgacagccagtccctcaggcccagaagtcatgaatcgttcctccaataagtcattcagttggctggcagcaaacactgttaagattctggatggcagctgcatttcatattagattttaacagaaactcatgatgaaaagtctttaagacctaaacgtccaagtatattattgtataattttgagtattagaaaatcagtaggatgttctttcagcatttctgaaataacagtgcaaaaatagctccagcttcataaggccaacctttggtatctgtgttctgcaaaatagggtaagcaagatgccacaaaagccaggttgtatgtgtaattatcttcgctacaacaacaggactatcacactttaagcaaccctgtgggtctttaaaataaaaaaaaatgtaagacgtaaagaaaaactttcttgagagagaacattttacaaatcagaggaaaatcttgcagaacttttacattttataacaaataaattatatgctctattgttttcctctgagtacatcatcagtacttccataatacttttaatgtttaacttgagaaaaccagtagcttaaaaaaaca

SEQ ID NO: 226630 - DNA, 248 bp, Homo sapiens
tggacattttaaaaccttagttaaacctatcaggatgttcattgccctcccttagaaaatgcccaaaactgagaatctgagctaactggacagtatacacaggtacgctctgtgtatatcagagtccctgcagaagtcaagaaattacctaaatacatttggcccaccatagccattatagagaaaagacaaaatatctgctgttcatggaaataaattataaaatctgttgaaccatactatgttct

SEQ ID NO: 226631 - DNA, 569 bp, Homo sapiens
gatgggtgctaagggactttgtagttccctgaagttccagtgagtaaaaggtacccttggaattttttattccttcagacttttaaaacagagatcactttcaaaaattactctttctgctttgaatccatgttttagtaactattttgacactgtttggtcagaaggctgtgtgggtcaactgcaaataaataaaataaatgtgatttcagtaatttccattttgtaacaagtaattgagaaaataggattggatcagatatttgcttatacacattccctttcaggagcacttctgttctataaagaatgttggtatattgttaaggacacttcaagctttgggaacctttgaagtatccattgattcagttaacaaaattatgttgagtgcctaccctgggcctgggcctgtgttaggaggggacactaagatgagagtccaaagcacttcttctcagactcctggctgctaatgggttgctgcctctacttcttcacttagcagatagctttaaaatgagtaatgcattttaccatggagcccgtaagagacattcacccagttg

SEQ ID NO: 226632 - DNA, 171 bp, Homo sapiens
taagctcttccacattctactaatagatttcatcctctccccaccccaccccacttctaagtgacctggaatctgtttctgctgatctcaaccaaatgcaaacgaatgcacatttcgggcagcaggttgggggtgatatggctcatgatctgcagcataggggagcacata

SEQ ID NO: 226633 - DNA, 478 bp, Homo sapiens
atacccacttttctttacaagtctctatctaattcatactccctattgctctttcctgcttcacaaacttcttaaaagattttttcatgtggtgtgaatatttaaaatctgtcttagcaattttcaaatatacaatatagctggccatctgtatttgtgggttttgcatcctctgattcagccaaccatggattgaaaatattaggaaaaaatgacgaaatacaacaatacatcataaaaataatacaacttaaaagacaatacagtataacaactatttacatagcatttattttgcattaagtattataagtaatctaaagatgatttaaggtatatgggaaaatatacttaggtgatgtacaaaaactttaatcatttcatagtgtatacatatatcaaaatgtcacattgtaccttataaatactcataatcatttgtcaattaaaaataatttaaattttttgaaatgtaaaa

SEQ ID NO: 226634 - DNA, 477 bp, Homo sapiens
ccaagaacttaggaagaaacacagcacaagagcattaacaaatgccagacttaagataaaggtatttttaaaaacgacagatttgagatgtttcaggtaaaaatctggcttagttgacaaaatttcaagaaaaaactttgggttggcggggcagaaggatcaaactgtctgtccaagttaagtttatcaacactgtattacacaacatttgtgactataatattgtttgtttgagactgagtcttgctctgtcacccaggctggagtgcaatagcacaatctcggctcactgcaacctccacctcccgggttcaagcgattctcctgcctcagcctctccagtagctgcgattacaggtgcgtgtcaccacgcccgtccgattttatttttagtagagacggggttttgccacgttggccaggttgtgcgactgtaatattaatttgcctctgagtctgcacacttagtagtccttt

SEQ ID NO: 226635 - DNA, 787 bp, Homo sapiens
tatctctagatgtatatacaaatggccttccctctcttataggacattgccgtcaattcccagcagccttgatcctttccttttctgattcagaaattacctgtgggtgaggaagagcgttgcgacagcttgtttcagtgtcttcaatttctgtttgaactctttgtacttctcatctttgctaaggaaaaaaaaaatctctggggtttgtgcattgtatttcaagtgttttagcaaattcaaattgcctatttttctttagacttttgcttgaaggcttgggaaatagagatggcacctggtataagagaagggtcgtgagagaggaagtatttgaaaggcaagtccctcaccgaaggtcacgttcatgtgaatgtcacctttcagggaatttttgcagtgtggtgaggtacctgtgacgccccaattttcttgagaaatgaaagagttttggcaacatgaccgtctctgtcaagtagaatgggcatcgcagtccctgtctccctcctgcccctggttgaagtcacctttccagctatgtttccatctttctgtccaccatctgtttatccatccgtcatccctgcagagtacatgatgactgaaaaactgagagtcttcagtgtttaggcactgggcttatgaggccacagcccctacacttatgggattgacagtctcatggggggaacagtggtcagatactcacatgcagaaccgtaaaatgacaactgttctgagtgctttgagcttgaccttgggggcatgcaggacaggtaggctgcgg

SEQ ID NO: 226636 - DNA, 511 bp, Homo sapiens
cagggtggacagtatgattgcaaggcaagcaggggaggaagagccacttgagacattgctctcagctgctggggaggagctgcgagcaggcagcggtgggaaattgaggcttattgtgagcaaggtgccggcctccggggcgacggggagcgcagagcagcacatgaaagctgcctgcggatgagctgggggatggaccacacatgtggattgcaaggacagctactcagagagttcacattcctcccccattgaactgggtatgattgtaatggtttgttaaacaaacaaaggacctaaagctgtgaatgggagagaaaaaagacttaaggtgaaaaggagaagaggccctgcttgctagtgttccactctttttaagctttctcccccatttccttaacattcctttcccctttcagaaaagccagtgttgtcgcttggaaaacttgccttgtctcttcagtgccattttcttttaaaatggaaacctgatgaaatgttaatcagttta

SEQ ID NO: 226637 - DNA, 258 bp, Homo sapiens
tttcttctgataaacctggaaagctcagcctcccaggacctccatggactaggtcccctgtagtgataccttcttgatggccctgcccaaggccccagtcctgcaggaatacatggccatggaacccctgtctgcagtgagcaggggttcctgccaggaagggaaggggccgtgagcagcggggttcaccttctgacagcacaggcctcgctcctagatgtgtccttacagaatgtatgcaggcaatctccggcaccc

SEQ ID NO: 226638 - DNA, 181 bp, Homo sapiens
ctccaagctaagtgttcaggttgtagaaatatcacaacactaagaaatagtaagacatatgtcacacacactttagacagcaacagctgggctgagctgactgcaacacacaagtgatacgatcacttagtggctgtgtgcacccaaactacatggtcaccctcaaaatgttcaaaataaa

SEQ ID NO: 226639 - DNA, 102 bp, Homo sapiens
gtgggtgtggactaggactgtcccacctgggacatgtgggtcacccatcttattttcccctcatggggcctttcttctgtttgcctttctgctcctccactg

SEQ ID NO: 226640 - DNA, 707 bp, Homo sapiens
gcgaggtgggagcatggatgaatggtgcacagggatcgctcgctctatctcaaagtctctggaggaggaagcgttgttaccaggtcagagcaaggatcaggctgtatacctaagtgtgcgaatgtgagtgtgtcagtgtacactgtgtgtgtgtgtgatgagtcgttctgagtctatgggtctaaatgcaaacatatgaaattgctcactaacagtgtggacagggaagggataggggctcctaaatgcagtccaagcctccagtggaatgtcctgggacccaggcatatccgcaggaaccgataagcagcaaacaccctgccactgtttccctggaaagagcaaaatcgcaactccatcgaagccgaaggcgccgatgtccgtcctgtggtctcactgcagaaatacgcgccggttcctggaaagaaaacagtcccagaggctccaagaaacacccattctgagctaggctggtcccgtcctccccactctcccatccctgaccgccggcagaattacctgacctgtccccactgctccagatcgcaacccaatcgcgcgcccacctcccctccccgcctggttgcgcgggtctgggccccactgggataaaggaagggaaggggggcggagatggggccgccttccttccctgccccacccgcacgttcctccgcctctcccccgggtgaatggtgcgcggccgc

SEQ ID NO: 226641 - DNA, 457 bp, Homo sapiens
catgttgaccaggctggtcttgaacacctgacctcaggtgatctgcccaccttggcctcccaaagtgctggaattacagacgtgagccaccatgcccggctgagagtatctttattcttaaaaaatcaaaatgtttaggaaggcaggagacactaatagggctgggctagtcttgtggaggcagtggatggacgctttggctggcctagggaagaatctgtgattcagtgctgcagggatcaggtgatcctggtgagagaggtcctggaacaagggttaatttggtcatttttggaatgacctgggatttggcttatttattttatttttaaaatttcccgctgggcacagtggctcaaacctgtaattccagcactttggaaggccaaggccagtggatcactcgagctcaggagttcgagaccaccctgggcaacatggtgaaactctatctctc

SEQ ID NO: 226642 - DNA, 468 bp, Homo sapiens
aatgaattactgtattcttttgtatttaaggaatactgaccacattagaaaatgtaaacatttaatgcagagacgtgtttttgctagagttgaaatgtaatatttgttaacacagaggggagctaaaatttttggggggagttaattgatcatctagaataagggtcagaaatccttatagaggctgcgtgcagctgctcatgcctgtaatcccaacaacttgggaggtcgaagtgggaggatgccttgaacccagcagttcaagaccagcctgggcaacgtggtgaaacccggacgctacaaaaaaaatcaaaaaattagccaggcatagtggtgcatgcctgtagtcttagctacttaggaggcagagttgggatgattgcttgaatcctgaggtcaaagttacaatgagccgagattgtgccaccgtatgccagcctgggcaacagagtgagactccatctcaaa

SEQ ID NO: 226643 - DNA, 444 bp, Homo sapiens
gttttacttcctcatatgtgtactgaagtgttctttgctgtctgatgtatattaaggggtcttcagcaattatgaaaccattgctgcagaagcccagagtcacatactatagaaatattctatagtaaggacctaacaggattcacattaaacagaacttgactataaactaatggattcctactacagataataggaaatgtggttttttttttatttttttgaaacagggtctcactttgccacccaggctggagtggggtgacatgatcatggctcactgcagtctcgactcctgggctgaagtgatcttcccacctcagctactcaggaggctgaggcaggagaatcacttgaacccaggaggcggaggttgcagtgagccgagatcacgccactgcactcaagcctgggcgacagagcgagactccatcccaaaacgaa

SEQ ID NO: 226644 - DNA, 1350 bp, Homo sapiens
cagcaagccatcgatacaatttgaaaagaaatctatctcacaagagcgtagaatttgtccttgagatcatacttattattgtcagtagtaaaagaaaaagttaaccttgtagccactaataaaattaactgtatataacaaatattcagaagagcttcaagagtctaaattggtaagatgactcaagtattacttagatattaaattaagtactcataaatttttaagaaaccaacaatatatacctactatgtgcccacagaaatcaaaataaaatatttaagaaagcaacaacaaacacacacctttttacttgggcaaagaaattaaatcccataatttattagtatatagcaaatttgactcaaatatttgagactttcagtatctgtcaacaattttagagattaattcccaggactttaaaaattcctgaatataagccatttgaaatcagtaacagtaggaaatactgctttttctccctgaactttttaaatgataaaaaaaacttgaagaagtccatcaatatttagtatttatgttctcaaactatcacttccttttattgtctgtaggagtttaagccaatttcattttgattaatgttctctctatagctaatctttaaatttttttgaggctggacatggtggaagaataaaatcagtcaagtggtagattagcccaattgacttttatatcccagtctctgttatcctgacctaacttttttcctctatcaaatggagaaaaaatgatcagaaagatagtactatgctaatgtggaagagtattttaaaaagttttcaaaaactttgtgtaaaaggggaccagaatatacccaacatttccaaaagaagcaaaaacaagtagattctaatcagttcttgataatctacaatttcttcaagctaattacagatcattataactttgaggggtgactccaaaatctaactgtgacacaaatgtgctgaatgattaacaattcacttcatcttgtttctcagtactcattcataaaacaaatgctctcatatttttttgagaaaaactttaggttacctaaaaatgagaggacagtgtttcaaagaagatcaatgaagcatttttatatcagaagaatttaagaaacaaagatcccttgctttaacaggtcttagaaaaatctacgttcaatactggcttacttgcccagcacctatagcctaagactatactacagtctaaaggtctaaagactacaggctctaggcttagtcttagtctttagttagattaaagactatagtctaaagacttactcattcagcttctacaatttccactcacttttcaccttatgca

SEQ ID NO: 226645 - DNA, 601 bp, Homo sapiens
tcgagccggtaccacactatgtaatactatgctaatgtggaagagtattttaaaaagttttcaaaaactttgtgtaaaaggggaccagaatatacccaacatttccaaaagaagcaaaaacaagtagattctaatcagttcttgataatctacaatttcttcaagctaattacagatcattataactttgaggggtgactccaaaatctaactgtgacacaaatgtgctgaatgattaacaattcacttcatcttgtttctcagtactcattcataaaacaaatgctctcatatttttttgagaaaaactttaggttacctaaaaatgagaggacagtgtttcaaagaagatcaatgaagcatttttatatcagaagaatttaagaaacaaagatcccttgctttaacaggtcttagaaaaatctacgttcaatactggcttacttgcccagcacctatagcctaagactatactacagtctaaaggtctaaagactacaggctctaggcttagtcttagtctttagttagattaaagactatagtctaaagacttactcattcagcttctacaatttccactcacttttcaccttatgca

SEQ ID NO: 226646 - DNA, 425 bp, Homo sapiens
ggcgttttagttgaaaacttagctacacctgatcagtgtactgcagaactttgatgagtgggagtccctgatagattcctggttctaggctctttgccaccagatcaaccagaaaaaggtggtgttttgttttgttttgttttgttttttgagactgagtctcgctctgtctcccaggctggagtgcagtggtgcgatctcggctcacagcagcctccgccttccgggctcaggcgattctccttgcctcggcctcccaagtagatgggattacaggtgcccatcaccatgcccggctgatttttgtatttttagtagagaccaggctggttttgaactcctgatccgcccacctcagctgggattataggtgtgagccaccgcgcccggccaggtgttcttcatcagactgcagggacacctcc

SEQ ID NO: 226647 - DNA, 561 bp, Homo sapiens
tacctgattggcatgttcctatttgcatgtccccctctccccatagttttcaaaccctggctgcatgcagcaggctgtcatgattcagcagaactcaacacattgggtatttttgggcttgaactctcttggggggtctgtccacttaaaggaccattcagctgctaaatctccatctcactttatttattcaacaaatactgatatcaaattgggtggccattcacctgaccactttggagtatagtagcagctcactctacataaaagtgtgtctggcatggtggctcacgtctgtaatcccagcactttgggaggccaaagtgggaggatcgcttgagcccaggagttcgagaccagcctggacaacaaagtgagacccccatctctagaaaaaatttttaaaaattagctggtgtggtggtgcacacctgtagtcacagctacttagcaagctgaggtgggaggatcacttactcccaggaggtcgagactgcagtgagccatgactgtgtgccactgcacttcaacccgggtgacagagcaagaccccgtctccag

SEQ ID NO: 226648 - DNA, 687 bp, Homo sapiens
tgaacaaccagaaggataaacaatagggaaacacgccaaaaatcttgaacttgagagtcagaactcacaggtaacaaaggtgtttagttatactatattaatgttttctaacttttaccatgagcatgtattcttttgcatctctatttgaatttatagcataatttttcacattaaaactggatttactttaataggcaatacagccgggcgtggtggctttacgcctgtactcccctgcattttgcctccagcagcatgacccctttgcagcctgtttaccaggaggcactcagctgtgagcctcttgccccacttgctggcacctccctgtcttgcccaacggtgctttgtggttttgtctccatttcctttggttgaatgacttcgaggtggaggggtttctcttgggcaagagcagtgcttcctcaatcactctgactgctggggtctttgcccctctgtcgggagcctcagcattgctcagagccttctctcatctccagaatcttgcaagtcactctctttccacgttgcccaacataaccctgtaagcccctcgagtttctctagtgttttccccacacattttgccagataagcctcatcaaaccaaccttgttagttagatggggcctatcacattattgtcttttgacagatgaggaaacaggcccagagttgaga

SEQ ID NO: 226649 - DNA, 414 bp, Homo sapiens
cagtgcctatttattcagaacttagtttcaggtctgttttgtactttacaaaacatctttcatgaaggatatatttgataatggaaagtattttttttttaaagctgtatagttctgaatcacaaatgattgtgctatcgtgtatattctgaaaagttcgtgattaaatcacctactgttgtgtgctagcacctcataaaaaatactcttcaatgagatcacatggacacaggaaggggaatatcacactctggggactgtggtggggtcgggggaggggggagggatagcattgggagatatacctaatgatagatgacacgttggtgggtgcagcgcaccagcatggcacatgtatacatatgtaactaacctgcacaatgtgcacatgtaccctaaaacttagagtataaa

SEQ ID NO: 226650 - DNA, 474 bp, Homo sapiens
agcaatctcattaatgtgagaaacaaatattatataaaatactgggatattatataaaatctcaacaagaaatgtatgggacacatggaaagaatccctaaaattgtgcttagataaataaagaggaatacttagcatttgtaaacatgtcattttttccccaaatagaattaaagttacatcacagggatagttaaaataaaggggaatattttgggaaatctgacaaatatttcttaaataaaaaagaaagtttgaaaaaatacataagaaaactagttcttagggagaaaaaaggaggaaatcaatggacccactttatcatgttatgaacactctcataataaaggagaaattagaaattaatacagtggaatagatagtcctgatgcattagttagactgaactatctgaaattaccaatatttaactgcttttgacttacaaaactggcaatttcatatcgttcaatg

SEQ ID NO: 226651 - DNA, 484 bp, Homo sapiens
ccggagtcagggggtgggggagggaggaccgaccgacactctaagaaggtctttggtcctcctcggtgaagagaagggttccatttcatttcctttgcttttctctcagtggatgaaaagatggggtcaggttcccattcccctcactggcgcactgagagattcgcgggtgcctaaaagctttctcctgaatgtccttatatctctgtcgggcgcgattttagattgaatctgcacggggcttggcgatttgtgtattccggtggggctgtcgtagggttctttttctttagatggttgggctttaatcttatttgttttcgaactctaaggtaggcttatcaggaatcgtttttgaattggaaaatttaaaggttttgtttgggattttttttaaccccgaaacaaagttatgtcaaattagattgtactgtgtgggggctctcgtgaaggaaagagtgtatttaacctggggtttttgttt

SEQ ID NO: 226652 - DNA, 504 bp, Homo sapiens
ctcccaaagtgctaggattacaggcgtgagccactactcctggcctaaaactaatgtaagaatatatttaaagttattcacagttccatcaacctggacatctgccaattttatttttattgattttcttctagaccatgtctgtttacagagattcttacatagctgtaatccttgtgtggatataattttatatttgttttttactttttttctgagttttttttatgtggctataaaacctctatgatttttgtttttatcaaatgtacaatgcctcctctaatgaaagtgcctttgtttatgtagccattgcaccatcattgggcatttgattttgattcagagttattctttattatgtatagtactttaatgagtgcagaacctttttcttcctttgaattaaactaggattaattctgaaggatgggtaggaatacttttatagacccttaataaggattatgaaattgatttttttaaagaatgacgccaagttat

SEQ ID NO: 226653 - DNA, 349 bp, Homo sapiens
cagcacttctgcccaggcagcccagtgagactggttctctttctccctctgccctccttctccttccagttcatctcacccttcagcctcctgtgatgttccgagagaggtgctttcctgcaggaggctgggccttcaacccatggcctcaagtacccctaacccgtctcccagggccactgactgaatgccctccagcccttgagccctcttcccagtgtcttccttttcaccccagtcgtgggctctccccacttcacctcactactaccctttgttgtgctgctgtcaaacagcagctccacgaggggtacccaggccaggccacaacaggatggggacctgctct

SEQ ID NO: 226654 - DNA, 282 bp, Homo sapiens
aattgcatgtatttatggtttacaatatgatgctttgatacacgtatacattgtggaatggctaaatcaagctatttaaatatgcattaccttacagacgtaacttttgtggccagaacacaaaatttactctcttagcaattttcaagtatgcaatatattgttattaaccacagtcaccatgatatacaatagatctcttcaacttattccttctccgttactgaaatgtaacaaacctgcccgttctgcacatgtatcctattacttgaagtaaaattt

SEQ ID NO: 226655 - DNA, 478 bp, Homo sapiens
cctttgcaaatatcaggtaaaaatgcatgtaggttctgtgaaatattcgtagtaataaattgagacaccttttaattagtgttacccttgtgactttctgttgtacataatcctttttctaaatacatcattaaaataattatttttttatcagcataagcttactgaaaggaaaaaaaatcttactgtgccttactattttacagagcgtcacatgataacacgttagtcagctgctgtcggctggtggtgccagacatcaaaggaagattgggaaaactttagtagaaaaacaagacctagagttctaaggatgctcagtgctgtccagctgttgatgtgacttgcatggtaaccagacatcactggaccatacacttaagagagaggaggagttttttttaaaaaaagtgggagccacctagaagtctggaagttcttttcttctctctcactaaagcattccttgttttagcca

SEQ ID NO: 226656 - DNA, 394 bp, Homo sapiens
aggccaggcatggtggcctatgcctgtaattcagtgcattaggaggccaaggtaggaggatcacttgagcccaggagttcgaatccagcctgggcaacacagtgagaccccatctctacaaaaaaattagccaggcatatgcctgtagtcccagctagttgggacatgggaggatcgcttgaacccaagaggttgaggctgcagggagctgtggtcatgccactgcactccagcctgggtgacagagccaggccctgtctcaattaaagaaaaaaaaagacacacaaacatgcacataaatacacacacacacacacaaattcgaaatgagaaagaaatggttttttaaatgagaacattattacaggagagccaacagacaataggagatcaa

SEQ ID NO: 226657 - DNA, 459 bp, Homo sapiens
agatgatgcagactaaaactgcattttacattttatatggctaagtttattgtttccttgtgttgtaatatgatggaaagtaatgggaataattctgcttcctgtccttagggaccagtaggaattttcccatgataagcattttgtccttaaaatactgacatcctgttaagagatcatgacactccaatgaccatgagaccctggctatgctagtcagccagggggctgaccattgacagtgatgctggtctccatgattaaatagtgtgggtcagcatgtcccagggtgacagaaagctgtgtgatcagtgtctgtcacatatctcagactcagggttcctttttaaaatgtgcctggatcgatgatgacttaaagatttatctaatttaaatctgaacaaaatgagtgaccaaaacacttctgtaccacttctgtgagctgaggtccagcacaga

SEQ ID NO: 226658 - DNA, 443 bp, Homo sapiens
gttccttttggtaattgtagatagacttgctcaacctctactgcacctccttctagtgtgccttcccatatttgtgaaactcaaaagctaaatactgcattttctccaattcctttacagttaggattccagataggaattaatgtccattaatcggtgagatttggatttggaattgacttaaattgagagagagacggtccatgaagcatccattttctggtatggatcagagcagaaatggtggggttatagagcctgcaactgtagccgcagttttctcttttttgctagacagctttttaattgcaatgtggctctgaagtttcttcatccctcccaatggtcaggtaagttatttaaatacctgtctgtcattgcttactacactgtccttttaatcttcattatataaacaataaagacatacttaatgctcaccg

SEQ ID NO: 226659 - DNA, 358 bp, Homo sapiens
caatgtaggggtgaagagtaggtctttagacccagactgcctggattcataccttgcttcactactaacttactgggtgaccttaggtaagttagttaaactctctgtgactcagtttcttcatttgggataacaatatttcttgcttatttttttgtgacgattaagttcacctagtaagttacaatgtggtaagcactgtttatgtactagatgctagggactatcataagcaagacagacgtggtctctggtctcacgcggcttacattctagtgggttgggcactatatgtggttcatctgtgccatgaaccatttcaaaaaagtttgaaaaaagaatcagtcttaaagagaga

SEQ ID NO: 226660 - DNA, 230 bp, Homo sapiens
aaagctgtagatattacactgcctaactttaaaatatactacaaacttagtacgcaaaacactatggtcctggcataaaaacagatacataggctgatgctcagaatagaaagcccagaaataaacccacatgcacatggtcagagttacctagaatacccaatagggaaggaatagaaggaatagtgtcattagtaaatggagctgaggaaactggatatctgcatgca

SEQ ID NO: 226661 - DNA, 773 bp, Homo sapiens
agccccttgctgtacaatgtcatcatgtcctatcaccactgcttctggctcacagtgggagtttacattttaggcatccttggatctacaattcataccagttttatgttgagactctttttgtgcaagactaatgtgattaaccattatttttgtgatcttttccctctcttggggctctcctgctccagcacctacatcaatgaattactggttctggtcttgagtgcatttaacatcctgatgcctgccttaaccatccttgcttcttacatctttatcattgccagcatcctccgcattcactccactgagggcaggtccaaagccttcagcacttgcagctcccacatcttggctgttgctgttttctttggatctgcagcattcatgtacctgcagccatcatctgtcagctccatggaccagaggaaagtgtcgtctgtgttttatactactattgtgcccatgctgaaccccctgatctacagcctgaggaataaagatgtcaaacttgccgtgaagaaaattctgcatcagacagcatgttaatgaatagaatcaatgttatgttgttacatcaagataggtctttggtttgattagatatctaacttattggatttattgttgagatttatgaaaatttagtgatgctcttttatgtaacacctctccaaaatattcctccggtctgcttccatcgaacttatattccaatgagcatatgtaaagaaatacaaagaataaaatcaaaagacttttgaggttta

SEQ ID NO: 226662 - DNA, 658 bp, Homo sapiens
  misc_feature (1)..(1): n is a, c, g, or t
  misc_feature (31)..(31): n is a, c, g, or t
  misc_feature (71)..(71): n is a, c, g, or t
nttctggtaccctgctctcataccctgtagnaccgctggttctggaaaaagctttcttcttcggtcccctngataggctagtgacaactgaaaacatgcagaccacaaaagatgtgagaattcaaactgagccatagctccatctcctggaagtgtatatcagcagcaacaagagtaaagacccagaggcatgagaaacacttcctcactgaagcactcacgttccgactgtgtgcaaaagaccttttgtgtctcactcactgagggagattgttcttcactcaatcaatgagaagaacagacgtcttagaaaaccttcagtacctgggggaaatgaatgagctcaaacacaagggaaagtcagcccgtgttcaagataagcccatctcaggaaggcaggcaccatgctcctgagactactttacccccagataagaaagcccttattgataagccaaaatcacagattattttattaagctcatattttaaaagaatgcaaagcttcctttaatgttactttccattataaatgtaaaattacagtttgcacataatatctggattctggttaactattttccatactgtattttgcaattgcatatctgcatttctatttttatattaaaaaataaatagggttatgcaaataaaa

SEQ ID NO: 226663 - DNA, 731 bp, Homo sapiens
tattcttttttagtttattgaaagaaattcacttagaaaacagccacacatacattcttcaggaattatggaccttttctccctacaaattactggatacttggagaattcttgttattcttctctgtagctttttgatatctttacattaatattttataacctttaatttttctcctttatacattaatattggtgactaaaaataacgtacttgagtgtcatttatttttacatgggaaaacgtaattaaggagacaagaattggacaaatgggccttattctgattgtttcagtagcccaggatcattagtacattggccctctgtatccctgggttccacattcattggattcaagcaaccacagattgaaagtatttggaggcggggaaatggatggttgtatctgtattgaatatgtacaggctttttttttcttgtcattttctaaataattcagtctaattcatatcgtatttacactgtattagtattataaataatgtagagattatttagagcatatgggagaatgtacataggttacatgcaaatattgggccattttatacaagggacttgagcattcgtggattttagtgttcatagggaggcctagaataaatcccccatccataccgagggatcactgtgtaaagaaggtggataaaggttataaatggtaattaagaagtgcaattaactggaaaacatagttgtatgagttt

SEQ ID NO: 226664 - DNA, 328 bp, Homo sapiens
ttgctttgggatgcccggggggactgtttctgacatgtggtccccctgtgagcctgtgtgtgcaggtgtgagggagccgtcagctctgtccctctgtgttctccatgtccatgacctcatcccgtctctgtctctcatcctggcttctaacaaccttttcacagctgattcctttggagcatttgtcaccgcttcagggccaagaaccccaatcctccccctgctgcttgatttaatttctgaaatggacagcacatcagtaggggcacccacggggcgggagcagagctgtccagagacaaaagattaaatcactgccatctttgga

SEQ ID NO: 226665 - DNA, 480 bp, Homo sapiens
cagtgtagtaacatagaaacaaagatgattaagacatagttactgagaccagacgtggttactcacacctgtgatcccatcacttgggaggctaaggcaggtggatggcttaagccgaggagtttgagaccagcctgagcaacaaagcaatatctcatttctacaacaaatacaaaagaaaaaccagctgggcatggtggcacacacctgtaattccagctacattttggaggctgaggtgggaggatgcctgaggccaggagatgggggctacagtgagttgtgttcataccctgcactccagcctgggcaacagagcaagagcttgtctcaaaaaaaaaaaaaaaaaaaaaaaaaaaaaaggagatatacctaatgtaaatgacaagttactgggtgcaacacaccaacatggcacatgtatacgtatgtaacaaacctgcacgttgtgcacatgtaccctaaaacttaaagtatatt

SEQ ID NO: 226666 - DNA, 698 bp, Homo sapiens
tagaggatccccgtgggttgaccgtggtttctggtacaagcggcgagtccaaggggctaagggcttccagcaccaacggatgaccaacggggccatgaacgtggagattggaaacccgacctacaagatgtacgaaggcggagagcctgatgatgtgggaggcctactggacgcgtgactttgcctggacccttggcctggcctgggatctgcagccctccagctggcatgagttgcgagggctgggggagccagttatttgggctggcatggggtggggacacctcagttctcctctgcctcctcaccatggctgcctgtcacaggccacggcccctccccttggttcagcagtgagaggtttatctgggagtttatctggctcctgctgtggccattgtcatcaacactgctgtgcctgccgtcatcaataacttgttagtaaaaccttcatagggttcacagctcagaactgcacagcgttcacaacttagaatctgtggtgtttcttcagtgcccattagagcctcaggctgtctctggctcctagaaagtcattctaccatctgttttgttcactgctgtatcctcagtgcctagagcagcagttgatacatggtaggtgctcagtaaatatttgataaatgaatgggaacctacattctaagaaatggatcgtcacccaccaaccacaaaaa

SEQ ID NO: 226667 - DNA, 1082 bp, Homo sapiens
tctccacaaccaggaacttccgtcaagcccaggtgagaggtgccaggaggctgcctgggtcctcaagggggatatatgtccaaatggccttaccacaaggccccttcgccctcaaagttctgctcctcccgggggcttcttaggatctaaaaggatcagtcctagccatctcgtcagccatctcagcaagggctgacggggcggaacagcaaagcagaggcgggtcctgagagcgtggagcctgaagcccggcgccagagggagaccaagagggtgagatgcggctggaacccagccagagcggagactgaagcctgaactaggggccgggcctcaggcctaggaactagccacgagctgaaaaggaggcggatggcccggacagaagaggcggggctttcagaccagagggcggagccaagagctgaaaagggtggtgatttggtccagaagaggaagaacttaggctccggaggcagagccaaaggctgaaggggactactccctaggacagaggccgggaggtatcgggccgactaagccgagtggcgcggaggagcggagccttcagccccgcggctgggccgagcccgaaggtggcgtcggtgtcggggagccgccgcgtgcaccggccgtcctccctgggccgcatcgcggtggtggtggaccagggctcgggcttcaccaaggcgggcttcgcgggcgagaaccagccgcgcatagtgctgaagagctctagcctggtgcccagctgggaccggccggtgctgcccggagcgccgggctgcgagctggcgggcggcgtggcgcgggcgcaccccatcaagcacggcgtggtggcggactgggaggcgctggaagggctgtgggagcgcctgctggtgggcggcctgcgggtgtgcccagagcagtggcccgtgctggtgagcgactcgccgttggcgccgcccgcgggccgcgaaagggtggcggagctgctgttcgagaccctggcagtgcccgcgtgccacatggctagcaccgcgttgctggcgctctgctccaccggcgcgttcagcgggctggccgtggaggcgggcgcg

SEQ ID NO: 226668 - DNA, 1196 bp, Homo sapiens
tctccacaaccaggaacttccgtcaagcccaggtgagaggtgccaggaggctgcctgggtcctcaagggggatatatgtccaaatggccttaccacaaggccccttcgccctcaaagttctgctcctcccgggggcttcttaggatctaaaaggatcagtcctagccatctcgtcagccatctcagcaagggctgacggggcggaacagcaaagcagaggcgggtcctgagagcgtggagcctgaagcccggcgccagagggagaccaagagggtgagatgcggctggaacccagccagagcggagactgaagcctgaactaggggccgggcctcaggcctaggaactagccacgagctgaaaaggaggcggatggcccggacagaagaggcggggctttcagaccagagggcggagccaagagctgaaaagggtggtgatttggtccagaagaggaagaacttaggctccggaggcagagccaaaggctgaaggggactactccctaggacagaggccgggaggtatcgggccgactaagccgagtggcgcggaggagcggagccttcagccccgcggctgggccgagcccgaaggtggcgtcggtgtcggggagccgccgcgtgcaccggccgtcctccctgggccgcatcgcggtggtggtggaccagggctcgggcttcaccaaggcgggcttcgcgggcgagaaccagccgcgcatagtgctgaagagctctagcctggtgcccagctgggaccggccggtgctgcccggagcgccgggctgcgagctggcgggcggctccatggtggcctccctgcactccttccagcgccgctggataactcgggccatgtaccaggagtgtggctccaggctgctgtacgatgtgttcaactgagtcaggctggactggggggggtggcactgcgttgggggacagctctctatctaaagagtcaagtgtttggagctggcagggtcctcctggaggttggagctgactggatgggtcacccccataccctttctgggccaggagaaggtatttgggacccatgggaccctcattttgaactgcagtttgaatctccccaaccactgccagttcagagaatgccagtccagctgcctacccacagggccctactttatggcaataaaggtgatgccccacttgtgtccatgccacaga

SEQ ID NO: 226669 - DNA, 567 bp, Homo sapiens
cggacacgcctggcagacaccgtggtgctagccggcggctccacactgtttcctggcttcgccgagcgcctggacaaggagctggaggcgcagtgccggcggcacggctacgcggccctgcggccccacctggtggccaagcatgggcgtggcatggctgtgtggaccggcggctccatggtggcctccctgcactccttccagcgccgctggataactcgggccatgtaccaggagtgtggctccaggctgctgtacgatgtgttcaactgagtcaggctggactggggggggtggcactgcgttgggggacagctctctatctaaagagtcaagtgtttggagctggcagggtcctcctggaggttggagctgactggatgggtcacccccataccctttctgggccaggagaaggtatttgggacccatgggaccctcattttgaactgcagtttgaatctccccaaccactgccagttcagagaatgccagtccagctgcctacccacagggccctactttatggcaataaaggtgatgccccacttgtgtccatgccacaga

SEQ ID NO: 226670 - DNA, 484 bp, Homo sapiens
cactgaaagcagagcatggacagagggaggacagacagaatcgagccatctcaagaagaataagcttgaatgcccagaggcagcatggtgctgggaagtgctaagtccagaaatcgagtttttcaagtgataaacggtaattggttgtgccttccctttgcatgtaaactttgctaacacttcttagcactgtgaactctactgcaaacttaactgctttgcagagacctgaaaagagctcagtcaggtgaaaaattcaaaagagatgaacactgggaagagtctgtaataggacactagcttgtacgtatgtgttctttggttttgatccttatactaaacccttttctattctttctgatcccccatttccacatacacactttttcatggtctcacctcacactcggttaagtctttatttttctccctttctttctttccttttttttttttttttttttggtaagatactctgagtata

SEQ ID NO: 226671 - DNA, 273 bp, Homo sapiens
ggagaggaatgttggtgcaccttttatattttttttttcaaggatctagacagaaactggagtgtggtagcacaagaaggttaagttccaatactgatggacattacaatgttaactttccccaggctcaaggttttttctatcgttcaacttgtgggaaagtatgtgagtctgtcctctggggcttgaaagattcttaattacagatgaaaactaagaacagaaggatttgggaaacccagaagcaaaggtgttagggtctcaatagtcctt

SEQ ID NO: 226672 - DNA, 1168 bp, Homo sapiens
gcgatagtttgctcagaatgatggtttcatccatgtccctacaaaggacttgaactcatccttttttatggctgtatagtattcaaacatggaatatattttaagatagatataagactaaagcaaaggtaaggaaaggatggaagaataacgtgtgtaaatgatatatgttctgaaaaatagaaataaagccaataaaaatgggagcagaatggaggaaggcagataaaaaggggagaatagaatcagactgtcacaaagttaataaataattgggagtcaaagaattcattattgaaagctgacaaaccagatagtaggagagtaagaacaaaagggggctaaggacattataaaaagtattagtgtaaagataaccactagaacaaaaatgcggactcccctaaatagaaaaacaggcaaagaaaacaaatcacagagtgaatttaacataatagaaacagtaaaaataatataaaataatatgacaggcttaagactaaatatatcagtaatataaatatataaatgagctgaaaatcacctaataaaaggaaaatattttcagattgactttcaagcaaaaccaattcattgctctgtagaagagacatacctaaaacaaaaggattcagaaaggataaaactagtaggatgacttaaaggcatacaaagatgctcttagcagtgttaattataagacccaaataactaccaaaatgctcttcagaagtagaatgaataaacaaagtgtggtgtattcatacagtggaatactacgtatataatgagagtatgaatatgaattttacaaaacaacatggatgaatctcatagtaaggagtgaaagaggcatgaaacaagagtgcatcctatatgattccatttatatgaaattttaaaagaggcaggaccaatctatggtgatagtaatccgtatcatggtcacccttatggaagggtaatgactggaagggaagccaaaggggctttcagagcactagcgatgctctattttttatctgggtgctggttgcatgattttgttaactttgtgaaaattctttaagctggatacttaagagttgtgttcctttctgtatctacgttacattttaataaaaggtttacatttaaaaatataaactatttacaagcagaagatgag

SEQ ID NO: 226673 - DNA, 470 bp, Homo sapiens
cccttttggagggagacctatgtcaggagactgaattcttcattggctgcaacccaagcccctccctaccctgctagagagataaatggtggaaatggggaattgaatggagagctgaggggaccgggatggggagaggggagggaggaggctgggctgataagtaagaattgcagggactaaggacattttccaagaaatgttctcctaactttaatgtagtttaggtaacaaaataatatatgaagtatcaatattgacatcctcaaagaggaggaagctgctcatcagagagctagtataactgcacgaggctgcacagcagagacaggatcaaagcaggtccagtgaaaactctataggcctccactacagacccacttcagaaatccacattctagaatgttccagaaccgatcatgtaacacaggtgccaaagtacaactgaaaaataaactttaatgtcttga

SEQ ID NO: 226674 - DNA, 568 bp, Homo sapiens
accctcttctgccttttatctcacgagcactcccgtgccctccccccaactcactgtgcgttctgaaactcatcgtctgttgtcagcaaaattcctgtgattccatcttctcggaataggaagttccctctgccttctggccttactgaagcccactcagtaccctgcagccctcttaagtggaatctttttcctcccactccccatgtgcggtgagcctagagcaggggtgtgtccttgcctcttcctcaacctcctcacttggaacagtctgtcttcacctctacccctcacagccaggcaggcatatctcttgttactggtgaaggcactgcctccaaagtctggattgaggcatccctccctcaggccaggccctccctcatgtggcgcttccctgtgctcttcaaaccaccaggccctccaagctcctggcccagccccttttcgccaaccatcagcccctctttccttgctttcctcccagcccagtttagaactcttggtcatctgcatgcacttcccatagtgccctccatccttcgtttatgctcacctggcaaggtct

SEQ ID NO: 226675 - DNA, 491 bp, Homo sapiens
atgcatgaagatgaaacatcaatgaactcatctctaaataaatgtatcggtaaaattctggttcatgccaggcacaaaagtagcctaatcatatacacattatttaactcacagaccatctgaaggggctcgagaatatcactttgagaaacactcttcctaaaggatactgacagaggagttgtcaataactgagaaaaacacctccattttagatttgtaacatcagtaaccaattaagctgggagtaagctatctggttaaatagccatctctttattgttattcatggggaaaatattacttctttccacttttaagaacgacaaatccattacattttcaggttgtgcctttctaccactgagattgatttgttgatctctctaatcgtccttattggtatcaactttcatgtaaataatagtcaagtcttaaaagcttgtatacatggataagtaaataaacaactccacactgagatgcgatga

SEQ ID NO: 226676 - DNA, 345 bp, Homo sapiens
acaccccacctttcctcatctgggctgcaggtccaggacatcctgtcaaggatcagtggggccaaaggtgggaagataatggcccttgtgtctcaagcagaagaaacagttttccagttttgttttgttatgcttttgcttttttaggaagaatatggaaggcatttccttttagaaagatgggaccacttaggatggaagatggacagtagggttttaaatatcttgtccaaaaggacagcttccaactcttgttttttaatccctttctttcttacaagtaattctgcaatggaaaaagtggcatctagagaaaattagtcagttggacaagaggttgttgaa

SEQ ID NO: 226677 - DNA, 415 bp, Homo sapiens
gctgtgctcgctaccctctcgctgtctacagtagaaattccccatcaccacggacaccagccacctggcccggcagtccacgctctcagcctcatccctccaacgctccctccttcgggtcccatctaccacaaccaccaaacacccatgccacttcaagccacctcccccacgcacatgtggctccctctgcctccttcccttgtctcttaggggccagctgagcagcagctttgaggcaccttctgctgagcacccccccaacagtcaggcagcccctttcctggcaccccagcatggctctcttttccctgcccactgggaggagctccttggggacaggggccaagtctgactaattctcagatctccagcacccagcacagggcctggcccagctccaaagctggctgga

SEQ ID NO: 226678 - DNA, 368 bp, Homo sapiens
agttttgtttttaaaactttgaagaatatattggaaaaacataccaaaggatttactttgagaactttctaaactgaaatagacttctgggaaagaactattgttctcttcttcctgtttatttatgttattactcttcttcaaaagggataacagtatctcctttatatccacaaaagcagtcaaatcctcccttgaagggactctgtattcgggtagtcctgaaatatctcttgctagatttttgctccaatgtgataattgtaatataaaaaattcttttggtgtattttgtttattatttggtattttaagagccagataaatgtccaacttttaataaaatgtgttaaacatagaaatgtgta

SEQ ID NO: 226679 - DNA, 319 bp, Homo sapiens
ttgttggtattctcccctgttggttctaagtgttactgttgtgtgaccatatggcaccagaactgagcgtgtgtgtgtgttgaaggaaagaggaagcatttcaggtcaccatgattgctgattagtaagaagggcactttctttccatttccttgaatgagtgcacactgacagttcagaaggtcattgacactgaggtgggaccttagtttcccacctcacaggaggcatcccctggaggcttgtttattgtttgcgtacgagcacttgaggagggaatgcctggtgctgccattgcagagccaaatgcaggggccta

SEQ ID NO: 226680 - DNA, 471 bp, Homo sapiens
gactagactcttccactgactcagaaaaagaaagcagagaaggagagaagccagtgctgttcatactcgggagaggaaaaatgtgtttgcccctcccaggtacacaaagagagagcccgaaatcaacatccgcggttgccctgagatagcatcacccatcgttccgccggtgcgccctccctgagatggtggcgtgtgttgtttgggctgtttttcatagccgccgcagctgggaattcaagatgctatacttaggcagaagtccatgaaggaattaattgatatgagccagaagttgattgccatttaagtactcagcctccaccattgccaagtttccctctttgcagaaagaactgagcttgcctgcaaactggctcattcaggatgtgagcacaagatggaattcaacctttaatatgctgcaacacctgcttggaaataaaggggctctgtgcttttccccccaaa

SEQ ID NO: 226681 - DNA, 397 bp, Homo sapiens
atggaaaggatgaggagttgatagcgattacattgttgtgatggttgtaacatcaggctacacttgactagggaatataaatgttagtgagaaaagatttgcacaaagaaaatgctaataaaagttgacataaagtgcttgtgctgtggtgggcaccatggggcacaataatgaaacttcacacatccctattaccattccctttctacagagaaggaaaccaagactcagggaagaagtaactggcccagagttatactttgattacataatgcgacatttgtccaaatgaatactggagcccagagtagggggggtaacccagaaaaataaaaccgccactggttccagcagtgaattgggccaaattgcaaataaatgtggtataaaataaaga

SEQ ID NO: 226682 - DNA, 490 bp, Homo sapiens
aagtttctgtgaacagcccggaagtgtattcagaattgaatgggtgagcacacacacctgctggctaacagaagccataacttatcatggtctccaagagatccctgagcccagtctgttcagaatcatgatagaaaggaatgcttgattgatattcagctattcagtttgttaaaatacatttatgaaagaacaagggacactttatttagcagctatgcttgtaataaattacactaatgcaaaatatattgccagtgatcttttcccccttaccttaacagtacttttatttgtactttgctgaaagtgactaaattacatatatttacaattcatccatgatagcttttccgtgagactttaatccctcccttttgtgaaaatgaaataatgaagcttaaactatttaaaataagaatgttattcctccatttatttgggctttacttttccttcttgagaaagaaatatataaaatcataggact

SEQ ID NO: 226683 - DNA, 638 bp, Homo sapiens
ataaaatttattgctaagttattttctttagttgtacattttatgtctggtatattttattttgaatgctatgaaagctggtatgaaatgtgggaagctcagtgtatcagtttatgatgtctaatttgaatatttgtttcatttttaattggcctctgttaatatgaacattagcttattttatccatttaatactattatcattcacagttctgcatgctaaaatgtttgaatcagagtgcctttgtttttattttaagacttttgcctgcatttcataaccagccatgcttatgcagttaaagttcaaagtttaaaattcctatgcatgctttccttccctatgttgagatgaaatgctgtaatttactctttgatatagatgtactttacccatatttgtcttggatgactacattttactcagtttttcttgtacagtacataaaccaaccattttctgaccaaattcctgcatttcctatgtactgacctatattttattttgtttttgttccccaattccttatttttttcttctgcattgctgtttcccttccccatttcatccttttccctgtgtgttcaccttccctttccttgtcttttcccaaatgcccattcccttccctgtctta

SEQ ID NO: 226684 - DNA, 520 bp, Homo sapiens
agcttggtaactcattaccttgtactggttctccttttttcctcctccctttgcttttctctcactgttgcttccttgagagagtactccctacttccttggaattacctttaactctgtcttttagagattccaatttgaggtagataatttttctcacctatgaggttggcaaaaagctaaaaatatgactaatctattagtgaggctgtagagaatcagacactattatgtattagagcaaactaatttctctatttgttaaaacaaagactggaaactgctcaaatgttcatcactaggtatcttgttgaaaaagctaaggaatgtttatataatggaggacttcacatacataaaaaaaagaccttttatatgttgctatggagtgatcctcaggacttattaagtgaaaaaaatcagggtaaagaaacatgtaagaaaaggggataatagatatagataaacagatataaatacataaatatagatacacatacaaatatgctcatatttttct

SEQ ID NO: 226685 - DNA, 226 bp, Homo sapiens
ccgaaaacatggctaatacacatcttccatatgataataaaatgttataaatcttactctgcctcagaaaagcttttactaaaagattatctatggtaatcaatttgagttcatggaaaatttcaatattccacataattcagacagttaaatgtcaatgaaatctcaaaacatttgaataagataaagtcttcttagtgaagaattttatattaccggtagttag

SEQ ID NO: 226686 - DNA, 659 bp, Homo sapiens
agatagtgaatacagttttattctacttcttgaaataggttcttcaggagctgtttataaattgagttgtggttaaatatatgagggagctatttgaagaaatccctttacaaaacattttctctactaaaaatgaagttaatctttgcataacttttgttattaaaatgcaaattttcgcatggccctggcatgctgtataaagaaagcacatctgcacatgaggcttagttctgcctttgcgtgtggtcttcagaggaagtaaaaagtgattctgaagtataagataccaaagactcaggaaaagatcacaagccctttggctccctccttggctggagaagagtgttgtttttagcctggagggggacagaggggctgaggaaggagcagcagggccaagaggggagctcagagaggaactgtccttcctggaggctgatcttactcacagaccagcagggggcgctgctggtgagccagttttgtggctgttgccagagtgaaattttaaaatatgatctatggctgggcacggtagctcatgcctgtaatcccaacacttttgggaggctgaggtgcgtggatcacctgaggtcaggagttcaaaaccagcctggccaacattgcgaaaccctagtctctactaaagatacaaa

SEQ ID NO: 226687 - DNA, 413 bp, Homo sapiens
caggaaacatgatagaatctagtgtttcggtaatatgttatctacaatctccagttttctacaaaaatattagacatggaattaaacagaagagtgtgatctataccccaaaaaaggcaatcagtagaagctgacttagctcagatttgaatttagcaaagacttcaaagcagctattttaattatattcaaagaattaaaggaaaatatggtatcagtgaatggaaaaatgttctgagcagggaaatggtaaccattaaaaaaaaaaaaaaactggaaatcctagagctgaaaagtacagttactgaaatttaaaaaattgccaggtgagctcaaaagcagtttggcattgtcagaagaaaggaacagcaaacctgaacacccagtagaaattgtcctgtatgaggaataga

SEQ ID NO: 226688 - DNA, 506 bp, Homo sapiens
ctatccattggcctctcaataatagagagctgtgttgacatctctccctttaatggtgattgtccatttcctctttttttttttgcaattttataactttatttgatgtatttgacgatcagcgattagttctcatccacatcgactgtctttagatttttgaaagtggtaacaggtatgtaggtaaccaaaatatagagcttatttggtgaatcttcatcctcattacgttttctggacaaccgcacacggataccgtgtgggtcataccttattcctttggcccagacctctttgttgcacctggtatcaatgtgcacatctggagttcccatctccttcatggcaaattgcagaatctctttgagttcccgaggggcacgcttcttaagcccactccatggatgcatttgtgaatattgatggtgtattctcgggtcaccacctcgttgatggcagaatggccctttttcttctcatcacccttctttgcaggagccattctc

SEQ ID NO: 226689 - DNA, 680 bp, Homo sapiens
tgaaacggagtttcactcttgttgcccaggctggactgcaatgtcgcaatctcggctcactgtaacctccctctcccaggttcaagcgatgattctcctgcctcagcctcagcctccccagtagctgggattacaggtgcctgccaccacgcccagctaagttttgtatttttagtagagacggggtttcaccccgttggccaggctggtctcgaacctcaggcaatccacccgcctcggcctcacaaagtgctgggattacaggtgtgagccaccgcatccggcccagaagcattttttaaaacatagtttctcacaaaactgaaacatacaattgccctatgacctactcaaaccaagtctaagtatataaccatgaaagataaaagagtaagaccacaaaaagacttgtataagactgttcatagtaactaactgcaaacagcccaggtgaccttcaacagtgaatagattaattatggtatacacatacagtggaaaactacacactaataaaaagaaaggaactactgatacacgcaacaaagacgaaactcaaaaacattatgctgagtgggaaaaaaaagccttacccagaaaaatacacacagtactataggctctatgggatcccatttaatgttaagttctaaaacaggcaactctgtaacttagggcat

SEQ ID NO: 226690 - DNA, 383 bp, Homo sapiens
tgcttgcttcgcgccccccacccgcccggggaccgcgactaagtccccgacgcagctcttcccttttcctgaataccctgggactctgctcccgagttccagctccgaggactcaaagacagtctccgttcctcactcttcaaagaccacctccttttctagaggtgggctccccgaccttgcgcttctagagctgcaggagcggcgctgcacaggtctgacaagcccagctcattggcgggtatctgagccatcagtctgaaagacatttggggaaaattcatagaacatagaaattcatattatacatattcatattatacattcatattatacattgtgtatattatataatatatatatagtccataaattaaaaaaaa

SEQ ID NO: 226691 - DNA, 546 bp, Homo sapiens
tgctccacaagggagtcccacttcagatgtggtgctgggcatggtcactcctgctggatgtttagaaggtggaaagcaaggacctagggaaataccaggtacaccctttccaccctcatccagagcaggacaaagaggccaggcgttgtcaggagcccaggtctccagctggagggaacgtcaaccctgcagtgggagcaggggcccattgcacatcctaggcagagatggtaacgtaggcaccacaggtatgcagggattggtacccctccctggcatcagaaagaagccaaacaaggagctttctgcagaatgaaaccttctttcctttcagaagcactgctgactgtttggtggttgccactggggcagtgagcctttggtccattctgaggttgggctggtttctcctcttggccctcccctacagaccataaaggaaatcagcaagaagtccccagcaaacatccacagatggccctgccacatccccctctccgagaaacacccaagaatgatcaataaacattaaaaaaaaaaaggtac

SEQ ID NO: 226692 - DNA, 103 bp, Homo sapiens
aatgggaacgtctgaagacatacttcataaaagaggttatctaagtggtcaataagcatatgaaaggtgctcaaactcatatccatcggggaaacaaatgcaa

SEQ ID NO: 226693 - DNA, 192 bp, Homo sapiens
gataagatactcaacatcactaaccattaaggaaatacaaaccaaaactgcaatgaggcgcaacactttggtggatcacctgaggtcaagagttggagaccagcctggccgacacggtgaaaccccgtctctactaaaaatacaaaaattagctgggcgtgatggtacgtgcgtatagtcccagctacttgg

SEQ ID NO: 226694 - DNA, 573 bp, Homo sapiens
  misc_feature (569)..(569): n is a, c, g, or t
aagggtacttgataattttttgagatccgctcagattgaagagtgacaggaagagttaattagagcagttttaaggataaatttgattataagcacagggaggaagcaagagtgtaatttgatcatgaatggaaacattcgagctcttacccagtactaattaaaaagaaaaatagtaattactgagtagctattatatgcccatgatagggggcactttgtagaggcttaggatgtatcagtggaccaaataggcatggctgtccccagacagtttacatttttaacttgaggtgacaaatattaaatataaaataaacattaaataatatgagttttagaaaatgagaagttctgtgacacaaagctaaagcagaaccagggtaaaggtgatgcaggattagtttgttttaaagttagaatttagtgtacaaaataaggtaaaaatgacttattaagtagacagacctactaacataatctgtaccagaagagagaaaacaaagaaaagaagcctcacatttgtgggtatgatatttatgctggacacataaagcaagttacagccncaaa

SEQ ID NO: 226695 - DNA, 150 bp, Homo sapiens
aggaagaatccctaaaaaatatctttccttccagaggcttcaagaaacctttgcctggaaatattcagcctcagagcacagtgctatgtcacccaggaaatagctatcatgggaaaattcaaggaaaatattcctgctcaaggaaaaaaa

SEQ ID NO: 226696 - DNA, 569 bp, Homo sapiens
tatatatgtgtatatatatatacacatatatacgtatatgtgtatatatatacacacatatacgtatatatgtgtatatatatatacacatatatacgtatatatatgtgtgtatatatatataggaatccgtgggattttacttcagtgacataaattcatttgaagtagatattaaaatacattgtataaatatttagtatgacatccaacttttctctaacaagttaataaaaattatcctctataagttataaaacaaactaagctttttacatttattagaaatttgaacactggttatttaatattaagtaattattaaatttttttaatgtgaacattactgtggtcatttttaaaaaatcatcttatatagatacagactgaaatatttacagaataatataacatctggaatttgcttcaaataaccctggtggagtaaatgagggaaaagatggaagaagaaagactggctgtgaggggaagatgaggaatggacactggggttcattatactcttctactttagggtatatctgaaattccccataataaaaactttt

SEQ ID NO: 226697 - DNA, 110 bp, Homo sapiens
aacattttcatcaccctaaaaagaaaacctttgacccattagcagtcattccctattctcattccctcccagcccctggcagccatgaatttactttctgtctatagatt

SEQ ID NO: 226698 - DNA, 227 bp, Homo sapiens
acagctgagaatggagaatttgaaaaagaattaattttatcaagttatcctatgtatatttttatttatgtgaaaaaggtgaagatttttaagtcaagtaaacaggaagtgttatacaacagtttaaatatttagagaacatatcattatttttgaaaatccaagtagaagtctaatggtattgtcagaacaccactgcttatctcaaaatgagacatggacttctg

SEQ ID NO: 226699 - DNA, 228 bp, Homo sapiens
ctctatttgaggggtggtatttgtgcctggtggtgttatatgctttatatccaaagccatattgggacatgcgaaggtttctttttttaaaaaaaatcaaatgtaactccataattgtatataatgcttatgggctcgcaccatagtgtttggactagattgcagagcacattctatgtttttaaagtactacaaagtgagttcacttaacatgagccttatgtgagt

SEQ ID NO: 226700 - DNA, 447 bp, Homo sapiens
ctccatagctgtcacttaaaggcatttacaatgtaattcgtggtcggcagggcacaatgttttcagcactttgggaggccaagacgggaggatcgcttgagtccaggaggtcaagaccaccatgggtaacataacaagacccagtctccacaaaaaaaaaataaaaaattagcctagagcagtgatttgcacctgtaatcgcagctactaggaagaccgaggcaagaggatcacttgaacttaggaggctgaggctgcaatgagccatgattgcatcactgcactccagactgagtgacaagagcaggactgtgtctcaaaataataattaataacccgtctcaaaataataataataataataatttgaggtcaatttaaaatatatttttttatgatggaaacactaaaaaatatagatcacctatattatgtatcaaaataaca

SEQ ID NO: 226701 - DNA, 447 bp, Homo sapiens
cccaaaccccttgtagtcactgatgattttcattgggctatagatgggaaggcaccagtcataaatattttctatgaatgagtgttctagatattttttacccaaagatgtagcatatcagtgggtcactattgaaaacatgtttggaatgaagcaggaaaataagtcaaaagatctcccctcagttcctaagcaactttgttgtaaaaataactgtgaaaactgggcttaaatgaaacatacattcgaatgcctggagtaagaattattgatagcccagacttagtatcccccccacctttccaagtccttaaagcattggctttctactcaggaggctgaggcaggagaatcacttgaaccagggagtcgcaggttgcggtgagccgagatcatgccactgcattccagcctggcaacagagcgagactctgtctcaaaaaaaaa

SEQ ID NO: 226702 - DNA, 422 bp, Homo sapiens
gatagaagagtatgtgaactaaataatgcagtggtaactgcatgaatcaaattctaagtggtatgacaaatggtaataactgatgagtactccccactcttagcatcataaagatgttgtatctttaaccaaattatgaatgactgaaacaggattatacagtggagaatcaatgtatattttttaaggacaaaattatttttgtagatttaaaatattacagtaattcatcttggcattatgctagatatccatacagaaaaaagactctggtgtcaaataaatgactccaaattcagttgtgctacttagtagtactcatatgagttttgtaattctcattttttctctacttcgtaatgagactaataatgcctttgcagactgaagttaaataaagctatctctatttgcagatgaca

SEQ ID NO: 226703 - DNA, 387 bp, Homo sapiens
aagccaagcccagggcacctggcgcctgtctgctggtccgtggttctctgcaccctggtgacaggatactcacagttctgtgacgcagcctccctgggccgaggtttcctcacctgtagttggcgggcaataatggtccccacctccgtgggcttgttgtgaagattaaattccttaataaatgtgaaatacttagaacaatgcctggtacatggccagtgccatataaaaaaaaacagttgtaatatttattatcactgggctgggcacggtggctcccgcctgtaatcccagcactttgggaggccaaggcgggcagatcgcttgagcccaggagttcgagaccagcctgggcaacatggcgagaccccgtctctacaaaaaaaa

SEQ ID NO: 226704 - DNA, 434 bp, Homo sapiens
tgttgctttttgtaggtagattattgcatatagagttgagaaaatggataaattttgctttatttattagatacctctgaaaagttttatgataaaattttttgcaagtaaagttacttttctgaatttgtaagaggaattcatatttttaataacctttctgtgactttttgtgtaaagccagtaagtatcttatgcagctattctcaaagtgcggccagaccactaagagttcctgatacctttttagtgagtcggccaggtcacagctctttccatagtaataccagtacattatttgttttcatcactgtgttgacggtggcactgatactataaaagaaatgataggtaaaactgctgcagcttatcctgaataaagacagcaccaagctgcatcagaagccattatattcatcactgccacatatgtg

SEQ ID NO: 226705 - DNA, 631 bp, Homo sapiens
gagagcttttgctaaagtggttctgggatgggatgcaggtcactgagtccgtggaaactcagaatgttgagaagctgagcacagatccagatgccctgcccccatcagttctgcttgcaccaggtaaatgggttgtttagacagtgaccgctccaaaattcttagcatttataatcagtttacacacttagtgtttgaaatatgttatataaaatattttatcaaaaggggtagagggtggagagaaacacgtaacttgagaaatattttttacaaatgtccacttacccaggaaaatgtgtataataaagatgacatatgtatcaaaactctcagtgtctcattccttatagatattcaatagccattactttttcttctctgtgggcttaaaagctggtagaaacataacaagacaaatcagaatgaaagaaaagagccccaaattcccaattcgaaatccaaatcaataaatctaaaaacattgcagtattgtaatttcttatgcttgcttccaaggctctgttcaatcacccggaaccaaatttctcttaagactggtgcctgaagagaaacaagctcaaataatgattctggagaactttcgcttttgccctgaccatcagccagc

SEQ ID NO: 226706 - DNA, 536 bp, Homo sapiens
cctttttaaaaatctggattgacagaaaactctcaaataacaatacttcccctgacccactcatgcctgctggcagcccatcaatgcagcagctgttgaacataaaaacaatacttgggctaaggtaatagagacagacttctaaaaggaatttgctgggcgatctaaaatgaaattcacattgttccaggcttgacctgagatagaaatcaggagtctgttccctgatatgacaaagccaaggcaccagagccacctctttttaggatcgacgccaatgagtgtgagcacatcgctcaagccaaatggcacaggaagtccagttctgtggacacattctgcccacctgctgaactgtgactgggtaggatggagtgtgaaacattgagagaggggtaggctgaggtggtgaggtgggaaagagaccatattctaaaaggaccatttttctgacaagtgggagctttgtttgttcttgtctgtgtgtgatttcttttttatttatttatttattttttttgcatttttattgtaca

SEQ ID NO: 226707 - DNA, 353 bp, Homo sapiens
atgggatattctgtaaccattaaataatgttgtagaataatatttaacaaaatagggccctagcacggttgctcacgcctgtaatcccagcactttttgggaggccaaggctggcagatcatgagatcaggagatcaagaccatcctggctaacatggtgaaaccccatttctactaaaaatacaaaaacaaaattagccgggcatggtggcaggcgcctgtagtcccagctactcaggaggctgacgcagaagaatggcgtgaacccgggaggcagagcttgcagtgagtcaagatggcgccactgcactccagcctgggtgacagaacaagactctgtctcaaaaaaaaaa

SEQ ID NO: 226708 - DNA, 372 bp, Homo sapiens
agcaagtaagaggagtcagagcttatggagggagggtgtgtgtgtgttgtgtgtgttgtgtgtgtgtgtgtgtgtgtaaggaaaagtagaagccaaatgtgagctcttggtttggtggctctgatcagctgtggaaatctatgtttcaaaatggtagaaagaggaaatcatcacttttttttttttggagagggagtctctgtcaccaggctggagtgcagtggcacaatctcggctcactgcaatctccgtctcccagctactcgggaagctgaggcaggagagtcgcttgaactcaggaggcggaggttgtggtgagccaagatcacgccattgcactcacgcctgtcaacaagagcgaaactccggtcc

SEQ ID NO: 226709 - DNA, 264 bp, Homo sapiens
caattgtgagaatcctggaaacaggaaactttacttgtttccaggtattttttacctgtcattttaactagtttaagcctaaaaatagtctttgcatattactgtccaaagctaggagttgaaagaaacaggatttgaacccaggtcctctctgacttcaaagataccatcatttccttcattagattcctaccccattgttttcatttgcactgttatatttcacattattttgtgtgtattctcccaccccaccaccctgca

SEQ ID NO: 226710 - DNA, 352 bp, Homo sapiens
cctcccaaagtgctgggattataggtgtgagctatcacaccaggccaatgaatttttgagaatggtttcgttttgctgaccagactgagtgcaatggtgcaatcatgtctcactgcagcctcaacctcctgggttgaagcgatccttcctcctcagcctcccaagtagctgggacaacaggtgtgtcccattagccaccacaccaggctaatgtcatcttaatcctcttctttctcattcttcacacttagtaactcccataagtttacacgtttacacttgctttctcccacagtcccacatttttttgcaagctctgcaagtgttatccagttgttgctgggcatctccc

SEQ ID NO: 226711 - DNA, 281 bp, Homo sapiens
caagtacatgatggcatgtgttgagagctgtgttctctttgttttggttagacatgattcctgccctaagagctaatctcatttggagggaaatgaagggaccaagtacagtattcaccgtccaccagttaggactgaacacatagcccaaggtgtttaagaagaaaaaggccaggcgcggtggcttatgcctgtaatcccagcattttgggaagccgaggcaggcaaatcacctgaggttaggagtttgagaccagcctgaccaacatggtgaaaccccg

SEQ ID NO: 226712 - DNA, 412 bp, Homo sapiens
ctcatctaagcctgatcagctcccaaaggccccatctcccgataccatcacatgggggccatggctctaacatatgaatttgcagggtatataaacactcagtccataataggcagttgttgttttgttttgttggcagcatgaggcttccatgctcaaaaagcaagaagaagaataagggcctctctcccaagctcagtggaggtcatctaaacacatcccagtggctctgactaggccactggctcatctgtgaaacaatcagagttgtcagtggggagcttagtagtctgatcaaacaggttatggccctatatcctggaccaggttgagggaaaactgcacccagggtccccgaggcagggagcagggaaggggtgaatgtaccaaagaaatgcaatgagcttttgcc

SEQ ID NO: 226713 - DNA, 545 bp, Homo sapiens
ctgtcgaatgcaaagagcaggatgtgatgatagtcttgagttaagcttgttttgattaggggaagatgtgttaccacatctgtctcagatgctgaacatagtccctgtgttgcactgatgagctctgttttgtaaagtctctatagttgatttctgttattcttaaggctttaaaaatattgctgaataattttacaaatagttgataaaaaactatttaggctgcatgcctgcctgttagtaatagagaaatgtctccttataataagtaaaggagaccaaataaatttgtatgatatacttttgcattagcttaaaataaaaatataaattatatacagaacgatgagttaccttttttcatgtttttctgcctttattatatgtgctttatttcttaaacttgcatattatcttactttaaatattaaaatacttagcatggctgctgaaggtcttaatttgtcaaaatggattattcttagggactctgtaatggttaattgacaagatgcttcaaataaattagacttaatttattatag

SEQ ID NO: 226714 - DNA, 394 bp, Homo sapiens
agctgtggcgtcgcgtgtgaggcgcgtgcagggtgagtgtgagtggacgcgtgagtgtgtgagtgtgcgcgcttggagcgtgttaggcgagtgcgtgcgcccacccctgcgcccctcctcccgcttacactttgatcttatttgatcggatcgtgaccccagccccgccgggccgacccgaaatgaaaagctctcctcctgcgaagccccctcggggcgctgtgcagcgaggccccttaggcggcggccacgctgtggtccccgaggtcccggagctggccctgcggggcccggcgctcagaagtgatgaattgatcagatagacgaggccgggcttgtccccggccactgattatcgaggcgattctgatctgggcacggccaccggaaaaaa

SEQ ID NO: 226715 - DNA, 556 bp, Homo sapiens
tctaaaatttttctagttttaaaattctacaactaaggcatgggtgtggataatttttaaacctcatatattatgtacaacatccttctactatagttccactacttatgggtactgggaacatatgtaaattatataagctttatgaatcagtccttaatttataaaataaagataatggcactaatattaacctagtggaattgtggtgaaggttaaataaaataaagatttaaaagtacagcacactatctttggctcataataaatcctcaataacaaataacaggcatcaaaatatctcagattcactgacagttaagcacagtccctatctatttatagagcccagactggccatgacttactttgtagagacctgtatgaagtcattcacatagacccttcaccaccccagaagtgagatatacagatatctttcacaatgttcaatgccctaagcaggatggcacctaggatgtttctctcagggaacactcacagtccctcagaccctgctccatcaatctctgagatctagtccataaggattcct

SEQ ID NO: 226716 - DNA, 427 bp, Homo sapiens
tccatccctcaataccattcccaataaagcaaccgctatagactcccagatatgtagccaaattccttctgaggggtcattagcctaaacgcagcatacataaaaacacagcaggcatgaaaagtaatttaaaaaaaacaaatgcccttctaacaccaaacacactggttatcctaataattccatgtctccgaaactcaaattccagccatcaattcaatccacactaaatgacaatcactctcaaaacatatcatatcagttcaaagtaacaattatatatgtccacaataatatccaaagtgccaccaaaaccatgttaatgtcaagttttcctttaactattgtcatcatagagtttctccttttatcatgaagaaatacggaattaaagatatgaaatgaaaaaaaggaacattctggccgg

SEQ ID NO: 226717 - DNA, 370 bp, Homo sapiens
agactgttgatgccacagtgacctgagaaaatggcatcagttccttattttttaatgacaacattcatattttattaaatataacaaagcttcaaactgctatatgcattatttagctttttctgtttacctatttcttattttaaaaatccctatatagtctccaaagtttatatgatcactataacatagggactattggatctctcacggaaagttgatttcagactcatgggtacccactgtgcagtgtgggtaaaatggatttacaaaccattcagagttaggaaatccaacccagaattccacccatgtaatgcataatctaggctttttcttctggctattaaaaaaagaaagaaagaaagaa

SEQ ID NO: 226718 - DNA, 599 bp, Homo sapiens
tccaggtgaaggatcgcggtgtcacctttaggatccctcgcctgaagtcaggactcacctgagcagaatgatggcttctcagtgaatcccacttcccacttgcatttccagagacaagtctggttcctctagattcacacacacataaagaaatagttatccttctccttgcccctgatctcccactgaacaatgcctgggatatgtgggttttggagtgtctatcaggaaggatgtgtggaggatttctcgacccctattattttcctttctgtgtacaaggcatgtgtcggttgctacctgagcagaggtggcagctccatataggctggctaagagaagaaaactgttctcactcagattctataaattactcgcattctcactttaatatcaagtatgatatatattagagtgcatggttttggctagaatcaatttggaaggctgtcaaataaaacacaaaatgggaaaataaatccaaaggaaaattgatgacatgattttactcccattacattccacttaacaaatgcatatgttttacaatatctttaataataattattaaacatagtaaaatacttccaaacttggct

SEQ ID NO: 226719 - DNA, 478 bp, Homo sapiens
agagaggggaatctcactatgttacccagactggtgtcgaactactgggctcaagcaattgtcccgcctcagcatctcaaagtgctgggattacagacgtgaaccatctcgcctggctctgtcatttcttaaagttcaaatgaatgtatgaaatcccccctcaattcttctcaagctagaaatggtgaacaaatttccttagacctcatcacacattattcatatatctctgatgcctagggtatgatttgtgtcatactttttgataatttttatgtgttcatcttatctccccttttgtattataaacttcttgtgaagcagggagtatttcattcatctatttatatggtattctgcataaaacaatgtcgtgcatatacctagtagatacacaattaaatgtatatgcaattgaaaaaacaaacccacaaatacactaataaaatagctgaatctctccttcagatattcaagt

SEQ ID NO: 226720 - DNA, 282 bp, Homo sapiens
catatcccagctatagtcagcaacaacaatgaaatgtaataatccttttcaggaagaccctggcagggctgtcaacccaattaattccagcaaagtaacgtgggctctttcatcaaaagattcttacatacaaacacacacaccttcacaagtgcacatgtgcgcacacatacaacacacgctttgttctgttttgttttgctttctgctaaaatgaatagaaagactctttaaaaaagaaaaaagaaaaagaaaatagctcttggtgaaaagcactcattg

SEQ ID NO: 226721 - DNA, 148 bp, Homo sapiens
gtgcccagcctaaattacttttgaccactgcctcctcccagtcctcttcccagaggtaataattgttattaattcggggcataattgtttatattaggcatctttatatgctaggaactgttagtacaaaatgagagaaaaagaaaaa

SEQ ID NO: 226722 - DNA, 237 bp, Homo sapiens
ctgtaaagagtatgtattttttttggctttgtaaatcttcttagaacataatacattgtcagagatttttttcttttttaaaaaatgacacatattaccctatagtaaaattatataaatctacctgaacttcatttgctccacctttttatttccaagttttaaaaaatgcagcttagcctaagctttattagttatgcaaagtcaaaataatgaaaataaaatgagattaactgg

SEQ ID NO: 226723 - DNA, 357 bp, Homo sapiens
cagtctgggcactgggctcacgggggtgggacagcacatgatcctgcgcccagggagccccaggctggaacaaccacatccaaaagcaaatgctgggcacccggagtcccccatggatggatgagtaaacaaaacatgctggagacacacaatggaatattatgcagccttacaaaggaaggaattctgacatgcactacagtgtggctcaacctcgggctgaaccttcacatggggccaagtgaaagcagccagacacaaaagccacacagtgtgcgactccattcatgtacagtgtccagaaccacatccatagagacagaaagcagttaagtggctgccagaggctgggtgaag

SEQ ID NO: 226724 - DNA, 502 bp, Homo sapiens
tggagatagtgaaaaacagataatttaaaatgaaagtaataatactttttttttgagacggagtcttgctctgttgcccaggctggagagtgcagtggcaccaccttggcttacagcaacctctgcctcctggttcaagtgattctcctgcctcagcctcccaagtagctggggttacaggcacctgccatcatgcctggctaattttcatatttttagtagagatggagtttcgttattttggccaggctggtctcgaacccctgacctcaggtgttccacccacttcggcctcccaaagtgctgggattacaggcgtgagccactgcgcccagcctggaaagtagtaatacttttgatggccctttcaattgtgttcttttcagaagctatcactaaagaaagctgatgttgagttttaggaaactgtttcatttcttacctggaattttaacacttaactgaattaaaccaaccaaccttacctaaacaaagttttctg

SEQ ID NO: 226725 - DNA, 313 bp, Homo sapiens
aagattaaaagcatgctgaacactcagtaaaattagtcaattagcagaatattatcaacaaaaggaactttcctaaggctccagctcttgattactgatctactcatttaatacagacttctaggggagtaatctgtaactatgcatccataattatttctacttaaaataatcctttcatttttatatgtgacttaagactaaaagtttagatttaaacagctcaggaatgaagagttaatcactgtaataatttttttaagtctccataattacaagtactatgtgtggctgtatattttatcttgactac

SEQ ID NO: 226726 - DNA, 405 bp, Homo sapiens
gcttaccaccatgccagacttacatagagacgggggtctcactctactgctcaggctggtctcaaactcctgacttcaagccatccttctgtttcagtgtcccaagcacaagctactgtgcccaccactaaatttatagtaaactgaaaactaactcactcactcactgactccctccctccttccttccttgctttctctctctctctctctctctctctctcctttctttcctttctttctttgcgacagggtctcactttgtcatccaggccgcagtgcagtggcgggatcatggctcattgcagcctcgacctcccaggctcaagtgatcctcctgcctcagcctcctgagtagcgggaactacaggcatgcaccaccatgcctggctgactttaaaaaat

SEQ ID NO: 226727 - DNA, 409 bp, Homo sapiens
gaacaaactccggacacaccatctttaagaactgtaacactcaccacgagggtccatggcttcgttcttgaagtcagagagaccaagaacccaccggaaggaaccaattccggacacactagtagttaatgactgtgagttatgaggcacatgaatctgtgaaattggaaaaagagtatctatttgggttcaaaattatttccgtcaacccctgtggttacttctgactgattttttttcttattaagacatattaatgactttttaactttgtaaacatttaatttcttactttctcatttatttctttttcatttgaagccaccagttttccaaatttcaagtcacctaagcttggcaaggcagaactatctatgatatcatcattaaaaatatactatgcaatata

SEQ ID NO: 226728 - DNA, 722 bp, Homo sapiens
cacagtggctcacgcctgtaattccagcattttgggaggctgaggcgggcaaatcacttgaggccaggagttggagaccagcccggccaacatggtgaaagcccgtctctactaaaaatacaaaaattagccaggcgtggtggcacctgcctgtaatcccagctactcaggaggctaaggtgggagaattgcttgaactcaggagacagaggttgcagtaagccggactgcaccactgcactgcagcctgggcaacagagcaagactccgtctcaaaaaaaataaatagccgggcgcggtggctcacacctgtaatcccagcaatttgggaggccaaggtgggaggatcacgaggtcaggagatcgagaccatcctggctaacacagttaaaaccccgtctctagcaaaaatacaaaaaattagccaggtatggtggcgggcgcctgtagtcccagctactcgggaggctgaggcaggagaatggtgtgaacccaggaggtgaaggttgcagtgagccgagatcgcaccactgcactacagcctgggtgacagagtgagactctatctcaaaaataaataaataaataatacataaaaacaaaagtgaggtcttttcacacatacccttttcacatttaaaatttctcacaaaggtaaggttaaaaattttagcagacccaaatccacatatataagaaattcagcctataatcaacagatt

SEQ ID NO: 226729 - DNA, 223 bp, Homo sapiens
caagcagagagagagagagagagagagagagacagagagagagagacagagacagacagaaagaaagagagaggcagacagacagaaaaagacagagacggacacagagagacagagaaacagagagaaagagagaaagacagagagagcgagagagggagagagagagagaaacagaaaggcagggagagagacagagagagacagacagacagacagacag

SEQ ID NO: 226730 - DNA, 363 bp, Homo sapiens
ttaaaacaatctagagttattgagatccacacactgaagatagtaaatgaatctcctaatagtataaagctcccgcaagcatgctaggtctaggttggggctaactctggaaagaagagagtaaatggacaaaggaatagggagaggatgggaagggatagaaaaggaagccccacctttccaaccctaagaactttcaaagtttagtttttatctctgttctttcaactatagaaatttccattttacctaaagtgaaggaaatcattcagcttataattttgtttttacttagttaactccattattcccaaggaatgagagagagagagagagagagaaagagaaagagaaagagaaaga

SEQ ID NO: 226731 - DNA, 521 bp, Homo sapiens
cagtttctccccaggtggagcagtccctcagtgaggactgtgaacgaatcttcaggaacccccactgtaggagcctcaaactgagccccacgggagatgctctagactgagaacttcccataaatgatacccacggggaacgtttagatttagaggttgcacagaattgctccacatctgggagaccaaaagacagtcctctggaaggtggctggcccaagctccccagtgggggaatcaggatgtcagagagatcctctagaacctgctgttcttgctattgcatgacccctccctggcaccagagcctccctcctggctccctcccctgtcacttgccagcctgtagtggtgcttgctgcagccctccctggttgctttatttatttattttgcaccaacagggttgctgcagactcattcttgcctggtttaaaaagagagagagagagagaggaaaaaaaaaaggagaaatgctttctggctcttttctccacctcagtcttggcagcagcggccgc

SEQ ID NO: 226732 - DNA, 591 bp, Homo sapiens
ggagcaatgttagtagaaaatcaccaagagagagcatgtaaaacaggttttttaagattatatatgcaagtgtaatgtgcatattttgtaaggatataacttatagatcagtgaattttcacaaactgaatatacccctgtaactagtaccctttcaagagagaacattaccagcactccacatgccctcttgtataaagcagatgttcctaactgggtgtccatgggctgcttcagtggttctctggatttccctgaaattgtttaattgtttgcaagagttgtatatgtatacttttttttttttttttttttttgagacgtagtattgctctgttgcccaggctggagtgcagtggcacgatctcggctcactgcaagctccgcctcccaggttcatgctattctcctgcctcagcctcctgagtagctgggactacaggcgcccgccaccatgcgtggctaattttttgtatttttagtggagacggggtttcaccgtgttagccaggatagtcttgatcgcctgacctcgtgatctgcccgcctcggcctcccaagtttatgtatactttttttttttttttccta

SEQ ID NO: 226733 - DNA, 338 bp, Homo sapiens
tttttaaggaaacttattggtaatacagttggttttttaaactaagaacaatgataggccaggtgtggtggctcacatccaaaatgccagcgcttcgggaggccaaggcaggcggatcacttgaggccaggagttcaagaccatcctggccaacatggcaaaaccctgtcactgctaaaaatacaaaaaaattagctgggtgtgctagcacacgcctgtaatcccagctactcaggaaactgaggcacgagaatcatttgaacccaggaggcagggttgcagtgagcctagattgcgccacagtcctccagcctgggcgacagctagattctgtctga

SEQ ID NO: 226734 - DNA, 556 bp, Homo sapiens
agaaattctgggtgaggcctggtcttccgtgttttaacaagtcctccagcaaatcctgatgcatgctgacatttgactaccactatggcaaaatggctttctactagatgcttgtatattgactgtcataaaatcaatgcccctcatcagtgttttatttcggactttctcgcctattcatgggcatgtatttgttctttcaaatgaacataaattccattccattaaaacagtctgtggttccaatggggcattgcaataaattatatattaacattaggataactggcatttttgtgacattaagtgtttatatctgagaatacaaaatgtctttttatttctccatcgttttttttttataaaggtcttctgactttctcgccaaatgtattcataaataatttatagtttgaggtcattatattgagttaagtactttttctattccatttctagatttttgttacccaattagagaaaaaagctattatataaactaaatatttatcttatatgtagccactttattaaattatcttatttattcaagtgg

SEQ ID NO: 226735 - DNA, 669 bp, Homo sapiens
cggccgcagccaccataaagcctgcggcgagattgcgaccggcgccaggtgagtaataggcagcaaaatccagagtatgttggtgcggagtcgcggggggggggaggggcggggtgcgctgcgggggtggcagggcctgagctgagacgggccctggggacctttgaggctggggctcccccgaggactgggagatttccagggcgcgctccttctgcgcagcggctacagcctgaagggggcagctctggatccagcgacaacgcgcggtgtccgcgcctctgagaaggtggtagttggctggttgcgctctcccgaattggggaaaaaagaactcagcctccaaaagggaagaaatgctttgcttttctcttctttctcagtccaaatttgcttacctcctcccttctctccccccgcccccgatttggggaccctgctcagacgtgtgtccagcctctcttactggcgttcctctttttttttttttttttttaatctcctgtgtatctcatttgtatattgtgatgttaatgagtaactcctgtagcgctgatgggcggggggtggaggggatgaacggctcgcagtctctctggattttgctgcctattactcacctggcgccggtcgcaatctcgccgcaggctttatggtggctgcggccgc

SEQ ID NO: 226736 - DNA, 503 bp, Homo sapiens
gtgtttttgtttttgattttgcaatgactttaaatatgtgcaaaagactttaaaagatgtcagttcacacagtactagcagtaacctttctattccacttcagggtggtaaaatgagaatactggaataggagtctgactagttataggttctagtgctagtttctcctacagctaaatgaccctgagtaagtcccacactttctggatttgagtttggtcatctgtcggtgggggaattggactagcccagtgactctcatctaggaatgatcgtacccccgagaagacctctgataatgcggagatattttaggttgtcatcattgagcagagagggagaagagccaatcataattccaagagacagaatcctgaatgttgaaatcctgaaagatgaaaatccctaaagtctaaaatcctcaaaatcacagtcacaaaagactaaaatgttgaaaataataaatgtgggaaaagtactttttttacttctttaaaatatgt

SEQ ID NO: 226737 - DNA, 434 bp, Homo sapiens
cttgacagagaacctggtctggccctacaacctgcctgggctctcgctacgctcctccgtcgcaccaggctctgatggggtagagagagccagggacctagtcccccaccttcccgaaggaacggggtacccgctgtctccagcagcccagccagcaccaagaatctcggctctccgagagcggctgaccttggccgccggatctttggatttgtgagggtcacagtgcaccacaccatccctccctgcaccgggtggccctgccgcagtgtccacgcctcgtcctcctgctcggctccgccctattttcgccaagccaatcctggaaggttgactctgggccaggaacggagctgcagtccctgagcgccctggtttcaaggcgcctcccaggtcaagaatccttcgaataaatcctactgtcttcaaggtga

SEQ ID NO: 226738 - DNA, 795 bp, Homo sapiens
gtaagtcaaggacttgcatgctagaatcagacagaaaatccagaaaagccacgttatttaacagaaccctacaaggtcagctttgagtcaaagcagaccacatttctctcggccctcgcgagtgaggtcgccaaatactcgacgcctcaagagcgagccgaggaggcagaggccgaccaagccggcctctcggcagccccgcccggcgccccgcggagaacgcccgggtgcggctcgagggaagttgtgtcaagtcccacgcgcggcccgcggagaacccaggggcggcccgcgcgcgtcggcctagcggggagggctgctccgggacacggtgcggcggccgcgggcgagttggacgcgctggcagagccgggccgaaggcggcgggcgtctccgggcagccatgttcgcggcgcccgcccgcgcagcaggacggagccctgacagcaatgtttgctacggcctccctctgcagtcagcctaaagcaaggagctggaggtagatgaggcaaaggtaaaggagaccaaaacagtattttaaagaaaaaatcatttatcttcaaataggctccaaacctaagatggtgtatactgttagaggacaagaacctgcttctagccatctttgcgtctccaggacctgacttgtgaccattcaataagagtttgatagatggacagactaatgaatagatgaagatgattagaagccaaaatttctgaatcttcctagcacccagaacatggcttaacatcaaggaaatgctcactaaatactgtcataatggaatgaat

SEQ ID NO: 226739 - DNA, 289 bp, Homo sapiens
cattccagcctgagcaacagggcgagactccgtctggggaaaaaaaaaatagaacccaggaccgggcgcggtggctcatgcctgtaatcctagactttgggaggctgaggcgggcagatcacttgaggccaggagtttgagaccagcctggtcaacatggagaaaccccatctctactaaaaaaaatagctcggtgggtggtgcaaccctgtaatcccagttactcatgaacccgagatcacagcactgcactccagcctgggctacagagggagaatctggattaaaa

SEQ ID NO: 226740 - DNA, 480 bp, Homo sapiens
ttttccaatttgctttggtacttttcttaagtacagagaagcagaaactcccccatcctcttcagccctccatctggctcctgctgttacttgttttcacccgaattttgttcttctgtgattctctgacttgacgagggccactagcatcccccaaacagacaatgcgctgcctctgcgtgctggcaggaggccacctctctttgtgctgactcagcagccaggctcccaggctgtggcacaagtagcattcctgggaaaagcctctccccgttataaacactcatgaaaacaattcctcactgggaagagaactgaaatctgctgctcaatcttaatgagaccacggtttagttagccttttggtctgattacagtttttaaggttcatgctgtatcattcagcataaatcgacattaaaaaataattcttttctgtgaacaactcacccatgaggtttttagggttttttttttcct

SEQ ID NO: 226741 - DNA, 372 bp, Homo sapiens
aaaacggtctcaggttagagttaccaggacatctgcctctccagcttgggggtctctcacgtgcccctctcaggcaagatcgggcctatcattggcttaggttttaggaaggtcccaagctcatttgccaagggctgagcttccccataactcccaggacacagggagaagacaaggggagggaaactgagggacggagatgaaagcgctcgtcccagcgaaggacccgcgcttcaggcgctgggccctggcggcagtgaacaagctgggggtggggcgtcgggccgcgcccccgccctccggacccccagcgcggacccctgctccggggcgggggcgctcacagtcgcgcgaacccggaggtgcggagag

SEQ ID NO: 226742 - DNA, 1110 bp, Homo sapiens
gatataggtgcacagtatgttacttaagtaacggatgagcccccctaaacatccacgtgtctctgcaggaacctgtgtaagtattgtgaaaacccttttcttccagggaaaaattattggaaattccttaactgagctatacttggtacttgctctagaacatttgggaaatgacaaactcaggctggctctcctctctaacctcactgggctataaatgttccttctaactctgtaatgaaagttcagtgacaaactagatagtgaacctgtgaaagtcattatttacatttgctttaaagggacagttttaccgttcaacttcaagagtttttctacctctttaacagttaatattttttaaaggaagaaatggaatgtaccttcaggggtcaagctgttaactgtatacctgcctctagttagcttggtttatcaaaaggatttttaaatgattcaaggtaatgtttaggatatttgttttaactcctgctgtgctgtgatttaaaaaaaaatagtctaagaaacaaatttatccatgagataaacatcatattttatagttttagaaaaaagggttgggggtggaatttagcctagaacttaaagaaacaacctctgcgaatttctcttgacagcggagttgcttgtcttgacttctaataatataaatccaggcagtttgattatccgatttgcaagaaactttaatggaattctggggcatttgtcctgttttatgtgcaaatgaaagtctaaaaaatatgaggaagatattacatttttcaggagcctccattttttcagtctaagagaatgataagtgagaggcctattgtgatgaagttgcattggacataatgtgggaagtgaataaatagaaccaagaatcttcatctatctctgttggtctttcaggattctcttagcatataggaaaatgatttaccttccagatctcgaaggacttccaatagcatagatcaggtttaatttgatggtctataccatcagaaataactaatatctgttttctttccttttagagtataatcaattatggataggccagaatatttttggcttcaaaacaaaaggattcataagctt

SEQ ID NO: 226743 - DNA, 428 bp, Homo sapiens
cccccccacacacacagtggcctctgtaacatgcccacacactcagcttgcagatagacaccctatcacgctgctctgcactgtgaaaagctaccctgcccacaggcaaccgctataacgtacagacaagatgcctccttcctgttcactcagcaagcacacacaatcgatgggatagaatgctggcatgtgtcctcccccaacaaagcttagggtggtgcaaagaggcaggggctggtgatcggggcatccaattggtagccccacatctgcctcgggtttctcagggcccccagtcttcccatgtgtaaaataaaaggcgtcagccaccgcttcacattttttaggtaaattcatttaaaggtgaaattcacaacatagttcttactggaaaaccagtatcacttgtcaaaaaagtaactacaaaa

SEQ ID NO: 226744 - DNA, 408 bp, Homo sapiens
atttacagtagttttaacaatctgttccaatttttagcccttatattttatcgtgaataaaatatgaacatgtctatgaacatgtccatactttttaataagaaaacgacctttaactttgtatcatggtggaatttgtaaaagctattgatagttttgttcagacagaaatttaagaattatagtaaatagttatgatttggttggattaaaaattctgtaagatctgatcttagaatcttaatcttgccaatgatgaagattctaagtgatggtgaggagttgtctgggaatagctgtatgtcataacaagctaagtttgtttataaagcatggtagagctcaaagggaaagcttttatgaaatctggctctagcactttttgtcaaaataaatcaatgaacacag

SEQ ID NO: 226745 - DNA, 636 bp, Homo sapiens
ttgcagtcaaagaaccctgctggctgttacccctcccttgcaactcttcctgaccctaattgtcttactttcatgtttttttttaaatgccagattttgtgcatttctcccaatatcccagggtgcccaattttatctctcctccctccccaaaaactgtacagccaaaaagactttaaacactttttaaaatttaattttattagccgggtgtggtggctcctgcctgtaatcccagcactttgggaggctgaggtgggtggattacctgacgacaggagttcgagaccagccaggccaatatggtgaaaccccatctctactaaaaatacaaaaaaattagccgagcgtggtggcgggtgcctgtaatcccagctactcgggaggttgaggcaggagaattgcttgaacccgggaggttcaaattaaagcttttagtttttatttttaatagaatccagctaatgcaggacaaaaagtcttgaaccagattttcttttcactccctttttaataggagaagggaactccataaccaaggcttagaccctcttgaggagagaggaacttgaggaaaccataaaatcttacctttttcagactcattaacttaaaatggtttgaaatagcttctgg

SEQ ID NO: 226746 - DNA, 481 bp, Homo sapiens
caagagagtagtcaaattatattggcagtttgttccctatgtacaaaatggttgtgttccaaaacctcagcttaaatccattatttagaatttgaaacacgatctattaaacccattatttatttgagggatagtgccatattaatattacaaaagtattggacttaacaaagtttgacttttctgcattcaaactctcaagagtcctcaaaagcacatttcctccttctctagccagggaagcattcgagggacgtgagtcttcctcccagcccatcagccaggtactgggagcatgcccaccccaggcctaagaaacccacagcctcctcagagctgagagcactggccccggtagtgggatcagggagatgggctggggcatctctgagaaggccaaagcagtgtgtccaatctcttcagagcaccaatccctggacttcttggactgccaatggaattaggcctttgactttctcac

SEQ ID NO: 226747 - DNA, 462 bp, Homo sapiens
agtgccaccacttgccaggtccactggccgaaaggtagcattctcccttccttgaggattcttgaagaatatctaggtgagagaagggaagaaatactgattgtagagccccagagctgagtggatggcacactgcagttgattgcactattttccctgctgggaatcccacaagcgtgcacacacacacacacacacacacagaccacaactgtgttgaagagggtggatgtggctagtcagctgcagatccaacatgcaaactttgcaacctctggttcagctccagtgtccaccctggggactatggcactataaagtggcacagaaaagtaacttgttttcaactaaagtcaagtggagccaggaatttgaaaacttgaccttattatattgctcataaagagagacgacttttagatatgaagattttaagatgggcaaaagcagcaagcttactgc

SEQ ID NO: 226748 - DNA, 358 bp, Homo sapiens
aagacaacaaggagcttgtagaggttatttgcttttaaagattattggtaggggagtccttctgttgtttataaggagtgagaacagtttgaaaagctcttctctcaactacctttctggaaaatttttaatgtggtaaaactgcacgtttaacacaggcccaactgcaaacaaccaaggtaaattcccacaaaagccatctcccctgcaccaccccctggtctagtcaacactgtaaatagaactgccacgttattattgagaaggcgggtagctcccatgcaaactacatatttgattagagtctgaactctttgctgaaccatgaatttgaaataatttaggtgatacatataaa

SEQ ID NO: 226749 - DNA, 665 bp, Homo sapiens
caggagatcaagaccatcctggctaacacagtgaaaccctgtctctactaaaaatacaaaaaattagccaggcgtggtggtgggcgcatgtgttcccagctactcaggagactgaggcaggagaatggtgtgaacctaggaggcagagcttgcagtgagccaagatcgtgccactgcactcaagcctgggcaacagagcaagactccatctcaaaaaaaaaaaattgatcatttcatattttattaggacttagatactggtctatcacatcaggagcttgaacaaataccagtgcctgggtttgagtcaaaaactctaaatttttttggtgtaggactctaatataggcatattttttttaaaaaaaatcccacaaccagttccttatatgaactcacttcagaggcctggcatttaatttacccattaaaaacaaaacaaataataaaaaaaaaacagacttctcaatttaattaaattattcaaggtcacagaaggtagcttaccttcaacttactacagcataaggttactgtaatttaagatttaattaagttcattttaaatattttaaaattcaataataaaatacatatgaactcaaaactttccaatacttttcacagatgaaacatacagaaaattacattgtttcccatttgta

SEQ ID NO: 226750 - DNA, 368 bp, Homo sapiens
aaggtcaggtttaggaagggagcctggattcagatttcccaacattagatcaggaactctggaactgtaaaccagagggctacccagagccctgcctcagttcttctactggggtggctgctgggacgataacttcacagtagaaaaaaggagaggctgctgttcttctaagccagagaggttgaacgccttctgctgcacagccgctgcctgtgtgtgcgcatgctcccttccctctagcgtgtctcctcctggatgtgggaaatgctgtcagaatgcttcctcctgccagatcccatgtagccccccacctcccttcttccaggagttctggtttctgttatgccagcctcttcctttcctgttcg

SEQ ID NO: 226751 - DNA, 519 bp, Homo sapiens
ctgtcataggctggtacttttgtcttgtccctttcatacattaatgtatacttattcaattttgggcttgtttttctttgtgatttttaaccatttccatcaatatgtgtttattaaagtacaaaagattatctcttggatggtaaagggaagatgaagaatgaactttgaaaatcttgtagccttacagagctgggataaccagtcataaggagacttgatctgcattgactttaataacaataataataatagacatcattttggataacctcttacattttatgcttttattttctctttatctcatttcattctcctaatggcctttttcagatgaggaaattgagactcagagaggttaagggtcttgacgaaggacatatacctagtaagtggcggtgtttgtccgagaggatggtgctcctgctctgtcacagtgggcatggggattcaggccactgccaccgaatttcaagagcccaagcacagagcccaaaactaaattgtgagggttta

SEQ ID NO: 226752 - DNA, 539 bp, Homo sapiens
agaagtgctttataagcattgtctcattttataatattcctcataacatatgagattatttcatatattataatttgatgatttagatactataaatatccccattttatagataaggaaactaaggcataatatttagtagcccagtatcacacatgacagtgctaggatttgaatccaagtttctcactccagagctcacaatcataaccactatgtcaaatatcctttcagttgttttagtattatgtactctacttttcacagagtgaaacttctgttaactttgggaaacaaatataaatttattgggtgttctttatgttctagtctctggaaaggaaaggctaaaaagattttgactttttccctcaagaagctctttttgggaaagacagacgtggagaagtgattattacatgtgttaggtgctgtaataaggtggtacaatgtgcagaacagaatagttatggcaatcaaggcatcacagagaaagtgacattttcactgcttcttagaaaataagtatttttgaggtt

SEQ ID NO: 226753 - DNA, 263 bp, Homo sapiens
agagccctagacagcttcctgggaaataccattacttaagagaatgtggttcaatctatgtttttgtagcctaacagtcagtgaaccaaaacaatgaacaatcatgggaattctgactctcctgtgttgtcttctcaagagagcctgacaattctgctggttatgtccacttaaaacccaaatcaaaaaccttatatgtgtacagtcctgttgactttcaaaatacattgctactgctacatatattaaatcctcatttgact

SEQ ID NO: 226754 - DNA, 353 bp, Homo sapiens
cagtctttgcgtctgcaaaacctggataatcactccatataccacctgccgggaactaattttcttgtcatttcataaaaaaagattcccagtcttctagacaagttgcaaggactgactaacgcgggggaatgcttgcatatcagcagaccagaggtggtgtagacgccaagcgtggaccgagtcccggggcgccccagaagtgtcttctccccgagcgacagagttaatgcctcgcattaacagctatgagtccctcttgggtttctcccactcccaacacccttctctgagcccctggccaccgtcgccttctcctctcgcgccccactgaccaaacatccctttcatca

SEQ ID NO: 226755 - DNA, 220 bp, Homo sapiens
atgtgccaggcactgcagtaaacatggaggatagcaacaaaacagacgtggttcttaccttctggaaatgcttagtctggcatcaggcatgttttccatacacacaaacacaataacagcacaacaagatgagtgcttttatgaagctatgaaaaatgaagctgtggaaacagagttctgagtgtttagtactgcccaggtatcagaatttgaactaagt

SEQ ID NO: 226756 - DNA, 389 bp, Homo sapiens
tcttcaggggggcactctttgcttccagacattatccaaataagtttctatcaagagtgagggtgacataacaggtgaagcataagaaatataaagcatgcaggtatggaattttaacaagaaaccaagtcttgggactttctgaggggaagaaagttgtaatactccgggaacatttgaaattgcatgtccagccataggctgatagtggggagataccattattctagttgtagtccagaatttgcacagtttgttttattgttcatgatagaatcatattttcttcctacatctaggacttaacgcttagcattagaaaaaataaaactattcatagtatcttccttctttgttttaaaataaatgacaataaatattattaccaa

SEQ ID NO: 226757 - DNA, 226 bp, Homo sapiens
gaacctgggaggcagaggatgcagtgagctgagactgcaccattgcactccagcctgggcaacaagagagaaactctgtcttaaaaaaaacaaaaataataattttttgatatctcattattagaacaaagttttcatagtgcaatcagagcagttttgaaatgtgaatatactggtaaactttttaaattgaagagttgtggccagtatctcattaagtctattc

SEQ ID NO: 226758 - DNA, 235 bp, Homo sapiens
aaaaggaataagatgcaagccacatatgaaattgttaatttcctgcagccacatttttaaaaagcaggaaatcataggagaaatgcattttaatttaacccaatatatccaaaatattatcattccaagaagtaatgaacatcatataatttattaataagatattttacattactttttatactaagcctttgaaatctggtgtgttatacttcttggggcggccggatatact

SEQ ID NO: 226759 - DNA, 354 bp, Homo sapiens
cagtataatgaggagccacaatttttacaaaaatgaatcctgccagaattaaaaggcatacatgattctttgaagaatttcactaatgcatagaaactgcggtaacagaaaagaatactttgacttcctcactattcctaaatcacagcagattacagattcaaaatcaatcagtattctctgctgaactctaattaacacttaacattattagtcacaaatgtgaaatcttgatcggagatggcctcaggtattctaaatgtaaataaaattaggtttagatcccttttaattacctgaggtgctgtgagcgattacaatggcaattgataaacttaatttcttattaaagca

SEQ ID NO: 226760 - DNA, 452 bp, Homo sapiens
tgttcttgccccttctaaaccaccaagcaaaagacaaaacagtagttaaatataattaagtgaatttcagtgaagagtgatctagatttctaaaacaacacaccaaaagtacaaaccaaagagaaaagatggcacagttagaacttctgtgtaacaagacaccaaaaacaaaagtacagatacatgactggctaggagaagatatttgcacatacaataaaggatgaacctcaacaagataaatagcccaattggcagggcagtaggggggcaggtagtggaggaaggtaaggatgtgaatacgttatttgcagagaaataaatagaaatggccaataaccacataaaaagatgtccaacctcactaagtcatggtagttggggatcgtaacaacctggagcttgtggtatcttgtggatccaccggccatctttagttaacaattactttt

SEQ ID NO: 226761 - DNA, 467 bp, Homo sapiens
tacagtcccaccagcaccatgacagtttacaaataccatgggaatgccaggaagttactctatatggtctaaaaaggggaggcatgaataatccaccccttgcttagcatatgatcaagagataaccataaaaataggcaaccagcagcccttggggctgctctgcctatggagtagccattttttcattcctctactttcttaataaacttgctttcatttcactatatggactcgccctgaattctttcgtgagcaagatccaagaaccctctctggggtctgggtcaggacccctatttggtaacagtcctacaagccaaatttcctgcaaggtgttaaggagactactccaaaaataactttaaaaattgtagactgcatgaaatagagtttgaagactctaaatatctccccaaaaagtccattttcacttccctcttcctcatttgaaaggccattgttct

SEQ ID NO: 226762 - DNA, 446 bp, Homo sapiens
aaaaaaaaaaacaggtttttgtttgtttgttttcctttaatggaataaggtctttagaactagactccttggcggttctagcttagactacaagaagccactagaagcctctgtattgtttctggattctgttaccttgggcaccgttcgtactgatgtagtgtttgcttttgttctttcgttatgtcttattcctccagtattaggaacagccctaggtaacgtttctgatcatgaagtgaatctgaccttgaaataaccctgaactattcccgtcactatggcccgtgtcaaaaacttgcggattgttgtgatcatgaggtttccattgatatgtttgataagtggtttaaaataaatatattttattgtaagtatattaatatgcaagatatgactaaagcaatatgatgtttgactggtttattaaaaaactattcacatta

SEQ ID NO: 226763 - DNA, 434 bp, Homo sapiens
attaaatattttcaaaacatagcttattaaactatatgaaatttacatatctatctaaaattactttccatttccccaccacaaagatgcagaaattgaacacaaagatggggaaacttgcttgggacttagagcatgagtcatattggatccttatgaagccagtaacataacacagtgctaatggagtaacacagcagatgtgaataatacccagggaccataccacattgtatcaatgtttcccaacctttgtcatgttgtagcacacatagaaaatattgtacagcatactggtataaaccagaaagaattagagaaaaaaattactttttttaaattatataattgatgaaaaaatgtagaagatttgaggaaaaatactgaatttgtatggaactttcaaataaaatcttgccagatgttttaattga

SEQ ID NO: 226764 - DNA, 420 bp, Homo sapiens
tcatgtcctgtgcttcctaatcaatatttaaatatagatggtcaagagaagatgactctaaaaggcaatcaaaagttgcaaacattcttgtatggagaatcaagtttaagtagatgcattaaatttatcacattaaacttcacaacaggtttgaggagagaggtgagaccttcttttgtagaattcaaacttgttcagatatttgaatacatatacttgagagaaagaattacatgaatttagtttatcttcaaggacctttatatatttcatacacaacacaatttctttgtgctcattatttaaaaataaaaatatgtattctaataggggctatgtatatatttgatatataatacaatatattgtatgtataacacgtatattgcacatgaatgtgaaaatatataaaatcaatat

SEQ ID NO: 226765 - DNA, 451 bp, Homo sapiens
attttctgggccaaagctgggagaatacatgatcaaaactgattctctcatcttcttcttcctctttctctctctttctctctatcacaaagggccccaaaatgacagatttcccctgcatcatgccctccatacttcagtttcttagagataccctaataaaggatatgggtattttctctgcacttagggagaactccataaactggttcaatcaggctgcattgttgaaaagccaaagggaaggattaaagaaatttggaaatggtttttcaagacaacgcctggcttgcaaggttattgtcttgctgaataattctatttgacatgccaaaagagaaatattaacttgttctttctttttgcattccttctgttataaatcatagtcttcttccaggatgatggatgcctcaagacacctagagcaaaggtcaagaaaggaaggaag

SEQ ID NO: 226766 - DNA, 478 bp, Homo sapiens
caaataccacttttgcccaggcttttgtgacatgcagtgctcctgcccagcatggcaccttattttgacaaggaccttgttatctttccaccaagttatcacttgaaatgataatatagcttgtatgttgttcccaagctgtcgtatattttcctggttgtttgattttaacaatgagaataataaggtttaatactcctccctaagaaaagatttgcttatttcccaatttgaaattactttgctaagagggatataatgagttctatagtgaaacaagtatgtgttttatcctaatttctgaaattattcctgaaaattcaagtccattgtttgtctcccaccctatcctttggttctgtcacctcagaactaacaccttgacaaagtgtttcttttttgtccttctaccctccccgcaaaagtttattttttaataaatcgtttctggcaccaacccaaaccacaattacttaaa

SEQ ID NO: 226767 - DNA, 342 bp, Homo sapiens
cattaatagtggttaatggtccctggtgggattatggctgtttgtttttctttttatttatctgtattttctcacctttattaaatatttattagtatataattaaacacttttaatgagccaagaatatgaaccgtcagcttacaaaagaagatatacaaagagcaatacttacgtgaaacagtattctacttgttgaacaataatcaaagaggtgaaagattagtgcgatatcatttttatatagtatgcagcagtacagtttggtactggaaaggtgataatgcaattatactgtatagtatatctgagaaataatatgatgatatgtatcaaccttaa

SEQ ID NO: 226768 - DNA, 463 bp, Homo sapiens
aataaaatgctgctgcagttactgatactttaactatgtttgaaaaaataaatattccgttgcagcaatgacaaagacctttttagattccattgtggtaacacatcaattaagagaacaagctgtagagctacatcgttcaacaccagagctaccagtcacgtacagctacaaagcacttgaatgtagcgagtctggattgaaataggctgctaagtataaaatacacaccagattttgaagacttagtactaaaaaaagaatgtgaaatacctcattaatatctttgtatatgatcacatgttgaaatgaaaatatttggatatattaagttataattttaaaaaccttgctttttaatgtggttcttggttagaattacgtatatggatcatggtgtatatttatgctggacactgctgctctagagccagattctataaagtgtattcctggccctgcc

SEQ ID NO: 226769 - DNA, 522 bp, Homo sapiens
agagtgtaccacatggtagggagtaactacacatatgtcacatgtattctatgttttatctttctttctaactgagagataagagtgcttagttagccatgattccttggcctagtgttatggaaatttgccagatctttatagtaaactagcccagtcctacataaaacatttaaccaatattcttcccttattatgaaaaaaagattaaatttaattatttcacagaaatatttcaactgttatagtttcacatttttaaaaaataaaatttttagaacatatgtttcaatgtgtttcttcctgaaattttgttgtcctctaatccgcaagacatttcaacattgtttctgaacacgtattctttggctgttcccctcacgtagagaatagaaagaaactaaaaaagaaattaacaatgattaaaataatacatgaaataggaagttaagactatagtgcattatttacagtaagtcatttttatttggtaagatgatgcgctgtgttaaggtcatcagg

SEQ ID NO: 226770 - DNA, 196 bp, Homo sapiens
aagagtccacaccatgagcagtaatagcatctggataactagtcacaatttagctaaaaatgtaagtgaacagtttcatatttagaaactatgaacaaagtatgaacaattatatgccatcaaattagataaactagaagaaatgaataaattcctagaaacatgcagcctaccaagaataagttatgaagaaaca

SEQ ID NO: 226771 - DNA, 485 bp, Homo sapiens
gtttagcttgtacttgatttttactaatagtctaagaactgaaatccacagataactgtgaactccgtttagtcagtagtattactctctatccagctttttttcttttttttctatgcctataccactaacatattgtagaattaatttattttgaccttttctgtctccccccctccctttttaagaatttcttttaaagatggtgataagtaagtgaaactttgaaaggtaggcagtatcagatctacataattaagaactgcaggcaatttatggattactttcctttaaacttccaaagatgtaatagtataccttttagagatgtggctactgctctctggagagaattagggtaagcagattttcactcatactttatgagctcattaagtatgggcagttcaaccgtttagtaagtaaaacaaaatatgactattttgaagattaaatctgtttatagtaacctttagattatgtac

SEQ ID NO: 226772 - DNA, 394 bp, Homo sapiens
tcagcctcccaaagtgctgggactacaggcatgagccaccatgcctgaccttttatatgattcttatgaggattaaatgagtgaacatttatataaaatgcttagaacaatgcctggtatgccaaaatgttagttattattacttttgttttttgagacagagttttgcttcttgctcagctctccactgcagcacaaaagcaaatacgtaaacaagtgggtgcggctgtgtttcaataaaactttatctggaacagacagacaagggcctgatttgacccactggttaaactttgtccttccttggcttgagtcccttagcacgttctcatccatttcatttatttattttattgttatatatattttttgagatggggtctcactgtgtcac

SEQ ID NO: 226773 - DNA, 527 bp, Homo sapiens
gagaataataatatatttgtttttgaggccctggaacatctctgaggactatcgccctacagagaacagcttttttgatgctccatgaagacagaattccagtggatccacaatgggtgggaggaagtctaacaagactcaaagccaagtacaaggggtgaccatagcacagacaatgacaggaagaatccttgcttctggaaacttcccgtaaaagtgcaacattacagaaggtacagagaggcacctctgtgcccaaggctggagctcaccttggagaagagagccatggaaatgctgggcttggtgacaacagcaaggacaacatcagcatcaagtagcaaagatgcacctgtttcccagcagggaaccagctttgctcctcacgggcaattagcaaggtttgacttaatttaaagcctacacaaccactgatctctgagaatatgactgatgttattttctgtactgagagtaacagtaaaacaacaataatgacaataaaaaagtggcctcgctggcctcac

SEQ ID NO: 226774 - DNA, 274 bp, Homo sapiens
cacacacacacacacacacacacaaatatatttctgttacctgtatgacatgagcattgtagagttggctttcagacactgatgcctggtaaatgctttgttcaaagcatggtgaattatcattctcatcctgtatcaagactgctactttgcaataggctctatgcccactactttcagctaaaacgatgagttgaacctcatttctgacttcaaaatcaagaaacttgggttctttcacagtgagttgtcctatttttatttccaaggagaa

SEQ ID NO: 226775 - DNA, 408 bp, Homo sapiens
ttttaaatggtaaatttaagcagaggaataatccctccattaagcagaggaataatctctccagcagcatttgttctaaggtgaagaaatggagtccatgtcacaaggaatcagtgacagaaccaggtgttaggtccaaatctctggactctaaatattgtgctctttctgctctaatatttcctgtgtgttttacagtctgtcttattagttatttatttaacactgtagaattgatttcctgcatattagttatacaagtgtgcctcctcttggccatcattattttttatgggctgtaccataaattctgacacttggcccaacaggttgcttttatccagtatagactattgaatgcatgaaaaagaaaaaagtacaccaaaaatatacatttttaaaaggcca

SEQ ID NO: 226776 - DNA, 269 bp, Homo sapiens
tgggggaacagacccactgcactgcccctcgtcagaccatacctgcactacgggcctgtctcagaaattctgctcaacagggatgcgttcggagagaaggacatggatggtgaagaatttggaaataccttatacaaagaatggtcaagggaactgggaacattccggctgcaaaagagattaagtaagagaataatttaatctacttcacccaggatttattgaggctccacttcacgttaggttctgtagggaattcaaatatgaac

SEQ ID NO: 226777 - DNA, 369 bp, Homo sapiens
atcttacccaggcctcttccttcaaaagaaaagtctgtctttgagacactttagatccattcagtgggcagggatgtctccccctgccacctgccatcacagcccccacctcagattcaagaacagctgccacaaacacagtgacctgcaggaagtgaaagagtgaagtgactgggggcagagtaatagcagccagtaaagactgagggatcattgtgggctttgagaactatttcaagaattttaggccagtcgcagtggttcatgcctgtaatctcggcactttgggaggccaaggcaggaagatcgcctgaagccaggagttcaagaccagcctgggcaacaaagcgagacctcatctctacatta

SEQ ID NO: 226778 - DNA, 480 bp, Homo sapiens
caaaccatctccatctaagcatttatcaaatttctctttaaacttgaaaatcaactgaagaatttaagtcaagtttagaatagataaatatgtctttgagtatattttacaatgtctgtttgatttagtagatccttctggggacaggtctttctagagtttggagagttaccaagttactaaggtgtatttcctcagggctgcttcttgcttgttctcagagaagttggccaatcactgacaaaatgcatttcttttcccccttttcctgtcgtttgttttatttttaagctagcacttgtattttggaaaaattatttactcaaagatatcttgggcaggaaagaaaaatgttttacttcagttatttattggatctctataaagcaatatgatttctcctaaggctaactatatagtaggactagcatcataaaaaagtcatgtctttaaaaatgccaaaaatttgattttttgtat

SEQ ID NO: 226779 - DNA, 622 bp, Homo sapiens
gtagaatgtttcacagagctccagactggcaccataaattagtcagtaagaaaaaatgtttaatcatttgcagatgataaatttgagacactgataagagacaaagttaaattaggtcagaactgagattagattatttacctatcctgatatctaggcagggatagatagtgtcggtcattgacctcagaaggatctctgattcaggttataagcaaaatgaataaagaggcagtggacagggaagctggagcagaacctggagatgtagcacatgcctagaaatgaggtgtttcattttgtactgtgtttcttttgcttttcaaattacagagacaatataaataggctgttaaaactatcacatagtctagaaatgtaaggccaacttaatttgatcttggctaatgtgtttattctttaataaactttttattttggaatgattgtagaggtacaggaaagttacaaagataatagagagttcccagatacgcctcagccagtttctcccgttgttaacatcttacagtaccatggtacatttgtcacaatgaggaacccagtttcggtactttactgttacctagacttcagacttttttcagatgtcattcgtttt

SEQ ID NO: 226780 - DNA, 683 bp, Homo sapiens
atctaagaattaactgtgttctggaatggcacaaattacaaatgaaactcaagggaggtaaagcacacagtttttggatgatcatgttgctagttatgggattagttaagatttggccctgagttccagggctcattaatgctacccaaattattatcatttccaataattagcctagataccaagcccacagaaaacaggcaagaaagtcctggcagactagatggctcaagagcccctctctgtatccgctaatgctggttggcaccactaatgctggttggctccgtttcatgccattagcctgggagttacttcagggcgaagatggtgtctgggtaccaggtcaaatccccgcaaaatcactgagccagcctgccttggacatgcagatttccactgtggcggtaactggatggtggatagagggtaaaacagatctgagtttgataaagtcagaaccactcactggatgtgtgtgtgtgtatgtgttggtagggggtggacctgtgccttgtaggacatgtggctgcatccctgacctccacctacccatcacgaaaaccaccaaggcctccaggctggcaaaatgtcccatggggacgaagttgccctaaatcgagaatcagtgtctgaaacaaccctggacacgttgtgctgtgttgctgcttcctgcagaagcc

SEQ ID NO: 226781 - DNA, 466 bp, Homo sapiens
actacagaaaccaaattaaccagtagcattgtgaggaaagagcaaggaacaatctgggcttgggccctgggtctaccatttactaactactgagtagtctattcaacctctctaaccttctgtttccttattagtaaaatcatgcttaactcacagagcttttgtgaggaataattgaggtaatggtcataagtaccttgttaactgcaaggggctattcttatatgagggattgttaacaataaaaaagaaactgcttcattcttttcttggaaggtgcctggagtactacagcaagttcaaactcctgcccaatttcagggtctttaatgatcctgtcctcccttcctcattcaacttgttgccaacagcatggcccctccagcctagctgggtgcctcacagtgctatgtgcacctgactctcatgtgtctgcagatcaaaccaataaacatttaggaacacc

SEQ ID NO: 226782 - DNA, 540 bp, Homo sapiens
ttgggccaacgcaccgtcccacactgacagtgcccccgtgtcgtgcatgtattctgcgcattttcctgtgctaaacactctcccaaaacatcgtggggcctgattcttcctctttgttccaatggccctgggtgactcaagtgcccattcaatgaccaggacacagaggtcttagagagatgctccttgaggccccaggtgcgagcctgtaccctgccggagcatgaggcaagggacagggcatcgtctgtggggatagtgggggtagtgggggtagtggtcagccagatttggtgactctacttgctcaccagacgatcctacacctgccacctccgatggatccactgcctctgtgcctgcctgtactgctgatgctccagtggataactcagcatcccagcctaggcccaatgccactgaagatggaccttgccccctggggacccaggagtcctaccactcagctgtccccaggagtgcccagaccctcattcttatccaggacctaggagccctacccctggccttccctcatca

SEQ ID NO: 226783 - DNA, 423 bp, Homo sapiens
gctacatctatctttgtccgattggctcataaacaaagtggtcatgggcagcagcgaaggaagctatgcatgggctaagcaatgttcacttccactcatcaaagctgatctgacaactgccactgctgagtgcccaacctgctacctgagatggatactgagcccccaggaggaccagcttgtgacttggtagcaaaaactcgactgccatgaaacattgggctctaaaggagaaacaacaaaagatacaaagagactgtggtacattttctcgtttatattaatttaaagggaaattgtttcatatggttctgaaacactaacaatgcaattaattcaccagaaacagaaaaaaagtctttgtcttgctaccatactcaatcagattgaataaagaaatagaaggcaaatttgctaaagcaa

SEQ ID NO: 226784 - DNA, 448 bp, Homo sapiens
ccagctttattaatatgattgcattcctttactgtagcacctaacaccagtactcagttaaattttttgctgaataaatcaatgaatggagaggtaaagaggaaccagaagttggggttacagaagtcactgatggaagagtttcaagatagtagaagtggtcagccctgttaagtgacaagccaaggactgaagaaagactggcagatttggcaatcagatgaagtgacctgaccaaagagcagcttgtgtgaagtagtgaggacaggcgctggtctgcgactggtttaggaggaaatggaaatgaagaagaagagataggaaagtggagattatatgatgacaagtatcaagataaaaatgaacacatttggcctgctacctgaattttttaaatcggctcaccaaaaaatatcaggcttattgaaatattggaatatctgatgaa

SEQ ID NO: 226785 - DNA, 375 bp, Homo sapiens
caattgctttcagcagttgtttctgcagacaaacccccagtgcttgctctaggctggtgccaagggctgccgcctgaagcttgctgacagcccagctgctaacctccaggtcagagaaatgataccaacttcacaatcagagggaataagacagaagactcaggtgggcccacactgggctcaaccttttgcttcttgatttttcccctgtccttcctcatggttccagacctgattgttaagtactaccatgcctctcaaaagctgtctctcttaaccaggtctgataggacaaagctatctttcaagaagaactcaaaaactgtagaggggaataaaacaatttttaaaaataaagaaaaaagttgagtcaaa

SEQ ID NO: 226786 - DNA, 580 bp, Homo sapiens
  misc_feature (570)..(570): n is a, c, g, or t
ccggccctgagcagtccatctaaaacacaagcccaacctggttgttgccttgttttaaagcttcctgggactttcccatccctctatgggggttggggagggcaagctcttcagctggcaacgaagccttgcgtgttctagtgccttcttgcttgaccagtcccatttcctgcctcagtccacagcatcatactgcatttagttcggtgaatcccctgtgcattcttaaacctttccaccttgctggcaagtcagtctagaatccctttctcagcctcttgtttgctcgtggcctccagttctgtcttgaaaatcctgctgataacaccatctctttgaagccttcactgaacttccccttcctgacagagctaattactcactacccttttctgcttcggtatcttgattaggcttccattattacaagtagattatagtggggtaattacacatttaaccatctgatcacctactaggccctgagatccattcatctttttttttttttttttttttttgaggtggagtatcactccagccctggcgacagagtgagactctgtctcnccaaagacac

SEQ ID NO: 226787 - DNA, 444 bp, Homo sapiens
cagtctggagtgcaggggcatgatctcagctcactgcaacctctgcagttcaagcaattctcctgcctcagcctcccgggtggctgagattacaggcatctgccaccatgcccaactattttttgtatttttagtagagatggggtttcaccatgttgggcaggctagtcttgaactctgacctcaggtgatccacctgctttggcctcccaaagtgctgggattacaggcatgagccacaatgccaggcctatttaagctgattctttaaagatgagtagaaatgttttccaggtgaataaaaccttgagacattattccaagcagagaccagcaggtgcaaagacacagggatatagagatgttgaagtttaccaaacactgctagatttagaaaacaaaaaggaaacaatcaaaatcaaaaattaaaattaaaaatcacca

SEQ ID NO: 226788 - DNA, 473 bp, Homo sapiens
  misc_feature (131)..(131): n is a, c, g, or t
  misc_feature (152)..(152): n is a, c, g, or t
caggtttaaacatttttggcaagaatacttcataagtagtgttctatactttatattgcatcacttcaagagtatctggttgttccatgtttttgtggggggatcaaaaatttttgggaattttcaccttncctgggtttttaaaaaaaagnggggaaaagacaagcagaccaagtatggtggctcatgcctataattccaacattttggaaggcccaggcaggaaaatttcctgagcccagaccagcctaggcaatatagtgagactccgtctctacaaaaaatgtttttttttttgtttgtttgtttttaattagcttggtgtagtggcacatgcttgtaatcccagctacctgggacattgaggtgggaggatcgcttgagcccaggaagttgggggctgcagtgagctgtgatcatgtgccactgatctccagcctatgtgcctgtataacagagcgagtctctctctt

SEQ ID NO: 226789 - DNA, 432 bp, Homo sapiens
caggtttaaacatttttggcaagaatacttcataagtagtgttctatactttatattgcatcacttcaagagtatctggttgttccatgttttgtaattgattactctgttaaggaaaagacaagcagaccaagtatggtggctcatgcctataattccaacattttggaaggcccaggcaggaaaatttcctgagcccagaccagcctaggcaatatagtgagactccgtctctacaaaaaatgtttttttttttgtttgtttgtttttaattagcttggtgtagtggcacatgcttgtaatcccagctacctgggacattgaggtgggaggatcgcttgagcccaggaagttgggggctgcagtgagctgtgatcatgtgccactgatctccagcctatgtgcctgtataacagagcgagtctctctctt

SEQ ID NO: 226790 - DNA, 780 bp, Homo sapiens
gggctttagcgcgagctgggcggtcggcccggtcccaccgaactgcatagggccgtgtagccgggggaagtcagccccctgctctgagaagcagactctgcatctgtaaaaggctaagcgtgcccactggggcctgtggtcaggattggctgcagtgaggtccgcaaagcccctaccgcatcctgcgccttcgttagggtgagcagtcatggggactcgcattgtgccaccacgtagcgggtctcactgggtccgcttgtctgctcgaggagacagccggtgaggacgggagctggcctgctttgcccaggctgtaacctcagcctccgcccatacccacagtaagcatccattccattgatattcgctaaatgagtgaattattactaagacagagggccgagtggaagcgccataaatcacgtgagtgaatgtaattgttgtcgctgaccctatggagcacttcccttgccaggcactcacccatcctaggtatgtactttacatgtaattgtcatcttcatttgtcttcacaacaaccctgtgaggtgggtgctgtggttactcccattttacagataggtaactgaggcacacagagcattttgttcaaggacacactgccagtcaggggtaggagcagaatgagaacctatggagcttgctcttaggcaccctgccacactgctcactgtgggagagaagcagccaggcagacgtgtgcagcttggaattccttgcacacatggctgcggcaggtcaattaggtgccctggtgtg

SEQ ID NO: 226791 - DNA, 575 bp, Homo sapiens
gggctttagcgcgagctgggcggtcggcccggtcccaccgaactgcatagggccgtgtagccgggggaagtcagccccctgctctgagaagcagactctgcatctgtaaaaggctaagcgtgcccactggggcctgtggtcaggattggctgcagtgaggtccgcaaagcccctaccgcatcctgcgccttcgttagggtgagcagtcatggggactcgcattgtgccaccacgtagcgggtctcactgggtccgcttgtctgctcgaggagacagccggtgaggacgggagctggcctgctttgcccaggctgtaacctcagcctccgcccatacccacagagaaaaagtagtcataatacaaaagaaaaatggacaatgcttggataccataataaaaattaacactaccaacaaggagcatggacattgtgtggcttcagatgtaatgtgaaggacaacctccgttgaaaagggcaactgctgtagtattctaatctggaatgcatcacctaatcctatcataagaagacattaggaaaaaaaaaataaagataattccatttttttaatgg

SEQ ID NO: 226792 - DNA, 1364 bp, Homo sapiens
ctctgtttatttatttttattattacataatagatcttcttctgaatattcttcaaccaggaaaagggttagaaaccttggggacattacctcattgaaccctcaaaaccaagcatcgttggcttttttacaaatgaagcatgcttggtctagacagacaccaaataccatgctgtcatcctcactggtgtcctttgatactgtggtcagcagccgcacttgaccacaaggtttataggcccttaatgacctggccttgtgcacagccgacaaagcaccttctaattatttcattttgtgcagcaatggagaggtgcatgaagactccattccaaactccaaagctcagggactttcttccgaacagtctatactctgttgtagtattattcccttccatcgacgtctgtttatctgtaaacagcatgccagagatctggaggctcttttatgtctcaagtatgtaaatgtaaacacttgtcaacttttgacattgttcatttaagagtgtttttctcctgtaggaagaaagaaatacagctgggaagttgatgtccttattcacagagaagggtaccagttgtagttttcagaatctgtttttagcccatagtgggttttatctggttggttagaattaggtggaaggagggaagagcagccaagcactgagcagtggtcatgggcctgctggtgcaatgatttgggggtaagagaagaccatattgggaaggtctacgtgagaaagtcagagtaaaaaaattgaggaccctttttgcagaagtggaggcttccaaactcagtaataagtgtcttctagcccctgaatacacacaaagcaagaatactttgtgtttacccactgccccctgaccactgctgaaggcagaaagggacgatcacctacagtacctggtttgggtctttattctctcattccagggagagaaccttaactagatggactgactgactgttcattggctttggttgggtagattccctgcttccctctataagttgacgccaaaaaaggacaccgaccagcactgcagtcatagcaaatgtctcaaggagacccacagggtggtttcttcaaatacactactcacacacagcacatggagtcatggacaaacagcttaactgcccattgcctttgagaagtcctggaccaaaggccatagctcagccattgaaagatcttccttctgactgatatgtccctgcatagctccaacctgtgcaggcagaggatagggctgttccaaatgtcgctcacagagctgcctttgcctttctgcagatcccaagatacacacaaagcagttaacatgggtaaataggccttcctctgtaggaga

SEQ ID NO: 226793 - DNA, 4372 bp, Homo sapiens
  misc_feature (1337)..(1337): n is a, c, g, or t
  misc_feature (1609)..(1609): n is a, c, g, or t
aaacttggagagacgcaggacaggatcccggcggcagaaggacggagagaaaggggaccccgggacgggaaaggcgcagagcaggcgcgggcggcggcggcggcggggcagggcagggcgggcgtcccggcagagggcgcgcggtcgccctgtcgccctccgccccgccggggtcacagtgccccctccctcgcgccctagccgccctgccgggctatttttacgcgcggacaccggacaccggacaccgggctggggcggcggcggcggcggccgaggcggccgaggcggggccgcaccggggccgggcgtcggggccacacgtcggttcgcgggtcgccggggctgcgcgcgccatggagccgcggtgcccgccgccgtgcggctgctgcgagcggctggtgctcaacgtggccgggctgcgcttcgagacgcgggcgcgcacgctgggccgcttcccggacactctgctaggggacccagcgcgccgcggccgcttctacgacgacgcgcgccgcgagtatttcttcgaccggcaccggcccagcttcgacgccgtgctctactactaccagtccggtgggcggctgcggcggccggcgcacgtgccgctcgacgtcttcctggaagaggtggccttctacgggctgggcgcggcggccctggcacgcctgcgcgaggacgagggctgcccggtgccgcccgagcgccccctgccccgccgcgccttcgcccgccagctgtggctgcttttcgagtttcccgagagctctcaggccgcgcgcgtgctcgccgtagtctccgtgctggtcatcctcgtctccatcgtcgtcttctgcctcgagacgctgcctgacttccgcgacgaccgcgacggcacggggcttgctgctgcagccgcagccggcccgttccccgctccgctgaatggctccagccaaatgcctggaaatccaccccgcctgcccttcaatgacccgttcttcgtggtggagacgctgtgtatttgttggttctcctttgagctgctggtacgcctcctggtctgtccaagcaaggctatcttcttcaagaacgtgatgaacctcatcgattttgtggctatccttccctactttgtggcactgggcaccgagctggcccggcagcgaggggtgggccagcaggccatgtcactggccatcctgagagtcatccgattggtgcgtgtcttccgcatcttcaagctgtcccggcactcaaagggcctgcaaatcttgggccagacgcttcgggcctccatgcgtgagctgggcctcctcatctttttcctcttcatcggtgtggtcctcttttcnagcgccgtctactttgccgaagttgaccgggtggactcccatttcactagcatccctgagtccttctggtgggcggtagtcaccatgactacagttggctatggagacatggcacccgtcactgtgggtggcaagatagtgggctctctgtgtgccattgcgggcgtgctgactatttccctgccagtgcccgtcattgtctccaatttcagctacttttatcaccgggagacagagggcgaagaggctgggatgttcagccatgtggacangcagccttgtggcccactggagggcaaggccaatggggggctggtggacggggaggtacctgagctaccacctccactctgggcacccccagggaaacacctggtcaccgaagtgtgaggaacagttgaggtctgcaggacctcacacctccctagagggagggagggagggcagggtggagggcaaggctggggggaggggattgggtttaggaagagctaggttaagtcataacgagtggggaaacactgagtcttgttgggtcttgggttgtgtggtttggtagctcctgtgggtacctcctgaagcagcagcgaatggcaatgggttgtgttgtgttaatgaagactcaattggttcatattactctgagttgtgcaaagctcatggagccttttggggtagtgttgagataggtttggtcgtatcattttgtgagtttcctaggtcagtgttgggtttggttgggttgtgagtctgggatagtgtggtccagctgcattgtgtaggattctgtggtttggtgggtcccctagggccatgttgggtcaagttagatggtcccccatggcattgttgagatcgaatgtgtgtggtgttaagtttcgttgagacatggtggaaattgtgtagctctgtgattcttccaggggcatgttattttaggttctgtgaacttgcgagtcatgtagaaatgtgaagagtccagtggtagaatttgagctttctaggtcacattgggttaagtttgtatgaccaaatgaatcttgtagggttctgttgggcttaactgtgtagaggtgtgtggctggacatttttcgtggccacagcgagttgagttgtgttgaattgtacaaccatatgagccttgtaaggccagttcagttgggtcatgccactgtttgagtctcatagggccatgctgaattgagttccattgagttgtgtcactatgtgagtcctacaggaagttgggttgagttggactgtgcgaacgagttccatagggccacatcgggctgttttgcatttagtggtagcaccaggacccaaaggaaatagcagtggggaagcatcatgtatctgggagcatgcagtggcgagggctctgggaggtgtgccgagctggctccccagctcgctgtagggggcgggactggattctgtatccatgggattgggtgttcatccagaggcgactgggtaaattaggaagaggtggatgctcctcctgtttaccccacatccacttcattgtgctgttcactcccattctcccctacagttttatgctcagacatggaggtcagagccacaagggaaaggggagagggggagaaaactgtactctgtccagacatgatagagggacagagccaaaaggatagagaaagagacccagaaaaaggaagaggtggaaacccagagagacagagacccaaagggagagaaacagagactcagggagagggagacaatgacctggagggtggggtatggcagagacgcagaagagaggaacagaaatccagagtggggagacagagaccaagagcaggggatagaagccgggcgaagtggcccatgcctgtaatctcagcactctgggagaccgaggaagggggattgattgaggccaggagttcaagaccagcctgggcaacatggtgagaccccatctctacaaaaaatacaaaaattagctgagtgtggtggcacatgcctgtgatcccagctactcaggaagctgaggcagaaagatcccttgaccctgagaggtagaggctgcattgagccatgattgcaccactgcactccagcctgggcaacagagggagcccccgtctcaacaaacaaacaaaaagagccagtgggggagggagggacagagacccagagggcagcgtcagacacccagagttggagacagaacaacagagtctcagggaaagagaaccacaatagaaaaaggcagaaaaggccgggcgcggtggctcatgcctgtaaccccagcactttgggaggccgaggtgggcaaattacgaggtcaggagatccagaccatcctggctaacacggtgaaaccccgtctctactaaaaatacaaaaaaattagccgggtgcggtggcgggcacctgtagtcccagctactcgggaggctgaggcaggagaatggcatgaacctgggaggcggagcttgcagtgagccgagattgcgccactgcactccagcctgggcagcagagcaacactctgtctcaaaaaaaaaaagaaaagaaaagaaaaagccagaaaaagttggtgcccctgaacccaagagtgatgtacagtctattccatagaatcacagaacaatcctgaaccaggcctgtcacctaccctccctgcagctcaggaaggctgtcagacaggctgggggcctcactctgttttccaggggagaaacctgagtctcagagcaggggagtggcttcccaaggtctcacagcttgtccccaggggccaggcaggctgtctgtctgcttcacatgtccccatcagcctgctgggacacacgggtcctcctgagtcccgtagcctcatttcttacagacggggaaactgaggctcagagcagcaggtgttacccaaggtcacaaggccgaacattttcagaaatctttcagaactcaaagggcatttagaggaagaaggctgaaatcactaacacatatagggcttcctttggtatcaaagtactttacttgggttaatttatta

SEQ ID NO: 226794 - DNA, 431 bp, Homo sapiens
gtcctgccacaacaaagaatgatccagccccaaacatgagcagtgtcaaaggtggagaaatcccaggttaaactctgtggctttttctttccttattttcagcgaggttgcacatccgttctgtatttgggggtatcatcatttgatgcaattatctggctggttttggaggaaagagggaggtggcaagccagagccagcagtcatctggtgccagggctaaagagcatctccttctccctttccttggtctcaaaggacccttgtctttgttgcaatccctgtgctgtggggtgtcacatctgttgacagaagtaccatttatacagaagccgcagtggggttggtccacaatgggttaaccaccacagggccctctgcccaccagagctgtttactgttcaccaaagaggctgattcttaggactcta

SEQ ID NO: 226795 - DNA, 374 bp, Homo sapiens
tccctcggaggcctgtctcagcatttcctaagtcagcataattgcactagttgcttgtaggacccctagttccattagagaaaaaaaccctcaaaagttcttagtgaaagttcttagcacctcagtttgaatgtcaaggatcatcgccctgaggttttgtcagttagcctgtgataaagcagcaaaaatcaggacactgcccagccctgcagagtgaccatgtggaaaccaacagttgtccccatggttttacaaatgagatgactgaggcccagaaagaggaagtgacacttgccggtggtcaaatagctcagcccaccacctgtttttatatggtttgcaagctacgaatggcctttatttttgaagtggtt

SEQ ID NO: 226796 - DNA, 276 bp, Homo sapiens
caggagctgagatcgtgccactgcacttcagcctgggctacagagtgagactccgtctcaaataaataaattaatttaattaaattaaaagtctacctgtgaaccatctaaaatcatctctgcatgccacggtttggaaaacaccaatttagagaagaaataacaatgatcatgatagctaattctgacatgctacttcatttgtatcaacccattgagtcctggcaattactgctggacaaggcagacagaattattataaaacctgggtttccc

SEQ ID NO: 226797 - DNA, 612 bp, Homo sapiens
aaaacagaaacagctgaaaacctaaagaaacccacagagaaagcagattttaataagctaagtgttatcctatacaaagcatgacatttttctcattactagtcttgcattacaaaatttttacttaattatatttttaatttcatgaataaacattttgtgaacagtttctctcttcttacataagttcacaagtaatacccttgagtttgcttcctgcaaatactaaaatttattcatatttatatgaatatttacagaaatatgttttcatatttacagaaaaagtttgttgacttctcttctaggaataacttattttctgagttgattcctaggatattaaattgggttattcaatagtttctccatgtattcaacaaatatttattgaatatcatctatgcataaggaagctaccatgggaatccctttaaaaatatagatataaataatatatggttcttgtttttaagaagcttaaaattaaatgaaaaagatgagaccaggtgtggtggctcatccctgtaaccccagcactttggtagaggctaaggtgggaggattacttgagcccaggagtttgagaccagtctgggtgacacagtgaaa

SEQ ID NO: 226798 - DNA, 510 bp, Homo sapiens
agcccagccctcctcaggtcacttaaccacaccatcttagggagcccagcccactctcagcctaaagccatcagtgaaagtgcaaactcagggactgcagtcagttagactcaacagctctcatcccccaggtcctgtccacaggctcagcgcgctatgtcctgccctgcccacgctggggtcaagaaaggaagttttgctcatcttccaaggcccagctcagccgcccccttctccagaggcttcctccttctccaaggacagatctgctacttatttgcctcttcccacaatacttttttgaaaatcttttccacagagagccccagggatccactcgctggcctcaaggatttgtgaattcctaaaatgttgtgtggattttcgtatatgagcatctgtatgtttttatctaaggagaaaacaacggatagctttatcaggttcttaaagaggtctatgtcctaaaaacatttaatataaatatgaatatgactctactacagtata

SEQ ID NO: 226799 - DNA, 674 bp, Homo sapiens
attcaaaagcagttcatccatcctcggtatttacatacagctttaaatatgtagatttttttgaattatgcattttggtattctatcattttataaagggctgccagcaatttacaaaaaaaaaaacatggtctacattgagttctgttttgatctgccctctccatcagagtgtttttaaatgcttgtatcatgaattaaacatagaacaatctcattcatttaaataaaatccgcctactgagggccatatgcatggtttgggtcaaatctgtggaagcgtcattgtggagaagaatgccctctggccatgtcttttctgtttcaattgtccaaggtctaagaatgaacaccaaagaggaaggaacacatcaatctgagtcaccaacacttcaaagatggtctttctcaaaagaccaatacactgcaggctttcatcacatataaactgacttaaggaatttcctaaaggaggtagactttatgtagaattgcttttttttttttttgaggatttaatggtagaaggacttctttgtaaatataaaaataattatttaacattcatgatgatgacttacgtagtaacaattttattccaatcattatgctaagtgctttacataatttattttaaaaaccatataagatagttatgatcattattcttcatg

SEQ ID NO: 226800 - DNA, 313 bp, Homo sapiens
gagaggtacatggaagagtcgctgctgtttcatgaataaaaacaggtcattacactgtctttggaatccctatgtaattattttatgtcttgttgtaacctactggttgacagaaataaaggaatcaaaagagtgtcttttcagaatcattctaatttgttcatagttttgggaaatattccacaaagataaactggccatggtgccatattgtgcaactaattaatatcggtcaagggggggttgtttgtttcattgacaatagcactggtaaattaaaagtaataaattcagttgaaaaccacgtgtaatt

SEQ ID NO: 226801 - DNA, 337 bp, Homo sapiens
aatcaaccccacaccacactaaaagcctagcagatgcagaagcagactcacatccagacataagaattatttgccacaatctctactgttctgcatataaagtctgccattcagtcaaaaattacaagacaaaaaagctgaggaggaaaaaaccctctttatcaagagacaacaacaaacagaaccagataaagcaattaacagaattatcagagaagaaaattaaaataactatgattacccttttaaaggctctagcacaaaggtaggaacatgcatcaactcatgagaaatttcaggagagatgaaaatggaaatgcaaaaaataaaaaacagt

SEQ ID NO: 226802 - DNA, 2210 bp, Homo sapiens
  misc_feature (1044)..(1044): n is a, c, g, or t
  misc_feature (1287)..(1287): n is a, c, g, or t
  misc_feature (1592)..(1592): n is a, c, g, or t
  misc_feature (1950)..(1950): n is a, c, g, or t
taattaaaagtaaaatagtacttcacaataatagtgatcctccaaaagaattcagctcaatgaaaaaacaagacagagacagcttcctaacagactgcatatctcaaaaataagctaaaaggaaacaattaaatcaaaactttgggcctaaataataacataaatcaccacataaagtacattattattatttttaaaaacgttccataccaagattgctaataatctgagtggtatgttttaaagatcattctcaccaagagagatttggagaagggagagaacataatctttggtgctttgcctcttactattttgccaaaattaggagtaccttatcaatagtatagcaacatttcggccactaggtggcaggttaaaaaaaaaaaaaaaaaaagctaaaacagcaaaagctaagcatatgggtgcacagtaagttgctaaacgaagagatcagaggtaccaaaggcccaattcttccaaatctacaaatgccaagaagtgtgatgaaacaagaacatcaaagtaggactgaccttgccaaggttaggtctgaaaacagtcacttctcatcactaacagcattctaagaaaaattgacatttgaatagtgggtgattcatactataacctcaaggaatagatcaaggatgagtctggggaagaaggactactggatgaagaaataaaatctcacttcttgagtttagtggaagaaaatatccaaagatacagggaagccacccacccaaccatcctcatattccacaactatatctcaaaaatactaccccctctgtacagaagtacagagaattaacaacggagcagtccccaatacacacaaaaaagctgaagctaccttccaagaatgtgcaccaaactctaacaaaggtaatcaaattgtaacatcatgaagacatgaccagattacaataaacggcctgataaaagaatatgttaataataataggatcacctgcatgctagttataaagaatggccagtttggcattctgaatcaagtatatggaaagaaaatgncccatcccataaacatggatatcagattcagaaagccattaagtcttaaaatgaagacaaatgtattaatgcatcacagtctgatgacacagtctgattaacatgatttaactaatccctctgggctctgattccaagctcaacagacaaccttattataaattgtcttgtcttatatacgaaagcaatgtttttcaacttctctgcaacctaactaaagagttcagtatactcccaacagtnaacagtgattcactagggtgatgacttttaactatgaggcatcccacatatttgaacctccaagggattgttattttaaaaagcacccgaatccttgagattctttcttgtgtgtacaaattatggaatacatgagaaattttgtacatgtatataatatgcagtaatcgaatcattcagggtgtccatcacctgagtacaatgtatttttccattctaccttgctataaaacactgaattatttcttcaagcttcctgtatatctgtacactttaactcactcctcttcatcttcccctcctcntacccttcccagttattgttatctatttttccacactctatctccatgtgttcaaactgtttagctctcagacattcttatgacttccttccactggttgagaattacgaaccaaataaagaataaactgatctaaattcaattaccttaatgattacatttctttctgcaaattaaaatttttggcattttggttttatatgtcagtttctgtgcccttggttaatgtgaggcatgctgagagtcaaatgacaaatatgtcaacggaccttaaatggaggtcacctagtccaataccctgtttaagaataccctctattttccaacattggtttaatctggttagtttctgtctacnacctgaggataactgcactgacagctgaccccagaaataaaaggaaaaagagttgcttttagaactccagtctctccttcaaaagctaagcaaacttgagtaggtacttcagcgaaaagctacattaaaaatgcagtgagagaagacagatggctcagaggaaaatgggcaaaaggacccaagtgggcactttgcaaaaatcaaaatgactaataaacatatgaaaaggaacacagcctcattagccagcggggaaatac

SEQ ID NO: 226803 - DNA, 254 bp, Homo sapiens
ctccacttactctgtctcatcaccttgttgatttccttcatagtactcaccactgtttaaaatgatgatttagaaagttctgcgtgtgcaagctcaacaggcattgctgtttgtcctgctcactgctgtctacccagtgcctcagcccagtgctccgcctgtaaaggtgtccaatgaaaggctgttggaaaaatgccttcgtgatttttgtgtgctgagacatggctgagggtgggctggattccatgaggtga

SEQ ID NO: 226804 - DNA, 594 bp, Homo sapiens
cgcggtggctcacacctgtaatcccagcactttgggaggccgagacgggcagatcatctgaggtcaagagttcaagaccagcctggccaacgtggtgaaacctcgtctctactaaaaatgcaaaaaataaaaacaaaaaaatttagctgggcgtggtggcatgcgcctgtagtcccagctacttggggagactgaggcaggagaatcacttgaacccaagatgcagttgcagtgagccaagattgtgccactgcactccagcttgggtgacagcgggagactccatctcaaaaaaaaaaaaaaaagagtgaagaaaacgatacaaaaatcaaaaacaagtcacgcacgatggctcacacctgtaatcctggagctttggaaggctgacatgggaggagggtttgaggaaacgagcttgagaccagcttgggcaacacagcaaggccccatttccacaaaaaataaaaaaattagctaggcacagtcgttcgtgcctatactcctagctacttgggctgtggcagaattctacccatcacccaggagactgaagttacaacgagctatgattgtgtcactgcacttcagcctggg

SEQ ID NO: 226805 - DNA, 344 bp, Homo sapiens
taatatttgttcagatcattcatcttgaatatatctcaacaccttatgacagaaacaaggaataattaagacctttataaaaactgcccaagcagattaatttagacatttgacattctattttccatacccaaatgtgagtatttttcaggctatatatttcagtggccttcacgtatgcagcataattatttggaaaagcatttggtttttacagacttttaggtcaccatggtagtttggaactgtagtaaatcagagagattaagacatttaattatttctataggaactctatattgtataacaacattattttttcatgactatttcatatataatcc

SEQ ID NO: 226806 - DNA, 447 bp, Homo sapiens
atgtagtatctttgggtgacattttctttctttcagcacttattttcctattatatcctggcctataaggtttctgctgagaagtctgctgttagtctgatggtggtggggggaggcctctctgtaggtgactggatacttttctcttagtgttttagaattttctctctgttattgactttagacagttggactataatgtgctgtggaaacctttttgcattggggaacactgggcctcctgcatctgaatgtctgaatctcttgctagacttgggaagttttcatctgctattttgataaataggtttttcatcccttttgttctcatctcacctttggggataccagtaattcatatatttggttgcttgtagtatcccatatatcacaaagactttgttcattcttttttttttctttctttatttttgtctggttagtttt

SEQ ID NO: 226807 - DNA, 329 bp, Homo sapiens
atagtagaagtctgctggccatgaattctctcattttgttctttaatctgaacaaatttttttttttcttttgaagcacatggttgctggatgttgaattctgggtgatagctggtggtgtctgcccctctcccttcaaaggtgttccattgtcaactggccttcattctttctaataagttgttagccatcatttgtatctttattaccttgtttgtaatgtttctctttttttttttttgggttgatttttttttctctttgatactgattttttagaggattgataatgatcctaggtataatttacttggtatttatacttctcg

SEQ ID NO: 226808 - DNA, 437 bp, Homo sapiens
ccgtgttctggagccttgggtgcagacccggggccagggccaccccagtcacgccagcgagaagccctgatgacaagcttttgggcagagccacatccacgccggctggcaactttgagcatgacccctgtgccaggcactgctgcaggccacacatgcagcttctccctgagtcctcgcagagccctggggtgggggctgctggctggatgccctcagaggctcaaaaggatgaccccaaccaaggtcacacggctaactatcaagacaggattctaaccccagtccatacagtccagagcccaagctttaaaccatcgcacggcgagggtgctgccccctccccaaccatgctccgtgtgcctctcccacccccattacccttgacctcagcccacgatgctttggtaaaagctgagagttgctctttttttctt

SEQ ID NO: 226809 - DNA, 636 bp, Homo sapiens
ggttgtagtgagttgagattgcgccactgcactccatccagcctgagcaacaagagtgaaactctgtgtcaaaaaaacaaacaaatgaacaaacaaaatttaaggcaaagaaaagttaaggacattgcctgaacttacatagctagtaaatggtggagctgggattttatcctggcaaggctggcttcaatacctatgcttttatccagagttactgcttttagctcagagaaagatttgacatatggtattgtcatagttcaaaaccatgactagtcttgtgttgggagactctaagataaatggtaagaatgtagtcttttaaaatggttaatgtttatttcagggttttttctactgaagttatatcaacactacttctttaaggttaatgagacgtttaactgaatatactaatttttcgtatctttgtgaaaagttagtcattggttaaaaaaattatgtcagaaactagtctaggcactaggaatacagtaagcaaaacagcaaaaaaaaaaaatctcagagtcagtgagcttatgctatagtgggaggaggagcagaaaaataacaagtaaaatacaggtgataataagtgctgtgaggagaataaacagaaggatagaaagtgctagg

SEQ ID NO: 226810 - DNA, 586 bp, Homo sapiens
cactgtgttagcaaggatggtctggatctcctgacctcgtgatccacccgcctcggcctcccaaaatgctgggattacaggcgtgagccaccgcacccggcccaacatttttttttacatgaaagacatctagagacaatatcacagtaaaaattaatgaatcatacaagatccttggtttaaatttctttcatttgactattataccaacgtcccctgtgaaggtacacaattcatattagcatttaaaattgtttttaaagtcctataatttaaaaaacccctttttcatggaatttcctgaactattttgatttgaagatgtatctatcatgccaacttttctggaacacagtgaagtagattctatatatatatatatttttcctatatgagttattgaaaattgtatatataaatacaaatgtgtattttattgtggtaaaatatacatgacataaatgtaacattttaacaatttttaatgtaagcttctatggtattaggtacattcccattgtcgtacaaccattaccaccatccatctccagaactttttcattcccaaactgaatctccaccccca

SEQ ID NO: 226811 - DNA, 352 bp, Homo sapiens
gcacgtccccaaagaacgccaacagtgcagcacaggctgtacctgggaatgactgtaggcttcaagggcaagtcattgaaatcaactccccttgtccctccctcaacaacacacaagatgaaactcaatggtgggggacagcagcctctccacggctaaggggctgggggctcagtcctgccctgcacctcccttgggtcagggctgcctgtggccagcacacttcttgcccccccagctccagctctttcaggacggtctcctaccacatccctggcacagaccctggacagggaggctcactacagacctgaagaggctcaagctgccaaccccacagtgggcacctgcc

SEQ ID NO: 226812 - DNA, 438 bp, Homo sapiens
cacctgctccaaacagtctcttcatttcagaagccttcagttctactcctttttccatcactgttaatggattaaccttgtcttaatttgatgcaaggactgataacctctctgacgtgaccttgcctcctttgcagctgtccccagaccaccttgcatctcagaattgctttctaactcttttcatcattttcttattccctactcttggaagactctcctttacaaggggtgtccctgctattttcctagacctgtttccttagttttctccaagatttcattttgtcagttatctttttattagaccttctttatttttttctagcttgtttccctctgtgtaagcatgctcagatactctgatttttccccctaactcatggcccctctttgaacaaccacgtttttcctcattttcatttcatcttaaagcct

SEQ ID NO: 226813 - DNA, 340 bp, Homo sapiens
gtaagtagtttggtaatttgctgttataaattgattagagtagcagttctatagccaatctgataggtttagacattataggtaatattccatcccttctatgtatgaccaagagcttaccatttaatctagtgcccgaaaaaggctttacaaagttcatggtctgttgaggaactttgtccctttgagccttgacttttattagaaatattctatatgaggctgggcacggtagctcgtgcctgtaatcccagcactttgggaggctgaggcaggcagattgctcgtgctcaggagttctagaccagcctgagcaaaatggtgaaactccatctctaca

SEQ ID NO: 226814 - DNA, 481 bp, Homo sapiens
ccagaaggtggaagcaacatcatgcccactggtggatgaatggataaacaaatgtgatatatgcacgcaatggaatattattggaatattattcctttttaaaggaaggagattctgacacatttcacaatgtggatgaacaatgaaaccttgaatacattatgctaatggaaataagccaaacacaaaaagacaaatactgtatgattccacttatatgaggtacctaagataggcaaagtcatagaggcagaaagtagaatggtggttaatagggactggaagatgacaggagttaggaattactgttttacaggtacagagcttcacatgaaaaagttctagagaggaatggtgggaatcattacaaaacatgaatatagttaaagcaactgaattgtacacttaaaatcgttaatgtgatacattttatgttacatgtattttgcccactgaaaaaaataaaaatatataaacacac

SEQ ID NO: 226815 - DNA, 483 bp, Homo sapiens
agaagtgttgcttttcatttgttcttaagacactgctctcgggcaccagatacaccaaccgagcgattctcagaacccctagcatgggccacaaaccaaacacgcagagccgcagcgaggacagagggtgccgcgtggcccttcctgacattctttcatctgcacactgtaccgtcaactcattttctgcacggaatgaagatacatcactctgctctggaaaactacatttagcatctccttctttttgtggggcagggaagttttcatcgacaaagcgtttgtattgcagatggctcaccatatgccacgttcctgcacgttatcaccttgtaagcagattctgtcaggttttaggagtaaaagcttaattaacaagtggtgtgtacaattatgtacttaattatctactgcttttatttctttgttgtttcttgttttccaaaagtttggtaacaattacaggcaactgttgcctaatgc

SEQ ID NO: 226816 - DNA, 500 bp, Homo sapiens
cactgacttaacacgtttctgagattttattaagggcttttatagtgtaccctcagcttttaagagttgttttctgggaggaattcatgatctatcataggtaagtattaaactagaaaaagtatgcattccaaaattactttttttctgaacaagaatgagaatatggctttaattgtgttcaaaattgttgcatttcatgagcttgcatttgctaagatggattaatttatgatatctttgagaagttcatgaaaacctgacaaatgtccacgtcaacttatgctttatataagttagcttgtgtgttcagtcactttttttgtgaagcagtgtaaccatactagtaataatttatgtgaaaagcatctcactctttcatgaccgcaaagttcctgcaggattttcttatgatcaaatattttacattgtaaaaatttttcgatacactgaaacctaaatatcctataggacaaatgaaacagtctgattagaaatgt

SEQ ID NO: 226817 - DNA, 292 bp, Homo sapiens
ctccactattgtcctatgaccctgccaaatccccctctgcgagaaacacccaagaatgatcaattaaaaaaaaaaaacaaaaaaaaaaacaagccaaggcaggggcccacagctctctgtgacccacctgggcagacctggcccgtgatagaaggagagggtgatggtatgagactcaaacccctgggcttgggcactacgtatccttggacaagtcacacacctctatgaattccctttgctcaagcatatgatgcagttgcttaattaaactcttgtgaggaccaagaga

SEQ ID NO: 226818 - DNA, 195 bp, Homo sapiens
tcttcctttagtctgtctgcctgtttgtgaactattaacacgctgtcttatttgttgagggtttagattatattttactgtctaacagggttagtcccttcagttttctttatttcctcctctgagctttttttttatggttagttttctatgtgaatttaagaattgtctcaaaattgtctaggtctcattcca

SEQ ID NO: 226819 - DNA, 316 bp, Homo sapiens
taggacctcaatggggccttcccaccttcctctcaggaatgccttgcaggaggccaaggagccattttccaaaaggcaagaagtaccaagtaacctggaacaacctgctgggtttctgagggcgagaagctccttccgctaccgtagcaaagccatttggtttaaaatcctcataaaagcaacaatgctcatttcctatattgggttgtatttcctaattaccatcccagagggaaacctagggagaaggaaggcagagaagccagcctcacagccttcatttgtgcatttaaataaagtgtgattaaaaagcaca

SEQ ID NO: 226820 - DNA, 773 bp, Homo sapiens
caggatttgaactccagcagtgcggcaccagaggccctactcctaaccactctgcgattctgcctttgtcatggtttggggtcagaagttctgatgtggaatgttgacccaggcactgtgtgactgcacctctatgaatgttcctttcttctttagtaaaataggggtactaatggctaccttgtgacattgttgtgaagattaaatataatatgtgtcaagagtctggtgaccagaaaatactcaatgaaaggtaactttagtgtttttagtggtggttccatggcccgctggatcccaacttctgcatcccgacagggaagggctgctgagctataactgttactgtccagagaggcgatggaggcaaggaactgtgtaagggccagcaggacacagctgttctctcacactatctatagcagaggacacttccctgcccacattcatcaatcccgcccattcgtcgatcctgctcatgctttcagcttcccactacagagtcttgtgtctatgccagagcgcttctccaaccatgggaagttgtttggggtaagcaggaagaagagagtggtgaaaatccccaggagttgatggataaatatcccagtcccctgcctgtctccctaaggcccccagtagaattgagccccagttgctcatagcagtaacctgctcccgaacacactccatactgattgccttctcttccctgtctcacttccccactgcccttctgagatcacctcccaaataaactacttgcactcaaa

SEQ ID NO: 226821 - DNA, 446 bp, Homo sapiens
ttgaaattatgtatccataatagatacataaagacctataggataagttgcaaacatagcgtatttgattgtatatcagttgtatgagtctatgaaacacttctgggtattaccagaatcaattttgtgagaaataatatatatatataatttaaaaaattatttgtatggaatttccacttgttcggtagaaatattattttattcattgattattttattcattttattgtattcattatattttattcattatattattttattttattcattatattattttattcatttattattttattcattgatatttagtgtaaaagtgggccttgtggcatgtacctgtagtcccagctactccggctgaggctggaggatccctagagcccctgtgtttgagaccagccttgacaacatagtgaaaccctgtgtctacccgaaaa

SEQ ID NO: 226822 - DNA, 465 bp, Homo sapiens
agactgcagcaaaagattatttaacatactttcttcccttttatggaaaagagagctgttctcctttttgaaccatattcccctaaataccctcacaatcttcttaggcctctcactccttcattttcttttctagccccttcatctcatccttattttgaattcagatgagttaatacagtttgatggcctagttcagattctagaaagggacagctgttcagagatgatagtgacatgcttttctcttctcacattgcttctctttaaagaatttacaggacttctgcctacatttacatctgaaaacaatagtttcatttggtgtcacatccttgcccaaatttattgagaatattggtaaaggacaacatatttacaaggatttctttattaaaaactggggagattggcaagtgacactgttgctaaataaataaaaataaaaactgagaaaagcaataa

SEQ ID NO: 226823 - DNA, 537 bp, Homo sapiens
ggggaggcgcggccagggctgcgcgctccgcggagccggcggggccgggaacaggtgatcccagtgggagccccgcgccctgccgagttcgaggggcgggagcccgcgctcccgggcgcatctgcagccgcccagccgcggctccggacccaggcatccctgcgctgtctggggcccgggggaagccccctgcccccgcaggctcggaagtgcctgctcctgctccctggccactccggctcccagctcccggcgccctctccgcggcggagaaagttgtggacgtgtcccgatagtcgagcccgggcgctgtcgcgaccgggccgggtgtgcgcgcgctcggggcggcgctgacacgccagccccccatcgcctcggtcccctccggaaactgcttctgaagctgaaactttgggcgcctaccagcgcgggcgggagcctagggggcggagggcggcttggtgcgggcctgcgggcgcccctcggcgcggacagccgggacgccgcggacggcatgtgacggtcccggcggccgca

SEQ ID NO: 226824 - DNA, 385 bp, Homo sapiens
taggacttttggtttgatgctggaaccagttaagactttggggaactattaagaggggatgattatattttcgatgtgataagacatgagatttgggaggccaggacagaattatatagtttggaaatttatcccctcaaaacctcatgttaaaatgtagtccccagtgttggagttggaacctggtgaggggtgtttggatcatggaggtggatccttcattaattacttggcccatcctcatggtaatgagtgacttcttatgagatcttgtttaaaagagcctagaacgtccttccctctctcatccatttttcaccatgtgacattcctgctccccctttgtctttcaccatgattgcaagcttcccaagaccctgtctca

SEQ ID NO: 226825 - DNA, 373 bp, Homo sapiens
ctgccctagacctctgtttttctcatatgaaaaatggatacaaaatgtgtcgtcatcctatcaaacatcaatgcctcaaatccaagctccactacttaacagccctgtgatcttgggcaaggtttacctggctgtgcctcaacatccttatttgtaaatgggtatcataatagtggcaaccttgcggggttgttgaaccattaatgtgtgaacgtatgtaaagcgctcataagaatatctaggacactgtgaacgccatatgagtgatagatattattatcagcctttatcacagagctgtactgcagtttaaataaaggaagaggtgtgaccagggtttgcaaactctgaagtcccctctggagaggtaagc

SEQ ID NO: 226826 - DNA, 322 bp, Homo sapiens
cacatagtactcaatcagctgatgtaccaatcaactttgctatgccatggaatcactgcccccctcgtggccccaaaccagctgacataatatagaaagggagaagcagttgtcttaaaagaaactgctgcactgtcaggattgaaagaattatggcagacaggctgtgcactaaagcccacagggagcagtcaagggcagtggtggcccagtgttgtcaggtggtagagaccagtgtagggaagcagcagtggcgggcggattacctgaggtcaggagttcaagaccagcctggccaacatagtaaaaccccgtctctact

SEQ ID NO: 226827 - DNA, 411 bp, Homo sapiens
cgggactgttacggtggcctgggccgcgctgaggcccacagtcctgagcacttctccccttcggctgcagggtgctatcatggtcacttcctgtgtccggatgctggtgggcttctcaggcctgactggctttctcatgggtttcatctgctccttggccgttgctccaactaactgcctagtggccctgcccctcttggattctgcaggcaataatgccgggatccagtgggggatttctgccatgtaagtgctccctggggagggagtgccatgtacgttctctttggtggagagtcacccagaaagaataatggagggcctggatattggtaaactcttgtggtttacaaagactttcatgaatgttatcaaaccttaaaaagcatcaaagttgttacccataattca

SEQ ID NO: 226828 - DNA, 423 bp, Homo sapiens
tgaaattgaataagtttcaaatacgaaaatttaggaacatgatacaaaacttttctctgtgcaccactggagtactgcttttgaaatcaattctctctgtcctggattacccttagagctcctgtctcctgcatggaggagggtggagggcatttaacatgtccatctctcaccccattctacctgagcttccagcaccaccacctctgggcagttccgcttttagtcagcagctcccagttcccataattttgacttctgtccttgctagtccagaagaaatggctcttctgggattgaattcctccctttccccagcagaaatggattggggcagaggaattgcggactccatggcatagagggtcctggaaggcttgtcattagggtatcagggtgggaaggggagtgaagggaggggaa

SEQ ID NO: 226829 - DNA, 422 bp, Homo sapiens
atgagattgagaccatcctggccagcatggtgaaaccctgtctttactaaaaatacaaaaattagctgggtgtggtggcacacgcctgtagtcccagctactcaggaggctgaggtaggagaatcgcttgaacccaggaggcagaagttgcagtgagccgaatttttgcaatcagatcttggcgatgaccttgagcagtaggatataaataactcccacatgcttagtgttccaataatggaacactaggcataaatgttaaacacaaaacaaaacaaaaaaacaagaaacattaaaaattataaataaaatttaaagactaataaaaaactaggataaataatgttgcattaactggacaaagtatatccttaatagaaagaaagtttattaaaattgattagaaaggcaaccactactac

SEQ ID NO: 226830 - DNA, 741 bp, Homo sapiens
ttaggcttctgtgccattgtgctggcttatccagtgacacagggagccacagtcagattccacagcacagggcagaggctgctcgatgctgcagaagactcttcaaaagggccttcggttctagtcctagactgaccactaaccccggaaggggacaaacatgtcccctccctgggcctcagtttcctcttacttaccctaataggattggactggtgatcttaggtccttccactcctgcaacagtgattctagaattggttgactggtattttgaagaaagtaccagacaagctcattggcaggttatatctgttggtatctacctcttgacccattccatctgctatctgagatcagtcaggcaagtcagaaagcagttagcaccaccagaggctttggataaggcaccgtgggggttgaaagggggaatttgcttctagcccgattctgtagtgttagccccatgatggattccggctacatctgtacctaaacactctctctgctcttgttcagaattagtgttcctcttatctctcatatctcattgcctttggccaactcagggacttagctccagcagatgtctgccacctcctacgtcactggctccacgctctctcctgggtcatttcagcacatgcacacacacacacacacacacacacactcactcactcactcatacagacctacaccaccacaccctgtgtacattacctccccacggctctgctc

SEQ ID NO: 226831 - DNA, 596 bp, Homo sapiens
ttagtctctaatagtgagtctaataagtctcaccaattcacacacaaagattctaacacatgtacatatgcatttgtacagaatgtaattagatactatagtaacaaatcaaaggtaatggacaaaacttagtaatttcaattaaagctttctattcggggcttctcctgaatgtgtgttttaaatgactaggacattaaagggattgtttcagaagaactatcagcaccttttttatgtgtcatgttcatccagactatccatccagataattgctttatttctgatatgtcttccaaggttgttaccccgtgtgggataggcaatgaatttaactgtcttttgtccctaaaagttttataagtttttatctaacatattcatgtagtggaaaaaaactcacaaaagtgctttcaagcattcacagtggtgtctaagccactattaattgaaaaagctgctgtatttaaaaaaactgctagttcctgtgaaccaagatcatgccactgcactccagcctgggccaaaagtgcgagactccgtctccaaaaacaaacaaacaaacaaacaaacaaaaactgctagttcctttaaaa

SEQ ID NO: 226832 - DNA, 630 bp, Homo sapiens
gggtcagaatagatagcatgagtttggatgtatttgaaagtaaatggaaagtaatgatactgtagttaccaagaaggctaaatgagctgggaatttggtggttttgagctggattcgattcttcatttcctgccacttcgatgttaatctctgtgccattgtaggggagatacagtgactcatttgcacacagggtcatgtagtactttctgaattgtgataaacattcagagacagggtacgaccatcagaggcaaattttgccaattaaacaatattgtgtaaatcataaagtgtttttctaaattaaatcaaatcagtaagtatttatcaagcaggcacttatgtgagaggctaacacacaaaaacaaacaggatttgaaatgcaaagaaatgaaaaacaaggtggaaaatgggaattatagttgatcttttctgaattgtttccacagactcagagacaggaagtgaactaacttactaacagccagaaaggaaaattttttctgggaaatctctctttatagagccaaaacaaatattttgatctgggagaaaacaaaattttaagtgaatgtaaaactgaccttcccattcagatactagataagtcaaagaacttcaattaaa

SEQ ID NO: 226833 - DNA, 482 bp, Homo sapiens
actccaagaggggtacagcttcaagttgataggattaatcaacattgtcacacatagttctggggagttcatagtgagataaagactatggacttggatgtattttaatgaagcaggttgtagtggggattcttttgttagtttgtctgatgggaatacaagctccagagacagtcctactctttccttctaatctgggctccatcttacatgtcatcttttttgtcccaaagtttttcacctgtaaaaagaactaatgttagtaccaagctcagcaggtgctgcaatgattacatgtgtaagtatatacaaagcagttagaatagtgtctggtgcatataaagtgctcaataaaattattatttaaagtcagataaatcttctgtcatattcaggacttctgacaggtttatgtccatcacgcaattatctttcaatagtacagatataattatatgattctccccatcacctgccaaatg

SEQ ID NO: 226834 - DNA, 380 bp, Homo sapiens
ctgttagtagagatggggtttcaccatgttggccaggatggtctccatcttttgacctcgtgacccgcccacctcggcctcccaaagtgctaggattacaggcgtgagccaccagtttgacaacacattttcatagtgttcctcatgtaatgtcctctgtgtctactggaatgaaggatttgcacataccaaggaatagaataatgaaatactatgagttagcaaaccagcatgatttgtctgtgtgtgtgtaaaaggcatgagtaaaattatttacatgatcatctattattgcacatacatatttgagtgttaaaaagttaaacgttgtcttaataggaatttcacagccttgtgatctttctttttcttttctcctt

SEQ ID NO: 226835 - DNA, 654 bp, Homo sapiens
tttgttgaaatgattaaggttgcctgtcagttcagtgaaccatttgttatcttcaattaaactgaaagtctccatacatcagccctttgtaaatactgagtggttaatgctgcctcttaggtttccaaatgtcttaagaatgtgttgtaataaaaaaaaattagcatcattttaatattaatactccgacatagattttatcttgagagtgtttctgaaccaaagactctgttagccccatattcaggggcacagggaatctcagatatgtttgtatttgttttcccgaaagagttaagacaatattttctttttttagttaaggttagttacccacatgtcctgattttgactagtttaactcttgaattcttcctctttagcatattttccctgttctagttgatcctttcccctctccaatgtctaataaaaagcttgttttcttggaacaaggtagtttaaatagtaaaacagaaacacaaacacaaacagacacacgaaaaaagaaaaaaaaaaaacaaccaacaaagagggggcgggcgcgccaccaccaaaagatctcccccgcgggggggccacaatcttcgcgcccacacacgagcgtttgctgacaaagggggcccccaaatagcggagccgggcattaacgcc

SEQ ID NO: 226836 - DNA, 496 bp, Homo sapiens
cccttccttctctcctaaccctccattactgccccatccctgagttccaccgttagcctagcaaactattttctgagttatttatctctttccatcttgctccactttaatgtaaattagcattctcttttccctggccactgtgatagcttttccaacggtctgtcccatcagttatgacacccacaacaaactgttctctatactacagccagaaagatcttttctgcttacaaaccctttactggcttccaaaagtccttagatgaagaccacattccttaaattgacctcagcaattcagcatgactctagctcctctctttccagtcttcctccatcccctactcacagatacttacctatctctgtgtgcaacctcttctaccccaacctcacctgctctgtttctactcctcctttagattgcacctgaaggattaccttggggaaaactatccaaagcagtttagactgaaccctcagtctaagtcag

SEQ ID NO: 226837 - DNA, 415 bp, Homo sapiens
tgagccatctaaaataatctgtgtcactttcattcatatcattcagagtagtactgtttactgtaaattagtaaatattggaggatgttttagcaaaattattgcattggtgtggggtagtttctcataataattagatagcagtgctaattttactaaggccattcctattttataacaacattctgctgctaacataagattatatatttttgttttctttagccacaggaagtggggaggaggagggaagatgaatgtaatcattaagatacagaagacatttcaattttatcctccttggaaatcatttggtctgttttcaggctgttcttactaatcttgactctgtaaacgttagtaactggatgtcagtaggctcatacagtttatttcaaatacagctcttcacaaa

SEQ ID NO: 226838 - DNA, 351 bp, Homo sapiens
tactagtagtaaaaggagtgtgctttgagtcacagatcctggttgaactccagcatgttacaaacctcagccctgttctatgaaaggtcataactacgaggattattgtaaaacattaatttagaaatgtaaagtggtccccaatctctggatctggtcaggatttattggagctgccactgaggggattaaataagtggggtcaaagccccacagcctagtcaaccaagttgctcctcttttgtctatcctgtggttcccaagcaagactgcaattgaaaaaaaggctgctgttattaaagtcagaacaccaaataaagctttttttttttttttgagacagaatttctg

SEQ ID NO: 226839 - DNA, 491 bp, Homo sapiens
agtgataagtgtaacaaatacatacacacacacacacacacatatgtatacatacgtattttttgagacaggatctccctctgtcacccaggctggagtgcagcgtgaacacaggtgactgcagcctcaacctcctgggctcaagcgatcctcccacatttgcctctcaaagtgttgacattacaggtgtgagccactgcacccagcctatattttaaatataatatattgaaaacgcccccaaaagtgtaaatgcaactgaaaaagaggttagagaaattcatagataattagaaatattctcttcagttgctttagtgcttcaaaaagttgcaaatgttttatatgactcccataaaccctgtcatgtaatcagagcaggagttataatctaaagtgacagaagaggagtttccagagacttcaagacttgaacgggacttcacaaggtcacaccagccaatcagtgacagagctggggctagaaggca

SEQ ID NO: 226840 - DNA, 230 bp, Homo sapiens
accactttcaccactagaatataagctctgggagaacagggatctcacctgtttgtccgctgttatatcccccgcaccaagaacagtgtcagcatatagcacacactcaggaaatatttgtcatattttggccaggcgtggtggctcggctggccaagatgggcagatcacctgaggccaggagttcaagattatcccggccaacatggtaaaaccctgtctgtcgacgc

SEQ ID NO: 226841 - DNA, 547 bp, Homo sapiens
acagacactcattcactgtcactacctctgtgcactattataatattattatgtctttttgcagataaggaaatgggcttatagaggttaggtgacttccccatagtcgtgcaagtttttcatatttagattagaagtggagatgagtgaggagattttaaagaatcttaatctgaagactgaagcaggcacatggccatgggaatggagaaggtgaggaaaatgtgagacacacacataggatgtagacatagattgactatggaaacaggatatgttgagatatatggagtgaaagatactatcatgtttgtttctttcttgatcatctatctatatatagtatgtatacatgataaaagtccatgtcctcggagagtttgttataagactaattaataagttcagcaataatttattatgtaatactgtgcatccaacactacacagaacatataatggggaatttaaatgaagaagaactcatgacctgtatgaattcagagtttaaaatccatctaaagagacaagacctatatttgtaaaa

SEQ ID NO: 226842 - DNA, 516 bp, Homo sapiens
  misc_feature (29)..(29): n is a, c, g, or t
  misc_feature (34)..(34): n is a, c, g, or t
  misc_feature (498)..(498): n is a, c, g, or t
gtagaatcaagaagaatgtcacaatatcnaaaantctactataatactcctcccttttccaattgcatatctttgtgaggttgaattttctttccctatagaatttcagtgaaaatgacataccacaatagattgaagcagaagcaaatatgagcatacagctgacttctgtcaagacaatcatcaaagagatttgaaaaaatataaacgacatgatcttctctttatctactttttttggaaatataattatttttcatgaaaacattttcataaaaaatgagcttactattattcttgttaaaggaaattaatatttttcttaattttaatttctaatgcagtaaatatcaatatatagaacccaaataaaagcactttaaaagcacttggcatttctcaaaaatcttttttttttttttttttttcaacacagagtctcactcacccgggtggggttgcaggggtatgactcccggctcatggaaaccttggctncgggggtcaagcgatttt

SEQ ID NO: 226843 - DNA, 733 bp, Homo sapiens
taattaggagatgctgatatttatagattaggaattatttgtagactctgcatgcaaatattatgggtaaaaagaaccatttaagtattttgaaaataacattagaccagatgatgttgtaattataatgtgtatttgattatgaccttttacttcttacaacaaacaggatggatttgaagcactcttttctaatgataattccaaagatttaaataactttctagatttttgtaccttccacactgtataaaacacccctgtcttccctgtcaagaaaattttgggggaaaaaaaaagaaaacattgtgcacagagagttgataatgaatttaaatattactaatggaaatactttatagttatatcaactaggagggtttttttagtttgttaactcaggagttttaataaaaaattgtctctaagaatgctgtttccactgcatttacataagggatatataatttattagacatctttttcatgtaaatattcacatgagtatttcaaattgtgaaattacaagtgggtctctttccatgcatactagaagacagcagttattttggcagacagtgcttttcatacattcacccctttactcatttatggatacatgcaaatattcttattaattaaactcttttcctaatgtaaataaagatactatgtgctgatgatacagtgatgaaaaaagacctgacaactaacctaaagaaggtcacatctg

SEQ ID NO: 226844 - DNA, 330 bp, Homo sapiens
cttagtatgtcagcactgttgtgaatactttctcaatttctaatatatagaaagtcacagtgatagtactcaattctaataagcctgtcacatgtgatacttgcggtccatctgtatttcacttttgctgttatttgttacctcatttatttaagagtagcatttgcctttttaaaattttgagattttggccgggcgcggtggctcatgcctgtaatcccagctctcagggaggcaagaggcgggaggatagcttgagcccaggagttcgagacctgcctgggcaatatagcgagaccccgttctccagaaaaagaaaaaacaaaaaca

SEQ ID NO: 226845 - DNA, 561 bp, Homo sapiens
ggccaatgcactccagcctgggaaagagtgagactctgtctaaaaaaaataaaataaaataaaataaaatctttgcatgttctcagtgaaaaacaagaatctacgtaaagtacttggctggcacatagtagttttccaataaattgcaacttaatcagcagcactcattagcccctcctagtgcttacagctcatggaagaggagacttggttgtccacagatccagaaggatgagggtcctgcaaagagggtgctgagaaggaaaggtcacttctggctggggaataagacggcttcctggaggcaggagcatcttagttgagtcctgggagatgaggagggttagggtttgcggagggggagggcattatgggagaggaatgtgcactaaagctaggtgcgaggaggaaattttaccaatcaaagcagacagcgcctcagtgcagggaactggttgggtgcagtgatccctaaatcaccggctgagggggccctgccatgacctctgccagggtcctaccactgggccaccgtgaggggcgagttccaggcagccagta

SEQ ID NO: 226846 - DNA, 454 bp, Homo sapiens
ttaggtattaatagctgaactgaaaaatagagctaacatcaggctgcacactgtggaggaaataaccaaaatcccccaggaaaggaggatcaatatccaggattgctgtaagatactatctaaaatgtctaatttacaagaaaaaattacaagacatggaaagaaacaggaaagtgtgacccatacacggggaaaaagcaggtgataaaacactgccttagaagtggcccagatgacttttgtagcaggcaaaagatttgtcaacaaagagaatttgtgtgtgtgtgtgtgtgtgtgtgtgtgtgtgtgtgtgtctacaaatggaaattctggagttgaaaaggtacaataactgaaataaattcacaagagttcagtagtatatttgagctggcagaaaaaaatctgaacttgaaggaagatcagtggagattatgcagtctgaagaacagag

SEQ ID NO: 226847 - DNA, 390 bp, Homo sapiens
ttgttaccttgactagagtacctataagcaatgatttcttagagccagatagaaccggcttatgagaatcaattgctaaattgtcaggaatcttgccagatagttgtgaaaccactggtgacttgaaatcagtctacaggaacatgcacacaatggaaatcagaaaacatagttttatttgtccttacaatgtgtgtctggaaaatgttactgccagtgttctatgttctaaagttatttgaagtaatcatttcccctgtgtgattaggttttatattcaggtctgttcatttgtttctgtttgtgttcaattgtttctgtttgtgtttaatttgattttttcccatttgacttaattttggtttttgaatatatgagtaatttacatga

SEQ ID NO: 226848 - DNA, 414 bp, Homo sapiens
gaatatgagtcattaaattgtattatcaacttgatatctgttaatcagctctgctgaaaaatgggctgatacttttgggaataaaggctctaggatggggtgatgaggaggacagttctgcttaccatcagtcttgatgtcaggcttattcccaccacaagaggggcatggactcactctttggagtcctcttttcactaccactctgggtcgtaggattatgggtggagactagaatgtgtctttctttctcttcaaagctagttctagtcctaggtcaagaagaagagggagcgggccgggcgtggtggctcacgcctgtaatcccagcactttgggaggccgaggcgggtggatcacgaggtcaggagatcaagaccatcctggctaacacagtgaaaccccgtctctact

SEQ ID NO: 226849 - DNA, 438 bp, Homo sapiens
aatcttggataggggaggtgtcatcctttctgactttgtgactgcccttcccccaccctgtccccagccttccaccatttggtcacaaggatgcctgcctgaggtcgggacacaaggaatctccttgtctaggctgcagcgtgggggcgtggcagggaaagacagaagctctttggtcccggggccccatcctggaaaaggagagggagcaagggaaaggcctgtttacttcctcccttagagcaagccctgactcccggaaactgaggagagagcagagcctgggtctctgagcctgggtcccagagccctgccgaattacaaattatatcatagaaggaattcagggaagctgccaacctggggctcagaggggacggtcccagagatggggacaagagctgtggctggtgtcagagaatgaattcttagagatta

SEQ ID NO: 226850 - DNA, 473 bp, Homo sapiens
tctgtctagtttaattactttgaatttaacatacttgcgtaataaacacatatgtctgacaggttgtaaaaattggggcttttagacttcagctgcagacctaaaatatttgcatagctaattaggggctcttgtgtgatgtccatctttatgtcaagagagtagtacgttcaagagtagtatgtcaagagaggcacggtggctcatacctgtaatcccagcattttgggagactgaggtgggtggatccacgatgtcaggagatcgatatcatcctggctaacatggtgaaaccccatctctactgaaaatacaaaaaaattagccgggcgtggtggcgggtgcctgtagtcccagctactcgggaggctgaggcaggagaatggcgtgaacccgggagcttgccctgagccgagatcgcgccactgtactttagctggggcgacagagcgagactccatctcaaaaaaaaa

SEQ ID NO: 226851 - DNA, 412 bp, Homo sapiens
atttcaactttcaagtcttattatttacaaaatacattttgtaagggtataatagctaccacagatagtgagtcctctgatggatctgggcaaagtcaattaagaaccttcctgaaaggaacattattctagatgccatttagaacatttgtgatccatgtgaggaggtcaaaatatcaacattaacacgagtttggaagaagtgggttccagtcttcatggatgactttgaggagttcaagacttcagtggaagaagtccacttcagtaaatgaagtctagagatttcatctgtagaaatttgatctgagtcttttttttatatcttccatgtctccacttaacttttgaacatatataatgcagctataataaatgtgctaatgttcttgcctgccagtttttacatctg

SEQ ID NO: 226852 - DNA, 488 bp, Homo sapiens
ggcacaggcaaaagtgaagaaatatcaccttaggttctgagctgagtgatatgttacaatgcttcctgctagaagaatgcaaaaaagagtatctcaacacctggatgaagtgcccagtggaattttgatatatcactaaaaccagcatccagatgatatgattcttcttccagggtcctgcccacagatggattgtgacatctcactggaccagcacccacccaggtggtttggtgacatttgaacctcgattcagcaaacccgtggtgcttcgactctattaatggagcacaatcttcaagtgggattggggctgttatgcatgcatcttgcccattgttgagattgtgactgctgtactttgatccaactcataggagatgttgactctcacaccctaagccagtacttgtgtgtgactgtgaaatgtatttctgaacatttttgagtgtgtgattaaaaagtataactttgaccagcatctgaat

SEQ ID NO: 226853 - DNA, 310 bp, Homo sapiens
gttaatccatctgtgagggcagagccttcatgatgtaatcaccccttagaggtcctacctctcaacacctctgcattggggatcatgaactttggggacacagtcacaccatagcaggtagtattactgagtctaccctcagcactgtgattattccctgtagcttttaaaggaagacaaatggactaaaatggaatgtgataatacaagaaggaaagaaagaaagaaagaaagaaagaaagaaagaaagaaagaaagaaagaaagaaagaaagaaagaaagaaagaaagaaagaaagaaagaaagaaag

SEQ ID NO: 226854 - DNA, 404 bp, Homo sapiens
ccgagatcgcgccactgcactccagctggggcaacagagcgagactccgtctcaaacaaacaaacaaaaagtactgtcatttggttaacagctgccttttatggaggccaagctatgcaaaccaaactatgaaaaactttaagagtaaaagggaccctggatgccatttagcttggtcacttgccactacagaagctccttcagcaacaacccagcatgcttgctcagtgccttcatcctccagctgaggaaggctgcccactccagcctgatcaaccatgattgctagaaagtgtttccttggatttcaccaaaatcctctttctctcatttccatccagctgtcctaaactctgtctttcagggccatacagaacacaaacaacccctgctcaacatgacag

SEQ ID NO: 226855 - DNA, 571 bp, Homo sapiens
gaacaagccctccatggaaggagctcagaaggatcagctgcagacagtgaagcaatgagctttgagataaacatcagtgaagttttctgtggctccacgcactcctatcaggagaaaagctagctggctttgcagttgcgggggagtagggaagatgagtgtactatttcctcccaccaattttgttcagtactagaggaggtcttagagatcatctgagtcaattcctacagttcacagcctaggaaacggaagacaagacttgctccaggtcactgaactagtaggtggcaaaaatggagactagaatccagttgttcctaatatgacattctacttaaaaagcctgactaaatcttcctcaattagccacgggtgtcttcttttccagattattaacgagcaatgaattcttacttcatacaaatgcctatgaaatttgtatttatattatactaccttttcactcaatgtaagacatcagtaaagtgattcagttatcaaatatcatataaagaaccataatgggaaatgtttagttctagtctgttaaattgttcagttttagaaa

SEQ ID NO: 226856 - DNA, 856 bp, Homo sapiens
taatccaacatgaggcctgaaagaaacttgggccagaaaatctccagggtacctgcccgccgaagtcccttccgaggactctcctgagccagtggctgagacatgcacatccatggtggaagctccaggtctgggcagccctctccctgcagtcacagactatgcccactaggaacacccacctgggacaaagcctggccacagtcagagagcaggacggctctcaccaagcccctcaggtggctccccgccgctgaccctgtgctgcgtggcacaggcttccccaacgccctgccacatttggcttcctccaagcaggctatgtgcttaggatgagatgtggctacttttagcaaacaacactagagtggcttcagcccagccacggtgacttctcgctcccataagagctcaagagggagaggtgatctccctccccagccactggggaccccagttcctgttgcctattctgccactgtcatcttcctgcaccacctcatggtcctggatggctgcacaggctctagccgtcatgcccctattccagctaggagaaagggggaagcataagtggcaaggagaagcaccctccccttcttctttttttttaattgctctatacatttattattagctattattaatgcagaaccaggggacaaaaagctcacaaacactctacacaatttcacaagacacattgcaggggaaaaagtgactgagatggatcaacagtatgctagggtcttggtggactcattcctaggggaggtggacctctaattcctggtggagggggtctcattcctggagggggcatgcctactggtgtccctcgagcagagggaagccc

SEQ ID NO: 226857 - DNA, 370 bp, Homo sapiens
ttgttttattttcaatagggaaaattgagattttgtagtaaatttaatttcctagtagaaaaaaggtgcagtggttcatgcctgtaatcccagctctctgggatgccacagcacaaaggatcaccagaggccaggaatttgaaaccagcctgggcaacatagtgagacccccatctctacaaaaaatgtaaaactaatttaaaaagaaattagtaggactcagtggtatgcatctataatcccagttactcaggaggccaaggcaggaggttcacttgatcccaggagttccaggctctacagtaagctgtgatcacatcactgcactctagcatgtgcaacagagtgagaacttgtctcttttaagaaa

SEQ ID NO: 226858 - DNA, 350 bp, Homo sapiens
aaaacgggtgtttatattaattgcgagatttttggcattcattttgattttttaaaaatatgggactaggccaggctcggtggctcacgcctgtaatcccagcactttgggaggccgagatgggcggatcacgaggtcaggagattgagaccatcctggctaacacggtgaaaccccatctctactaaaaaatacaaaaaattagccaggcgtggtggtgggcacctgtagtcccagctacttgggaggctgaggcaggagaaaggtgtgaacccaggaggcggagcttgcagtgagctgagatcacgccactgcactccagcctgggtgacagagcgagactccatcta

SEQ ID NO: 226859 - DNA, 542 bp, Homo sapiens
atatattctcgtccgaaaatatcccttcacgaaacttgctttttaaaatgttgccctttgcccaccctatgctcctatagaatatttagttcagtgacgacatccatcctcttttggcgtcctagcacaaaagtatgcaatttttattctcttttaaataaactgtgcaaaattaattttaaaaatacggtttacaattcctcatgaatggcaaagagcaaaaaaaaagacgtttacatctttcgacaatgatcccgggcattaaggccaacaatgttagcaacgaagagactgggtaaaaagaggtgggctaatctttcataggactgcttccgtggtcgctaacaacaatccgcctgctcactggacaagcagcgacacaagctctggaagcttccagttcatttcgagattcacaatgcggaagaaaaaggccggcagccccgctccgcggtgcgcaaagatatgcgcgaagggaggaggacaagctggaggcggctcagccagctcagagaggccgggtggggatacgggggcggccg

SEQ ID NO: 226860 - DNA, 413 bp, Homo sapiens
tagacagaatctttgtgatggaggtggtctacgaactgggcctcgaaggacagataggatttgaaagaataaatttggttgggagaacattctaggcaggggaaatatcccagaagtacagttcctaccaacagaatgagtgctgtactgtaggtatatgtggtgatacccagctcggctgccttctagggacagcaggcacaggaatgagagttgcgcccattctgctcatgagctcccgggtttccaagcgggacctgtctgagccagggtgggcagccaacacccagctgttgtcctgcaggaacctgagccaggagtgaccagatgcttggttttctgaagaagccagaaatctgcatctttatttgagatgttcggattttaaaagtttatgtttaattcagttcttt

SEQ ID NO: 226861 - DNA, 578 bp, Homo sapiens
tagtccatctccattaactcagaattttctgggtttgcggtgacactaaatgtcacagtaacgagggttacaggaattcggaaaagataacgctgctttcaaagccgaggagccagtaaaacactacaaacgtcccctgccggcatgctccagcacacagcccgacgccctgctctcccggccggcgctcggccgcaggaccgcgctgtcccggctcctctcggcgctcaccatcctcccgaatgcccagggcccggccgtccggagcggcggcacgaggacgcggaaccgcagagcggctcacacggtccccacagccagatcactcggcccctggagcatgttaaaaacacagccacagaagagggattctccctgaagcggggagtggggatggaaaatgcaagcgcaggaggccacgtccggctcgcgcgggagggccgggggccgggttgggcagagggtaacgctggggcccgcaagggaacggccgggactggcctcgctcggggcgcaggggcgcactggcccctggctcgcacgggccctggggctttacttggcacgggagcggccgc

SEQ ID NO: 226862 - DNA, 355 bp, Homo sapiens
atgctgtattaaattggaaatgctgcattagcaaatgcactccgcggaggagacaactgtaattctaaccaggcagtgggaagttgagtcttctgcttaccgtttttcacaccggatgattggaagaaccttggggacacactgatggctccgtccatacaaaccttgcttctctgtttcccgccgacttccagcaccaagctccgttcggctaaggactcaacagcctcagccggccagcaaggatgtgcttccactgaatgaaaataatctcttgtggccgggcgcagtggctcacttctgtaatcccagcactttggaaggccgaggcggatggatcacgaggttgagagat

SEQ ID NO: 226863 - DNA, 413 bp, Homo sapiens
tcaatagcagaaagataactggaaacttggtgaatgttgaaaaataatataacatatatctaaattaaccatgggtctggaaatcaaatgaagagccgagtacattggcacgtgcctatggtcccagctccttgggaggctgttgcaggggggatccctcgagcccaggagtttgaggctggagcatactgtgttctactctccactgcactccagcctgagcaacatagcaagactctgtctctaaattaaaaaaaaaaaaatcagatgtgaatttacaaaatgttttgaagtgaatgcaaatgagaatattgtatatcaactttggtaatatgcagctgagagagtacttagaaatttatagcactgaaagtatcaactcagtgacttttcttccacttttagaagtttta

SEQ ID NO: 226864 - DNA, 493 bp, Homo sapiens
cgaccgccaggtgccccgaagcccggcctcccctcccacccccgcgcctgttcccggcgcagcccgagccgtggcagtcacgtctccccatccggccccaaagtaagagccagccgcagccgcgccgaccccgcgctgggtgggagggcgcggggagggcggggagggcgcggggagggcggggcaaggaggtgaggggagggcgggttgcccgggccccgcccgctgcgcccaggtcggccggggagaggcgcgggcgagtcgcagcgccgcaaccaccgcccctgccgggcgctcggcgagcgggggcagggcggggtgaggcgtggccggggatgccgcgaggccgcgcctccagggctgtgcgcgggcgggtgttgctggggagaaaagcgcggcacggccccgcccgagtcctgcgggcacagcgctctctgctggtgtgggttgagaactgcatgagactaattaaagaccaccatccacttaaaaa

SEQ ID NO: 226865 - DNA, 266 bp, Homo sapiens
ctgggctttcaatgacgaagatctgagctaggatggagggtgtgaggttggaggccaaggatttggaggtaaaattggaaggacttgggagtttacatgcaggaggccagagaggaagagggaggagtcaaaaacgatcattggaagaggcttttcactggagataaagagtgagggaggggacgctggggaaagaagtaagtttgagggaagaatttgtttttttttttttaatctgggcaattggagttagaccctgtctcgta

SEQ ID NO: 226866 - DNA, 593 bp, Homo sapiens
gtcatttcaaactttgtaactgtaatttttggcacttcaggaatcccaccattttgtggctgattgttctctgaaaggttatgatagcagccctggaaaaaaataagatctatgaaaggcttttggattacatatgaactgccctgattattaaaatacacttcgatgttgaagacttacaactgactttactcagggtgaattgttaaataaatgaacacttaggctgagtaatcagatgggtactgtgaaaagggtatttttgagatggagtgtcactgtgtacctgttggtagtggcaaccataattatagattcttatccattaaaatacttcagggttgctgtaagaggatatttgttctttagccttgttaggattctgtcacccccttctacccccattacctgtcttctcttatcctcagcatgtatttggccacatggactggtttttaactttatttttacccaaattgtttgaatttggtatcccttttgggggttggaatagcactactgccgtccataaatgctttcctcagggccatgcccattctctggctaccttccccttctgagaactcccctgc

SEQ ID NO: 226867 - DNA, 448 bp, Homo sapiens
gaattaaaacatagctcagagatgaaatctgaaagaaaacatggcccctctttgctaaacttcatagttttgatgctgttaattacactttgttttccatatgatgcctcatggtgaccaaagtaaggtaaattattttgaattaatattccctccaaaaattgttatccccaagcatgtaaaaagtaaaaagcaataaaagcccaagttgcaaagaaagatgtgcttctataagagcatttggaggctgccggaagatggtgcattccagagagcttaagactgagctttgataacagacagacccaaatttctgccacatttcacagtgtgactgtgcattggctgctcaaccttgctaagctttaatatttttgtgtaagaaaaatatatgtatttattgtacctaaaggttgttaagagaattaaatgagtgtgtgtacataac

SEQ ID NO: 226868 - DNA, 213 bp, Homo sapiens
agccagggtggtctgcatggaacttctttcccggagttccggcctcagctccgatgtccacccttgtccccaggtggacacagcaccgcccagcatttggtgcaactccacccttctgcagaacgggcccctccctgggaaggcatggcttgcaataacatccctctgtaccttttctggcttccccgccacaataaaacctctcagcctcag

SEQ ID NO: 226869 - DNA, 564 bp, Homo sapiens
gcaagctgcgtgtgttcgatttggaatgacttttcatgctggtactggaatggtcattcctttgttcatttgactatcctaaatgcatacatttctttagcccagtgggctttgtcttgagacagagtctccctctgtcgcccaggctagagttcactggcatgatctcggctcactgcaagctccacctcctgggttcatgccattctcctgcctcagcctcctgagtagctgggactacaggcgcccgccaccacacccggctaatttttttgtatttttagtagagacggggtttcaccatgttagccaggatggtctcaatctcctgacctcatgatctgcccgcctcggcctcccaaagtgctgggattacaggcgtgagccaccgtgcccggccactgtcttgacttttttaataaacagctctgtgaacttggagagatccattaaactttcctggtttttgttcctcaaatgagggaacataacaacacaatgtgccccaattcatgacttccatctaaggcctcgccacctctagaactgctgctgttccctgag

SEQ ID NO: 226870 - DNA, 317 bp, Homo sapiens
gaagaagtatggctcagtcttactcttggagtgtgctggttttgggtcacccccgcatcctcattctgggctgcgggctgttagcctgcatgcctgggctcctggctcgcctgcctcatagctgagcctttcagcagccccaggagtgtgtgcccaatggggcagtgagaggtgacctgctgacatccctcaagtgacagagtcaattcatgtctccaaagagagaaaagcatatccctcctccaagagaaaatacagagaaaaaaatggctctttaaaaaatatgtgcatgtttcataaaatcattgtcctctaat

SEQ ID NO: 226871 - DNA, 191 bp, Homo sapiens
accctgatcgggcatttgctttcacgtaagccatgggtcaagaactgctttcaaaatctagtgaattttggccaagcacggtggctcatgcctgcaatcccagcactttgggaagtcaaggcgggtggactgcttgatgtcaggagtttggcatcctggcctggccaacacaatggaaccccgtttccaca

SEQ ID NO: 226872 - DNA, 481 bp, Homo sapiens
atgtgtgtgtatgagcatgcgttttggtgtgcttatataaatatacacttatgcacagatgcacacatatgcacaagcagccgcacgcacgtttagtctcttaaaagactacagtgtcaaaaagtggatcagagcttagaatcaagctctgatttcaacaaaacccgcaagtaagaggcctgaagatggaaggaaatggaagagcatgaaccctctagtgttaccctcatggacccacgtgcaacgtcagacattacccagaagttgatcccacaatccttatgcctacttcagctgctggaggtggggagactcactctctgggtctcgggggtctgggtccctgtcaccttgtaaggtgctttgcctgcctgggcccacacccaggcccgggaactgcagggtaggatcccaaaccaagcctaccagcagcccctcctaggcatcaatcctctttaataaggaaatttgaaagtgtaat

SEQ ID NO: 226873 - DNA, 616 bp, Homo sapiens
tgatcaggaagcagcagaagcaggatagagcagaacaggtctgaagcagtgaagcaagagaataataaaaaaaaagaaaagaaaaagaaaatatgagtttggcgctaggaagaagagttatcaggactagagcaagagattagagatgttgtcacagagcctgggacaggaaatggaagagtcaggggagagaaggggagaaatcactgctatcaccaccaccagcagtagcagcaccagccccaggaaagagagtagaaatgccaggagatgggggcaggtggagaaggaagaagagggagacagtagtgagagtatagaggacatgcgtggagagtttccagaagaagacttgtctacttgtggaaagctgagaagttaagagagagaggcttaaaaccatgtcatgagatttggcagttggttgggagaagactggcgaagtttagagtataatttcattaaagtagtggggacaggagccagaattcaggagttaaagagtgattagctgttgaggatgcagaagtaagtacatgacactttccaaaatttggtgttgatagggaggccaagtgggtggacagtttggaagtgataggggtccgcctgtctt

SEQ ID NO: 226874 - DNA, 282 bp, Homo sapiens
  misc_feature (232)..(232): n is a, c, g, or t
  misc_feature (235)..(235): n is a, c, g, or t
  misc_feature (238)..(239): n is a, c, g, or t
  misc_feature (246)..(246): n is a, c, g, or t
tgatcaggaagcagcagaagcaggatagagcagaacaggtctgaagcagtgaagcaagagaataataaaaaaaaagaaaagaaaaagaaaatatgagtttggcgctaggaagaagagttatcaggactagagcaagagattagagatgttgtcacagagcctgggacagaagcaggaagcaagcaggaagcggcagaagcaggaagcagcagaagcaggaagcggcagaacnggnagnngcagaanacggcaccggcagaagcaggaagcgggtaccgagca

SEQ ID NO: 226875 - DNA, 424 bp, Homo sapiens
  misc_feature (374)..(374): n is a, c, g, or t
  misc_feature (377)..(377): n is a, c, g, or t
  misc_feature (380)..(381): n is a, c, g, or t
  misc_feature (388)..(388): n is a, c, g, or t
tgatcaggaagcagcagaagcaggatagagcagaacaggtctgaagcagtgaagcaagagaataataaaaaaaaagaaaagaaaaagaaaatatgagtttggcgctaggaagaagagttatcaggactagagcaagagattagagatgttgtcacagagcctgggacaggaaatggaagagtcaggggagagaaggggagaaatcactgctatcaccaccaccagcagtagcagcaccagccccaggaaagagagtagaaatgccaggagatgggggcagaaccacgaagcagcagaagggcagaagcaggaagcaggaagcaagcaggaagcggcagaagcaggaagcagcagaagcaggaagcggcagaacnggnagnngcagaanacggcaccggcagaagcaggaagcgggtaccgagca

SEQ ID NO: 226876 - DNA, 507 bp, Homo sapiens
ggtaaagcagcattctctcatgggaggatgaagacaatcctgtaatctaaagctgggtcatgtgcgtggaaagctttgaggcaactgaaacgaagttgatctaggcatggaggtatgtgtgcacaatccttattagtgtaaggctgctacatttttctcatggtgagatctgttttccagaaatcgtcttagaggaggtaggtcttaggaaatagaaaagagtcatctaataagacaagtctttgaaaagcaggagaaaaacaatgataccgtaaatgcatggtgacatatgggcatttgcctttttaattatttatgtaactacctttcctcaacttactcatttctcagtatttccttgtgatacgtgatacggcatttgtatatattttctacatttccatcaatcaaatatttacagtttttgctcatctaatagttcaaacaaaaaataatagagattactttgttcttttatttaaaataaagttgtgatgaaagttatat

SEQ ID NO: 226877 - DNA, 566 bp, Homo sapiens
taagtcacatggcatcacttctgcccctttccatcggtcaaggctactatgaaggtccactcagtttcaaggggagggaatataggatctcatctctctgtggaggcttgtcaatgtcacaaaaaaaaaaaaaaaaaaaagaaaagaaaagaagtggaatctgttcgccctttaaatctgggctggacttgtgatttgctgtgactgattggatgtgagggaagagatgttggcccacttctgaggctaggcctcaaggactctcgcagcttccacctttgccctcttgcaatcctgagaccaccatctgtaaagatgtccagccaagcctcctgacagatttgaggctgcgtggagaactgaggcccccagccaagagccagcatcagctccagatatgggatgacagaggccatcttagacactgtagccccacttgagccgcagatgacaggagcctcaggagtgacccaaggtgagaccagcagatgaactaccaagctgatcccagcccagactgctgtcctatagaatgaggggaaataaatccttgttttaatccacta

SEQ ID NO: 226878 - DNA, 552 bp, Homo sapiens
  misc_feature (320)..(320): n is a, c, g, or t
tccacttaatgtctacatttcttttcctattatctagttctagtcttaccaggctatgtccaggctcagcaagaaagaatgccatgatgaatttaatgatgtctgctatggatagatgataaaggaatcaagccatgaataacgtatttgctgatgtaatctttttcctcaaatccatcaatataaattaatctgccctctttatttgtatctactgaaatcctactcatcatccaagactaaacattctactactcaccctcactgcccaagaactatcaaactcctgagccaacaacttaatatgactagcttacacnatagcttttatagtaaagatacctctttacggactccacttatgactccctaaagcccatgttgaagcccccatcgctgggtcaatagtacttgccgcagtactcttaaaactaggcggctatggtataatacgcctcacactcattctcaaccccctgacaaaacacatagcctaccccttccttgtactatccctatgaggcataattataacaagctccatctgcctac

SEQ ID NO: 226879 - DNA, 424 bp, Homo sapiens
tcaagcaattctcctgccttagcctcccaagtagctgggactacaggcacatgccaccatgcctggctaatttttgtatttttaataggacaagatttcaccatgttggccaggctggtctcaaatacctgacctcaagtgatccatccaccttggactcccaaagtgctgagattacaggcgtgagccaccgcacccagtctctctgcttgctttttgtttgtttgtttctgaggcagggtcttgctctgtcactcaggctgaagcatagtagtgcgatcatagcccactgcaacctcaaactccagggctcaagcaatcctctcgtttcagcctcccaagtagttaaaactacatgtgtgtgccactacactgggctaatttgttttattttttggtgagacagggcctcactatgttgccc

SEQ ID NO: 226880 - DNA, 441 bp, Homo sapiens
cccaccttggctgggattacaggattatgattttcaggttttagactttatggattttgaccttttgggacttcagcattatgacattcgggattatggcattaaaaattgtatctcctgggactatgatcggctcccaatgtcaatagtgccacttttgagaaacctgatctaagctcaaacttgttgggacatatctcagccttgaagaatcaccttgacatgaatgttgagtataactcctggccagctataaaatttgcaagacctagtgcaaaatggtaatgcgggactcttgttcgaaaagcaggaaacaagtaccctgaaaggtacctacaatgcttttccctttcttccaaggtttctctctctctctttctctgcttattgtgatgttatttgctatttaatattctaagtaaagaaaaattaaaaatttaa

SEQ ID NO: 226881 - DNA, 495 bp, Homo sapiens
cgccgaagatagagactgatggctatgtggagatcaattatgtgattattgacattgtccaggagagagttaatgatgaacaggattgagatggtggttcagaatatggaaaaaaggtctttaagtttcaggtgcaaaataactcatagaggaaactgagcagtacatgctcaagtgcatgcaacttattttaaaccagtggatttgtttgtaaagccatgattttaaaaagacagtgacaatgtatatttttagaatttcccaagtaggattcttctgcatgttttagagggaatatgaggtatttcttggttgaccaaataatactgtggttaaagttgaatatttggcaccgcagatggctagaattctaaaagtgatgaaactaattggtctaacaagttaacactgcattattagcaaaaagaagcagatattgtaacactcagaatgaataatcttgagatctgtctcaggaatgaaagctgacatatt

SEQ ID NO: 226882 - DNA, 386 bp, Homo sapiens
acccattgaatcacgttcccctggttctgggttcaagtactgagaatcctatctatgaataattgccaaagaggccacagaactcctaaaaagacgagttttcggccaggcgcgttggcttacaactgtaatcccagcatttgcaaggccgaggcaggcagatcacctgaggtcaggagttcgagaccagcttgaccaacatggagaaacccgtctctactaaaaatacaaaattagctgggtgtgctggcacacatgcctgtaatcccagctactcgggaggctgaggcagcagaattgcctgaacctgggaggcagaggttgcggtgagccaagatcgcgccattgcactccagcctgggcaacaagaatgaaactccgtctca

SEQ ID NO: 226883 - DNA, 458 bp, Homo sapiens
tggatgtacttgagctgtgggatacagagcataaaggggagcacaccactaagataaatctaggttcttgtctcataaccaggaaaaattagacatgccgacaaattgaaagaagctttaggagtcagatcctgatagagaccagacactgctggaattctcactccaacaaaagattacttcaaggtcggaacccaaacctgggtgaagaataactcacttataacctggcaggatccatgatggtgccagccccttcaccaaatgtgaccataattcaaaaggatcacacagcaagtcataccacctggcacctctgagccccccttgcctcttctgcattccagaccctgctttaaaaacccctgtgttcccaccacagattgaaggtggaattgtttactgctcttcctctgctagcatagagaataaaggaaaatgtcgctccctcttatcac

SEQ ID NO: 226884 - DNA, 616 bp, Homo sapiens
agccagccaacaatctgccaggaagtgtttgtatgatttaaggtaggattgagcaagttcataactgaaaaaagaggtgtggaagagtgaaggtccagaaaggaggggacacgcagctcaaagtgggaagatctggaacacaggtggaggctgcagggatcactttcaacaggaggaaggaaacttttcccctgggagagatgtgacgccacaaatgatgggtacagaagacattcgtgggtggcaacggaggaagttcctgtgaacttttaactgtttgaaccttcagcatccagtcttccagtctctcttggctaggtgacctctcaagtttaatattttaccagttttgagtcattgcatccatcctaggcttcaaaacccttcatttttccctttctctcttgtcctgtgcctgccttttgagcgtttattttgctgctgtcattatcatttccatctattttctacccatttcttttgtctgcctcctttcttcccctctagctctctctcttgagatcatgtggggaacaagaaaaaaaatatctgaagaggaaggaggagaccctgtagaagagagagattattaaaaatctaagttcctgaggatcca

SEQ ID NO: 226885 - DNA, 337 bp, Homo sapiens
gtagagtacagagagagagagagataatgtgcatgtgcttggattttacactgaaatcattctagaaatttctaaatgcttcctctcaaattttgtactaattgtatgacaggctagtagcagtttgttgattgattgaaattgtgtaatattagaaataatgccagagaatattgtattaaaaactatttgctctaaagcttttccctccaatagctctatgacaccttggaattctctagtgaaggcctgagtcttattcgttgtatccataacttaaactgaaaactgcctgagacatagtaagttactaaaaactattagtagcttgaatata

SEQ ID NO: 226886 - DNA, 321 bp, Homo sapiens
agaattgctttcctgtagaggagaaggattgagacatgacctttggtgaaactgaagctataacttgaataatattcgttaatctggggagaataaaattttgaaaggagaaatttaattttgatgctcttctttaaaaccaagggctccacattgtctgtaagataaataattaaagctttatttactatggcattcaagggacttctcaattgggccccaatctacttttctgatatcatttctgatactacttttcacttatagtccagcaaggcctgtccactcactctcgttagacccttcatgctgtcctacctc

SEQ ID NO: 226887 - DNA, 527 bp, Homo sapiens
ggcagtgtgctgtgctgtgtacttggcatataaacaaggcttcatgtttagggcaatggagtatggagtaaggggactcacaggaaaagttgtggctgagaaagaagtgggggaatgggacatgaggcaggtctggaatgtgtgcactgaaataaagaagcaccccttcctatctatggaagctggccattttgtgtattttctggaaaacatgaaggtattccagagccagcatgaatcttacatcaaaacttctctcttctgtgactcaggcttccttctgtttgttcaaatagactcaacactgctgaacacaaattttaactgaaactaattattcctttcatgatttttttttaaagctctttataggtctctaaataaaatcactttgtttctatcagtcttgttgatctctttccctctctatgctgttatttttggatttcaaataactcggttgttgaaacctccgatatccctaggggtgaactgaatgaagtgttgcacggcattaaatgtcattg

SEQ ID NO: 226888 - DNA, 571 bp, Homo sapiens
caaattggtaattatttcagaagcaaattaagataacatcttagaaaatcaatttatggacttgagccgagtgcttcatacaacgaatgggttttttctaggtgtttgtcaccgggaattttcctgagaggcttgtatatattaatagaaaaggagtgtagcttttttttctcttcgttataatttaggtaaagtcttacaatgtgtgaacaaggctgtcatttttagcttgcgtttgaacgaaaacatgctatactttttggagaccctgattgagtaatcagtacttggggtagtgataaaccacaggtgagctaacttgcggcattctttagattaaaatttgatcgtcattgtttgttcccaacaatgatttgccaggaatggtatgcatacttctcttctgccccattcttccttgttctaatctcttcttaaatagttctgtttttcttttgctgaacaggaattcccaagtaaataattctttcttgtgaccgagggtgcagttggtgaggtcttcttgccttctgaatggccagtagctgcttccggactccggaaaatatgt

SEQ ID NO: 226889 - DNA, 495 bp, Homo sapiens
acaaaaagaatctaagattctgtgagaccaagaagctgtctttggccagacatagtggctcaagcctgtaatctcagcaatttgggaggccaaggcaaacggatcacttgaggtcaggagtttgagaccagcccagtcaatatgggtgaaaccccatctctactaaaaatacaaaaattagccaggcatggtagcacacgcctgtaatcccagctactctgaggctgaggcctgagaatcgcttgagcccgggaggtggaggttgcggtgagccgagcaagatggcaccactgcactccagcctgggctacagagagagactccatctcaaaaaaaaaaaaaaacaaaaaaaaaaacctgtctttgaaacataacttcatgtcacttaacacctcaacaatgtaataatttccttcactttcccaaaacttaaagaaacaaatgaacaaaatggcttctggtgattctattagctatattttctaagggggaggg

SEQ ID NO: 226890 - DNA, 311 bp, Homo sapiens
aatcaccttgctgtttaggaaagctggatatgcagaccagtgaatgcagagagaaagcaaagaggtttgtgtgtgctgggggatgagtgcgaggatggaagggagtgggaattcatttattgatatatacatacagagcactgcacccactttgtgccaggtactgtgttctgggtgctgttgtagcagtgaatcaagtagacaaacgttcggcccccatggaactcatgtgtagtgcaggagatcggaagcaaacatacatgtaatttcttagggggcgattcatgttatggagaacaataaaccacgat

SEQ ID NO: 226891 - DNA, 503 bp, Homo sapiens
catttagcaaacaccctctgatggaaggagagaaacgagtcacatattggtgttgcccaagggccaaaacacacatctgacttatttaattccagcaacatcactgaggttctactattatctcctcttgacacacaaggaaacccaggtgttgaataacttctccaaatacatccagctattaagagacagagctggatttccaaatgaagtatctttggcaccaaagcttgtgccctttccctctctgggcacctgctatgtgctagttgtgctatcagaaacagggcttacacagccaacaagggcatagcccctgacttgaagaagttcacaatatcccttgaaagacatgctgaaaaacttccctgattaggacacagatttttttttgtccccagttcttttacttctggacatgccttcctagattactgtttttcaaaccttgataattcatctttttgtttttgatagccactatgttatctattggtgagtac

SEQ ID NO: 226892 - DNA, 531 bp, Homo sapiens
tgaatcagaatctgtattttaacaagatcctcaggtggtttgcatgcatgttaaagtttgaggagcattggtagagggaactgtggctatttattttattggtcatgtgcatactaatttcccgacctctcttgattattaaaatgactgtgaacttactagaactacaacatattgatgtgagggaggtgtttatatgtgaaggtgattggcttccatgcagaaaccatgtaacacccagcctgaacagtttctgatgaggttgcccttaacctaggaaactgaaagataatgttgtcgtgtttttgatatatgactgctgtcctgctcaactttataaacatgtccaggaggtggggagcagtttgctactcttcatttgcaaatcaattatctttatataagtagcaaatagtctattttaaaagctcaaaagataatttttaaatgagaatttgctttgcatgaagtgtgtagatgttggaaaaaggtgactttgtctaattattctaatatatgaagtttaaagga

SEQ ID NO: 226893 - DNA, 1013 bp, Homo sapiens
atctaaaaatttttagaaaaatttttattctattgtcatgcctagttgatagtttggcagactacagaactttatgttagatgccatttttcttcagaattttgaaggcatggttctattattttggcaataatagagaaataggaaccttcatacattagtgttgggatttcaaaataatacactcactttgagaaacagtctgtcagttgttcaaaaagttaaatatagaattaccatatgatctagcaattccattctcagatatgtatatacgcaaaggaaatggagatatacatgcacatatgacttgttcgagcatattcttagtaatgttactcataataactaaaaaattaaaatttccctaacgtctatcaacagatgaatgtataaataaaatgtgtacttctatacaatgaaataatatttggccataaaaaggaattacaacacaaatgaaccttgaaagtattatgctaagtgaaagaaactagtcacaaaagactacgtattgtatgattccatttatatggggtctccaaaatagccaagtctacagagacagcaagtagattagtggtctcctagggctgagaatttggtagaaatgaggagtactgctaatatgtatgaggtttcttttgtggtgatgaaaatatactaaaattgattgtaatgatggttgcataattcaactaaaagtcattgaattgtacactttgaatggattaattgaatggtatgtgaattataggcatatgttgttttattgtgctttgctgatactgtgttttctacaaattgaaggttgtgacaactctgccttgagcaaatctattgatactgttttcccagattgtgcccatttcatgtctgtttgtcgcattttgataattcttacaatatttcagactttttctttattattataattgttatggtgatttgtgatcggtgatctgtgatcagtgattgttttctggtgccacaaatgtaagacactgaactta

SEQ ID NO: 226894 - DNA, 440 bp, Homo sapiens
atacctgaagtgtaaataaactaacatttcctcctctcccttggtggagcagcattggccaaaataataataattcaactttaggccaataagaatgaactatggatgattatcagcagtgtctattcacaacagggctaagaaccgagcagagggagttttgcagtacccaagctagatgccagaacagaaacaccccactttcttactcattgaattagcccgttttcatgctgctgataaagacatacctgagactggaaagaaaaaaaggattaatgaacttaacagttccacttggctggggatgcctcacaatcatggtggaaggtgaaaggcacatctcacatggtggcagacaaaataagagagcttgtgcagggaaactcccccttatataatcatcagatctcgtgagacttatactgtcaggagaacag

SEQ ID NO: 226895 - DNA, 460 bp, Homo sapiens
tattttataacttgactgatactaccaaattgtcctagaaatgttgggtcaatttagtcccaacgctgaaaaaggtgtttgtacatgcacgtttatagtagcacaatttgcaattgcaaaaatgtggaaccaacccaaatgcccatcaatcaatgagtacataaagaaactgtgtggccggccgcagtggctcacgcctgtaatcccagcactttgggaggccgaggtgggtgaaccacgaggtcaggagttcaagaccagcctgaccaacatggtgaaacaccgtctctactaaaaacacaaaaaattagctgggtatgttggcaggtgcctataatcccagctactcgggaggctgaggcaggagaattgcttgaacctgggaggcggaggttgcagtgagccaggatcgcgccattgcactccagcctgggcaacagtgcaagactccgtctcaaaa

SEQ ID NO: 226896 - DNA, 639 bp, Homo sapiens
tgtatttgtatttgtagtagagacggcgtttcaccgtgttatccaggatggtctcgatctcctgacctcgtgatccatccacctcggcctcccaaagtgctgggattacaggcatgagccaccgcgcccggccaacatccaaggattttggtgtccaaagggaggcctggaaccaatcccacacggatactgagggacaagtatatcatcccatttcatccctacagcagcaacttcatgaggcaggagttattagtcccattttacagaagaggaaactgagacttagggagatcaagtaatttgcccaggtcgcacaattagtgatagagccagggcttgaagcgacgtctgtcttaagccaatgacccctgcagattattagagcaactgttctccacaacagtgtaagcctcttgctagaagctcaggtccacaagggcagagatttttgtctgttttgctcattgctccttccccattgcttagagcagggtctgccacgaagcaggttctcaatgcatagttattaaatgtatataagagcaaacatatgttacagagaactttctgtatgcttgtcacttacatgaatcacctgtgagatgggtatgcttgttccccagtgttgcagatgaa

SEQ ID NO: 226897 - DNA, 483 bp, Homo sapiens
ttaatatatagttatctacaaagtagataaaatgaaatcattaaaaataatccagaggaagcagaaaagggaaaaaggaacaaagaacagataggacaataagaaaaagaatagcaaaatagtagatttaaactcaactatatcgataatcacactagatataaatgtcctaaatacactaattaaaatgcaaagaatgtcagattggctaaaaatgcaagagccgactattactgtcaacaagaaaccctttttaaatctaaagacataagtaggttaaaggtaaaaggatggaaaagcgctaatactaatcaaaagaaaattgaattggtatatcaatatcaaagtagaactagagcaaagagtagtaccaaggatataaaagaggcttgtttcattatgacaaaggggccgtttcacgaacaggacatagcagttctaagtgtttaagcatataataacagagcatcaacataaatgaag

SEQ ID NO: 226898 - DNA, 601 bp, Homo sapiens
ttacaggattttcttggtaggtttttttaccaacttccctctccagcaaagagcctaaaatgactgataataccatgttgctgtctttctccagggctcagccttctttaaatgggcctgcttcttcatctggtatttaatctgagatggaaagtgagatgcgaaacccaattttccctttcacttggtcacatgcccagaagcagcagcgttcagtgggccgagtactggcgtggaaccttcctctgttcccatgtctgtggcgtggcacgaacctgtgatgtggggctctcccgcccttgccctggaggggccttcagggacatgtggctcacccatctgttattgtcacatatcccccagaggaaggagggacaggctgtgaggttagcttgtttattttatgaggaaacaggcacagaaaaattaatttacagagtcttggacaaaatcccaaaggaaggaggagtgggaagagcagagagcggataaacagcacaacgccatccctggacacgcctagttcttgcttttatttaaattttggtaggttctgtggccacacccactttaggctaggtactgggagacaacctctggg

SEQ ID NO: 226899 - DNA, 372 bp, Homo sapiens
tttcagttatgttaggacaacctatgtgggttcacatttggcttaatactaccctacttctccaataagtatttaagcatttattaaaatcaaacttttcaagttaaccacttctactaccctagtctctctgagaaagacatgacacaccttacttcaacgaaaaaaaaggtcttttttcctcacaaatattttctcataaactttattttttaaaggcttttaaaaccagattctaatttaattaatctagatttgcaaaattataaaggaaaagtcttgccggttgttgctttggttatgttaatttcacaatttagtaaattgtgactatgtacaaagcagccttttgcgggggccgggggtgtttca

SEQ ID NO: 226900 - DNA, 398 bp, Homo sapiens
gatgctgggttgatagccttacttccttcccacatgagccttttccacatggcagtttacttcatcaaaacaggcaagccaagaagaccagagagaacatctggtaagacatgccacagtcttttgtaactcagtcatagaagtgacatcctgtctgcattaccatactcttggttagaagcagatcactaggttagaagcctgcttaatgggaggggtgacatggacatgaaggacatgaacaataggaagctgggatcattggaggccatcttggaagctgtcttccaaaatagttgcctaccatgccttggttttctctgtttgcattaacctttttttcccctctatatttactgtgattatcttgagtaatttaaataaaatttttcatttga

SEQ ID NO: 226901 - DNA, 563 bp, Homo sapiens
gaggggagactaatggaaactatggggaggctatcccccaagcctccgctgaggccaccgctgtctgtgtcccgagggccctggagtaggaggtgtcaatgacggactcaatgaatgaatgaattgatcccaccaccaccagcggcaggcccgcctcttccttccacagcccaccttggcctccccgcctcgccaggtggcaaggccttcgctcctggtccctgagcgccgctcgcttccctcccgcgtgggcagggggcagccgcgacgccggcccagcgcctccgagccgggaaccgcacagcacccggcgatggccccgagccccgcgcgcccgaagccacggcgccgctcgctgggggcctcgggacggcagggacggctgggggtggcgcggaccgcgtccccgaggcgcgtagcgcgcgatcgaaccacgcgccccgcccgctgcggtcctctaacagcccctcgcgccgccccacgtggggccgcacgggctggcggccccctcacccgattggccgccgcacagccaatcagagagcggaggcgatagcggccgc

SEQ ID NO: 226902 - DNA, 507 bp, Homo sapiens
agttttatatgtttattgaactaatacatgatcctgtataacatttgtaaaatacagaaaaatacaaagatgacaacaaaataatttaaaaacattaaaaaatactgattttagagataatcaatgttaattttttcactattgaaaacatttgatgaagatcttgtcattcttttttcattatctttttatataaatggattatttcacataatatattaatttgtacttttttgtaaatttagtaatgtagtgtaagcattttcttcattttattaaatatgcaactgcaacatcacttttagttattgaatatgtcctttgtagaaatgtgataagttatttaatcaaattcctagtattggacattttctttgttttgtgtaacacaatttgttgttgtgtgtaaaatatgtgcttgtaattatgttgttgcataaactgtggttatttccattgctatatttgtgtatacggaatgcatattcttaatacttttaaacttta

SEQ ID NO: 226903 - DNA, 459 bp, Homo sapiens
caggactggcaactcagtatgtggtttgcttataaacctgtgaacacagaaatttctgctcctagtagatggaccttcctgtacaggaatacactggaacctcaaaatcagaatttcaggacagttttgtcttacgtgggaacagggagcaaaagaaggacatgacttagggtggcggcattgggtcatgcaatatcaggttgaactgcagaggggatagagactgaggtcaaccttcaataaaaattatggacaccaagactccggtgaatttccttggctgtcaatatttaatgcctattgtaacatagtgttaatgttatacatgactttactggaaaaggacaactgaaaattctgtatttggagctttcctggactctgctttgtgggtctcttcccttagctgatttcagtgcatgccctttcactgtaataaatgataactatgagtattga

SEQ ID NO: 226904 - DNA, 1133 bp, Homo sapiens
cactttgctaagagggaaacagaaaaacattactccagccacacaaatatgatactgtgcaagtatcccactcttactcattcaaatcctacccattttttcccatcgtggaacagagtcttgccaacttatacctctctccaataacccataaagatggtgatttgaatttgggccaagatttaacattttatgaaatacaagaggagagttttctgcaaaacacaggatttgcagacaaggagacttaggttcaaattccagttctgccatttattacctcagagaggtcatacaactttcctgaagttgtatgacctctctgagccttagtctcctcgtttgtaaaatgagagttaaaatctacctcatggaatcattgctaagattaagcaagatatataagtagagcttgtgcacatggtaggtacttggagaatgttatttctccttccctcttactcatctggacaagtttaactagaattctaaacagttaaatatgtatcaatcctttgtattaaatatcttgatggtaaaatgttaaaatattgatgtgaataacagctggtattgaatattcaaattaggggaactctttcattgttttaagataacatctgtacatttaatctgtgccatgcaataaaacagcttttcctgaaacagctttttaaaaactatttttaagaaattcataagttacttttaagaacattagcttagaacatcttcccctttcacaacaaattagacattagagccaaaattgcccaaattggtatagtttctatctccctacactttaatcaagatgtttgtctttatatcagcaaaaaccgctacttaagtgagattcctgcatcccaataaatgtatctgggcatttggtacttgagagaggattgggtttgacaacacccagaagctaatgaggatgtgccttctctcagacctttgcattcaggagcaagaaagcagaaatactttgtggactccttttcagacactttacaaaatacaaaattttaaccttgtgaaacacaaaataaatgcaggataaatgtccaaacattttagcccctactgtttttgaaactgaataaagccatgatagtgaaaaatattttcca

SEQ ID NO: 226905 - DNA, 683 bp, Homo sapiens
ttggcagggaggccatggctccttaactatccaggaaggccctctgccctcttactcagcgcttcagcagaacagggctgggctcttgatcctgagacagctgggagtctgcaaggtgtgccccatgctttccttcaatgtagagatgccttttacctcccattagagtgcttcagaggctacttagggtgccttaggaaaaggtatcgttattgttattccattagtctgtaaccttctagattttagctgaatgaaactctaaaccacttaaaacacactgggctcagtagcatacaaaatcgctctgtgcttagaggcgtctgcaaagtggtgggcgtgctgccccagtggctgtcactctggctgctgcccttatgtctccttcaagggtacatggaagagagatgagggacacatgcctaaggtcggcttctaccacattcctatcccactttctcagccggcttcctactttttcactgcctctgaaatagacacagacctgccagtcctggaaggcctcaagcctctggaaaagcgaagatcacttttccccaaagatgttaattccaaacttgtttatgttcctccttggaatgacagcttataaaaatatgtgcagtattaagagatgaagcctgagggtgaaggacaacatagtacttgacaggcaccagaat

SEQ ID NO: 226906 - DNA, 385 bp, Homo sapiens
gagaaattgtcagaggccaggttttatagggcatgctgaaattggatgttatcagtgaccagaagacccggatgcctgggaggtgaacaagccttcagctgcctttgctatgggaatacagtttccaggtactgccttgcctaacatccctttcaagtagactgccctttctattaaataaatcccttccttacttacaaggaaattctggagctgtctctgtacctgtctgtccatgaacaaatagtggaggcaaaactaataaattccagctagtgtcatggattgtggggtaacgactcactaatgggtgttagctggggagaattttgtgttagaaggggaatctcagcttggatgtgatatgctcagatttcctgtttgg

SEQ ID NO: 226907 - DNA, 415 bp, Homo sapiens
atttctcgtacttcagggacaaaaataatttggctactaacgaattagggctacctgccagtgccaacacatagtgtaggtaagaggaacactataaagaaaagctgctggcagcaaatccgttgaaactttcatatgtaacagcgtttctatttctgctcttcacatctttgaaagaaagtgtgttttagaaaagaaaatgttaaaaaacagaagatatgatctttcttaaaaatgtatgtgtagctccactttaatatttctcattgtggagatgcatggggtttcattatgtcctatgcactcttggttcccctacctttcccaatcaattctgtcacattgaccaacctaaggatcagatgcattgagagtaagtgtaatagagaagaaatgaaattcactgcatagagcc

SEQ ID NO: 226908 - DNA, 4154 bp, Homo sapiens
gccccgggtctcactctccccagcctgcccctcaacgagcctcagcctctgggcttaactgcagcctctgcgtgactgcctaggccctgaataactcactgcgaactagcgatggcaggaagtgctgggcagggaggggaaggggcagcggctggtgctggcctctgctgcctctttgccccggggacatgtgctaagagtgccaggcccctgcggagtagtgaggtactccctctgcgtgctgcagtgttcacgagtaccggctgtccagctggctggggcagcaggaggacacccacaggatcgtgctctaccaggcagatggcacgctcacaccctggacccagcgctgcgtgcgccaggccgactgcatcctcatcgtgggcctgggtgaccaggagcccacagtgggcgagctggagcggatgctggagagcacagctgtgcgtgcccagaagcagctgatcctgctgcacagggaggagggcccggcgccagcgcgcaccgtggagtggctcaacatgcggagctggtgctccggccacctgcacctctgctgcccgcgccgcgtcttctccaggaggagcctgcccaagctggtgaggcggggagaggaggctgcctgcccgtggctccgtggttcatttcctcgaacgttcgaagcattcttcacattccccacctgattccctgacacctgcgctcctgggcccttcctgtgcttgtgaacgtgaccctgcctcacgtctccttcatcttgccctttgggcctctggtggccacggctaggaagcagccggtgcagtgggggcaggcacagggcggccatcgggctgggggctcagcgaaccccggggatgggcctgaatcagggggctcagcaaaccctggggatgggcctgacgtcaggggggctcagtgaaccctgggggatgggcctcatgtcagggctgctcagggctgaggctgaggcccccacatccagctgatgagggtgtcctcaggccagcgctgctccctcctttgggcagaaggccctgagacttttaattccggtgtcctcaggcagcccaggggcctgagagtgaggggtgtggggagtctgctcatgctcacggcccccagcccacagctctgtccagaaacccacgccctgaaggcaccatctgctgcaggatagagggaccccagtgggaacagctctgaggatgccttctggccccccacccgggcccactctctggccccccacccgggcccactctcttgcccacgtaccctctgccagtgtcctccccccagtagctgagctgtctctggggcccggtccgggcactgaggtgctgaccagtcgtatcaggcagggcctgctgcatgctggagaggatttggggtcagtttgggtcagaagtggaggaaactccccccagtcaagccaggatgcgaggtctcggccgagggtggggccctgcaccagccctgcctgacggctcctcccccaggtggagatgtacaagcatgtcttccagcggcccccggaccgacactcagacttctcccgcctggcgagggtgctgacgggcaacgccattgccctggtgcttgggggagggggagcaagaggctgtgcccaggtgggcgttctcaaggccttggcggagtgcggcatccctgtggacatggtgggaggcacgtccatcggggccttcgtgggtgccctgtactctgaggagcggaactacagccagatgcggatccgggccaagcagtgggccgagggcatgacgtccttgatgaaggccgcgctggacctcacctaccccatcacgtccatgttctccggagccggcttcaacagcagcatcttcagcgtcttcaaggaccagcagatcgaggtgcacccccaccctcaggagcccatgcagcccccagtgcctgtcccctcctggccccccacctcttggccctgggtcagcctccccagacacaggacaggagcgtgatgggagagggcccatctgagccccgtccgcccgcaggacctgtggattccttatttcgccatcaccaccgacatcacagcctcggccatgcgggtccacaccgacggctccctgtggcggtacgtgcgtgccagcatgtccctgtccggttacatgccccctctctgtgacccgaaggacggacacctgctgatggacgggggctacatcaacaacctcccagcggatgtggcccggtccatgggggcaaaagtggtgatcgccattgacgtgggcagccgagatgagacggacctcaccaactatggggatgcgctgtctgggtggtggctgctgtggaaacgctggaaccccttggccacgaaagtcaaggtgttgaacatggcagagattcagacgcgcctggcctacgtgtgttgcgtgcggcagctggaggtggtgaagagcagtgactactgcgagtacctgcgcccccccatcgacagctacagcaccctggacttcggcaagttcaacgagatctgcgaagtgggctaccagcacgggcgcacggtgtttgacatctggggccgcagcggcgtgctggagaagatgctccgcgaccagcaggggccgagcaagaagcccgcgagtgcggtcctcacctgtcccaacgcctccttcacggaccttgccgaaattgtgtctcgcattgagcccgccaagcccgccatggtggatggtgagtggaggcgcaagacgaagccgtggagacgtgcgtgacctcctgatgctgtgttgggcttgaacccccccaccccagaggcccacggcctcccctcccgcccacgtccacgcccaggctccagcagctggggtgcttggtggcactcctccgtcccgggcaccacgtgttcccacagcagtgggactgtgaccaccccgggtcacccagcccctgcccttcattcacctcaactcccagccacacctcaggcctgaagtagaaccacgttttgcctcccaccccacccagtgggaaatgggaatgaaggctgcttgttggaggggccgcaggacaagaagggcgggtccactaccctccatgctccatccagggccctgcgcttgggccttcagccagtggcctcctcacagcagaactggacattctcctgggagacgtcttcatggctgccgcaggccgagagggccctgggcaaggcagcccctatccacagttgccaggtctggggtgctggagccctcagggtgcttggctgacaaggggaggagtgtctgcccgctccttgtccttgtggaagacccacgaagtgatgtgctggggcaaagctggagccagacagaaccaggggtggtgtgcagggctgccctgggaccaggtggctgcgtgtagggccccgggccaccttggaggcgggggtgggcatctgtggccggttctgcctctgagtgtggctatgctgggtacggtcccttccttgggaggggactgacgcagccctaccctcggtgccagacgaatctgactaccagacggagtacgaggaggagctgctggacgtccccagggatgcatacgcagacttccagagcacctcagcccagcagggctcagacttggaggacgagtcctcactgcggcatcgacaccccagtctggctttcccaaaactgtctgagggctcctctgaccaggacgggtagaggcctctgctaaagagcccggatgcagcgtcttccgtgggactgtccccaaggctgaggctcctgccaagtcctaggggcctctgtacctgccctgctggaagccctgacttccccggggccccaggctgtgttagggttctctgggcctcttctttgtaccagcagccctgcatacagggccctgtgagcccccctgcagtcctgtgaggcccctgaagctctgtgaggcccctgaagctctgtgaaccccctgcagccctgtgaggccccccgaagccctgtgaggccccccgaagccctgtgaaccacctgctgccctgtgaggcccccaaagccctgtgaactgcctgctgtcctgtgaactgcctgctgccctgtgaggtgtgggagccctgatgctgccgtgtgatgtttcaataaaggtggatctcactgttaaaa

SEQ ID NO: 226909 - DNA, 2434 bp, Homo sapiens
ggcgaccacggtgcatgccgttcgggactcagaattggccaagctgccggcaggagccctcacgtccatcaagcgcaggtacccacaggtggtgactcggctgattcatctcttgggtgagaagatcctgggcagcctccagcagggacctgtgacaggccaccagcttgggctccccacggagggcagcaagtgggacttggggaacccggctgtcaacctgtccacggtggcagtgatgcccgtgtcagaggaagtgcccctcaccgccttcgccctggagctggagcatgccctcagcgccatcggcccgaccctgctgctgactagtgacaacataaaacggcgccttggctccgctgccctggacagtgttcacgagtaccggctgtccagctggctggggcagcaggaggacacccacaggatcgtgctctaccaggcagatggcacgctcacaccctggacccagcgctgcgtgcgccaggccgactgcatcctcatcgtgggcctgggtgaccaggagcccacagtgggcgagctggagcggatgctggagagcacagctgtgcgtgcccagaagcagctgatcctgctgcacagggaggagggcccggcgccagcgcgcaccgtggagtggctcaacatgcggagctggtgctccggccacctgcacctctgctgcccgcgccgcgtcttctccaggaggagcctgcccaagctggtggagatgtacaagcatgtcttccagcggcccccggaccgacactcagacttctcccgcctggcgagggtgctgacgggcaacgccattgccctggtgcttgggggagggggagcaagaggctgtgcccaggtgggcgttctcaaggccttggcggagtgcggcatccctgtggacatggtgggaggcacgtccatcggggccttcgtgggtgccctgtactctgaggagcggaactacagccagatgcggatccgggccaagcagtgggccgagggcatgacgtccttgatgaaggccgcgctggacctcacctaccccatcacgtccatgttctccggagccggcttcaacagcagcatcttcagcgtcttcaaggaccagcagatcgaggacctgtggattccttatttcgccatcaccaccgacatcacagcctcggccatgcgggtccacaccgacggctccctgtggcggtacgtgcgtgccagcatgtccctgtccggttacatgccccctctctgtgacccgaaggacggacacctgctgatggacgggggctacatcaacaacctcccagcggatgtggcccggtccatgggggcaaaagtggtgatcgccattgacgtgggcagccgagatgagacggacctcaccaactatggggatgcgctgtctgggtggtggctgctgtggaaacgctggaaccccttggccacgaaagtcaaggtgttgaacatggcagagattcagacgcgcctggcctacgtgtgttgcgtgcggcagctggaggtggtgaagagcagtgactactgcgagtacctgcgcccccccatcgacagctacagcaccctggacttcggcaagttcaacgagatctgcgaagtgggctaccagcacgggcgcacggtgtttgacatctggggccgcagcggcgtgctggagaagatgctccgcgaccagcaggggccgagcaagaagcccgcgagtgcggtcctcacctgtcccaacgcctccttcacggaccttgccgaaattgtgtctcgcattgagcccgccaagcccgccatggtggatgacgaatctgactaccagacggagtacgaggaggagctgctggacgtccccagggatgcatacgcagacttccagagcacctcagcccagcagggctcagacttggaggacgagtcctcactgcggcatcgacaccccagtctggctttcccaaaactgtctgagggctcctctgaccaggacgggtagaggcctctgctaaagagcccggatgcagcgtcttccgtgggactgtccccaaggctgaggctcctgccaagtcctaggggcctctgtacctgccctgctggaagccctgacttccccggggccccaggctgtgttagggttctctgggcctcttctttgtaccagcagccctgcatacagggccctgtgagcccccctgcagtcctgtgaggcccctgaagctctgtgaggcccctgaagctctgtgaaccccctgcagccctgtgaggccccccgaagccctgtgaggccccccgaagccctgtgaaccacctgctgccctgtgaggcccccaaagccctgtgaactgcctgctgtcctgtgaactgcctgctgccctgtgaggtgtgggagccctgatgctgccgtgtgatgtttcaataaaggtggatctcactgttaaaa

SEQ ID NO: 226910 - DNA, 1223 bp, Homo sapiens
attcggcacgcaggggctcggagagcaggctctgccccgtcccctggctctgcatgcctgtccagggggtaaccagggctggcttctccctagcggatgtggcccggtccatgggggcaaaagtggtgatcgccattgacgtgggcagccgagatgagacggacctcaccaactatggggatgcgctgtctgggtggtggctgctgtggaaacgctggaaccccttggccacgaaagtcaaggtgttgaacatggcagagattcagacgcgcctggcctacgtgtgttgcgtgcggcagctggaggtggtgaagagcagtgactactgcgagtacctgcgcccccccatcgacagctacagcaccctggacttcggcaagttcaacgagatctgcgaagtgggctaccagcacgggcgcacggtgtttgacatctggggccgcagcggcgtgctggagaagatgctccgcgaccagcaggggccgagcaagaagcccgcgagtgcggtcctcacctgtcccaacgcctccttcacggaccttgccgaaattgtgtctcgcattgagcccgccaagcccgccatggtggatgacgaatctgactaccagacggagtacgaggaggagctgctggacgtccccagggatgcatacgcagacttccagagcacctcagcccagcagggctcagacttggaggacgagtcctcactgcggcatcgacaccccagtctggctttcccaaaactgtctgagggctcctctgaccaggacgggtagaggcctctgctaaagagcccggatgcagcgtcttccgtgggactgtccccaaggctgaggctcctgccaagtcctaggggcctctgtacctgccctgctggaagccctgacttccccggggccccaggctgtgttagggttctctgggcctcttctttgtaccagcagccctgcatacagggccctgtgagcccccctgcagtcctgtgaggcccctgaagctctgtgaggcccctgaagctctgtgaaccccctgcagccctgtgaggccccccgaagccctgtgaggccccccgaagccctgtgaaccacctgctgccctgtgaggcccccaaagccctgtgaactgcctgctgtcctgtgaactgcctgctgccctgtgaggtgtgggagccctgatgctgccgtgtgatgtttcaataaaggtggatctcactgttaaaa

SEQ ID NO: 226911 - DNA, 1492 bp, Homo sapiens
ggcgaccacggtgcatgccgttcgggactcagaattggccaagctgccggcaggagccctcacgtccatcaagcgcaggtacccacaggtggtgactcggctgattcatctcttgggtgagaagatcctgggcagcctccagcagggacctgtgacaggccaccagcttgggctccccacggagggcagcaagtgggacttggggaacccggctgtcaacctgtccacggtggcagtgatgcccgtgtcagaggaagtgcccctcaccgccttcgccctggagctggagcatgccctcagcgccatcggcccgaccctgctgctgactagtgacaacataaaacggcgccttggctccgctgccctggacagtgttcacgagtaccggctgtccagctggctggggcagcaggaggacacccacaggatcgtgctctaccaggcagatggcacgctcacaccctggacccagcgctgcgtgcgccaggccgactgcatcctcatcgtgggcctgggtgaccaggagcccacagtgggcgagctggagcggatgctggagagcacagctgtgcgtgcccagaagcagctgatcctgctgcacagggaggagggcccggcgccagcgcgcaccgtggagtggctcaacatgcggagctggtgctccggccacctgcacctctgctgcccgcgccgcgtcttctccaggaggagcctgcccaagctggtggagatgtacaagcatgtcttccagcggcccccggaccgacactcagacttctcccgcctggcgagggtgctgacgggcaacgccattgccctggtgcttgggggagggggagcaagaggctgtgcccaggtgggcgttctcaaggccttggcggagtgcggcatccctgtggacatggtgggaggcacgtccatcggggccttcgtgggtgccctgtactctgaggagcggaactacagccagatgcggatccgggccaagcagtgggccgagggcatgacgtccttgatgaaggccgcgctggacctcacctaccccatcacgtccatgttctccggagccggcttcaacagcagcatcttcagcgtcttcaaggaccagcagatcgaggacctgtggattccttatttcgccatcaccaccgacatcacagcctcggccatgcgggtccacaccgacggctccctgtggcggtacgtgcgtgccagcatgtccctgtccggttacatgccccctctctgtgacccgaaggacggacacctgctgatggacgggggctacatcaacaacctcccagcggatgtggcccggtccatgggggcaaaagtggtgatcgccattgacgtgggcagccgagatgagacggacctcaccaactatggggatgcgctgtctgggtggtggctgctgtggaaacgctggaaccccttggccacgaaagtcaaggtgttgaacatggcacgcgacatcgccaggggatcctct

SEQ ID NO: 226912 - DNA, 921 bp, Homo sapiens
cgggtcacccagcccctgcccttcattcacctcaactcccagccacacctcaggcctgaagtagaaccacgttttgcctcccaccccacccagtgggaaatgggaatgaaggctgcttgttggaggggccgcaggacaagaagggcgggtccactaccctccatgctccatccagggccctgcgcttgggccttcagccagtggcctcctcacagcagaactggacattctcctgggagacgtcttcatggctgccgcaggccgagagggccctgggcaaggcagcccctatccacagttgccaggtctggggtgctggagccctcagggtgcttggctgacaaggggaggagtgtctgcccgctccttgtccttgtggaagacccacgaagtgatgtgctggggcaaagctggagccagacagaaccaggggtggtgtgcagggctgccctgggaccaggtggctgcgtgtagggccccgggccaccttggaggcgggggtgggcatctgtggccggttctgcctctgagtgtggctatgctgggtacggtcccttccttgggaggggactgacgcagccctaccctcggtgccagacgaatctgactaccagacggagtacgaggaggagctgctggacgtccccagggatgcatacgcagacttccagagcacctcagcccagcagggctcagacttggtgaggagctgggcatggtcccacctggtgcccacagctgagccttggtgcctggccctgtgccggccactccctccctgtggtcccaccgggttaccagcgctgcagagcccctgccctgcctggtcctcacctggaacatgcggtctgcttgcaggaggacgagtcctcactgcggcatcgacaccccagtctggctttcccaaaactgtctgagggc

SEQ ID NO: 226913 - DNA, 477 bp, Homo sapiens
ggcgaccacggtgcatgccgttcgggactcagaattggccaagctgccggcaggagccctcacgtccatcaagcgcaggtacccacaggtggtgactcggctgattcatctcttgggtgagaagatcctgggcagcctccagcagggacctgtgacagggcatgtcctggccaacgtttgtggagtgtggtttgaacgtgaactgaccctggtctgcctactaggtgctgcccaggcccagtgtgaaggctgcattctgcgccatcttcagctctcagacccgaacacctgaccctggcacaggctgcgtcttcattacagattcgaggctttcttgatctcctacctctagttggcaggaggtggggcctcctctgctttctctgcaggggtgcacagttggggggatgtctgctggtcagggggtgcacagttgggagggatgtctgctggtcagcgggtgcacagttgggggga

SEQ ID NO: 226914 - DNA, 1129 bp, Homo sapiens
ggcgaccacggtgcatgccgttcgggactcagaattggccaagctgccggcaggagccctcacgtccatcaagcgcaggtacccacaggtggtgactcggctgattcatctcttgggtgagaagatcctgggcagcctccagcagggacctgtgacaggccaccagcttgggctccccacggagggcagcaagtgggacttggggaacccggctgtcaacctgtccacggtggcagtgatgcccgtgtcagaggaagtgcccctcaccgccttcgccctggagctggagcatgccctcagcgccatcggcccgaccctgctgctgactagtgacaacataaaacggcgccttggctccgctgccctggacagtgttcacgagtaccggctgtccagctggctggggcagcaggaggacacccacaggatcgtgctctaccaggcagatggcacgctcacaccctggacccagcgctgcgtgcgccaggccgactgcatcctcatcgtgggcctgggtgaccaggagcccacagtgggcgagctggagcggatgctggagagcacagctgtgcgtgcccagaagcagctgatcctgctgcacagggaggagggcccggcgccagcgcgcaccgtggagtggctcaacatgcggagctggtgctccggccacctgcacctctgctgcccgcgccgcgtcttctccaggaggagcctgcccaagctggtggagatgtacaagcatgtcttccagcggcccccggaccgacactcagacttctcccgcctggcgagggtgctgacgggcaacgccattgccctggtgcttgggggagggggagcaagaggctgtgcccaggtgggcgttctcaaggccttggcggagtgcgtcctgtgaggcccctgaagctctgtgaggcccctgaagctctgtgaaccccctgcagccctgtgaggccccccgaagccctgtgaggccccccgaagccctgtgaaccacctgctgccctgtgaggcccccaaagccctgtgaactgcctgctgtcctgtgaactgcctgctgccctgtgaggtgtgggagccctgatgctgccgtgtgatgtttcaataaaggtggatctcactgttaaaa

SEQ ID NO: 226915 - DNA, 370 bp, Homo sapiens
gagtctcagggtatatatcgccaggggactactctgatgaggctttctaataatactcaggactcacggaagacttgtctgagctatcaaaattctcacattactattactatcatcatcatcatcatcatcatcatcatcatcatcatcatcattactctgagatagggtcttgctttgggacccaggctagagtgcagtggagtaatcagagctcactgcagcctccatctcctgggctcaagtgatcctcccacttcagcctccccagtagctgggactacaggcacacaccaccacacctggttaatttttttttttttttttggtagagatgggctctctcaggatctggaagaatttgctaaaa

SEQ ID NO: 226916 - DNA, 462 bp, Homo sapiens
gcaggcaggctttctcatggattcattacaaccactttgtagcccattacaaccactttgggtgtggcgtgtccatctaagaacctaaggatgatgtccaaggttagcctctagggattggagattgtctaaaaatatttgccaacaagcttcttaaaatttcaaaaaactgtatggttctctcagtgagagaccctgtactgtctgccccatccttaacacacactgtgtttctgatggtttgtttctttcaaaggctattcttactcagaagatgcttccctgtagccttggtttcctgccagagattagcagggtgtaaaagaatatttttttcttatatccacgtggaatgttcaaggcaaataaaccatttgagcatatttagagtattaatgtttttgagggttgtttactgtgatgtttgggattatgtattcctaagtggaagccacaaaagtt

SEQ ID NO: 226917 - DNA, 194 bp, Homo sapiens
caaataataattactgagcacccaccatgtgccacactctaagtcctggggtgtagcaggaaccaagcatatgcagaactgcccttcaagggcttgcactttagtgagaaggaaataaaattttataatattaattactgagcacccaccatgtgccacactctaagtcctggggtgtagcaggaaccaagcta

SEQ ID NO: 226918 - DNA, 546 bp, Homo sapiens
agcctcatcttgaaatgaaattttagctcatcctcttatatcctgaagtgttatcattagttgttgattcgttatttacatacaacaacagcaacaaaaaattttgatgtgtcctatttctctagtaagcccagtaaaattataagggcttaaagagcagacaaaatagaagatagagaaatagacagaagaaaaatgaaaggaagaaaggagaaaatacaggtattatgggagataggctgggacagagaaggaaagccaggaagaagagacagcatgagcaaaagcatgaagatcagaattcaaagaggatgctgctaagaaactacagacagagtcttgctatgttgcccagtctggtctcaaactcctggcctgaagcaatcctaccttgacctcccaaagtgctgggattacaggacacagcaagaaggcagccatctgcaggccaggaagagagcttgcccatgctggcaccctgatctgggacttttcctgtcactggaactgaaaaataaatacatgttgcataagccacccagcctg

SEQ ID NO: 226919 - DNA, 504 bp, Homo sapiens
tggaggatagggagcaccccagcaattcactggacttctattcttgtatttcagccaaaagaatgaaaaaataattaagctttattgatattagtgtatagctggaactcacttggaaatatactacaattcctaagtaaatgtacgttagcgtatatgcaagaatgttttactgatgtgccgtactatctaaatttcaagactactaattagagaaaagagttcctctattctctgacctctgtcccgctcctcactaacctttcctgtggagagattgtagttctcgaactccccatatgtgttttgtgtctgtgtatattcttaatggctacagtcctataaaacatactgtttatatttcaggactaaaattattatgctctcaaggaaggggtaacaaaaatggagcaagctttcttcttttgtgatcacccttcatcttgtgtatatgtccagcattgctctttaaagatgtacatttctatttttgtcaccctgtca

SEQ ID NO: 226920 - DNA, 233 bp, Homo sapiens
aggaagaagttcaagagatctattgtacaacatggtgattacagctaataaaaatatattgtatacttgaaaattgctaagagattagattttaaacattctcatcacaaacaaataatacttatgccaggtaaagcatatgttacatggcttgatttagccattccacaatgtatgtatctgttagaacatgttgtacaccatatatacaatttttactttcaattaaaaat

SEQ ID NO: 226921 - DNA, 458 bp, Homo sapiens
cagtttaatattttacctcttctaacctttttatgtagaacctttagaactttaaggtatatcacaaacactactctaacacattgtattgtttgggtccgtggtgtgtgtgtgtgtttgtgtgtgtatgtatgtgcgtgtgtacgcgcacatgctagtaaaactctaaggaagcagcatggagttagcagttttcttcctaagaaggaatgtaaggatttgagaatatttgatgttagacctgtgtggtgacatataatggcaggaaaatagactgttgaagtgacaaagttctgctataaaatagtcttgtttataacagaaatattaatggagttgatctcaaggattattttagttatgtgctaattaaataatttgtactatttagcaatttccatttttaaaattgttacaatcttttgactgtgtaaatcagaaaattgtaatacattgtt

SEQ ID NO: 226922 - DNA, 525 bp, Homo sapiens
tcggccaccgagcgagaccctgtctctacaaaaaataaaaatgaactgggcgtggtggtgtgcacctatcatatctagtctttggactagaaaaatctaaaatggtttggtaagactttgctgttgctttaaagcaatggtccccaacctttttggcaccagggaccagactggttttgtggaagacagtttttccactgataaagttgggggtatggtttcaagataaaactgttccacctcagatcatcaggcattcgattctcatacgcagcatgcaaccgagatcaccacgtgcacagttcaccgtaggttcactctcctacaagactccaacgctgccactgacctaacaggaggtggagctcaggcggtgatgttcgctcacctgctgctcacctcctgctgcgtggcccagttcctaacagaccacagacggatctgctggggactcctgcatataaagtaagtgtgtttggagggaaagtaactaatttaaagagattcccaccagccaattagaac

SEQ ID NO: 226923 - DNA, 276 bp, Homo sapiens
tcggctttctaatcaaattgatctgcctgctgtccctccacaccataatgactagcccttatatagtgtttgctgtgtgccagactctgttctaagggcttcacatagtacctcacttagtagttactacaaatactagtaagattttcatttccattttacaagtaaggtcagcacggagaggttaagtaacttgcccaaggttatacaactaggaaggggcgcaaagaagtactaagcagctattttgaaaaacaagttcttcacatgtagctg

SEQ ID NO: 226924 - DNA, 418 bp, Homo sapiens
actctcgtgttattcctagaggcaaagctgcgcagtcccaaaagcgatcaggttctcctcttctctcagttttacaatgaccttctctaacccaatgatagtaacagctaggacagcagaggttttgaggtacattcttggctttttttttatttgggggagtgatagaaaaaaaaaccccaaaggtactggtttctttaagcctctggaagcctccctggcctgagtccctgacccaccaagctcaaagttacatggggtctgaccctgtaggtctctaaccagagtgtagagatctcaggacagactttttgcagccacatgctcaggcacccctaacaggtctctttggggttccaggctggcttgagccccaagtctaggtctgacttggatgttttattttcttgatactact

SEQ ID NO: 226925 - DNA, 404 bp, Homo sapiens
acctacaaaagcctgccactgacattgaagaaccaatatatacaatggacaaacaatccagtgccggcggggtgaagaggagcgtcccctgtgattccaacgaggccaacgagatgatgccggagaccccaactggggactcagacccgcaacctgctcctaaaaaaatgaaaacatctgagtcctcgaccatactagtggttcgctacaggaggaactttaaaagaacatctccagaggaactgctgaatgaccacgcccgagagaacagaatcaaccccctccaaatggaggaggaggaattcatggaaataatggttgaaatacctgcaaagtagcaagaagctacatctctcaaccttgggcaatgaaaataaagtttgagaagctgatggctgtgtata

SEQ ID NO: 226926 - DNA, 378 bp, Homo sapiens
tggagcgtccccagtgggctgagggcagaacagcagtggacactcccacccccttaagagaggcgggaagtggagcaagcaccatgagcccctgcaggatcctgcctgggtcccaggagtccagctgctcgggcagggcctgctccgacctcctcacatccctctgcggtggccgtgaggaataccttggggcccatgaagcacaggggcccctgttacagaaagaaccttgagcaagtggtgccatggctttgggaagggggctgttgtatgctgtcactgggattattttttctcttctctcccactgtgaaatgaactaaaaaatagttctggggggaaaaaaatgtcttggtttgcacagcttttaaaaaggca

SEQ ID NO: 226927 - DNA, 470 bp, Homo sapiens
atgaaaaactcaaaaagaacagtatactgagtgttttcaccctaagatcaagaacaagacaaggaagggcactcttgttacttctctgcaacactgtactgggatttgtagccaggacaattagacaagaaaaagaaataaaaggcaagatttcaatgggaaagaatagacttttcaacaaatgatgctgggacaactggatatccacaggagaaacaatgaagttgagcccccacctcccaccatatacaaaaattaactcaaatgaatcaattaaatgtaagagctagaatcatagacgtcttagaagaaagcataggcatagatcttcattgccttgaattaggttatgatctcttacttataacaccaaaagcacaagcaataaaagaaaaaatgaattagacttcatcaaaactcaaaacttttgtacttcttaagataccattcaagaaagtgaaaagataacc

SEQ ID NO: 226928 - DNA, 408 bp, Homo sapiens
agtaatgactgggatatttactactgggccacaggtactgggtatgataagcagcactttgggaggctgaggtgggcgggtcacccgagatcgggagtttgagaccagcctgaccaacatggcgaaaccccgtctctactaaaaatacaaaattagctaggtgtggtggcacatgcctgtaatcccagctactcaggagtctgaggcaggagaatcacttgaaccggggaggcagaggttgtggtgagctgagatcctgccattgtactcctgcctgggcaacaagagcgaaactctgtctcaaaaaaaaaaagaagcactctaaaatgttactattggatatgcaaaacagtacaaagtttgttgaagaatcattcagtaatcaataaagattaaagtgccatctca

SEQ ID NO: 226929 - DNA, 897 bp, Homo sapiens
acttaaactcattcaaagacacactgaattacatcaccacaatctaattttagaacattttcaatgccccccaaagaaactctctgcaggcctgggcaacatagtgagaccctgcctctagaaaaatttttttgattagctgggtgtggtggcactcacctgggaggctgaggtgggaggatcccaggagttagaggctgcagtgagccatgatcatgccactacacttcagcctgggcaacagagcaagaccctgtctctattgaaaaaagtggtgggaagtgggggagaaaccctgtgctacagcagtcttcctgattcctgcttacccatctcctactccatccccagacaatctctctatggattggcctattctgacatttcacatcagtcatctgttgcttaatgacagacacacatttggagaaatgtgtcattaggcaattttcttcatgtgtacacatcaaagagtgtccttacacaaacctaaatgggacaacctactgcagacctaggctgtatgacagaacctattgctcctcggctacaaacctgtacagcatgcaactctactcaacactgtaagaaactgtaacacagtggtgattgtcttaatgtgggtttccccagaagtggccctgaggaaggacttgagtgcaagtagcttcctgagaagtggcgagtggaaaaatgcagcagggaagtggagaagagagaagcggaagggaagacagttgctaaagctgcattatcacaaaagccacccctgtggaaaactggagctcggttccactggggaactcatggagccagggtgattctgatgaacagcagccttggaaacgactgccttaggggacttgctgctataaataaagaagacagatttgtaat

SEQ ID NO: 226930 - DNA, 450 bp, Homo sapiens
ataacggccactctaatagagtttattcttctccctcagattctaccttagcacccagctgactacattccagatggttgtttaaccttctgtctctcctctagactgagttatccaagggcagggaatggtacttatttatctgtgtggctccaacatctactgcaataggcatcaggaagtgacaagtaccaaatgattttcaaggagtgtgccacatagcccccaggtcctggggcggtcccgagggactctgcagtgtgagaaggggctgagctgatgagggggaggcccttggccccttcttcagtgagagaactgccttctgtgtctcattcacgtgctgaagtgggggttctgtgccatatttcatctattatctacccccataaaaaaaaaaaggattatttctaccatgttccctttccatgcatacatagagaaaaaaga

SEQ ID NO: 226931 - DNA, 607 bp, Homo sapiens
caaacaccaaagatactttgaaaactggatacagaagtgatgtattctgatggttctagcttagtatttattataatatttatttatagtatttaaatagtaattttttttatcataataaagtgagaatcacatctgaccttccttttaacttgggatgccttgagtagccgtaagaaagttgtgaagtatatcacgtggaggaaggatcacatgtctagagtaagggctgagaagcctggccgagtggctaagcttgctgcctgccgtcctctacccagattgcagatgtccggatccattcctcttcacaagtgtaaagaaaaagcaagcatgcctccactctggagctagccacccagatcttctctctggaggtctaaaattcagatgtcttccagtggcatccgtggaccaaaggtgtatttttggatgatgcagtttgtgttttcttaactttaaaaaaacaagtagacaagttaaacataagtgactacaaggggtgaagttttaccctaacaatgagttttcatttcagaggttttgtttttctttatgatttattcctgacaaacacctaccacttactagtttaccaaacagctgg

SEQ ID NO: 226932 - DNA, 365 bp, Homo sapiens
aagaagttatttcacgcattatctcatctgccttcacaaaacaactctaaaataggtatcacctccattttatagatgaaaaaactgaggctcacttgcccaaagtgtcacagctaacaaattggactgaaccaagatttaagcagcctgactccaaaacccatgtttcgcctactaaacctcttccatattaattcctcctccatattaattgcgtcgttagggtggcttgtcgacgctctcagctccccatcagtactcaagcttcctgagggcagggattctattttgttaactgctgtattctcaaagccttgaacaatgcctcatatgtaaagatactaataaatatgtgctggatgcat

SEQ ID NO: 226933 - DNA, 580 bp, Homo sapiens
agaaagaatgatgaaaagctaactgccttctggaaaaatagtattttatttaaaagggaattgacacccatggagaagttgcttggaagtaaaggcagtggctgaactatataatgtttacattttaaaagttatgagagaaataaaaacactcatacttaatttgaaaaacattaactttaaaattgccacaattgtccatcaaaaaaatttgtagaagaaagtagattagtatgaaggaaattttttatatttagaattttatctcaagaatttgagccttggccgggcgtggtggctcatgcctgtaatcccagcactttgggaggcggaggcaggcagatcgcgaggtcaggaggtcgagaccatcctagctaacacagtgaaatcccgtctctactaaaaatacaaaaaaaaaaaaaaaaattagccgggcatggtggcgggcgcctgtagtcccagctacttgggaggctgagacaggagaatggcgtgaacccaggaggcgaagcttgcagtgagctgagatcacgccactgcactccagcctgggcgacaaagtgagactccatctcaaaaa

SEQ ID NO: 226934 - DNA, 417 bp, Homo sapiens
ggcttccaatatcctgtttaacaccctctatttcaaagaacgaccagcatttactacctccttcctttcacaaagagccaaaaaacatatgttttatctaaagcccaatatttccgtctaattgcaaactcaacaaaagtgccataagcactattcaacacattcagggatttttagttaactcagaaagatcaaaccgttttcatgccaacctctttagatatttcctatttaaggaagaaagggtcacaaagaggtttttaatgacctgatgagccttctagaacagccaatatttatagaaatatttcacaaagtcctaacaaagcagtccattttcaaacgctcttagagtatgactgccaaactgattgtattccaaactgattgtattctatatcttaggtaaacagaata

SEQ ID NO: 226935 - DNA, 323 bp, Homo sapiens
aaaagacaacatatgaaactttgtgggatgcaattaaagcaggctgagggggaaattgacagtatgaaatgctgcgttagaaaagacaaaacatctcaaaccagtaatctaagctcataaccttatatgactagaaagagaagagcaaaataaatccaaagcaactagaaagaaggaaatggtatagatcagaaatcaatgaaattaaaaatagaaaaacatttgaggaaattaatgaaatgaaaggctagatctggccaggcgaggtggctcacgcctataatcccaacactttgggaggccgaggtgggcagatcacttgc

SEQ ID NO: 226936 - DNA, 418 bp, Homo sapiens
tctttttaaattgatgcacaattcatttgggtgctttctatgacacgcagtcagacttgcctccttcctgtgtgggctctgactatctaataaaagagataatgtaatgacttacatatctagaacacaaggtaatgattccattaccaggcatatccctgttctgatttgcagacagtttaatttttacatctgatctttaactagtgcttcagatgaagcagaactgggtatttgaaaggaatttaatttgttttgcccattttaatggtagttttttctgagtgtatttaaagagctttttataactaccatcttccaatttttaaaatggaaatatattttctattgcttatttttttttactgcaaagccttatttgtttattttagaaaaattagaaaatactgcaaagaaa

SEQ ID NO: 226937 - DNA, 451 bp, Homo sapiens
cgaaagtggaagcaagtgaaacggggggaggttccaagctgtttttcagaatcagctctcacagaaactaacagagctacagctctgtcgttaccatgacaccaagccattcatgaggagcctaccccatgacccaaataccttccattaggtaccatcttcaacattgcaaatcagatttcgacagcaggtttgaggggacaaacacccaagctataacaacttggaaactagaaataaacttctaggtaatccataagccaataaagaagtcctaagataatttttaaaaattacattgaactaaataataaaaatacacatagcaagatgtctgagacccaactacaaattttgagaaggaaatatataattactaaatgctcactcactagaaaagataaaaaattcaaataaataatcaaagctatcatctcatgtctcttccaaa

SEQ ID NO: 226938 - DNA, 602 bp, Homo sapiens
agctcacacttaacccagcaggaggctgcgtacagattgagtaattctccacaacatacctactgctatgtaaactaaagtcaccgtttattcttcattaaattgccaggatgctttctgttggctagtccgtgtggatgctttgttctctgtgtccccacccaatgcccctgtgccttccttactcaccttgcttttctcttagagtaaaactgggtactgtaactctattaagatgttattgtgtttaagagaataatttaaaagcatcactttggttaaaaatgtaatgtttcctaaaaacaagtggaacaaggatttgattagtcaatttaccgaatatcatgaaacaaataccagaatacttaagggtagatgataattatgcagttttctggaaaacaaaagaaaattgtaaagcagataaaagtactaacaaaccaaccatactgagatcttagagaagttgccattctaacatcttgtggttggtattcaatgcataggtatttttctcatcatctcatcagcttcaaagcaaaacatggaccccagctttctttaggaagccgatatgaaaactatacttcataatattgctt

SEQ ID NO: 226939 - DNA, 286 bp, Homo sapiens
tctgtatgtgcagggcccgagtctagagaaggccgcttggtctgccttctgcatgctcagaatcactgtcaactctagttactgcatcttgagctgccctgagttctccagatgcacccagagccgctgcctttagccatggctcgatggtctcaccccagggtttggctttggggactggggcaggtgctgtgcagagcagctttgattccaggtcagaacttgctaattggactttttgttttcttggcacttggtcatttttccccaagcatgagaagttaaa

SEQ ID NO: 226940 - DNA, 202 bp, Homo sapiens
gggttgcaccgtgttgcccaggctggtctcgaactcctgagctcaagcaatcctcctgtctcagcctccgaaagtgctagattacaggcgtgagccactacgcccagccgtaagccttccttaagttagccattatcattgggtgtcctggttcaaaaacccgacgtggccaagtttgttggtgggggtggttgttttttct

SEQ ID NO: 226941 - DNA, 307 bp, Homo sapiens
tccctttttttttttttaaaaaaaaggtcaaattccttagcccttgtagcagaagaggtttgaggaagagaattccagcagaatcctgtaataacacgcctcggcatgacatggatcaggatagaccccctgagtaagctcatgccacagtgggaggaacctccccttcaggggagtctgggctgggctctgggcccaggcactgccctgggggtcagaggccattccagcatctagctcagtgtgaggcactgttctaagtgcagggaaccacagtatggggtcaggttcatgtcctgtttctgcc

SEQ ID NO: 226942 - DNA, 409 bp, Homo sapiens
caactctgccttttagcaagacacagagatacgacataactaagacttcagttaccttgacccatccacagccctaactcatcttatgtttctttccatttccagcctccgactcatctctttgccttctgaattctcactcattccttgctctggtggtaatctcccttcctcatgatgttattcctgtagcaaacacaagaccctccctggcattgacccattcaagaccctggtttcccatggttctaggtccagccagcatgagtccacatggccagcatttctattgggtttatccaaacttacaaaaaggaactgactgttaggaaagccaccgacattgttgtaatggtggaatcattctacatctctaaataaaatgctacagaacctttagggctagcag

SEQ ID NO: 226943 - DNA, 799 bp, Homo sapiens
ggctaattttaattttttttgtagggatggggtctcactagtattgcccaggctggtctcgaactcctgggctccaacagtcctcctacctcggcctccaaatatgctgggattataggtgtgaaccaccacacctggcctctaatcagttttctagtctcccactcaagccttagttgagcagacaaatgaagatttccaaaaatctgaggaaaacctccagtatagaacatgtagactacaaagagaaaaaggcagcctggatgaaaaccgagactaaaaagggagaagaaacaaaattcagggcaaaacaaaaaacataatcctaatatcttcaggaaaaaagagaaattacaatcatgaaaaaaggaaagattgctaaaaaataaaatctcagcgaacaaaaaaagaattcttataaaacatggtaatggaaattaaaaactcagtggaaggattaggagatgaagttgaggaaatctctcagaaactaggacagaaacataaatagatgggactgaagacagaaaagtagagaaaattggaagacaaatccaggatattctgtatgcataaaaggaattacaaaaaggaaaaagaaaatagagaggaggaaataagaaaatagtttagaaaatttccccaaactcaaaacatgagtttgcaggttgaaaaggtcccctgagtgcttagcatgctggctgaaaatagacctgcaccaaggcctagcatcatgaaatactgagactctgagagaaaatcaaagagtttacaggtttctgcaataataataataata

SEQ ID NO: 226944 - DNA, 672 bp, Homo sapiens
atgactgggttagggactcagaaagaataagagaaacatcatataattgacttatatttggctagttttagtagaaaatatcactgtccctctcctaatagatagccaaaaaaaacccttcttcaagagtaatgtgtatggttgcaagtccagtaatgaaaaaagaaaaggaggaaagaaataaaatcttacaatgtgggttccaggaaaatgtcatgatgaatgactccatgagtggcaatcaaacagaaagactgtgacattaatatttataatattgtaattagcaagataatgcctaagcagcattattagtgtaactaatcatattatcataaactgactctgcagtatttagacagtgagtgttcttgcctttatcaatgactatcaatatcctaaggttgcttataactaaaaaaaattcacaaatgactttacaatcattcgatgtaaatatctcaaggaaattgtctctgacatgatagtttatgaccatctataaaatcattgtctcaaatttgggtggttgccatgtgagcggaaatggaagtagctgcattgcactgtcatgttttgtctttaaaggattttcacactcgtttcaaaacttacatattcaaataaaagatgggtaatgatgaagacaacttgtgtcaatgacataaatgg

SEQ ID NO: 226945 - DNA, 427 bp, Homo sapiens
acagtggggcagctgcaagccctggaccaggttagcatctaaaggcaaagcagcaataaggattaaacaaaatgaacttaaaggtttcattgtccatcatgccatgtgagactatctgggtcatctttaggggtagccccatgtgctgaaaacctgataacgcactgaatgcgtgtgtttcagcttcacttgtcatgaaggagagtgggcagctgctttttggggaagaactcctcagctgtacagcccaaaggcagcaatgagaaacaggaaggatgcactggcccttgctgtctaacacgtgtcactgatggtaagttacgtgtgactgatgataagttacgtgtgactcatggtaagttattcttcattgggaacttttattatttatttatttatttatttatttattttgagatggagcctc

SEQ ID NO: 226946 - DNA, 419 bp, Homo sapiens
cagtattttctgctttttgaaaactgagtgataattcctgtacttttgtgtctactgaatgatttggtgacacaaatttcgattacttttacctagtggcttgcagtaacaatgctacaataattatgtgaaagttaatgtaatatatttgctgcattctgttttattagtctactttttcacctttatactcataccaaattattttaattctgtagctttttgatgtgttttgaaatcagaaatggtattgcctgtaacattgttcctgtttttgaagattgctgggtactttattgtctgtttggattccatatacttttaaatttgttgtttttatttctttgaaaatgcagtgagtcatttgaaagacattgcattaaatctgtagattaaattgagcagtaaagacatcttca

SEQ ID NO: 226947 - DNA, 520 bp, Homo sapiens
ctcatagatgtggttgcacctggcaaggagcccagctgcagaaataagcaggcaaacgcgagtttctgagccagttccagcccggcccagatgttggcccctgacaactagctgtggctggtgcggagggaggagcgagggaagaggggcagatcgaggctgccaggtgagcatcctccatacagctcctgcttttctgctacaaccccagtcccgtccagcccggatgaccggggaggctcactattgggttataacaaccattccctcgccccgactcattcctgcggaccacggccggaatcctgaactgcccctctttgcctgtaactgtttgcaacacagtccccatctccgaataaccaaattttctcctttaatgaagggttgctaaagtcaaggtcaatcacaatgatgaatcatttccttgggggcttctctgattccccacccggccgccccttcgttccacactttccctttcaagcatactcaaactccaggtttccacctgcggccg

SEQ ID NO: 226948 - DNA, 547 bp, Homo sapiens
ctcatagatgtggttgcacctggcaaggagcccagctgcagaaataagcaggcaaacgcgagtttctgagccagttccagcccggcccagatgttggcccctgacaactagctgtggctggtgcggagggaggagcgagggaagaggggcagatcgaggctgccagaaacatatgaagctcatttctgccacccttcctagaaaactggttcctgacagagacatgtggaaaggtatctgcacaagaaaaagtgaaaacatatgtccaagcaaggattgtttacaaatgtgcatagcagttttgttaataatagccccaaactggaaacaatccaaatattcatcaacagacggatacagtgtagtatagtgaaacaatggactagcattcaactaaaaggagcaagctactaatacatgtagcaatgtgcataaatcgcaaaaactatgttgtgtacaaggcaaacacaaatgagtacatactatatgatcccatgtatataaaattctggaaaatgcaaactaatataaagtgacacaacctaaa

SEQ ID NO: 226949 - DNA, 629 bp, Homo sapiens
ttcttttgttttcagatggaatctcttattggccaggctggagtacagtggcacaatcacggctcactgaagccttgagttcccaggcctctaacctcggcctcccaaggaactggaccacctgggaccgcaggtgtgcaccaccatgcctggctaatttttatcgtttctagagacaggatctcactatgttacccaggctggtcttgaattcctgggctcaagctattctcccatcatggcctcccaaagtgttgggattacaggcgtgagccactgcacctagccttaggttttaaatcccatctcagctacttactatcatctgtgtttccatgggaacaatttgtcacctcccagagctcagttgtcacacttttgaaatgggtttcaaaacaaacactcattagtaataatggaccaagcaatataccctcataggaccctaaatcaagggtatcaaatcaaatccatcagaaggacagccccaccccaaccccaaccctacacaaacaagtagcagatcacacttctttgtaacaaatgattgtcatttggtagcagaatcacctttaccttattccctcttgagagtcctttctcttaagggaacccgagatcagctactg

SEQ ID NO: 226950 - DNA, 336 bp, Homo sapiens
caggactttatcatcttcagaattttctgtaaaaacgtgactattaaagaatgacttcttatttcttgtgaattcatttattttgcaataactaattccaggtagggtaggaatggaataggaggacttctaattctcaaatgtcaggagaggatataattttcagaacatgagtcatattctggagaggttaggccttggtaggtgcttgcctatggagtaggggttgggtgcaccagccagccaggtggtaccatgagggtactctgaccctatagcctggggttgggattcaagtgaaacaacagaaagtagggggagtgtcagaaaggaaag

SEQ ID NO: 226951 - DNA, 881 bp, Homo sapiens
catgatttgatggacagtgggaagctacggaaagtcttggagcaatagcgagttgatgagcactgaagtgaagaatgctggtcacagttttggagaggcttggttggaggagtggagaccttaagagatgtctcgatttttactcatgggattttaattgatacaggcgatgcatgacagcatggagacattgcttcttcctggtgtcatcgcaagaagctttactacttgtaattcccaagagaagggagcacaccaggccacagggccatagggatgcaccagtgttggtcaggaggcagaagggagccaggggcacgctcagcgcagaggcttcgtcgtgtttctgggggaaagggaaggcagggcaaggcaaacaggctagtcctgggaacagcagtctctcctcagtcagcaagcccacaaagccagagcatcaagaatacagaagataagaagcagttaccacaataagaaagagttaatacaattggccctgtgatgaagggatgctcaacagacaaatgcagaatctaagaaagcccagaacaggaggcggtgcagaactggctgtgtgattctgaggggcctcggtgtggctttcttcgtatttctgtttggggctcattgtttcttggatctgtgggtttgtatagtttcatctaatttggacaaattttagccattgtttctttgaaaactttttcctcattatttccctccaattatatagctcatttatattttattcatttttttattgtctcctgttttattttggatagtttctattgctgttttcctctgtagtatctgtctaatctatagtaattccattcagtgcgtcctttttttaaaaaaaaaacaaaacaaaacagagt

SEQ ID NO: 226952 - DNA, 473 bp, Homo sapiens
attgttcatttaatttcagccttattccttcataaggggttttaccacatgaagtcatccgatgaccctagctcttattgtgaagttgaagatgactggagtatacttacaaatgttacaacttaaaaatgttacaaaacatttattaaagctcatatttaaagtagagcatccagtttgagaagtagacatcaattattaaagatgtcttttttctccccatttaactagttaaaaccatgatgtgtaaatgtagaagtagaataatcatatggaattccctaaaatatttctgtttactaacatatattgaccaagtacatcaagcaggagagctcttccttcattctgttatagtccacatcattctaattttgctcagttgttattaaaagcatattcctaaaccatacacttttgtttcaataaagttttattttgttgggatgaataaaatatcaaagttataagct

SEQ ID NO: 226953 - DNA, 250 bp, Homo sapiens
tgcgcccggctgcctttccaggtgcttttataccattatcgtttttatcatgtcaacaatgtcttggaataaacagactaccaacccgagctggaatacttgggctgtatttttatgatgatggtcatttctatgaagggatttgactgatttagtttcttcactcataaatgtatattgggcccctaccgtatgttgtcactgccaggtgccagggatgtaaaagtggacaggatggcctggacgtcta

SEQ ID NO: 226954 - DNA, 448 bp, Homo sapiens
ccggtggtgacggggccgcgctgctgagcgcaagggctctgaagttccagcttagccctgaggtttggtgatagcagccattgtgttctttctacctgtggagccagcatgcaccttcggaaacaattgatgtactctgccccagaatatgcagccacagtggagtcaccagagtgagacgaaggggacctcttgtatcttgaagaaatcctgtagaatagaacaaatcttaaatgtcttcttcaagcaaagaagccagtcccagagcaataaataaagtttatttattgctatatatatatatatagcaatatatatttatattatttatttgttatatatatatgtaagaatgtaggtatacatacatgtgtctgtgtgtacatgaatgaaaatgtatgtaaatcatgtaaatctcctaataaaggctggaaaatacaaaaaaaat

SEQ ID NO: 226955 - DNA, 241 bp, Homo sapiens
cctttcagggatgatgaaactaagactcaccaagaagattaatggtttctccttggccatatgtttgagcactgcgtgagcacaactggactttgaattttggcttgtgcttgattttaagttctaaacaccagattgagggtgtcaggttttgtctttgtttttgtaatgattttaccatcgatgaaagctggcatcagtcatctgagtgacactgtcccttgaatgttgctttcccata

SEQ ID NO: 226956 - DNA, 386 bp, Homo sapiens
tgtgtgctttttatgaagctaaacagatgatgatcatgatctaagcactagctttggaaggcaattgtagtggatggaaagggtcagggtggattctacgccagatgtcagcctgcagaggctgtgattccaggcttcacttggttgaagtgaccagtctggccagctttgctaggcctcctctttctgactcactgttcccatggatctctggaagctgctggttcttacgtgtctacgaagagaagcagcttatttcctggggtgaggcatgcccagagaagatttacttctcaaaaggcctacttgaatgtagttcacaagcctggctgtgcctcagcatcacccgtacagcttaaaaagaaattacacacacggaaccacat

SEQ ID NO: 226957 - DNA, 609 bp, Homo sapiens
tataccctgtacattgctcagcctcttgttctcctccccacttcctcctgtctcttctcttttgacagctctccagagaggcctctcaccccaccttccatagctttgtctccactgagtcaaaagctgttagatcatctgtttgtcccctgagtggtccttagaatgaacagccaaatggatggcttggtggtggtgtgtgccatgcctgcaggaagctcccaaggaagcaatttccagcactttcccctctgcagcttcccaccaagctatgcgaaaacatatcaatgatttgactgcaacgtccctgacagctgttaacttggaaaatacaaacaatgacgacgaccgtgaatgtgagttatttctgtgatttctcttttcattaaagtccatccagtcaccagtttgagcctgtcacaaatctgcttctctcccacacgaccttctctggccactgactgcattttcaaaagtagcccaaggccagagaacagctgtttgctgattccctcgagaacaaattgcaaattgtgcatcatcggcatgtgctcttggcttctttgaaggatgcgttgaaatgtgccaaatggcaaatgagaatcacag

SEQ ID NO: 226958 - DNA, 365 bp, Homo sapiens
cgtcgacgttttattagcatttgagtattttatttctttttgaatgtttcattgcttttcctgaagtggcattgtcttagtctgtttggctcatcatgtagtaatttgtgcctctcccagattacccattttgctgatgtcaccaaatcttgaatccctccagttcagtgtcagcagggaacaaaatttccagtctcttaacctgggtgtgtgtgtgtgtgtgtgtgtgtgtctgtgtgtgtactgctcaggcaggcttctgaatgttgatattttgcatatgtgataagagggtttcgagtcttttgattaaagacttccaaatgaccccttgctttttgccctgctcccctcaactgcttctc

SEQ ID NO: 226959 - DNA, 1118 bp, Homo sapiens
caaatgagatcatctctgtcatgtgcctcacgcctcacagggactccatgtgtgaagattcccccttcactcaccagatcatctccatggcaacagcttgcagcctgctcttggagtgctttgttttggcagcttctctgctagtttgtgtatggagtgaatggaggaggtaaatccacagattaagaatatgctgtcaggagtcaggcagccaaggtcagaagccagctctgcttctcagtggtaaggtgcttgacttctacatctcaattttcacccactttgtacttttttcctaaattaaatgagtataatagtagtacctacttgataggacttttgtgaaaattaaatgatataatgcacctaaaaacagtactgttacaactaataggaaaggctttgattattaatggatgagagtagaaagcttggtgcatttattgtctcatctactataacagagttggtgtgagaattagtattatcatcctccctttattgaccaggaaaccagctcattgagattgagtcatctgctggtaaatggtctcattaagaggtggacccatatttctctagctttctctttacaacacaggactttgcaaggaacatataattctgtgactagcgccatttggaaaatgttgaaactgaagtagagatgagagatcttacgtctgcctacccagtgagatacgaggaaggtcaagggaaaaaaaattccaagctcttctttatctgctataggaaatgaacattcaattttttgcatgcaacgacaagaggtcaaggaccccagaagccagcccgctacttccaagttgagagcccctggtcataccctccagttgagctcagatttgtcacaaatttacccctctcctttccttccattccccatgacctgcagagagagatgtcagataccttcctcttggcctcccatgggcatccataagaaacttacttgaagcaagaagcccagtataggtgtctgggcagttggacatttcctctagccagatctgtccgaatagagccatctgggtacatgacgcagagggcatttgataaataactggaaaagtcaataaatctttgctacccttcac

SEQ ID NO: 226960 - DNA, 302 bp, Homo sapiens
ccagggcctccccttcagtttcattatctcctttgactctgcccacaacctttgaaaaggtctcgctgttcttcccacggagagagaggtgcaaggcttgctcagcctcacacagccaatccgtggcaaaggatggcgggaattcaggtggccccaatctcaacccatcctcttcccaccctgtatcctttttagtttatttacaggaaaacatgttcaaaggtataattactaaagtgctcctggttacacaataatacgtctttactgaaaaacaataaattaatgagaaaagagatgca

SEQ ID NO: 226961 - DNA, 385 bp, Homo sapiens
aaagtaaggtttttttctcagtcaccctttaaaacacatttgtttttggctgggtgcggtggctcctgcctgtaatcccagcactctgggaggctgaggcccgtggatcacttgcggtcaggagttcaagactatcctggtcaacatgctgaaaccttgtctctactaaaaatacaaaaaaattagccagtcgcagtggcaggtgcctgtagtcccagctacgcgggaggctgagggaggagaattacttgaaccgtggaggtagaggttgtagtgagccgagattgtgccactgtactccatcctgggtgacagagcaagactccatctcaaaacaaaataaaacgtatatcgttttcattattgctttgaagaccactttcaa

SEQ ID NO: 226962 - DNA, 418 bp, Homo sapiens
agtggaggcccaggaaagtgagagaggtggctcagcttccaccactggccagcggtgtggcctggaatgcaggccccagcaactttgcagcctcctgccttaagggagtgggctggaccccaaatgaatcagtcccaggccgggcgcggtggctcacgcctgtaatctcagcactttgggaggccaaggtgggtggatcacaaggttaggagatcaagactatcctggctaacatggtgaaacctcatctctactaaaaatacaaaaattagccgggtgtggtggcgtgcgcttgtaatcccagctacttgggaggctgaggcaggagaatcgcttgaacccaggaggcggaggttgcagtgagctgagatcgcgctgctgcactccagcctgggcgacagagcaagactccacctaa

SEQ ID NO: 226963 - DNA, 335 bp, Homo sapiens
  misc_feature (211)..(211): n is a, c, g, or t
ctcctcaaacctcctatcctgccactcctcccctttcttattaaataccaagtcttctacttcatagaaaagagaaaccattagattagaattttctcaattcacagctccccacccctacttacccgcattggtactcatctgcctccttggcccgtcactggagaagagtcgcgccccccactaggacctcactgtgcccagacacccnaacccctgtgctctgcacctcatcaccctccttgctctctcaattctccttcctgcccaaatccaagccactcccaaaatgttatcttcctctcatcagcactgaatctcacccacactaaaaa

SEQ ID NO: 226964 - DNA, 544 bp, Homo sapiens
ccatgcagccacgaaacagagaagctctttattactgacatggaacatcaccaaaaaatacactgagaagtagaaaatataagtatttgcatttgatgcacagaatacttctggaagaatacataaggtcatattgacagtaacataatagcagctgccagggatgaggtctgagcctctgggaaacaggggaggaggaagatattttgttatcacttatatctttttctgtcttttaaattttatactgtatacatatattatctcttcaaaattaaataactgtttaacaaaggagaaaaagaaaagctagtaatcaaatggagatgaggtaggccacacgctccaagaggaggaaaaataccttgaatttttttccaggagcgccagggtccatggtaaagctctaccctgggccagctgcccccgcacttgcacctgggcacaggaagttgatgttcgcagaattaagaactttttttgtctcaatgcgtgaatggttaaagaaactgtgttaaactatggtgcctccatgctactcagc

SEQ ID NO: 226965 - DNA, 596 bp, Homo sapiens
aatagcctcatagttctttctgggaactggtccactgcaagaatgagtgcagctttaataattcactccacaagttctgaggttgcatcttacatgatttctggattacgtatttaaccatgcatttgcggcagtccttgtaactttcaagacttttgcttttttagtatttataaaagatgctttgagacctttaaagcgtgaatctaaacgaatgtcacaaaaagtctttgctctcttggcttttgctttcataagcaggaaaggctcaaataaggatgttagcctcgtggagtattctcaatggccaggagaaaggtgagaagtagctgattcacttggagggatcctaaggtggaaatggaccattggcagtctttccccatcttctgaaaaggcacagcttttcctctgaatgggtacatcatggagcagagtatataacaaactctcagaagacatgagttcaagcgttggttctgccaagaaaggaacttgatctctaagtcttagtttgtttaactgaaactgaaattaatagtacctttcccacctgtctcacagggtcataagaggatcagggagaaattgcagga

SEQ ID NO: 226966 - DNA, 501 bp, Homo sapiens
tcttcccaactagagctgcaactgcggaagttccactgcagcttctgcctccccacttgaggatgactttgatgggtaagtctgtaaggaccagtccttttcaactgcacatttctctttgagatctgcccacaggcagaaaacacttgggtgctttgccctccagcatggcctgggactggatggttaaatctaattctggggttcagtgttactaagctctttatgctgttctcttaaatcaccttctctccaatagttctatggatggaaagggctgctattttgatctccatgtgcttggctcctttgtctgtttctcaattggttgagaaataaggcaggaaaaagacccctcaaactccaacaatactcaagaataaaaagagttttgttataaagaactactaagaaaaataaagggtaataaaaactgtatgaattaactctaatcagaccacttgtctaacacatttgaggggattaagttcaaaaaaaaaa

SEQ ID NO: 226967 - DNA, 303 bp, Homo sapiens
cttcggaaaatctcaaattggtttctgtggccctctggtttgaatctgagatctgaactgttctgtggttagggagtgaaataagaaatgcttagtttgaaatctaggctcccgatgcaatttcataccccctgtttaaaacacacactctctaaaaatgcttttaagtaagttttcaaaccaaagatatatttttagatttcagtctttatttttgaaacaccctttgtagagaataccacagggacaaaatcaatttataatcctgaatagctcaaatatcactctttggttttatactaa

SEQ ID NO: 226968 - DNA, 3287 bp, Homo sapiens
agtgtaatgagaaagttcatgtgtcacatgaaaatgatcatgtttgtgttgctacagcttttgtgggaaatttagtttaaaggcagctcttggtgtaccttagtatattttaatccacaattataccattgatactgagaggtgatacccgatgatcttctctataatattcttagagtaaaacaaaatctcaaaagtattaatagctcttctacccttgaaggtgactggtcctgggacagttagaatctttcaggtttacctctgttcagcagatacttcagtaggatacatagcttttcttccagtgaaacaaagttcatatcatccattgtttttcaagcacgtgacaccagcctcaaagtaaatgacatgaccagtggttgaacagtctaattttcaaatttaatatagagcatataacttctgatttgatagtatttattttaaaaaattatgttttcatcattcatttgaaaatgaaaaagccccaaagtgagaactttgggggagggcctagaacatggatagatctcttagtggtctttccaaaagtacatgtacttgaaatattttcattatcatactattctttgaaaaaaaagatgcttactgtatacttgttttcaagcatcctctaaaatcaaaggttttgatcacaatatgcagatttctcttgatagatacttaaataggctatttctctcctcttcttgggcaatgccttgttttctcctctgaatatttgcatttgaaaggattgcttcctgttctgctcattgatcaaaggtagggccaattaaggattctaaccctaacccagcaccacaaagcccccctggagcatcttcccggctggcaggaccatgccatctctgtggagaaggtgctggggagggaagtccttccagtgccacatggagtgaggccctgcccatgctggggactttggggaggaatttggtattctggtggccttgctcagctctcattgagatcttttcctatcagaatgttagtgaatatacttcgcagctctttgttcagcaataaggaatattctttcaattcctgctcttcaagccaatttactacacccagttgtctttccagaagttcatcccagcggtaatatgttggtgtttgttcttctttggatttcacatctgttttctggtagaagtgagcactgttcacttgtgcagtcgtcttattttccttcttcctagatgactcagctctttgtaaatgttgtgctcaacttctaggggccagttctagactttggagatgcagtgtctcccaggtgtgcacggacacctggtccgtggaaacaggtgtgatgggcacaggctgctgcccttctgtctggtcgggggattcctcttcttcaagctgctcagctaacccagaagaggggagagagtactccggtggttcccagagcccctcccgttgtgccgcttcgacctgacacctgctcgatgctgacttaggcttcctgccaccaagcaggaaactagaaagagaacatttcagtgtaaggtctgttcccgacagcatggattagcttccgtgttctgaagttgttcttttcatggtgtctgacaccgagggcgttgttcgtccatcaggcgggattggatggagtcttggtgttttgccttctcagggaccaaaaatgtatcattgactccttaacagtgaccttcctcccaaggacatatccgtgttcatttttcataggttttactcatattcataggtagattctgttaatgtgagttggaaagaaaagaccaatttgtacaccagtcacaccacaagacagtttatcatataaaatacctcaattttttgtattcctcatttccacctcacaattgtactggtgatgaattttaagggtctgtcctttagcttataggtgatgtttcacatctggccagattcttatacctccattgtatacttgaaaaggttcagaattacaggaacagcagtgagaatttggcccactaccacgactcatttgtttcattcacattcctcacgtgcaacaacataattatattttaagaaaatgtaactttgttacatcaaaatatgttgtctagtaaaaagttgatattcagtagaacaaggatcatgtaaataaacatctatttcacatgtacccaaaagcatttaaaaagcagaatccagggcccagagcatgagccagggaggaggatgtttttcttcttttctctatttttccctaaattgtgcaaacataggtgagtctcttaacctttctgtgcctcagtttttctacctctaaaggggtgggatggttcttcaaattgtttctaaaacaccggcactttcagcagtgttctggtggcctgagatgagagcaccgtgttcagaagtgcctgggagtggcacagtggaaactccgcttgcacggaccatggagtctgctcaggaccatgctgtaggacacacagcctcatgcgctgagaaagcaaaggaagtgctgggtgtaaagtttgcatgattccatgaagctttagttttcctttttttgttttaaaagaaagggttttatatgttctattgtaaaatatggaaattaaacagggacttcagaaagccgcacagaaagatcaccttctgatggtgtgatgtgctcctgacattcggccgaggtctgtattctgaaaaagatttaatggcctgtgaaacacgtggattctgttgcactggatttgtaataaatgacgctgaacttcctgcttccaagcagctcaaccctgatgctgaactgacaccaggcgaatgtcagggctcccaaaccactagtgccaaagggtcatgttgaaaagttcagaatatttatttgtcagaatataataattgccccccaccttagtatttttgcactttacagaaatttagatactgtttttcagtggcttgagcgttttgccttttcaaaggataactattattttcttgaaaatggaatataatcatgagaggaagaagatgtaaaaaatgtcaaatgttgattggttgtgtaaaagttttgtcatagacatgtattggggagcttccaattagcatacatagacacatgtgtcagtggccaagacctgcttatattttgctttatagatgtagtcatagcatgttgttattgcctcatgtaaataaaaaggctattaagttttccagtaatatttattaatctgtatgtgttttaaaataaaataacttatttctagctgaaaaaaaaaaga

SEQ ID NO: 226969 - DNA, 1132 bp, Homo sapiens
agtgtaatgagaaagttcatgtgtcacatgaaaatgatcatgtttgtgttgctacagcttttgtgggaaatttagtttaaaggcagctcttggtgtaccttagtatattttaatccacaattataccattgatactgagaggtgatacccgatgatcttctctataatattcttagagtaaaacaaaatctcaaaagtattaatagctcttctacccttgaaggtgactggtcctgggacagttagaatctttcaggtttacctctgttcagcagatacttcagtaggatacatagcttttcttccagtgaaacaaagttcatatcatccattgtttttcaagcacgtgacaccagcctcaaagtaaatgacatgaccagtggttgaacagtctaattttcaaatttaatatagagcatataacttctgatttgatagtatttattttaaaaaattatgttttcatcattcatttgaaaatgaaaaagccccaaagtgagaactttgggggagggcctagaacatggatagatctcttagtggtctttccaaaagtacatgtacttgaaatattttcattatcatactattctttgaaaaaaaagatgcttactgtatacttgttttcaagcatcctctaaaatcaaaggttttgatcacaatatgcagatttctcttgatagatacttaaataggctatttctctcctcttcttgggcaatgccttgttttctcctctgaatatttgcatttgaaaggattgcttcctgttctgctcattgatcaaaggtagggccaattaaggattctaaccctaacccagcaccacaaagcccccctggagcatcttcccggctggcaggaccatgccatctctgtggagaaggtgctggggagggaagtccttccagtgccacatggagtgaggccctgcccatgctggggactttggggaggaatttggtattctggtggccttgctcagctctcattgagatcttttcctatcagaatgttagtgaatatacttcgcagctctttgttcagcaataaggaatattctttcaattcctgctcttcaagccaatttactacacccaagaagaccagaatttcatcggggatcctctag

SEQ ID NO: 226970 - DNA, 3861 bp, Homo sapiens
agtgtaatgagaaagttcatgtgtcacatgaaaatgatcatgtttgtgttgctacagcttttgtgggaaatttagtttaaaggcagctcttggtgtaccttagtatattttaatccacaattataccattgatactgagaggtgatacccgatgatcttctctataatattcttagagtaaaacaaaatctcaaaagtattaatagctcttctacccttgaaggtgactggtcctgggacagttagaatctttcaggtttacctctgttcagcagatacttcagtaggatacatagcttttcttccagtgaaacaaagttcatatcatccattgtttttcaagcacgtgacaccagcctcaaagtaaatgacatgaccagtggttgaacagtctaattttcaaatttaatatagagcatataacttctgatttgatagtatttattttaaaaaattatgttttcatcattcatttgaaaatgaaaaagccccaaagtgagaactttgggggagggcctagaacatggatagatctcttagtggtctttccaaaagtacatgtacttgaaatattttcattatcatactattctttgaaaaaaaagatgcttactgtatacttgttttcaagcatcctctaaaatcaaaggttttgatcacaatatgcagatttctcttgatagatacttaaataggctatttctctcctcttcttgggcaatgccttgttttctcctctgaatatttgcatttgaaaggattgcttcctgttctgctcattgatcaaaggtagggccaattaaggattctaaccctaacccagcaccacaaagcccccctggagcatcttcccggctggcaggaccatgccatctctgtggagaaggtgctggggagggaagtccttccagtgccacatggagtgaggccctgcccatgctggggactttggggaggaatttggtattctggtggccttgctcagctctcattgagatcttttcctatcagaatgttagtgaatatacttcgcagctctttgttcagcaataaggaatattctttcaattcctgctcttcaagccaatttactacacccagttgtctttccagaagttcatcccagcggtaatatgttggtgtttgttcttctttggatttcacatctgttttctggtagaagtgagcactgttcacttgtgcagtcgtcttattttccttcttcctagatgactcagctctttgtaaatgttgtgctcaacttctaggggccagttctagactttggagatgcagtgtctcccaggtgtgcacggacacctggtccgtggaaacaggtgtgatgggcacaggctgctgcccttctgtctggtcgggggattcctcttcttcaagctgctcagctaacccagaagaggggagagagtactccggtggttcccagagcccctcccgttgtgccgcttcgacctgacacctgctcgatgctgacttaggcttcctgccaccaagcaggaaactagaaagagaacatttcagtgtaaggtctgttcccgacagcatggattagcttccgtgttctgaagttgttcttttcatggtgtctgacaccgagggcgttgttcgtccatcaggcgggattggatggagtcttggtgttttgccttctcagggaccaaaaatgtatcattgactccttaacagtgaccttcctcccaaggacatatccgtgttcatttttcataggttttactcatattcataggtagattctgttaatgtgagttggaaagaaaagaccaatttgtacaccagtcacaccacaagacagtttatcatataaaatacctcaattttttgtattcctcatttccacctcacaattgtactggtgatgaattttaagggtctgtcctttagcttataggtgatgtttcacatctggccagattcttatacctccattgtatacttgaaaaggttcagaattacaggaacagcagtgagaatttggcccactaccacgactcatttgtttcattcacattcctcacgtgcaacaacataattatattttaagaaaatgtaactttgttacatcaaaatatgttgtctagtaaaaagttgatattcagtagaacaaggatcatgtaaataaacatctatttcacatgtacccaaaagcatttaaaaagcagaatccagggcccagagcatgagccagggaggaggatgtttttcttcttttctctatttttccctaaattgtgcaaacataggtgagtctcttaacctttctgtgcctcagtttttctacctctaaaggggtgggatggttcttcaaattgtttctaaaacaccggcactttcagcagtgttctggtggcctgagatgagagcaccgtgttcagaagtgcctgggagtggcacagtggaaactccgcttgcacggaccatggagtctgctcaggaccatgctgtaggacacacagcctcatgcgctgagaaagcaaaggaagtgctgggtgtaaagtttgcatgattccatgaagctttagttttcctttttttgttttaaaagaaagggttttatatgttctattgtaaaatatggaaattaaacagggacttcagaaagccgcacagaaagatcaccttctgatggtgtgatgtgctcctgacattcggccgaggtctgtattctgaaaaagatttaatggcctgtgaaacacgtggattctgttgcactggatttgtaataaatgacgctgaacttcctgcttccaagcagctcaaccctgatgctgaactgacaccaggcgaatgtcagggctcccaaaccactagtgccaaagggtcatgttgaaaagttcagaatatttatttgtcagaatataataattgccccccaccttagtatttttgcactttacagaaatttagatactgtttttcagtggcttgagcgttttgccttttcaaaggataactattattttcttgaaaatggaatataatcatgagaggaagaagatgtaaaaaatgtcaaatgttgattggttgtgtaaaagttttgtcatagacatgtattggggagcttccaattagcatacatagacacatgtgtcagtggccaagacctgcttatattttgctttatagatgtagtcatagcatgttgttattgcctcatgtaaataaaaaggctattaagttttccagtaaaaaaaaaaaaaaaaaaaaaaaaaaaaaaaaaaaaaaaaaaaaaaaaaaaaaaaaaaaaaaaagggggggccccccaaaaaaaccccccgggggggcccatcccccccacgtttttctggcgaacaaagggggcccccaaataggggcggcgtgctattaaaaaccacagacgcaggggccggcgtgataacacacggcgcgtcggggaaaacaccggctccgccgggcgacaccctgggagaaagacccccacctccgcgggggccgcgcaacttggcgacccacccacgacgaggatttacgcgcgggcggaacaaccctggcgcagcaaaccggtgacaccacccgcgaaaatgtcgtcgccgcggagaaaaacctcgccccacgcggagtatgatctgagacattttccaggcggggctctctatacacaccggcaccccaccgacacacacgcccacccagcccccgaccacgacgcgcacgccccacccgcccacgccgcccacccacacagcccgttacccaccccaccccacgccaccccccccgcagccccccacaccccctcgccaccaacgcccgacccccaccggcggcagcaagaccccaccaaaccccaccacgcgccacccc

SEQ ID NO: 226971 - DNA, 630 bp, Homo sapiens
aaaaatcttcatatcttcatctccatctactctttagggctttaaattcagttaatccattacttgcataaagttagtaaaaacaaagaatatttaattttgaagagtattagctagcattgttgagtaggaaagaacaggaaaaccaagtaaatctctctggatggttttgcttgtggatatgcgtgtagtaatagaaaatgcaactgaactctaaataataaaatacttcctgtagggcaaatacagccagaaaaattggaaagcagatcaataagattactacatatctttaagccactgaaaacaagagctagacgttggaatgtattagcaaagtagctatgtctagacacttcatgttaactatattatataacttttactcttggatactttactggtagggaaatggataaaatgatcctcactgatgccttctaatactggtgccttacagagcagaggtgggtaatgtccttatttcatcaaaggatactttctctctggagagtgtaaaccatgattgattcaagtacatgcaaacagtgacttacttagtgcttctgaaaaatttctgagtcagaaggacaaaaaataaacataacaaaaaataaacatttacatcac

SEQ ID NO: 226972 - DNA, 1072 bp, Homo sapiens
gaggatcccacaatctagtttgaacagggaccctaccagccagggccatcgagacaaaaagaaacccaaatcaaaccacaagcctcggtagtggccagagatggggggggggcctgcctgcggtgggatactccaaggcttgggggttccaacagccaggacccttgaggcagggtcctcacaacagagatccagtggcccctcagacccaggtggaggggcccggcttggctgcctgaggctgcagctctcccgattgaaacccaaaccggaggagctgcctgtcacggtgcctgtgatcctgtgatccgaggcatgattgagagggggcgcggcaggagggggctgcaggcccccaggcagcccctgtgtggagcagcaggagtctgaggaggagaagggggggggggattttctctttcttcccggcctgcttatctgatcacagaggagggaagggctcccgttcaaaggcagtctccttatcagctgggggtttgtttggaacgataactgcacctggcagggaagccttcctgcaggtgggggtgcggccgcatgggcggggctggctccagggtgtgtgtgtccacacgggaacgtggctaccgctaatgctacgtgaatgtgcatcccatggtcttcgtgtgtgcaggtctgtcctccgtgtgtacacatctccaggccagtttgtgctcccacctgtgcgtgactgtgtgtgtgtgtggatgggcacagagtacatctgccctcggcacaggaaaaagaagggactcagatctgggcctggactggactgggcactgcttggcgtccacatgatgggggtccctgccaatcccacccatgtcctgtctccagagtgaagtacctggagcctgtgggaacaaggggatgggtcaggagcagaggttgtgacatcacagttcacttgtgggcacagcagggacaatggggaagaggctccatggatgctgaggtgtagccccagcgggtgttgatggagaagaaaagagcctgtggagaggccaaggcacgggccagatcaggggagcaggatgggccagctgag

SEQ ID NO: 226973 - DNA, 571 bp, Homo sapiens
gaaagacagttcaggcacctgagtggttacattatcccaagccaaagaaggagaagacaagcttgtgagtttcccacgctccctatgaaagtgatgccatattgatgtttcagctctgggcaggctgtggcaggccgaagggaccaccacggatgggctttcagccagggtctgccccactgccttcatttcatctgtcgaaaagcagcttttttctgtttcttcctttcttgttcattaatttttgcagtgttgtctcaagtcattccatttgtcattttcatttgctcccatgaccggtgttaacagaagagggtcgtgctgaacagaagtaagtgccacctgctgtgctgctgcgtgaccccgtgtgtgccactctcgcgctcccgctgcccaccgaggtgtttgcagagcctcctcttcgcttcctaaccacacacacagctgcctgcagagcctttccttacaaaaaccaaaatcaatcccaactacctgggaacagctgggtattttcccagtgagggcagcactggggcaaccctctgggccagagatacccgtggggtagaat

SEQ ID NO: 226974 - DNA, 178 bp, Homo sapiens
agtgtacattttagatacagagatacgttttagataaagatattttagatatctgtatatttttgatacagatattttaattattttttgaaaaatcattggatggacttaaataaattttcctttcttctttccttcttctttctttccttccttccttccttccttccatctttcc

SEQ ID NO: 226975 - DNA, 707 bp, Homo sapiens
attggacacctctgatgtagaaccttcattatcattataaagggtttcattctggacatttatttttgcccacccctcactccccttaccattttcatccagtcctgtgactttacgtatgatcctagtgctgatgactttaaactaatatcactagccttcatatctcctctgagatatatctgacatctctactaaaaatctagtaggcacctcagactccacatgtctaaaacgaaattcttgaatccctgcctaaaatcctgttcctcttccatttagcctctcctatcttggtgaataacactagtgtcctattaggctaaatcctttgtgtttttcagtttctctatcctctcaccctgacctccattgaaaccatcagcaaggatcatctatttcatctccaaaatatagcctgataacccccatgttggttcctgtccacctggaagtctatgatatagtttctctactttgattcttactcccttcaagatggccagtgtgaactgttaaaaatgcctatcaacgtgtgttactccactccttaaacttagttgcttctcagtgcatttcaaatacaactataccgccttaagatgcctctttctctcattttcccattttcctgttgtttttttctcttttaaatcttttaatcaagcagacataaaattatcatgtttatcaattcattatattag

SEQ ID NO: 226976 - DNA, 310 bp, Homo sapiens
tggccttgttttgtttttgatcttagggaaaaagctttcagtctttcgcaactgagtattttgttagctgtgtgttcttcatatatgacctttattgtgttaaggaagtttttcttttatttctgtttattaaatgtttttatcatgaaatggtgttgagttggggtgctcttcctgcatcagttgaaatggtcatgtgtttttttcctttcatcctattaatgtggtatattatattgattgtttttttgttttttgttttttgttttttttttgagacagagtctcactgtcacccaggctggaattc

SEQ ID NO: 226977 - DNA, 375 bp, Homo sapiens
tgtaaagaagaagggcaaataagcaaagtatctctgtttcctctttcccctaacaccctggcaaccactactttactttctgttattaaagacttgcctattctggatattccacataaattgtctcataccgtgcctggcaatctgtatcttgtctagtttcttacacagcataatgtttcaaatatttattcatgttgtagcatgcgtcagcacttcattatttctttttgagatatgatgtaactattctggaattagtagtgatgattgcacaacattgtgaatacactataaaccactcaactgtataattttaaaaggtggaattttatcatatgcaatttatatctcaatataaaaatgaaagaacac

SEQ ID NO: 226978 - DNA, 154 bp, Homo sapiens
tggtatttacatgaaatgttttaaatttctcttatttctaaatatttcatcatcaaaaatatggatttagatttctggagtagattttaaatatgagaataatgacatggtatatcttaaattttacagttgtattactcaaggggaaaggctg

SEQ ID NO: 226979 - DNA, 130 bp, Homo sapiens
gaggaagactgggctgggactgagttcccaaaaggaacaaaggaagccagggacagaatctgagggtcctgtatcacctccagaggagttatttgttgggtggctggagcccacatcctccaccacccag

SEQ ID NO: 226980 - DNA, 140 bp, Homo sapiens
cctctcctctctggagctacccatctgctagctctcctgggactcaaaaaactgctggtcccatggaaatacccactcaccctcacacagccctggcctcagtcctagctgttccttttttttttttttttttttttttt

SEQ ID NO: 226981 - DNA, 549 bp, Homo sapiens
catgaagggggttataatgttatattagcttttattatcaacatcaacaatagcaactgatacttttgtacaaactcatattacaagtactatgttcagtccttggtttaaattgacttctgtaagtttcacaactggcccatgaggtgggtgctgttatgaataatattctcagatgggagttgaataatttgcccaaggtcttccagcaagtaagggctggggagcagggttcagacccaggcaggcaggttcgagggccccggttctttactgctggatgtgttaacacacctgtttattagaccattgacagcaatctgtaaaatatgcaagaagcctggtgctaatgaaagtaattacaggcgtgagccaccacgctcagcctagaaacacttttaaagcttttctgtcatctctctgctgatcctgctaattagcgcataattcaccactgcgttgatgcaccttatttaatgtcaccattgctcaattgttgaacatttagatttttgttgatattctaaataaataatgttgtaaatatca

SEQ ID NO: 226982 - DNA, 418 bp, Homo sapiens
aggctaaggcaggggtttggcggggattacttgagcccagtggtttgaggccacagtgagctatggttgtgccattgcactccaacctgcgtgacagagtgagaccttacctcaaaaaataaatatttttggttttccttagcatcaatgtctacaagaaaatgctaggtttcttttaaaaaatgccttattccttgttttaaaagtaagagattaaatcaagaataacaggattcagtaatcccccacttctctcagagatagattgaggggagttgataaaggaacaagggaactccagagatgaggaaataatagtgggtatagtcattatggtaatagcaaatgagataccccttcacccaattccataatatcagtagggtctttttgacttctgagaataagtccctagtta

SEQ ID NO: 226983 - DNA, 483 bp, Homo sapiens
actgaatgctgatcttggctaaacttatgaagacaaaggtgatcttgttgaagaattgggcttttcccacttggtagggtgtaactaggtttagttgtggtccggcctctcgtacaaaagtgactggtgaggggagtggaggtgggtggagcccccagtcccatcaggactgctttacaaatctatgattcttcagtgtatttttgtctcccctggggatttcagagcactcatggttgatgtagtatctatctaacactctctgcagccatatgcattaagattaccacgtttatatatctgacagtttttctagacaaaagaaggtgaaatgttaacttgcctgaccaaggaccacatacccttgtagtggccataagctttaaatctctgatctctgaggtttgttttctgtttttttaatgtttaagttttaggttaagctctcagcttcacagtctgctgagtttctgtgtagtacct

SEQ ID NO: 226984 - DNA, 326 bp, Homo sapiens
gtggggagcagggggttgcctcagcttcctccccgttatctcaacggtcccgcccaccagccctgagccaagcctgtttcgtcactgagaagagggtacagttggcttcacagtgatgcgacaaagcccacaaacagcaggtgctcaatacatgcttgagtggaggcccctaaggcagggcttgggctgctcctgcctcctagctcccttggtttcatccctaagaccagacccactgcctctaaccctgcaggactagggtgtcactaggtgaggcctcttgggtgacccggatgtttgatgaatgaataaatgattggagccaa

SEQ ID NO: 226985 - DNA, 364 bp, Homo sapiens
attaagcacacatcatatacctgtcttcaatttccttagaactgaagagtgtgactattctgagattgtttatcctgttttctaaattcaaataccgccaaacattgttaagttacaacttatgaaaaacatgtatcgatgaaaagtcagattgattgcttccttcagagacattctttgatgttttatttccttagtaaaatttatctcaaaaagagatttgcatgcacaattccatgtcttctccctaatttccacaaattcttcagaagaaccagaatcagctttcagtgatttgttgcctcctattaagccatagagtgttccaatttctgtctcttcctgtgttttggtgccagctctt

SEQ ID NO: 226986 - DNA, 424 bp, Homo sapiens
agatagctaaagctggaagaaaataaactccgaagttcaaactgtgttcctgtatttgttagctctcaagggaattgagggtgaagaaggagctaaaggcaggagctttggcaagatatcatcaagccaaatatcagataatctcatatgtttaactaagctgagttaattaaataatgattgcccaagatttttccacctcgaacatccaaataacgacagatgtctgacaccaaaaacacaaccctagaagttggagtcaacagttcagttccaagtcctatcacaaaagtattaagcacggaaattatctgcaatatagcaaaacaaatttaaaatgattttgtaaaagaatgtagaaggaaggagaccttgaagcatgagaatggtaataaaaatattattgcaaattcaagatatataa

SEQ ID NO: 226987 - DNA, 575 bp, Homo sapiens
catgaaaatggtgatagccttcctcctcctttttattattaactttatttccactttaataggagattggatcttccttgaggtagagaattatcaggtcatgatgtttattatgatgattttacttgcctttccctcaggccactcatttattataattttgggaaacaacaagctaagacagagctccttgagactactgtggcatcttaaattctctctgaaaaaagcaaaacctttaacttcatagacaaaatttaactttctgcatctatgaaagaaataatagaagacctcataagttaattttatatttaacaatttcttttttggagtccttttaagtgttgttaaataattctgaaattttccttaaaatattcactaaccatattttctcaaagttgccggacataatgtctgattcaaggaaatgtctctactataataatgcctgctagtaacaatagagtatgtgagacttggagaaaaagataaacatttataatggaatataaataaatgcacatatgatatacaaggcaatatgaataaatatatataaaatcacagaa

SEQ ID NO: 226988 - DNA, 456 bp, Homo sapiens
caatcaataaattgataaattggatttaataaaaattaagaacttttgtgtatcaaggacattgtcaagaatgtgaaaagacagcatatagaatggaagaagatatttgcaaatcctatatctgataaaggtttaatatccagaatatgtaaggaactcctgcagctcaacaacagaaagccagttaaatcaattttgaaatgagcaaacgcctgtaaacccagctgcttggcagattgagacaggaggattgcttgaggctaggagttcaagaccaacctggacaacatttttttaattagctgggtgtggtggcatattcctgtagtcccagctacatgggagaccgaggcaggaggatcacttggggccaggcagtcaaggctgccgtgagctgtgattatgccactgcatcccagcctgggcgacagagtgagaccctgtctgagaaaaaaa

SEQ ID NO: 226989 - DNA, 516 bp, Homo sapiens
aaggaagtatgctcgtgtttgattatagagggcttccttagatcctggggatttatagcgtatgcagtatattaaccatcctagcttttaaaaaactggctaagtcggccaggcagggtggctcatgcctataatcccagcacttcgggaggctgaggcgggcggatcacctgaggacaggagttgaagaccagcctggccaacatgatgaaaccctgtctctactaaagatacaaaaattagccaggcatggtggcaggcgcctgtagtctcagcctcctgatagctgggattacagatctcctggatgttgtgggtggacctcacccaatcagttgaaggccttgagagcaaaacctgatgtttcccggagaagaatttcttcatcaagcctgcagcatcaactccttgcttgaggttacagcgtgccagcctgttctatacattttagatttgccaatccccacgataatgtgagccaattcattcaaataaatatctccttctctctctttc

SEQ ID NO: 226990 - DNA, 561 bp, Homo sapiens
agttctggtaatcactactctttctaataaaaataatacaaaaacatgatccagttttacatttagcaaattgttcataaaaaaggtggtggtactcttagtaccagcctctcttggggaaaataaacaccttatgaatcattaccttgccctttcaatgcaacctagatacacagcagctctcctttcctcttattagcatgagacattgtctccttataccaagtaaggcttcccttcaaaacctcaatctgtgaactccttgcagatttggggtggttaataaatgggctgactcctcttctcgggcacctctttatctagaggccatttccaacccagtgatgtactggtgtacaatggaaggacccacttctgtatatagcttcctttgcttctctatctccggagagagacacaagctggtggccaagggcaggcatgggagggagacttctcacaactcacccttttgaaccttttgaatttttgaaacattatgaatgtattacctagtcaaaaacaaacatttaaaagaaaaaataaagaatccattctcta

SEQ ID NO: 226991 - DNA, 563 bp, Homo sapiens
atcccaacaatgttaataagcatcctgggtgagtttttaaattgaaagctagtttgatagtctccagagccaggatgttttgccatgaacttatatagagttatgcagttctctccttaaatgaagttatggaccctcctgatactgctcagcctgcagagctctggtttccagcatgtgagagtttctgcagctaaaaaaaaacacacacaaaaaaagggaaatcatgttctttgtagcaacaaggaggcagctggaggccattatactcagtgaattaacccaggaaaagaaaaccaaatactgcatgttctcacttacaggtggaagctaaacactggatagtcatggacataaagatggggcctactagaatggggagggaggggagcaaggtttgaaaaactgttgggtagtatactcactacctgggtgatagggatcattcatattccaaacctcagtatcatgcagtatacccatgtaacaaacctgtgcatataccccctgatctaaaataaaagttgaaattaaaaaaaaaaggcgccgtggatcctctagaa

SEQ ID NO: 226992 - DNA, 923 bp, Homo sapiens
aatgtcttttctctccattgaactgtcttggtactctgttttaagtatctgagtgggtctatttctggattctctattctttattcctggtctgttaacgtggtaagttacaactgattttcaaatgttgcagcttcgcagtcctgagataaatctttgtcatcatatacaatccttcttctgaagtgctggcttctacatctaataaacattactacgtttatgttcatgggggacaatgatctataattttcttgtaacgatccagtcacagttggtatttcagttatttggccttggttatagggtcagcaaatatttcctcttcctgtattctctgaattttctttttttctttttgagatggagtcttgctctgtcgtcaggctggagtgcagtggcgtgctcttggttcattgcaacctctacctctcaggctcaagcaatccccccacctcagcctctggagcagctgggattacaggagtgtgccaccatgcttgcctaatttttttttttttgtagagccagggtttagctatgttgcccaggctggtctccaactcctgagctcaagcaatcctcctgccatggcctcccaaagtgctaacgtctttgtactccaggctgggcagcagagcaggactcagtctcaaaaacaaaacaaaacaaaacaaaacaaaaaccaaaccaaccaaccaaatggaaaaaaaaaaaaaaaaaaaacttactaaaaagcaataataagggtgggcatggtggttcccaacactttgggaggcggaggcaggcagactgaacccaggagttcgagatcagcctggataacatgctgagatgctgtgtttaccaaaaatacaaaaattagctgggcatgatggcacatgcctgtagtcccagctactagggaggttgagatggga

SEQ ID NO: 226993 - DNA, 594 bp, Homo sapiens
ctcccattgcttgtcctctggattacgcattcaatggttagagcaaatctcttccgtgagttcctgatcgtgccacacccccctcgctctactccaattctactaccaatttatgtctataatctattccaaattatttttaatttatagtttaagccaggggtcaagttttattttttccacagataaacagctgctgcaacacctctttatctgagtgggtctatttctggattctctattctttattcctggtctgttaacgtggtaagttacaactgattttcaaatgttgcagcttcgcagtcctgagataaatctttgtcatcatatacaatccttcttctgaagtgctggcttctacatctaataaacattactacgtttatgttcatgggggacaatgatctataattttcttgtaacgatccagtcacagttggtatttcagttatttggccttggttatagggtcagcaaatatttcctcttcctgtattctctgaattttctttttttctttttgagatggagtcttgctctgtcgtcaggctggaggcagtggcgcgatctcagctaactgtaacctccgcc

SEQ ID NO: 226994 - DNA, 517 bp, Homo sapiens
ggcactgaaatgtctctctcactgcagcttgaagctggtattcccggtgagttggagcagatgcaggaagaccagtgggtctccagggaattcacctggtttcctctctattcgaatctggcagctggcttagttcttgggatagcgttagtgctgaataaatatttgtttcagtgaatgaatgatctaaactgatgattgtggagatggggagacttagacggattttaggcatacttaggagagaaggttgacatttgttgctgcctggtctggggaggtcaccatccaggcacccttgctgattgtggttgggactccatgtctgggttcaacttcacagtgacctcagccgggacgactggagcccgttggctctgcccatggtttccatatagaagattaaattttctctcatatttccctcctggccttttatttctgcctcccgcattccccagtgttccccagttgtatcctagtcaatttagaattaacacccactaatgaaaaaaac

SEQ ID NO: 226995 - DNA, 497 bp, Homo sapiens
tgctgtagctgaccatccttgccctggagctttctttagtgtctccaccccttcatttgctgtatgaaaatgaggcaagtcaagaacacagctctggattaggtgtggatgagctgggttcctgtcctgggggatcttgaccttggagcctcagtttcctcatctgtaaagtctgggttacagtctctgtgccaccagtctcacagggctgctgtgaagctgggcctgaaagcatttttcttttaattttttaatttttaaattaactattttgtcttatggtaggacattcaaaaggtacaaaggagtatatggtgaaaagcagggccaccccctcaaacaagcaggacccctgactgaaggttcacctagtggtgaggttcctgactgtgcccccagagggagtctgtccatatgcaactatacaggaggatggactttattttcccagcaaagagagtaattgttttactctctattttgagatgactgtcgat

SEQ ID NO: 226996 - DNA, 483 bp, Homo sapiens
gattataaattacttgaaaacgaaggatcatttactttcaattccactgcaagtacatttctgtctcctttactggattataaattacttgaaaacaaaggatcatttactttcaattccactgcataagtaagtactcaaaaaagatttgacaaacataaaactttcctctcttttgtttgtttagctcagatcacagctgctgttcccactgacatggaaggccacaaaaaagcagtataagcttaacatgaaattctctggcagcagcaaagcattgttcagtattacctcaatgcttagcctgtctccctcttaacgaaatttccaggccatattactgtatggcaaaagaacacatgtggccaggtgcagaggctcacacctgtaatctcagaactttgggaagatcactttagcccaggagttaaagaccagcctgggcaacacagtgagatcccatttctacaaaaaataaaaatt

SEQ ID NO: 226997 - DNA, 438 bp, Homo sapiens
catgcttgatttttctttggcaaagtctttagatctgattctgctaaacttgggttctcaccagatgactggcttttaaaagaagatgatgttgaaactgactcttgtaaaaaaggacatttagtagaagctaatggtacggtgaagttttagagagttgaggagaaaatctgtcttagaacttaatctgtgccttttccttaatagctttcttctaagcccataaatatattggttcagggggatgagtgaaggcaaatggagggtgtggaagggagacagagaacagctcttgggcgttggagaagtgctgggacttgtgtcagtgctgcccgtgttggttttccagcgctgctgtaactaaccaccataaccttagatttattgttttatagttctgttgattagaagcctaacatgatctgcctgggctaaaat

SEQ ID NO: 226998 - DNA, 600 bp, Homo sapiens
tgaatactgtaggcagttgtgatacaatagtaaatatttgtatgtttaaacatagaaaaggtacagtaaaaattcagtataaaagattttaaaaatggtacaccagtgttgggcactaatatgaatggagcttgcaggactggaagcagctgtgagtgagtcagtgagtgggcagtgagtgaatgtgaaggcctgggacattactatacactactgtaaaccagtgattggctttagcatgggcatgtggtagagacctgactgatcaaagatacgtaaagagaggcttgagggaaatatttttctccctggataaaaagagagacatgaagatgaaccttccatccaaacaagatttctgaggaggaaaaaaaataaaaattgtattttaaaaaagataaatcttccagttttgaatatgattatgcaaggttatcttgggactctgagggtaaatttgagcgtgcttggatttttggtactgtcctagaatcacccatttctcctgacttctttttatgtgaaagttttcctctgttttacccactttggttgagtgttctgttattgcaatagttcacattagaaaaacatttacaa

SEQ ID NO: 226999 - DNA, 475 bp, Homo sapiens
cctcgtttcttttcacaaacccacccataaattttataacaggtagttaaaaattacgacaaggaagcgctggcccagcttttcacaatgggcagcggggagaatgggacggcgctgcgggcagctcaccggaaattttacttctagactgtggcacaacctgtcctgaattctccctaattgggcggggtaactttcccagccagcaggcagtcattagggcatcttatctggggaagataagactggggagaccaaaccactcgcctatccaagggtccctcaaggagcccttcaggacgctcactacctctctcacccacccccagatctcttgcaggtccgcaccttccttggctgatgcaatgagggagtggggaggaaaaaaaatttaatccagagaaacgaatttgccccccaacttaatagctgcattattccagctctacggttgagattagaataataaattcaa

SEQ ID NO: 227000 - DNA, 774 bp, Homo sapiens
cggacccctgcaacaacttaacagctttctgggccactcccaatatagctttgatgctattagaagaaaacaactctgggaaatgttcaacttactctattcagaaattagatctaaatctctcagatcgtgattgattttttgccatttgttaaatgtgttattacacatcaatgaagtattttggtaaaatgctgacagcctcatgttgaagacctaatttcaaattcaagagcaggctgcaggtcagcagaaactagctgcgtacattgcactgtcttccccagtgctatccgagggacatcaagggagaacaggagaggagagaaaagggaaggaaggaagagaatgccttgcattaaggactcgcataggaaattacccaaaatcatttcaatcatcaaagtaggtcgttgaggacaatttacaaattggctcgactctggagaaaacttttgaagaaaactctgtaacgtatagaagcctttaaaattgaactttatttggatttgtggcatttggaaaagtggtctataaaaaaatctggaattaggccctatcatatccataatctttggggaaaactaaggacattattataaattaacatttctttctatgaatttactggaattatgagcagtttttattctcttagaaaaattcgacacacagctattcattaaactaaaatagaaaaatcaagattgttgcattcgatcaagcagtaattttattttaaaaacctaataaaaaacaatttgctctgaagaa

SEQ ID NO: 227001 - DNA, 838 bp, Homo sapiens
ttgcatcactgtaccccagcctgggcgacagagtgggactctgactcaaaaaaaagaggaaatcaggcaaggccacagcagcatccaatgccagaagacaatgaagtggcgcatacagagtacactggggtacaaagtgcgactccagtgcgtggggccggtccagacaccagccaggcaccaaggcaacaagcagcttcctcccagacacacaagcccttctcaagaaatgaaacccagctcataaagaaacccaggactcaggaacgaaggacatgtaggcaaaggcctgagtgtttcttacagaatactaaatgcccacaagaattagagccacagaacaaatatgaatgtcagaaagcaatacgttgcaaaaacaatcatatatccgaaattgggaggagcttcggagtgtcatgcctttatctttcaaaacactgtaccatgtgctcttaaaaaaaaaaatcaatctaatcttttactatttttcaaaaatttgtttaaattttagtgaactctcaggaaataatgaagaaccatttatttagagctcaaaaattcctttaggcagggcgcagtggctcacacctgtaatcccagcactttgggaggccaaggtgggcagatcacgaggtcaagagattgagatcaacctggcaaacatggtgaaactctgtctctactaaaaatacaaaaattagctgtgcatggtggtgtgcacctgtaatcccagctacttggcaggctgaggcaggagaatcgcttgaacccaggaggcagaggttgcagtgagccaagatcatgccactgcactccagcttggcaacagagtgagact

SEQ ID NO: 227002 - DNA, 537 bp, Homo sapiens
gttttcccccaactcctccagccctgggcaacaaccaatcgactttccttagacaacgttttgagcccttattgggaggaattatagtcgaatggaaaatccagtttgggacgtggtgtaaactggaattgctttcgtggtttttccttgtgccttgggtggggcactgccgtaagagcattgcatccatcctttcgtcggtactctgctgcacacggatggcatttctgcccttgttacagatgaggaaactgaggctcagagacattaagcaaggggcagagtggggcttgtccatgagaccccagagtctgtgctcttgcacatacattatcaggccaacatgatctatccatccgaattccaaataaataaataaaaatgcttataagaagtccccccatgctgcggggaggcagcggctcatgcctgtaatcccaacacttagggaggcacaggtgggaggattgcttgaacccaggagtttgagaccagcccaggcaacatgacaatacctgcatctctgcaaaaacgaaa

SEQ ID NO: 227003 - DNA, 770 bp, Homo sapiens
atccatggcccaggtctgtgtttccctagacaactccctcatgcattctctgaggaaacttaacagcctttgtctcttcaggcgtccagcaccttccctgccagcttagctaaggcactcccttctgttcccacaaccaccccacattagctgccttccttaccctacctgaggacatgcctcgggtgtgtgggagatacagtgctctcaagggtctttcttctccccttctccctccatcgtgagttttcctacacgggctccttcacgccagcctccacatgtgccccacgtgtcatgggacgacacagagcaaaagcccagcaccctcagctgctcctgtcctctgccccattttatcacagctatcacagctccccggaaagctgtcttctctgtccatggcctcacctcacccagggcactggccttggtccacatcaaggggacctgaagcttccctgaagcctctagcctgtggtgtgcacgtacaagcctcaggccccatttgtccagcctgtcagcagctgggaaatactaagtcaccctcttctggttatgtttaattttccaatttttctcaacattactgaaatgtctaaatgtggaaaagttgacatcattttacagtgaacaccacatacccaccacctagattttaccattaccaatttcctgttccgtacttgtatattcacatatatccaactattcatccctgcttcaatccatcctatttttattgcatttcaaaataaactgtgaaatca

SEQ ID NO: 227004 - DNA, 341 bp, Homo sapiens
cttctttggaaataatgtggaatacatagaaatgcataggcaaacatgtcattgtgggttcatagtaccaaccaaactttcttcctcagatggcctgtgcccactttgaggataatcataaagtagccagttgactggaccacatttaatcagagtaaagtttaattcacttgtcctgagataataacttatcaagagattctgagaaaaaaagagacacaaggccaggtgatgtggctcatgcctgtgatcccacacctcaaaaggctgaggcaggaggattgcttgagcccaggagttcgagaccagcttcagcaacataatgagacccccgtctctca

SEQ ID NO: 227005 - DNA, 368 bp, Homo sapiens
agggagagggtgagaggagaaaaaaggagtacaagcagctacttaaacagagaagtgtttaccagtaaggtcaaaagcaggaagaactgaaaagtgcccttgagattgggtaacagtgacaaccttactgagaacagttctgcacagtggtgagctctgaaatccaaatgtagcatgctcactgggctgtgaatgggaatggatgactgttttacaggtaaagttaatcttcaggtttttttttatattaatgaggtcacttttttcccattgtaagtatctttaagaagagtatttctgaatctacttcttgcctctttttattatctctacattaccattgtcaccttttccataaaattagtgtt

SEQ ID NO: 227006 - DNA, 509 bp, Homo sapiens
ggctaatttttttttgtatttttagtagagacggggtttcaccgtgttagccaggatggtctcaatctcctgacctcgtgctccgccctcctcggcctcccaaagtgctgggattacaggtgtgagacactgcacccaaccacccagctaatttttatttatttttatttttagtagagacagggtctcagctagttgcccaggctagtcttggacccttgggctcaaatgattctcccacctctgcctcccagagtattaggattacaggcataagccactgcccctggcctccccaagtgattgtgatgggcctctctggttaagaaacctcaaaattagagagggagtggggttcaatactacagcacaggactcagggcaaacaggcctgggttcagatcctggctgtgccacttatgaactgtgtgatgttaggcaagttacttaacttatctgagccttggttgcctcttctgtaaaaagggagctaatagatatccactttt

SEQ ID NO: 227007 - DNA, 148 bp, Homo sapiens
ctttccaacttttatttattttattcagggggttcaggtttgttaacatgggtacattgtgtgtcacaggtatttggcgtacagataattttgtcatccaggtaattggcattgtacctgataggtagtttttcagttctcaccctcc

SEQ ID NO: 227008 - DNA, 429 bp, Homo sapiens
tctaagttaggtcccttatctgaggtgtggtctttgcttataggttgtggtgcttttggggtctgaacgaaatgcccacggttttcagagatgcttgtcaactgactgttccagaaatctgtcttctaactttacatggcttctaatatttcatggtctgctctcagccctgaagcaatcactttcttttaggactcatggaattttttcctctgaatgcacggtatatcccttggccatgaatccacaaaacacacacacacagattcttatggtcccagctctcctcagaaccctccttttcagtaccctgccctgagagttccagatgcttctgtcatcttgaagtctgatcttagccttctcagctcagcaaaagcactgtgcactgcttgggctctatctccctgcactgcagttcaaaacatg

SEQ ID NO: 227009 - DNA, 487 bp, Homo sapiens
aattttagccattctagttggtgtatagtagtatctcattattgtgtcaatttgcacatggtaggttaagcatatcttcacacgtttattttttatctatacatcttctttgctgaggtgtctattcagattttttgcttatttttatttttatattcctgttgttgagctttaacaattctttgtattttctagatgcaagtcttttatcagatatgtatttgcaaatattttctcccagtttgtcttttcattgtcttagtggtgtctctcacaaagcagaagttccacattttactaaagtctaacttacagattttttctttcatggattgtgcttttggaattatatctaaaaactcattgtcaggccagtcatggtggctcacgcctgtaatcccggcactttgggaggccgaggcgggcggatcatgaggtcaggagattgagaccatctggctaagatggtgaaaccccgtctccacta

SEQ ID NO: 227010 - DNA, 466 bp, Homo sapiens
gttataaaagaaatcatatacaagtataaataaaatacatacacttctgagtcctgagtagatatcttaaaattttatacatatatatatatttgaacatgtgtcctgtctgcatggaaacacataccgacttaatttgggttaaatatacattactctaaaagataaactttaggcgtaaggaaattataaagtaagtgagtttgtgtgagtagaagtttgtacttattttcagaagaaatattggggaaaaattattttaacaaggtgactagtataaaactaaaagcctcaaaaatgctgaaagcaaatgtatactctgctttgtattgaatttattactagagttattgtatatgaaagtgtttcttaattttcattttgagatagttgttaaggcataggaatgctactgactttgatgttgcttttgtattttgaaagtttaataaatttgtttagtaaa

SEQ ID NO: 227011 - DNA, 582 bp, Homo sapiens
agctggaactgtcctgctctgcatctgtctcttcttattccagatacctccagagcagctcagaatcccttgggttggggacaagtcgaggcagaacatagaaagaagcactttgtgccaggcagagattctccacccttcctgttgtgtgattctgagcacgtcactcctcattctcagccttggcttcctcttctggaaaatgggaagaggatggttcactcagatgccttgggaattgagactcctagcagagtgcctggcatacaatagatatgccgtagcccctgttcttaatcaacagcttgactgaagcacggccagggagaagcatgacttcgtgcgtggacttgggtgcccttggatggttgcttggtcagctaagtgctccttgttgagcatccctttgatcaagccacttcccttctcaaaagggttcattggtttcctggctcccctgaatgcaatccagattcttgaacctggccatcgaggccttcatttcccaaaatgtcttttcagccaacttttccactatccaaagagccacttaataaatatttcaagaaagagaaaatacaa

SEQ ID NO: 227012 - DNA, 658 bp, Homo sapiens
tttatccagtgcctctctccctcttccctctcatattcctttccctctgctttttacatttattattattatttaaagagacagggtcttgttctgttgcacaggcgggagtgcagtggtaaaatcaaacccattgtagcctcaaactactgggctcaggtgatcttcctgcctcagcttctcaaagttctaaaattacaggtgtgagccaccgtacctggcctcctctgcttttttattattttattattattattatttgctttttcccctgatttgatgtatattgttgtcattttttattattatttttcatttctattttgggtttggggcacctgtgcaagtttgttatataggtaaactcatgccatgagggtttgttatatagagtatttcatcacctggttactaagcctagtacccaatagttattttttctgctcctttctttcctcccaccctccatcctgaagtagtccccagtgtacatcgttccctttgtgtctacgagttctcatcataacagatactgttttattatcacagtaaataccctgttggctgatcaatatgtaatagtagttggtctgttaattgaaaagattcattaaggatgaagaatcatgacatattactttaagcattttttatattt

SEQ ID NO: 227013 - DNA, 512 bp, Homo sapiens
caagagtgaaactccatctcaaaaaaaaaagaatatgacacagaattttatgtatagagttccaggtaccctgctcactacggactgaaattctgtgcagtctaacaaatgaatcagagcctttccatcttgtctgggtagtccctagattccctttttagagggttttgtttttagagtgattataaattcgtccaacagtgcactttcagtgccttctacctccctctaccaagtatgaactgcatgcatggctgatttatgatttcggctattatcgcttcatgtgcgttgttcactattttgtaactgttattaaagtaaaatactgacttggaacatgaattttaaaatggtgttttatccttctagtattgattcccagttttagaaaaattggtgtcatccagtgagttttatacagaaggattttttcccttagaaatatatacatacatacaaaaaaaatttgtcattttccctgtagttgtttattatgctgtagaatttga

SEQ ID NO: 227014 - DNA, 492 bp, Homo sapiens
gagcgaggtcgtcaggaaatgagtgccaagctgaggcctcctgcagagccgccctgtgtccctgccaggatctcaccttgaagacccagctagaggcagtaaatggaaagacgatgcccgccctggaggtgttcgcccatgccctgcgcttcttcagggagcacgcccttcaggtgcgctgcggccccacctctgccgactgtggcagggaccccctattttcccctcatccgaaaccgctcccccatcccgtccccgacattggatgggtagccaccgccggagctcagaggtcatcttctccagtaccctcctccctttttgtctggtagagcctgcaccaagccatactgatgggaggggggccgattcttccagctctgctgggaagtccttcctgtgatttgattagtacctccagttccgcagagggctgaagaccaccctccctccaagccagcctgggcaacaagagagactccatctcacaaa

SEQ ID NO: 227015 - DNA, 312 bp, Homo sapiens
ccctcccccataccattcttaaagctctagatgcttttctggtagatggcctagtttcctctctttccctctcaatgtggtcttttttcctcattttgctgactgtcacactcagaattctgggtttgagactcagtctttcagatctgcttccctttcagcctcagaccacaagataatacttgtttggaacttcctgaaaaatttagggtatgtgtctgactcctcccagccttcctgactttcctaagtttgaagacagcaagcttgtagatcaaatctgtgatcaaacccattatcttgaaaaaaatg

SEQ ID NO: 227016 - DNA, 1706 bp, Homo sapiens
ccctcgcctacagaggcggcgctgtccctgatcgagcggcgggagcgagggcctggacgtagtgtcttcaacagttgtaacagcagctgccatttgctgaatgacagcatgtgtcacacactctgctgagtattacaggcatttttttctaatacaaagtcttgtagtgtggggttcagagatgggcagtgagaaggagcagagtccagaaccacacctgcctgaggaaggggaagggggtaagccttggagagtggatgactcagagggttcttggatcccacctggggagaaggagcatgggcaagagagcctgtcggatgaactgcaagaaactcatccaaaaaagccatggcagaaagtcactgtccgggctcgagagctaggggaccccattgctcatccaaggcatgaggcagatgagaagccctttatatgtgcccagtgtggcaaaaccttcaataatacctccaacctgagaacacaccagcggatccacactggtgagaagccttacaagtgttctgaatgtggcaagagcttctcgagaagctccaaccgcatccggcacgagcggatccacctggaagagaaacactacaaatgccccaagtgccaggagagctttcggcggcgctcagacctcaccacgcaccagcaagatcacctaggcaagcggccataccgctgtgacatctgtggcaagagcttcagccagagtgccacgctagctgtgcatcaccggacccacctggagccagcaccctacatctgctgtgagtgtgggaagagcttcagcaacagctccagctttggcgtgcatcaccgcacccacacaggtgagagaccttatgagtgcactgagtgtgggcggaccttcagcgatatctccaactttggagcacaccagcggacccacagaggggagaagccctaccggtgcactgtgtgtgggaaacacttctcccggagctcgaatctcatccgccaccagaaaactcacttgggcgaacaggctgggaaagattccagctgaaggagagccccatttagagtgagggagagagagtgagagaccctaacctattggaggaagatcttcagcatcttttgctgctaccttgacctcaagcccttcatcccactttggagaatggttttgtatagcctctgaagtcaggatctcaggaagtcctgaggagggactctggaataaaaacccttgcctctttccaggccaatttctcgtgttggaaagtcagaagacccagtcttggctttactttcttggggtgaaagagaaatagggtaggctcagaacatgctcatgttattaaggcagcagtccccctggcctttgaggaagtacttatgagatgggtgtcactgtctgaaggttctccaaattgtctgtgaactgcttaggtaggagtgcactgcagtttcctgctagttcccacctgttgtgccccaactttgcttctagatctctggggtgggaggagtgaccttctcaatggaaggggcctccttggtctggagaagagatctgaggtcccaccttagaaatgaaagggaaaccctcagggagccatgacccagggaccttcacactcccccatgtttgttacttgttatccctcccccaacctgcctctgttttccccagagtgattagcagtaaaacccttcaatgaaaaaaaaaa

SEQ ID NO: 227017 - DNA, 1583 bp, Homo sapiens
ccctcgcctacagaggcggcgctgtccctgatcgagcggcgggagcgagggttcagagatgggcagtgagaaggagcagagtccagaaccacacctgcctgaggaaggggaagggggtaagccttggagagtggatgactcagagggttcttggatcccacctggggagaaggagcatgggcaagagagcctgtcggatgaactgcaagaaactcatccaaaaaagccatggcagaaagtcactgtccgggctcgagagctaggggaccccattgctcatccaaggcatgaggcagatgagaagccctttatatgtgcccagtgtggcaaaaccttcaataatacctccaacctgagaacacaccagcggatccacactggtgagaagccttacaagtgttctgaatgtggcaagagcttctcgagaagctccaaccgcatccggcacgagcggatccacctggaagagaaacactacaaatgccccaagtgccaggagagctttcggcggcgctcagacctcaccacgcaccagcaagatcacctaggcaagcggccataccgctgtgacatctgtggcaagagcttcagccagagtgccacgctagctgtgcatcaccggacccacctggagccagcaccctacatctgctgtgagtgtgggaagagcttcagcaacagctccagctttggcgtgcatcaccgcacccacacaggtgagagaccttatgagtgcactgagtgtgggcggaccttcagcgatatctccaactttggagcacaccagcggacccacagaggggagaagccctaccggtgcactgtgtgtgggaaacacttctcccggagctcgaatctcatccgccaccagaaaactcacttgggcgaacaggctgggaaagattccagctgaaggagagccccatttagagtgagggagagagagtgagagaccctaacctattggaggaagatcttcagcatcttttgctgctaccttgacctcaagcccttcatcccactttggagaatggttttgtatagcctctgaagtcaggatctcaggaagtcctgaggagggactctggaataaaaacccttgcctctttccaggccaatttctcgtgttggaaagtcagaagacccagtcttggctttactttcttggggtgaaagagaaatagggtaggctcagaacatgctcatgttattaaggcagcagtccccctggcctttgaggaagtacttatgagatgggtgtcactgtctgaaggttctccaaattgtctgtgaactgcttaggtaggagtgcactgcagtttcctgctagttcccacctgttgtgccccaactttgcttctagatctctggggtgggaggagtgaccttctcaatggaaggggcctccttggtctggagaagagatctgaggtcccaccttagaaatgaaagggaaaccctcagggagccatgacccagggaccttcacactcccccatgtttgttacttgttatccctcccccaacctgcctctgttttccccagagtgattagcagtaaaacccttcaatgaaaaaaaaaa

SEQ ID NO: 227018 - DNA, 1614 bp, Homo sapiens
ccctcgcctacagaggcggcgctgtccctgatcgagcggcgggagcgagaaatacttgcagacttgaaggaattatcagtctttcattttctatcatcagtgtcctatgatagtttgtgcttccctccctcatccctttgttcatgtcactctgttcaccaacccactctgctgaaatgtcgttatttcttcaaggcccggaggaaatgctaccactctcatcagagggttcagagatgggcagtgagaaggagcagagtccagaaccacacctgcctgaggaaggggaagggggtaagccttggagagtggatgactcagagggttcttggatcccacctggggagaaggagcatgggcaagagagcctgtcggatgaactgcaagaaactcatccaaaaaagccatggcagaaagtcactgtccgggctcgagagctaggggaccccattgctcatccaaggcatgaggcagatgagaagccctttatatgtgcccagtgtggcaaaaccttcaataatacctccaacctgagaacacaccagcggatccacactggtgagaagccttacaagtgttctgaatgtggcaagagcttctcgagaagctccaaccgcatccggcacgagcggatccacctggaagagaaacactacaaatgccccaagtgccaggagagctttcggcggcgctcagacctcaccacgcaccagcaagatcacctaggcaagcggccataccgctgtgacatctgtggcaagagcttcagccagagtgccacgctagctgtgcatcaccggacccacctggagccagcaccctacatctgctgtgagtgtgggaagagcttcagcaacagctccagctttggcgtgcatcaccgcacccacacaggtgagagaccttatgagtgcactgagtgtgggcggaccttcagcgatatctccaactttggagcacaccagcggacccacagaggggagaagccctaccggtgcactgtgtgtgggaaacacttctcccggagctcgaatctcaagcccttcatcccactttggagaatggttttgtatagcctctgaagtcaggatctcaggaagtcctgaggagggactctggaataaaaacccttgcctctttccaggccaatttctcgtgttggaaagtcagaagacccagtcttggctttactttcttggggtgaaagagaaatagggtaggctcagaacatgctcatgttattaaggcagcagtccccctggcctttgaggaagtacttatgagatgggtgtcactgtctgaaggttctccaaattgtctgtgaactgcttaggtaggagtgcactgcagtttcctgctagttcccacctgttgtgccccaactttgcttctagatctctggggtgggaggagtgaccttctcaatggaaggggcctccttggtctggagaagagatctgaggtcccaccttagaaatgaaagggaaaccctcagggagccatgacccagggaccttcacactcccccatgtttgttacttgttatccctcccccaacctgcctctgttttccccagagtgattagcagtaaaacccttcaatgaaaaaaaaaa

SEQ ID NO: 227019 - DNA, 438 bp, Homo sapiens
  misc_feature (68)..(68): n is a, c, g, or t
  misc_feature (75)..(75): n is a, c, g, or t
  misc_feature (97)..(97): n is a, c, g, or t
agtacttatgagatgggtgtcactgtctaaggtctcaaatgtcccctttggtgggggttttggggtgnaaaaaanaaaaccccccctttctgggggncccccttttttttaaaaggaggggtttaaaaaaggagggggaaaaggggttgggcgcccaaccctttggggcccaaagtttttttttcctgctagttcccacctgttgtgccccaactttgcttctagatctctggggtgggaggagtgaccttctcaatggaaggggcctccttggtctggagaagagatctgaggtcccaccttagaaatgaaagggaaaccctcagggagccatgattcatgttacatcctcatacatatgtgatgttggctgtttaaatctttgttaccttccctgtgaatccaaattgtacatatttagtaaatcaaacaaacaaa

SEQ ID NO: 227020 - DNA, 1884 bp, Homo sapiens
ccctcgcctacagaggcggcgctgtccctgatcgagcggcgggagcgagggcctggacgtagtgtcttcaacagttgtaacagcagctgccatttgctgaatgacagcatgtgtcacacactctgctgagtattacaggcatttttttctaatacaaagtcttgtagtgtggaaatacttgcagacttgaaggaattatcagtctttcattttctatcatcagtgtcctatgatagtttgtgcttccctccctcatccctttgttcatgtcactctgttcaccaacccactctgctgaaatgtcgttatttcttcaaggcccggaggaaatgctaccactctcatcagagggttcagagatgggcagtgagaaggagcagagtccagaaccacacctgcctgaggaaggggaagggggtaagccttggagagtggatgactcagagggttcttggatcccacctggggagaaggagcatgggcaagagagcctgtcggatgaactgcaagaaactcatccaaaaaagccatggcagaaagtcactgtccgggctcgagagctaggggaccccattgctcatccaaggcatgaggcagatgagaagccctttatatgtgcccagtgtggcaaaaccttcaataatacctccaacctgagaacacaccagcggatccacactggtgagaagccttacaagtgttctgaatgtggcaagagcttctcgagaagctccaaccgcatccggcacgagcggatccacctggaagagaaacactacaaatgccccaagtgccaggagagctttcggcggcgctcagacctcaccacgcaccagcaagatcacctaggcaagcggccataccgctgtgacatctgtggcaagagcttcagccagagtgccacgctagctgtgcatcaccggacccacctggagccagcaccctacatctgctgtgagtgtgggaagagcttcagcaacagctccagctttggcgtgcatcaccgcacccacacaggtgagagaccttatgagtgcactgagtgtgggcggaccttcagcgatatctccaactttggagcacaccagcggacccacagaggggagaagccctaccggtgcactgtgtgtgggaaacacttctcccggagctcgaatctcatccgccaccagaaaactcacttgggcgaacaggctgggaaagattccagctgaaggagagccccatttagagtgagggagagagagtgagagaccctaacctattggaggaagatcttcagcatcttttgctgctaccttgacctcaagcccttcatcccactttggagaatggttttgtatagcctctgaagtcaggatctcaggaagtcctgaggagggactctggaataaaaacccttgcctctttccaggccaatttctcgtgttggaaagtcagaagacccagtcttggctttactttcttggggtgaaagagaaatagggtaggctcagaacatgctcatgttattaaggcagcagtccccctggcctttgaggaagtacttatgagatgggtgtcactgtctgaaggttctccaaattgtctgtgaactgcttaggtaggagtgcactgcagtttcctgctagttcccacctgttgtgccccaactttgcttctagatctctggggtgggaggagtgaccttctcaatggaaggggcctccttggtctggagaagagatctgaggtcccaccttagaaatgaaagggaaaccctcagggagccatgacccagggaccttcacactcccccatgtttgttacttgttatccctcccccaacctgcctctgttttccccagagtgattagcagtaaaacccttcaatgaaaaaaaaaa

SEQ ID NO: 227021 - DNA, 1761 bp, Homo sapiens
ccctcgcctacagaggcggcgctgtccctgatcgagcggcgggagcgagaaatacttgcagacttgaaggaattatcagtctttcattttctatcatcagtgtcctatgatagtttgtgcttccctccctcatccctttgttcatgtcactctgttcaccaacccactctgctgaaatgtcgttatttcttcaaggcccggaggaaatgctaccactctcatcagagggttcagagatgggcagtgagaaggagcagagtccagaaccacacctgcctgaggaaggggaagggggtaagccttggagagtggatgactcagagggttcttggatcccacctggggagaaggagcatgggcaagagagcctgtcggatgaactgcaagaaactcatccaaaaaagccatggcagaaagtcactgtccgggctcgagagctaggggaccccattgctcatccaaggcatgaggcagatgagaagccctttatatgtgcccagtgtggcaaaaccttcaataatacctccaacctgagaacacaccagcggatccacactggtgagaagccttacaagtgttctgaatgtggcaagagcttctcgagaagctccaaccgcatccggcacgagcggatccacctggaagagaaacactacaaatgccccaagtgccaggagagctttcggcggcgctcagacctcaccacgcaccagcaagatcacctaggcaagcggccataccgctgtgacatctgtggcaagagcttcagccagagtgccacgctagctgtgcatcaccggacccacctggagccagcaccctacatctgctgtgagtgtgggaagagcttcagcaacagctccagctttggcgtgcatcaccgcacccacacaggtgagagaccttatgagtgcactgagtgtgggcggaccttcagcgatatctccaactttggagcacaccagcggacccacagaggggagaagccctaccggtgcactgtgtgtgggaaacacttctcccggagctcgaatctcatccgccaccagaaaactcacttgggcgaacaggctgggaaagattccagctgaaggagagccccatttagagtgagggagagagagtgagagaccctaacctattggaggaagatcttcagcatcttttgctgctaccttgacctcaagcccttcatcccactttggagaatggttttgtatagcctctgaagtcaggatctcaggaagtcctgaggagggactctggaataaaaacccttgcctctttccaggccaatttctcgtgttggaaagtcagaagacccagtcttggctttactttcttggggtgaaagagaaatagggtaggctcagaacatgctcatgttattaaggcagcagtccccctggcctttgaggaagtacttatgagatgggtgtcactgtctgaaggttctccaaattgtctgtgaactgcttaggtaggagtgcactgcagtttcctgctagttcccacctgttgtgccccaactttgcttctagatctctggggtgggaggagtgaccttctcaatggaaggggcctccttggtctggagaagagatctgaggtcccaccttagaaatgaaagggaaaccctcagggagccatgacccagggaccttcacactcccccatgtttgttacttgttatccctcccccaacctgcctctgttttccccagagtgattagcagtaaaacccttcaatgaaaaaaaaaa

SEQ ID NO: 227022 - DNA, 1989 bp, Homo sapiens
ccctcgcctacagaggcggcgctgtccctgatcgagcggcgggagcgagggcctggacgtagtgtcttcaacagttgtaacagcagctgccatttgctgaatgacagcatgtgtcacacactctgctgagtattacaggcatttttttctaatacaaagtcttgtagtgtggaaatacttgcagacttgaaggaattatcagtctttcattttctatcatcagtgtcctatgatagtttgtgcttccctccctcatccctttgttcatgtcactctgttcaccaacccactctgctgaaatgtcgttatttcttcaaggcccggaggaaatgctaccactctcatcagagtctggattgtcattgcttagtggtttcaagaagagtgacattattcaaatggcacaaatatcatctggtggtggtggacaaagccggtgccttctttttgctctgggttcagagatgggcagtgagaaggagcagagtccagaaccacacctgcctgaggaaggggaagggggtaagccttggagagtggatgactcagagggttcttggatcccacctggggagaaggagcatgggcaagagagcctgtcggatgaactgcaagaaactcatccaaaaaagccatggcagaaagtcactgtccgggctcgagagctaggggaccccattgctcatccaaggcatgaggcagatgagaagccctttatatgtgcccagtgtggcaaaaccttcaataatacctccaacctgagaacacaccagcggatccacactggtgagaagccttacaagtgttctgaatgtggcaagagcttctcgagaagctccaaccgcatccggcacgagcggatccacctggaagagaaacactacaaatgccccaagtgccaggagagctttcggcggcgctcagacctcaccacgcaccagcaagatcacctaggcaagcggccataccgctgtgacatctgtggcaagagcttcagccagagtgccacgctagctgtgcatcaccggacccacctggagccagcaccctacatctgctgtgagtgtgggaagagcttcagcaacagctccagctttggcgtgcatcaccgcacccacacaggtgagagaccttatgagtgcactgagtgtgggcggaccttcagcgatatctccaactttggagcacaccagcggacccacagaggggagaagccctaccggtgcactgtgtgtgggaaacacttctcccggagctcgaatctcatccgccaccagaaaactcacttgggcgaacaggctgggaaagattccagctgaaggagagccccatttagagtgagggagagagagtgagagaccctaacctattggaggaagatcttcagcatcttttgctgctaccttgacctcaagcccttcatcccactttggagaatggttttgtatagcctctgaagtcaggatctcaggaagtcctgaggagggactctggaataaaaacccttgcctctttccaggccaatttctcgtgttggaaagtcagaagacccagtcttggctttactttcttggggtgaaagagaaatagggtaggctcagaacatgctcatgttattaaggcagcagtccccctggcctttgaggaagtacttatgagatgggtgtcactgtctgaaggttctccaaattgtctgtgaactgcttaggtaggagtgcactgcagtttcctgctagttcccacctgttgtgccccaactttgcttctagatctctggggtgggaggagtgaccttctcaatggaaggggcctccttggtctggagaagagatctgaggtcccaccttagaaatgaaagggaaaccctcagggagccatgacccagggaccttcacactcccccatgtttgttacttgttatccctcccccaacctgcctctgttttccccagagtgattagcagtaaaacccttcaatgaaaaaaaaaa

SEQ ID NO: 227023 - DNA, 1848 bp, Homo sapiens
gccaaagctgggccttgtcacctaggaaagcctcaagatttagaggttttgttttgttcattttgaaagcaggcatataggtagatacttgtaaggaaggtttttcaaaaaggattaaacataaaaagagttacagttaacttacagttaggcagaaaaattgaacttatcccaaaatgaaagctcttttacttgcccatgaattatagtctggattgtcattgcttagtggtttcaagaagagtgacattattcaaatggcacaaatatcatctggtggtggtggacaaagccggtgccttctttttgctctgggttcagagatgggcagtgagaaggagcagagtccagaaccacacctgcctgaggaaggggaagggggtaagccttggagagtggatgactcagagggttcttggatcccacctggggagaaggagcatgggcaagagagcctgtcggatgaactgcaagaaactcatccaaaaaagccatggcagaaagtcactgtccgggctcgagagctaggggaccccattgctcatccaaggcatgaggcagatgagaagccctttatatgtgcccagtgtggcaaaaccttcaataatacctccaacctgagaacacaccagcggatccacactggtgagaagccttacaagtgttctgaatgtggcaagagcttctcgagaagctccaaccgcatccggcacgagcggatccacctggaagagaaacactacaaatgccccaagtgccaggagagctttcggcggcgctcagacctcaccacgcaccagcaagatcacctaggcaagcggccataccgctgtgacatctgtggcaagagcttcagccagagtgccacgctagctgtgcatcaccggacccacctggagccagcaccctacatctgctgtgagtgtgggaagagcttcagcaacagctccagctttggcgtgcatcaccgcacccacacaggtgagagaccttatgagtgcactgagtgtgggcggaccttcagcgatatctccaactttggagcacaccagcggacccacagaggggagaagccctaccggtgcactgtgtgtgggaaacacttctcccggagctcgaatctcatccgccaccagaaaactcacttgggcgaacaggctgggaaagattccagctgaaggagagccccatttagagtgagggagagagagtgagagaccctaacctattggaggaagatcttcagcatcttttgctgctaccttgacctcaagcccttcatcccactttggagaatggttttgtatagcctctgaagtcaggatctcaggaagtcctgaggagggactctggaataaaaacccttgcctctttccaggccaatttctcgtgttggaaagtcagaagacccagtcttggctttactttcttggggtgaaagagaaatagggtaggctcagaacatgctcatgttattaaggcagcagtccccctggcctttgaggaagtacttatgagatgggtgtcactgtctgaaggttctccaaattgtctgtgaactgcttaggtaggagtgcactgcagtttcctgctagttcccacctgttgtgccccaactttgcttctagatctctggggtgggaggagtgaccttctcaatggaaggggcctccttggtctggagaagagatctgaggtcccaccttagaaatgaaagggaaaccctcagggagccatgacccagggaccttcacactcccccatgtttgttacttgttatccctcccccaacctgcctctgttttccccagagtgattagcagtaaaacccttcaatgaaaaaaaaaa

SEQ ID NO: 227024 - DNA, 1996 bp, Homo sapiens
ccctcgcctacagaggcggcgctgtccctgatcgagcggcgggagcgagggcctggacgtagtgtcttcaacagttgtaacagcagctgccatttgctgaatgacagcatgtgtcacacactctgctgagtattacaggcatttttttctaatacaaagtcttgtagtgtggaaatacttgcagacttgaaggaattatcagtctttcattttctatcatcagtgtcctatgatagtttgtgcttccctccctcatccctttgttcatgtcactctgttcaccaacccactctgctgaaatgtcgttatttcttcaaggcccggaggaaatgctaccactctcatcagagtggtttcaagaagagtgacattattcaaatggcacaaatatcatctggtggtggtggacaaagccggtgccttctttttgctctggtgttggccatttgtgttcattctcagggttcagagatgggcagtgagaaggagcagagtccagaaccacacctgcctgaggaaggggaagggggtaagccttggagagtggatgactcagagggttcttggatcccacctggggagaaggagcatgggcaagagagcctgtcggatgaactgcaagaaactcatccaaaaaagccatggcagaaagtcactgtccgggctcgagagctaggggaccccattgctcatccaaggcatgaggcagatgagaagccctttatatgtgcccagtgtggcaaaaccttcaataatacctccaacctgagaacacaccagcggatccacactggtgagaagccttacaagtgttctgaatgtggcaagagcttctcgagaagctccaaccgcatccggcacgagcggatccacctggaagagaaacactacaaatgccccaagtgccaggagagctttcggcggcgctcagacctcaccacgcaccagcaagatcacctaggcaagcggccataccgctgtgacatctgtggcaagagcttcagccagagtgccacgctagctgtgcatcaccggacccacctggagccagcaccctacatctgctgtgagtgtgggaagagcttcagcaacagctccagctttggcgtgcatcaccgcacccacacaggtgagagaccttatgagtgcactgagtgtgggcggaccttcagcgatatctccaactttggagcacaccagcggacccacagaggggagaagccctaccggtgcactgtgtgtgggaaacacttctcccggagctcgaatctcatccgccaccagaaaactcacttgggcgaacaggctgggaaagattccagctgaaggagagccccatttagagtgagggagagagagtgagagaccctaacctattggaggaagatcttcagcatcttttgctgctaccttgacctcaagcccttcatcccactttggagaatggttttgtatagcctctgaagtcaggatctcaggaagtcctgaggagggactctggaataaaaacccttgcctctttccaggccaatttctcgtgttggaaagtcagaagacccagtcttggctttactttcttggggtgaaagagaaatagggtaggctcagaacatgctcatgttattaaggcagcagtccccctggcctttgaggaagtacttatgagatgggtgtcactgtctgaaggttctccaaattgtctgtgaactgcttaggtaggagtgcactgcagtttcctgctagttcccacctgttgtgccccaactttgcttctagatctctggggtgggaggagtgaccttctcaatggaaggggcctccttggtctggagaagagatctgaggtcccaccttagaaatgaaagggaaaccctcagggagccatgacccagggaccttcacactcccccatgtttgttacttgttatccctcccccaacctgcctctgttttccccagagtgattagcagtaaaacccttcaatgaaaaaaaaaa

SEQ ID NO: 227025 - DNA, 1697 bp, Homo sapiens
ccctcgcctacagaggcggcgctgtccctgatcgagcggcgggagcgagggcctggacgtagtgtcttcaacagttgtaacagcagctgccatttgctgaatgacagcatgtgtcacacactctgctgagtattacaggcatttttttctaatacaaagtcttgtagtgtggggttcagagatgggcagtgagaaggagcagagtccagaaccacacctgcctgaggaaggggaagggggtaagccttggagagtggatgactcagagggttcttggatcccacctggggagaaggagcatgggcaagagagcctgtcggatgaactgcaagaaactcatccaaaaaagccatggcagaaagtcactgtccgggctcgagagctaggggaccccattgctcatccaaggcatgaggcagatgagaagccctttatatgtgcccagtgtggcaaaaccttcaataatacctccaacctgagaacacaccagcggatccacactggtgagaagccttacaagtgttctgaatgtggcaagagcttctcgagaagctccaaccgcatccggcacgagcggatccacctggaagagaaacactacaaatgccccaagtgccaggagagctttcggcggcgctcagacctcaccacgcaccagcaagatcacctaggcaagcggccataccgctgtgacatctgtggcaagagcttcagccagagtgccacgctagctgtgcatcaccggacccacctggagccagcaccctacatctgctgtgagtgtgggaagagcttcagcaacagctccagctttggcgtgcatcaccgcacccacacaggtgagagaccttatgagtgcactgagtgtgggcggaccttcagcgatatctccaactttggagcacaccagcggacccacagaggggagaagccctaccggtgcactgtgtgtgggaaacacttctcccggagctcgaatctcatccgccaccagaaaactcacttgggcgaacaggctgggaaagattccagctgaaggagagccccatttagagtgagggagagagagtgagagaccctaacctattggaggaagatcttcagcatcttttgctgctaccttgacctcaagcccttcatcccactttggagaatggttttgtatagcctctgaagtcaggatctcaggaagtcctgaggagggactctggaataaaaacccttgcctctttccaggccaatttctcgtgttggaaagtcagaagacccagtcttggctttactttcttggggtgaaagagaaatagggtaggctcagaacatgctcatgttattaaggcagcagtccccctggcctttgaggaagtacttatgagatgggtgtcactgtctgaaggttctccaaattgtctgtgaactgcttaggtaggagtgcactgcagtttcctgctagttcccacctgttgtgccccaactttgcttctagatctctggggtgggaggagtgaccttctcaatggaaggggcctccttggtctggagaagagatctgaggtcccaccttagaaatgaaagggaaaccctcagggagccatgacccagggaccttcacactcccccatgtttgttacttgttatccctcccccaccccgcagtggatgtctccagagtttataaaggtagttccctttgataa

SEQ ID NO: 227026 - DNA, 1104 bp, Homo sapiens
ccctcgcctacagaggcggcgctgtccctgatcgagcggcgggagcgagggcctggacgtagtgtcttcaacagttgtaacagcagctgccatttgctgaatgacagcatgtgtcacacactctgctgagtattacaggcatttttttctaatacaaagtcttgtagtgtggggttcagagatgggcagtgagaaggagcagagtccagaaccacacctgcctgaggaaggggaagggggtaagccttggagagtggatgactcagagggttcttggatcccacctggggagaaggagcatgggcaagagagcctgtcggatgaactgcaagaaactcatccaaaaaagccatggcagaaagtcactgtccgggctcgagagctaggggaccccattgctcatccaaggcatgaggcagatgagaagccctttatatgtgcccagtgtggcaaaaccttcaataatacctccaacctgagaacacaccagcggatccacactggtgagaagccttacaagtgttctgaatgtggcaagagcttctcgagaagctccaaccgcatccggcacgagcggatccacctggaagagaaacactacaaatgccccaagtgccaggagagctttcggcggcgctcagacctcaccacgcaccagcaagatcacctaggcaagcggccataccgctgtgacatctgtggcaagagcttcagccagagtgccacgctagctgtgcatcaccggacccacctggagccagcaccctacatctgctgtgagtgtgggaagagcttcagcaacagctccagctttggcgtgcatcaccgcacccacacaggtgagagaccttatgagtgcactgagtgtgggcggaccttcagcgatatctccaactttggagcacaccagcggacccacagaggggagaagccctaccggtgcactgtgtgtgggaaacacttctcccggagctcgaatctcatccgccaccagaaaactcacttgggcgaacaggctgggaaagattccagctgaaggtccgcacccacacaggtgagagaccttatgagagcaccaccaatacagagagcaccaccaataca

SEQ ID NO: 227027 - DNA, 502 bp, Homo sapiens
tgaataatttgcagagagcgataaagatagtatgtgtcacagttgtaatccaaccctaaatgtagtcagtacccctttctttattctgtgtttcttttttccagaaatacttgcagacttgaaggaattatcagtctttcattttctatcatcagtgtcctatgatagtttgtgcttccctccctcatccctttgttcatgtcactctgttcaccaacccactctgctgaaatgtcgttatttcttcaaggcccggaggaaatgctaccactctcatcagaggtacttttccccccaactctttccctgtccttggctgtaggaacccaaaggagtctgtgcagcttagcacacattagtgatgtttgcacaaatcaggacctgtactgggcactcttatgtgtttagttttggggtggggtgtggggagtgtggtttgtgtgtctgtgtctgtgtttatctttgtgtgtacttggtatgtgagtgtgtgtctgtgtgtggt

SEQ ID NO: 227028 - DNA, 1761 bp, Homo sapiens
atggaaccagctgctgccctgcacttctcccggccagcctccctcctcctcctcctcagcctgtgtgcactggtctcagcccaggtcactgtcgtggggcccactgatcccatcctggccatggtgggagaaaacactacgttacgatgctgtctgtcacccgaggaaaatgctgaggacatggaggtgcggtggttccagtctcagttctcccctgcagtgtttgtgtataagggtggaagagagagaacagaggagcagaaggaggagtaccgagggagaaccacctttgtgagcaaagacagcaggggcagcgtggccctgatcatacacaatgtcacagccgaggataacggcatctaccagtgttacttccaagaaggcaggtcctgcaatgaggccatcctgcaccttgtggtggcaggactggactctgagcccgtcattgaaatgagagaccacgaggacgggggcatccagctggagtgcatatctggagggtggtacccaaagcccctcacagtgtggagggacccctacggtgaggtcgtgcctgccctgaaggaggtctccacccctgacgcagacagcctcttcatggtcaccacagctgtgatcatcagagacaagtctgtgaggaacgtgtcctgctctatcaatgacaccctgctcggccagaagaaagaaagtgtcatttttattccagaatcctttatgcccagcaggtctccatgtgtggtgatcctgcctgttatcatgattattctgatgatacccattgccatatgcatctactggatcaacaatctccaaaaggaaaaaaaagattctcatctcatgacattcaacctctgtctgtcccttgcaggatggagaagaacattcttacatgctgccaatgttgtcctggaccaagacactggtcatccctatctcttcgtgtcagaggacaaaagaagtgtgacattggacccctccagggagagcattccgggcaacccagagagattcgacagtcagctttgtgtcctgggccaggagagcttcgcctcagggaaacattacttggaggtagatgtggaaaatgtgattgagtggactgtggggatctgtagagacaatgttgagaggaaatgggaggtcccactacttcctcagaatggcttctggaccttggagatgcataaaaggaaatactgggccctgacctcccttaagtggattctctctctggaggagcccctttgccaggtgggcatcttcctggactatgaagctggagacgtctccttctacaacatgagggacagatcacacatctacacatttccccattcagccttttctgtgcctgtgaggcccttcttcagcttagggtcttatgacagccaaatcttaatctgctctgcattcacaggagccagtggggtcacggtgcctgaagagggctggacacttcacagagcagggacccaccacagcccacagaatcagttccccagtctcacagccatggaaacaagccctggccatctcagcagccactgcacaatgcctctggtggaagacacgccctcctcccctctggtcacacaagagaacatcttccagctgcctctttcacacccactccagacctcagcccctgttcacctcctcattaggtgtggctttagtagttcctttggttgtaactatgggatggaatccaggcatagggaactagttgttccacagctcccagccaggaagaaagtgtga

SEQ ID NO: 227029 - DNA, 340 bp, Homo sapiens
atggaaccagctgctgccctgcacttctcccggccagcctccctcctcctcctcctcagcctgtgtgcactggtctcaggtagggatgtgtgccacttgctgctgtcacctatcagaaaggatcatcaaccctgtagtctgcaaaggcaaagaaagaaggactgtggagttgttgacttatcctttcattctgaacatgttcactgaatttataccagcactgtccaaaagaaacacagtgaggcacaaaggccaagtgcatgtacaattgcaaattttccaaaaaaattaaattttactttttatttaagaaagtaaaaagaaacatgaaataaaaaag

SEQ ID NO: 227030 - DNA, 1848 bp, Homo sapiens
gtggcctgaaatatttccagaatacaagcaacactgacaaaaatattcttgtagggccccacaaatctcactgagaaagaacccctacaggtggagaggagtgtggggtatgcagactggaaggtgggaccctgattcattccagaactggaaggaaatcagacatttccaaacaggagagagatgggaagccggaggaaggagcaggaggagggaagagaatgaatcttatgtgaatgaatggtaattttctctcagttactgggaagaaaaaaaaataacaaaatcagaccttggtctggtccactaaaaagaattctctgagtcagacttctttcatggaagttgtgaactttatcctctggcagccatttatctaatattaaaccccttaaccttcctaattgttctctttcagtatcagctggtttcatattaacctttcagtctttcccataatgcagttacctccaactcccgccagacccaattcagagctgccatcaggtcagacctttgcctgctcttggcaacacgtccccctgtcctgctcctctgcaacctgcccctctttttcttcatgtgctgtgaaggcaccatgtggatgggtgttcaacttctggattggggatgcacagagcctgagggacacactttgcaaacctgcaccttgcacttttgggttctggcctgcaaggtctcctttattcttttggaccaaggctgtccctgggagagggcagccgccggcctgtcagagcaaatcagcctcaggcggtttctgcggctctggtatttgagctttgttttccctctctcccgggaagaactcattgaaatagtttctctgggaaagacaaagcgtctcgcccagatgctgaaggatcacttggtaactgcctgtcttggtttcccgttgtgcccatgaaggcgccatcagctctaaagctgacctgtggttccgtctccaaacagctaacccagacgtcacccccttgcagccagccgtcacagcctgagttggagttctggcctctcctagcagtgagtgacagtgttggaggggccttggacaccttgggtaattgctaactaaatatgagcagtaggggaaggtcttctggtccacggcagagccaacggggcacttcctcttctcttttctagtcagggtagaaagctagaaagaatcctaaaaatcactatccaagtccccattgtgtggggacagaggcctggcctgaagcctaggctggagggttcagtcggaagcagaagccgggagactgcatgagagggttccttccagcttcaccaagcccgtgctgcgcgggatgaagaaagtcaagcctgtcttccagtggggccctgaggtgggggagctggaggatagggtggcagcttttttatcagctgtccccaaaagaggcccttctcccagttgccacggaccaaagctcctcctgggagctccagcctgtctgttcaatgtttgccttgcgccttttcctggtgaggccacccccggcaccatctcaggcctcagaaggacgacctcactgaaacagcccttaggttgggaaagaagcaagccctccgcgccccgtccaagtctctcaactgggcacgagcacacacagacgcccaggccctgtccctgcgccagaatggccgctcgcgtttccaggcacgatgcccctttccatgagtgcacagagccctgggctgagctgggggccgagctccacgctctctgagcagctctgagcggcacgccaaagaaggtctttcagatgggctctgggatgtggaaccatggcgtccagccctagcgtcgactccacacta

SEQ ID NO: 227031 - DNA, 260 bp, Homo sapiens
caatccagaatgcagcacagagagaccaaaaagaaaaaaaaataggtaagggacatacatttcattgatagatctttaattgaagtcctagaagaaatgagaatgaagcagaggcaacatgtgccggcctcatggctgagttttttttttagaactggtgattgacaatcaatattcaaaaagctcacagaaacccatgtgggatgcataaaaagaaatctacatctaggaacattattgtgaggcttcagaatcaccac

SEQ ID NO: 227032 - DNA, 717 bp, Homo sapiens
aaaaaagattttatgaaggagagatctaaagaaataagacttgttattggtatggacttagaggtaggatttctctcagagcaaggaggtttttcaagcaaattctgataccaacctctttcctttggaagtaggaaacagagtccctagagacaatttacttcaacttttgggaactttgaagatcagtctttgagaacttagttgttgtctagtggccaactagatgttgtgtttctgaataatagaaattaacaggtgaacttggatgtcatggattaaaaattaagtgtcagtgtagctactgtaggagcactttcatgtactttgttgtttctgcttccagggacctaatacctatcattgctgctctggaatataatcagtggttcacaaaactgtcctctaaggatctaaaactgtccactgatgtctgtgaacagatcttgagggtggtgagtaggtccaatcgactggaagaattggtgttggaaaatgctggacttagaacagattttgcacaaaaactggccagtgctctagcacataatcccaactcaggactccacacaattaaccttgctggcaacccactggaggatagaggtactgcagagttctcattatcattgatgccagaattgtaagaggattagagaattttaatttagccatgcctgaagagctgtatcaagctaagttgtaattataagtgct

SEQ ID NO: 227033 - DNA, 768 bp, Homo sapiens
aaaaaagattttatgaaggagagatctaaagaaataagacttgttattggtatggacttagaggtaggatttctctcagagcaaggaggtttttcaagcaaattctgataccaacctctttcctttggaagtaggaaacagagtccctagagacaatttacttcaacttttgggaactttgaagatcagtctttgagaacttagttgttgtctagtggccaactagatgttgtgtttctgaataatagaaattaacaggtgaacttggatgtcatggattaaaaattaagtgtcagtgtagctactgtaggagcactttcatgtactttgttgtttctgcttccagggacctaatacctatcattgctgctctggaatataatcagtggttcacaaaactgtcctctaaggatctaaaactggtaagtaatcaaacatgcagcaaatgttgcttggctttgctgaatttcaaaaacccaataattgtgggaaaaaaacaatttttttactgtactagtaagctgtatacattttatttcttgaggaggtattttcctttaaatgatttgcgtaacatttagtcaaatttgtaatgtgagatgcttccaagtatttcctcatgtattcagctgtttcgggcaatttaagaagatgaacaaaaagatacatttagtgtagcctttagtataaagtcattcagttggcaaaaactgttaaagttacatttgcacagctgcaaatagcagattttatattcctatcttacac

SEQ ID NO: 227034 - DNA, 445 bp, Homo sapiens
ctcagtttccctatctgtatattgggagcagttgtgaagctcagaagagaaatgtctgtgaaaaggttatgaacaggagggagagtggaaaccaacctgctggatcgtgtccacagaccctggaatggggccacatgcttggtttgtcaaattgcagacgccggccgggtgcgatggctcatgcctgtaatcccagcactttgggaggccgaggcggacagatcacttgaggtcgggagttcgagaccagcctgaccaacatggagaaaccccgtctctactgaaaatacaaaattagccaggcatggtggcacatgcctataatcccagctacttgggaaggctgaggcaggagaatcacttgaacctgggagacggaggttgtggtgagcctagatcgtgccattgtactccagcctgggcaacaagagtgaaactccgtctc

SEQ ID NO: 227035 - DNA, 451 bp, Homo sapiens
agataacataagatttgtcattttaatgatttgtaagtgtataattaagtggcattaattacattcattatagtgtgcagccattaccgctatctgtttctaaagctttttcagcacgtaaactgaaactctgtaaccactgaccaataactcttcatttcccctgctcccagcctgtgctaacctctaatctactttctgtcttgatgcatttgcctgttctagacatttcatatactgtaagtgcaccatttgttcttttgtctctggcttattcagcatgatgttgtcaaggttcacccatgttcattcctttttatgtctgagtaatattccatggtatggacagagcatgttttggaaaacatggctgttaacggttccataaccctcctgtgtgtggaaggaccctgttttcttagcccttcccctcttttcgccccgactcagg

SEQ ID NO: 227036 - DNA, 276 bp, Homo sapiens
ctagccctcaaataatatttgatttaacaaaattttaaggtagcaaaacttgagctgtcacttggaattgataggaatccaacaagatttacctttattagtcagaattcagagaccaaaaccccagagggtatacagttcaagcctttcccttcacagatgagaaaattgagatttaggaacattaagtcaattaaccatgattacactgctaatcaaaaacagacctgggtctgccaataagtctcccatatctgagtcatctttagtttgaaa

SEQ ID NO: 227037 - DNA, 462 bp, Homo sapiens
taagagcagtgcctcggcttctgcacctgaaaccgcactaggcatataggacttaccagtgccccaggcttactcggccgacagcaactctctgcttccctcaatgcgttgtgcagaatgaggaggaatgtagagaatcagactttccaaacctcagcctgggtactgactttcagcctcgagattaagagcttgagtccaggagccaggctgctcaggttacacttcccctcagtgttaacctactcctgcgtttaacttgggggtaagttaccagacttttcggtgcctcagtttcttcgtctgtaaagcagggtgaataataatgcaccttcctcagaaagctatcgtggagattgagttaataaacatgaagtgtttggaactacggctggcaagtggtatgaattatatcagtgtcagctacagttattattattatttatgaatttgacctgaagc

SEQ ID NO: 227038 - DNA, 765 bp, Homo sapiens
gcgcatggaacattttccaggatggagaatattagatcataatacaggtcttaacaaatttaagatcaaaatcataccaagtatcttttccagccacaaggcgatacacttagaaatcacaaacagcaagaaaattcacaaagtatgagaactaaacacactgtccgggcatggtggctcccacctgtcatcctggcactgtgggaggccgaggcaagtggatcacctgaattctggagttcgagaccagcctggccaacatggcaaaactctgtctctactaaaaatacaaaaatttagctgggtgtggttgcgtgcgcctgtaatcgcagctacttgggaggctgaggcaggagagaatcgcttgaaccagggaggtggaggttgcggtgagcagagattgtgccgctgtactccagcctgggcgacagagtgagactctgtcacaaaaaaaaaaaaaaaaaaaaaaaccacacacacacactgaaaagcttttttttactaagatcaggaacaaggcaaggatatcactgtcaccacttccatgctatataacactggaagccctagctagagctatttggcaggaaaaagcaaaagcatctatatccgtgcaagttcacagataacatgatcttatacatagaaaaatctgcaatttccacaaaaaaacttgttagaattaatatattcagtaaaggtgcaggatacaaaattagcacataaaaatcagttgcgttcctgtacactaacaaacactccaaa

SEQ ID NO: 227039 - DNA, 324 bp, Homo sapiens
gcagtcacgctgccgagaaggacccacagatattatcaacaacacagagaaagctgctgtcggaaggccccttcccagcccaggattcggtctgcccagcagaggagaaagagaagaggctgggagtctaacctagagttgaagcctttcccttcctagctgggcaacctgcagctagttacttgaactttctgaaactcggtcccctcaccagcaaagcagggataataataactacttcttaggggtgctgtgagatttaaataacatttgtcaatgagctgaagtaaataaaagaaaaagaggcatggtgcccaaaaaact

SEQ ID NO: 227040 - DNA, 123 bp, Homo sapiens
acatgctagaaaaagctaagattgccattaagagagcataggtagaaatatgaacattaaaggcaacactggtgaaagctcacaaagaaaagaggagagctggagagaaggctttcatcttct

SEQ ID NO: 227041 - DNA, 683 bp, Homo sapiens
ttaaaagaaaattagaaatgtacacaaatacttattggaagctagctatatacattacactgtttttttacattgactgaatattggaagcattccaaatactttgatatattcacataataaaagaccattgaagttaaaatgatgttgtaaaataatacataaaatggtattaaatatatggaaatgcattcatggtatattaaggtagggcatggatagggaagcaaatgagatgatagtatgtaaagtaggaatctatatttttaaagtaaaaattttcaaagcatgcatacaagcttatatgtacatatagagaaagaactggaaggatattcacctattaatgatagtgcttttctcagggtagggggatgatgggtatgtttcctattatctttattctttaaagttcttcaaataaatactttatgaaacaaaaaccaaaattcctccgcttattaaaggcttagaatgggctatttattatattaagcattttgagcatagtcccttaaatttcttaaaatcacacaaggtaggtcttatgaaccattttacagatggaaaatctgaggctcagagagattgagtaacttactcaacactgcacaactagtgtaagatgcaaaactcaaacgctggtctgtctgtctccaatgctatttctctatcaccctact

SEQ ID NO: 227042 - DNA, 630 bp, Homo sapiens
ttaaaagaaaattagaaatgtacacaaatacttattggaagctagctatatacattacactgtttttttacattgactgaatattggaagcattccaaatactttgatatattcacataataaaagaccattgaagttaaaatgatgttgtaaaataatacataaaatggtattaaatatatggaaatgcattcatggtatattaaggtagggcatggatagggaagcaaatgagatgatagtatgtaaagtaggaatctatatttttaaagtaaaaattttcaaagcatgcatacaagcttatatgtacatatagagaaagaactggaaggatattcacctattaatgatagtgcttttctcagggtagggggatgatgggtatgtttcctattatctttattctttaaagttcttcaaataaatactttatgaaacaaaaaccaaaattcctccgcttattaaaggcttagaatgggctatttattatattaagcattttgagcatagtcccttaaatttcttaaaatcacacaaggtaggtcttatgaaccattttacagatgtgtaagatgcaaaactcaaacgctggtctgtctgtctccaatgctatttctctatcaccctact

SEQ ID NO: 227043 - DNA, 508 bp, Homo sapiens
ataactgtgccaacactagtcttgttgcttttccctctaatctgacaatttaaaacatggatatgccatcattgtccccaccctgctttgttcatatcccttgaatctttgactatttcattgctccaaatcaaaagatggggtggtggttttgctcgctgcctctagttcttgactggctgctgggggtttggtggaggaaaagtggagaaactacttgatccatgctatagcttcaaaagtagctgggctatgtcagtggaatgctgagttgtaaattattttcctagattatttgcaaggctgagctaacacacaaaacatccagactgcaaaaatctcactagaggaagtatctgtttctggcttctggccaaaggctatacttcccagaaaaaaaaccaaaccaaaacaaaactcacttgttattgactgtcaagagtggcatgtattttcaaacatctgatattacagaattagacattcatacatgtatttttaccttttc

SEQ ID NO: 227044 - DNA, 364 bp, Homo sapiens
gcggaggttgcagtgagccgagatcgcaccactgcactccagcctgggtgacagagtgactctgtctcaaaaaaacaaaaaacaggagagaatggattttcctgtccacatagaataaaaagcagttggtttagccaggcatggtggcatgtgcctgtagtcccagctacttggggagctgagatgggaggattgcttgagtcctagaggttgagtctacagtgagctgtgatcatgcgactgcactccagcctgggcgacagagttgagaccccatttcaaaaaacaaaacaaaacaaaaaaacagattggaaaacagcaatgaaagattgagttctataagttgacaataaagaaaattgac

SEQ ID NO: 227045 - DNA, 246 bp, Homo sapiens
gaaaataatttgcttgggactccaagagtatacgttcagggtctgtcacaatacaaataatttctataaaagtctagtaggtattatgagatttaccttcattctttctgatttagatgacactatcaccaatttgttgggaaatgttttccatttgggtaagatttatttttattatttaatctgtggttttctgagtaaaacctcagaaagttgtttttttaagaaacagcaggctgacataca

SEQ ID NO: 227046 - DNA, 426 bp, Homo sapiens
aaggtagagccctgactcctttttggacaacattcactaagagtgtgcattctgatttgcttgccaatgtcacaatctgaacactacagttgttttatcttttttctctttcccattgcttaacaccagcattgttagagaaagggatcagactaaggcttatctaaatggcccttattaaagatggtagagaaatacgatatgggtagaaaacattggttcctgtgaagtctggttttagctccaacttcacttagtggttttctctgtggttctcttccattagcacgatgaactgaagccaaggtaaaaatgccttcgataattgtacaaagaacagactaatgattgtgttatatccaggcgcaaagactatgattgccccagagtcttaatctgaaataaaagcagtagcaatgtttgaaa

SEQ ID NO: 227047 - DNA, 548 bp, Homo sapiens
ggtcatagaagccagcttgaaggagctccaattgaccaaattctagaaaaatttaaacattatattaaatgatagtgacaaattataagccaaagagtgaaataagaactcatgagaccatactgatataaataaataaatatatatataaataaataaatagtattaccatggaatgacagctagtaaatgtagaaggaacaatgaaattaggaaatcaccctttattaaacactgtagtgttaaatcaccctttattaaacactattcaggcaatagttcgcaacagatgctaaaactagtgtgaaaaggtttgttaagaaagtatatttacatagtctcaaagtaaatccccagaaaatcttctttaattaccagggaaaagcagtaactttacagtggagaaaccttgcagataccaccttaaccaagtgatcagaattactattaccagaaatggaatagacatcatacagttcctaatgtgaagggcacgatgccacttttgtagtgtttttgtcaaatgaatattcagagtctactcttgg

SEQ ID NO: 227048 - DNA, 486 bp, Homo sapiens
agagtaccagggtgatgattagctagagtcataaaatggggagatctagcatggccttggggaacatctagtgggcgtcacacatccaaatgcctgcagaggggccaggcaggtcagacaataggggatgatggggcctgtggggatgcgcctttaggcattacattcaaagacttaagtctactgtgcagaggtggtaagaatgatacaagtggttgttgttggggggctgattgactataaaggggcatgaagaaactttctgcaggtgatggaaatgttctgtctgttgctttgggtggggttacatcttatataccttcatcaaagaaataacttagatgtgtgcattttaccatgaagtatacctcaatttaaaaacttggggcaaattcataaagcaatgtggatctggctctcgggctaaccatttgtaaacttctgttgcaatccgacttccagaggcgtccttggctcctcatcttg

SEQ ID NO: 227049 - DNA, 509 bp, Homo sapiens
caggtttatcaggtcaaacccagaacacatcctcagggcaagcaatctgaggaatctcagtatgcaggaccagttcagcaagaggtttaggttcaaatcaggagtgagggcaaagtctggctcatggtggaaccttagaaaagtccccaggcaccatgtgaggccatgtgccatgaagcccaattgcaggacagaaaaggatgcccttctacccacacagttggccagacccaaccctgccaagaacacgccttctggttccaagataacaaaaacaagtcctaggtcacaccacccacagtggtgagagcccaagggctgaagtaggcaaaggccaggctcccataactgagcccatagccattttccccactgggcagagtaaaagctaaagaagccttggggcgaaggtcaggaagctgtagaggggtataggaacaacaaagacccaaacagctcatctgtactacatatgtactattgcatctactttaataaatgcctaccat

SEQ ID NO: 227050 - DNA, 426 bp, Homo sapiens
cacctaaagggaggccttttcatcagacttgctcagccaggagctcagagccttccatgtcacatcctgtgctgggacccctgtgccagaggctcagcagctgttcacttgttcagctcactgcacttactgagtgctgcctatgagtcaggaactggccaagttcttaggatgcaacagggaaacaaacagtaactggcatgtcaagaattaaaacaaggtgatgagataagagaatgacaaggtaaccacagaagatctctgaggaggttgcacttaagatgtgatccgagtcccacaaaggagcatgctgtcctaagatccggtggaagaactttccagacagaaggagcagctgatgaaggtggcggtgatgatgaagctggtagcaccaaataaatgtgctagaccaggggttggccagct

SEQ ID NO: 227051 - DNA, 442 bp, Homo sapiens
cagtacatatacttcataataaacgattatgttactggtttatgtatatactatatttttatcattagagtgttctcctaccatgtcttttaaagttaactgtaaaatagcctcaggtaggtccttcaggaggtattccagaagaaggcattgttaccacaggagatgacagctccatgtgtgttacacaacctttgaagaccttccggtgggacaggaagtgtaggtggaaaacagtgatattgatgatcctcatcctatgtaggccttaggctaatgtgtgtgtttgtgtcttagattttaacaaaaagattaaacagtaaaaattaattaaaataataggcaaagcctcatagaataaggaaataaagaaaaaatatttttgtacagttgtacagtgtttgtgtccttaatgctgttatttcaaaaggatcaaaaagtt

SEQ ID NO: 227052 - DNA, 517 bp, Homo sapiens
ctctgcagctagtgcatgacctgttctagccaaaaagatttaagcagaagtctgataggggatgtcagggcaatgctgattgacataaagctggtgtagcccattgttcttccttcccagcatacaaatgccatggctgattaccagcttttcctgatcagtgggtgggactggcaacacagggcctccacactcaactggcaattatctgcagtaacaacgtcataactgctcccctttaaacaccagctaggggtgctctgaggggccacctctctgggccatttctctaattttatgtcacctcctccctctttgataaggaggccaggagctgatggtattactgagagctaaaggaggcagcccctgacagagggccaggggctctggttggctctgcccttcccctcaactaggggaatcttgcagcatgaagtctggcatttcatggcagggaaagtttggatctcttaagatgattaatggaagaaaaataaagactggaaaatccacc

SEQ ID NO: 227053 - DNA, 315 bp, Homo sapiens
ggtggcagtcttctaggtaaatttaactattattaacctgattaatgaaagctcagtaaggaaagggaagttttcgatttaatattttaacgtcttttttatgttttagctcgtgtgttttaagattggggctttttatcatgagaagtttaacttcagcaaacaaattcattttggggtcaaggggaatgttttgttcactttgaatactaactgaatgtactaaattcatgaaagaaaataggaatgaatttcatgatgtattttaactgacagtttggagtttaatttagaattctaagtgttttaaaatgg

SEQ ID NO: 227054 - DNA, 184 bp, Homo sapiens
ttggggatccagcaaccaattctgaaaaatttgatgaaaatctgatttaaacaactttttttttttctaagtgtctagacctttctgtatcagaaatgaaagtttatcacagtgtctttttcgagccccagtcatttcaaggacacgatgagaaaaagctaatgcatctctcctgctcttctca

SEQ ID NO: 227055 - DNA, 391 bp, Homo sapiens
cacgcacacacacgcaatcgataaatccagagcccctggcattgacttctcagcactcacttataaaacttaaaaaaagaagcaaaggccactatcaaaaaaatcaaaactatcatcagacgcagtggcttaggcctgtaatcccagcacgttggaaggccgaggcaggcagatcatgaggtcaggactttgagaccagcctggccaatatggtgaaaccccatttctactaaaaatacaaaaaccagcagggcgtggtggtgcgggccgtagtcccagctactcaggaggctagggtaggagaatcattggaacccaggaggtggagcttgcagtgagccaagatcgtgccagtgctctccagcctgggcgacagagcgagactccatct

SEQ ID NO: 227056 - DNA, 488 bp, Homo sapiens
cagacagattcattatgtaaacaagacacaaaaatattttcataagatgtcagaatggatttcctctccttccccagcaacaatgtgattcttgtttgtgggactgtggggcttcttgtctctcatctgttcagctgaattggccggagcagaatgtctagagcccagagccggagcctgcagagatgattacaggctccgccgtgagctggacaaatgaggttggggcagcatgtgaaagcccaagttgtaaatctctcattataagagccattagccacacgctgcacatcgggggtctggagagacactgaaactggacatggtccgagagcctagcatcaaaggaaaaacccaggctcaagatgttcacaccactgccattatcctgtgtccccacttagaaactcaaagtggcctctctacagaactctccaacggcttatcagcaaagccagacaattagaacaaggttgttcttctccctg

SEQ ID NO: 227057 - DNA, 148 bp, Homo sapiens
cacagttaagctttgttagaaggcctcctgccccctgctctctctcacaaggttaactacaaagcacgaagttaggaggtggataagagagcccccaaatggcagcaagcccacctctgaactccattccctcccagtgggaatgttg

SEQ ID NO: 227058 - DNA, 371 bp, Homo sapiens
aacttaaagtgtacaggaggatgtgcataggttatatgcaaatattaacatcattttatatccaggacttaagcatttgtggatcttggtatccaaaggaggccctggaatgagttccccatggatactgagggaagactatatactcatgttgcatagtatatgaatacaaaatgttgcttaagcttgcagaagtacttttttttttttttgagatggagtttcgctcctgtcacctaggctggagtgcagtggaacgatctcagctcactgcaacctccacctcctgggttcaagcgattctcctgcttcagcctcccaagtagctgggattacaagcatgcaccaccacgcccggctaatttttgtat

SEQ ID NO: 227059 - DNA, 477 bp, Homo sapiens
ataaagcacaagtgaggaagcaggtagaatcagagaaggaggaaaaaaggttaatagtggaaggccaactggaggctgcttaagcctttggagatttttgtataactgcctcagagttttgtataactgccccaaatgaaggggagctgggtggttttccatctacagtcaatcctcactgataaagattgcctttatctaaaaggctcccagaacttcccaggtacactggttaggtagggcttggcaagctcctgaggtgctggagagctgaggagagaagtagttgagatgggaagttgtcagtgtgttaactgtgcataccagctacaagtaaacattgaagtgagctgaaaggagatggtccaggtatcaactctgtgtcttaacaggcattctcattgaataatccagatgtgaaataaaagcctcaatttagatagagacctagaagaaatgtgagatgaaatgtggtta

SEQ ID NO: 227060 - DNA, 332 bp, Homo sapiens
gaaaattattttattataaatcaggacctttcgtggaactgtattgaaattaattatcctgggcctggcgcggtggctcatgcctgtaatcccagcactttgggaggccaaggtgggcggatcatgaggtcaagagatcgagaccatcctggctaacacagtgaaaccccgtctctactaaaaaatacaaaaaaaattagctgggcatggtggtggtgcctgtagtcccagctactcaggaggctgaggcaggagaatggcgtgaacgtgagaggtggagcttgcagtgagctgagatcgcgctactgcattccagcctgggcaaacagcaa

SEQ ID NO: 227061 - DNA, 419 bp, Homo sapiens
tccttcctgccttcttttcttttttttcttttcttttctcttaacaaagcagtgagttaaaacctgactgttggattgtagagccttcaattagtgtctagttcattctcctagaaagacaagtgctctgcttggctagtcattctgaaatcatctgtaagccccatcttagtttaagaatagccatcagataattcttctcagccttttctcctggtttcctgacagttccagttactttttcagcttttcttcttttagggccctaaaaacccttcatgaggccttcatcttgtgttaccttttcttcgtaatactaaagttttatgacaaacatcccattctggattcacattttactgtattagtcatggcatgtaaaacaattcaataattggtacccttctgattaatttatt

SEQ ID NO: 227062 - DNA, 500 bp, Homo sapiens
ataggatagcagtatcccgtggggtacgccggggcaaaatgacccatgtcaagtcaataacctccgcgctgcttcaccttctcgtgctggaatgccttctgcgtgccttcctggaaagcgccctgtggccccgtgacccagcctgggccggcaccttgagttgggcacaaattcaagatgacaactcttggagcccgttggctggcggcagaatgatgaggagacattctgcccgggcggtttattgtccgttctagactgagaacaattccgggctgttacgatgtgattgcccttgggcgcgttatcagcgtgaactcagggcagagcaatacccctgccaagcggccgacgctgtttcacagggagggccctcctgctctttcacccacagtggggctcggggccatgggtgcagggctggaggaggatgtgaggggcagctatttcagtctggaatatcaggattttaaccccaaataaatgtcttggttattatt

SEQ ID NO: 227063 - DNA, 570 bp, Homo sapiens
gtatttttaaaaatgttttcaaagccttcatatatattaggctattataatttacctcattctttttatacactatggggaaaaagaaactattacaattttatgcagttgcatgttaccttatcccccaacaaactctggggaagggagatactgtttgccatcagcaagtagataccatagttattttaaattgaatcaatttgtccctgttcctgcatacttgaaataacaaatatagatatacctatatgttcattcagaatactgtctaaaacccagataatctcaaaaatgtatggtgcattccatctccttaaagaattctcatagttgcccagctttgcttataagtgccagattgtcaggttggcacaaacccaaagacaacacacatcgcagaatgaaaatactccaccctaaacgttttcatgacctgtgtgcacttttctaagagaagccaacactggcagtaaacctgagtataggaatgcgtacaatgtgggaagtgatgatttgcatgagataactaaaaaccttacccttgatttactactttgaaaataaact

SEQ ID NO: 227064 - DNA, 539 bp, Homo sapiens
aaaagaatagagcttccagaacctctgggaccataactaaaaatctaacatttgtgtcatcagaatttcaggagaagagaatgagagcagagctggaaaagcaattgaagaaatgctgtaaaatttccatatttggcaaaagacagagtcctcagatttaagaagctgagcaaaccccaatcgggataaacccatgctaagaatttcatgccaagacaacataataattaaaatttggaaaaaagaaaaaaggaaagagaccagccttacctatgaaagacaagttttaaaatttgtacataaaaagtttacatattgacatatgcagaatgctctgtttatccaatttacatatatatatatgacattccaacaatagtggaatgcacatttttcaagagtccatggagtgctgggattacaggcatgagccaccacgcctggccacaaagtggcatttattccaaagatgcaaagctgttcagtatttgaagatcaatcattgtaataccatataccaaataaacagattaatggga

SEQ ID NO: 227065 - DNA, 514 bp, Homo sapiens
ctctgctttaaaattcattgattgataaaatggctggtatggggctctttttgactgcttctaagagtaggaacaaaataagactttaagtcgtggcttgaaaagaaagatacacattttcagaagaaagaaaggggagggctgcagggaacctgtcttggagggagctcttcagtcagctccattagcctaggagcgtgctcatggtgtcacactgccagtaactagtcactctctcacttccaacaggggcaacagcctgaaggtgtgagtgtcagaaaatacttactttggaagaaaggtgtgttttttgttgttgttgttgtttttttttaccctgaagtttcctgactttttttttccagaatgtcttccttgtaaacaggcacctaaagcatcggtcagcagagttcctgatgactgctacctctgtgtgacaaggacatttgcagctgtctttggaaggctattctccacattaataaatgataataatgatgataatatatttttt

SEQ ID NO: 227066 - DNA, 552 bp, Homo sapiens
aaatatgaaactataaacaattataaggaggttggccaagatggccaactagaaggagctaatgtgtgccactctcatgaagggaagggacaagtaataataaatatagcaccttcagttgaaagatccaggtacacacattgggactcatcaaagaaataacccatggggaagggagaaaagcaaggcaggatgacaatcctcccaggagtgacccagagccaagggagcttccccaacccaaagaagtggtagtccaaggcaattaggaactggagtggtcccagggcatagcccaggaactctatggagaggcagctagactgcttattcacatggaacccagatcccatttgtcttcactggccaaaatcgccacctggggtctccagtcatccaaactccagccgacagtgattgcatacctccctaggatgaagctcccagagggagggacagataaccatctgtgatgtttgacagccttagttgttcttgcctttgggctttggaaagtctgaggtgactggaggctggagtaggcctccagtg

SEQ ID NO: 227067 - DNA, 431 bp, Homo sapiens
agccatggagcagatacggtaagactcaggataccttgtttgtatccgctgtgatgagaagtgaaggatgctggagtgcagtggcgtgatctcggctcaccacaacctccacctgccgggttctgaaccctgatactgacaacaatgaatatataaagacactcaaagctgccgttctctgctgataatgctggctgtcattatattcccatcagctgaagatgattttatgacgtccgaggaagcccccggccctgaatgagtaaattccagcctggacgacacagcaagactccgtctcaaaatacaaaatacaggcatgagccaccatgccggcctctatctcctgtcttcaacaatagctttttcaaaccttccaccttcctacttatctccctttattgtggtcaataaatgtccttttaagagga

SEQ ID NO: 227068 - DNA, 1481 bp, Homo sapiens
  misc_feature (1240)..(1240): n is a, c, g, or t
tgcctccatcagtgcctgtggcgtgtgtgtgtgtgtgtgtgtgtgcgcgcgcgtgcgtgcacgtgtgtatgtgtgtgtgtgtgtattgggtttctctctcccttgtaagaacacagccagcccgccctctcctgctgttgctgcagctctgacttgctttttcctgcctccttcctctcctctctcttcttgcttagcttcttgccttctgatactactcccaagatggaggctaatcactctgaacagctctcagcggaacgacagtcaacacctccaggtgacagttcatcattacccagtcacaatggcctggagaaggaagatggccaggattctccaaccccagtccaaccaccagagaaagaggcaagtgtgcaccccgatatctctgaagagctgaatcgacagctggaagacatcattaacacttatgggtctgctgccagcacagcagggaaagagggctctgccagggccagtgagcagcctgagaatgcagaatcacctgacaacgaggatggggactgtgaggaaacaactgaagaggctggaagagaacccgttgcttctggagagccacccactgtcaaagagcccgtcagcaataaggagcaaaaattggaaaagaaaatcctaaaaggattaggcaaagaagccaacctgctaatgcaaaatctgaacaagttgcaaacaccggaagaaaagtttgattttttattcaagaagtatgctgaattgctggatgaacatcgtactgagcaaaagaagttaaagctcctccaaaagaaacaggtacaaattcaaaaagaaaaggaccagttacaaggtgaacacagcagagctatcctcgctcgaagcaaattggagagtctgtgccgggagctgcagagacacaacaagactctgaaggaagaggcgcttcagcgggcacgtgaggaagaagagaaaaggaaggaaatcacaagccatttccagagtaccctcacggacatccagggccagatcgagcagcagagtgagcgaaatatgaagctctgtcaggagaacacagagcttgcagaaaagctgaaaagcatcatcgatcagtatgagctcagagaggagcatctggacaaaatatttaaacacagagaactgcagcagaagctggtggatgcaaagcttgagcaggcccaagaaatgatgaaggaagcggaggagcgacccaaacgagaaaaggaatatttgctgaccagcncagagtggacttcaggcgaaagtgttgaaggagcaaaagacagtcctgcaggctcaggtaaggccaggtggacaaggcatgggggtgctgtcctccctgtccccaaataaaaaggctggggccaaaggtgggcaccaaaagtcctcctatgtggcaggggatggggggatgggaattggaaataaagaacaccttcccatttattcatattttcaagtaaaaataaaagccccattttata

SEQ ID NO: 227069 - DNA, 784 bp, Homo sapiens
tgcctccatcagtgcctgtggcgtgtgtgtgtgtgtgtgtgtgtgcgcgcgcgtgcgtgcacgtgtgtatgtgtgtgtgtgtgtattgggtttctctctcccttgtaagaacacagccagcccgccctctcctgctgttgctgcagctctgacttgctttttcctgcctccttcctctcctctctcttcttgcttagcttcttgccttctgatactactcccaagatggaggctaatcactctgaacagctctcagcggaacgacagtcaacacctccaggtgacagttcatcattacccagtcacaatggcctggagaaggaagatggccaggattctccaaccccagtccaaccaccagagaaagaggcaagtgtgcaccccgatatctctgaagagctgaatcgacagctggaagacatcattaacacttatgggtctgctgccagcacagcagggaaagagggctctgccagggccagtgagcagcctgagaatgcagaatcacctgacaacgaggatggggactgtgaggaaacaactgaagaggctggaagagaacccgttgcttctggagagccacccactgtcaaagagcccgtcagcaataaggagcaaaaattggaaaagaaaatcctaaaaggattaggcaagtagttatgttcaaatatgtgacttttctgtatggtattcctaaaaaaggggcacttcttccaaacttcactaaaagccacatccaatatttggatgactgtagtagccttctatattttccctcgttgta

SEQ ID NO: 227070 - DNA, 432 bp, Homo sapiens
ggaagaaaagtttgattttttattcaagaagtatgctgaattggtaagatcttggattagcttcttttctcagaacgattagtgagcccagtgcctctagcttcaaggaacaacaaacacctgccaatccgagaatgaattgtaaacagcaacatctgaggtctgtgcgctaaccctgcagattatgagacccacagctaagatgtggcattctctctagtaaagctaggcagtggccttctcctttatttctgcttcttaaaaaattcttttgaaggaatgcccatcagaatctctatctgatccatttggttatctaaatcagggaatgaaaataaaccatatcacccaatcccagtgacataggtacctctacctgaaatgcattgtgaccagaatcactgggttaattctcgcatgttagcacctcac

SEQ ID NO: 227071 - DNA, 886 bp, Homo sapiens
ggaacgcgccgtccactgcagctgcgtgacttagagtcccggatggataaccggtgttgccacatttcggacagatgattcagcttgtaagcagacaatgtaaacttacaatatcaataagtaaagtacagtagtgtaaatacattttctcttccttatgattttcttaatattttcttttccctagcttaccttaattgtaagaatataatacatatacagaatatgtgttaattgaccttttctgttatcaataaggcttctggtcaacaatagcctattagtaggtaagattttggagattcaaaagttacagtgaattttaactgtgcaggtgattgatgcctaattcccatgttgttcaagggtcaactgtacaataggttttctgctttccttaccctcctgatgatttctgaactagttctacagagtttcctcttttcctttgcatctctccttcccactgccaccatccagattgttttcagagcggcacttcatcagctgcatcgtcaccctctgagggtgtggaagggctctcacttccacttaaggccatgccatgctaattgcctttctggctcttttctcttaaaaggtggtgcttagaaaggaaaggaatagtccatatgtggtcttagtaggacagggaacagtaggtctttacctcccttaatccgaatgttagatctcttcaatgcaatcaaggtaatgcttatttttttttggcacccacatcacatccactgctcactcaggttgagtttattgataactacaaccccaagcttttcatgtcatattaaagcaaaagccattatgagctgttcttatatctcgtagaatgtctgccatcttgtgtcatgtagcttttgtctcagga

SEQ ID NO: 227072 - DNA, 368 bp, Homo sapiens
tccccatttcctaagggataaagaccagattcattagcctctaagaccgggcctcaagctacttctccaaaatcatctctaggcactcctccaaattctctttaccttctggccatggcaaaagcatgctgtgccttcatgcctccctgcctttcccctgctgttctttcggccttcagtgctgttctccctcttctcagtctgtgaacttgtaatcacccttaaaagcaaagttcttcattgatttacctgtacccccacagccccctgtgccaactcagagcaccagccagagtgtgttctaaatggaaccacccaatgatgtatctctgtctctggctagactaaaagctccctgaggacgaggt

SEQ ID NO: 227073 - DNA, 261 bp, Homo sapiens
cttttcagtttggtgttttgatggcttgcaaacctgaaaccccagcgcctggagtgggatcaaagcctgtcacaggggcagagggaggaccgaaaagtctagacccctccagggatctctgctctgcttctgctgggatccccaccccttcctgggcctgggtttttccaggcactggtggatggcacttctgtgcctggaggaggttttggttaaagatgctctaaatgtcttgtccaatcacagttgtacaaaaaaaaa

SEQ ID NO: 227074 - DNA, 421 bp, Homo sapiens
agagaagagactagtctctctctctctctctccttgaatttagtcaaaatataaaggtcaaaatgatgtatttattaaaaacagcaagattttatttgtttgtttgttttgagacagagacctgctcagttgcccaggctggagtgcagtggctcagtttcggttcactgcaacctccgcctctggggttcaagtgattctcctgcctcagcctcccaaggagctgggattaccaggtgcccatcaccacgcctggctaattttcatatttttagtagagatggggtttcatcatgttggccaggctggtctcaaactcctgacctcaagtgatccaccagctttagccttgacatagggaaaagtgaaggaggaagtgggaaaaggttgaggtgggtggatatatcagatcaaatagggc

SEQ ID NO: 227075 - DNA, 291 bp, Homo sapiens
tttgtttttatttaaatatatctctgattgaactgaatgttaatcctggttaaaatgagtgacaaaaatactagaagatgtgtgttaaaacatttataccaaatgaattaaggccatttccttcagttctacttatgtgctgaaaacaataatacctaaagaaaaaccttacggccgggtgtggtggctcacatctgtaatcccagcactttgggaggccgaggcgagcagatcatgaggtcaggagttcgagaccagcctgaccaacatggtgaaaccctgtctctacta

SEQ ID NO: 227076 - DNA, 597 bp, Homo sapiens
atacaagacgtcagagttgggaggagacagtgggacagtgaggagttccctttattaatactggctctgaactgcccgtgagatatctaggtgaagttgttcagaaacaatgagaaatttgtgtctgaggttagggagtggtactggttgagcatcccagatctgaaaatctgaaattagaaatgctcccaaacctgaaacgtattgagtgccaacatgccgttcaaaggcaatactcattagagcatttcagacttcagatttgactatgtatcctgcaaatattccaaaatccaaaaaaatcagatgccccgtcacagcagttgagaggcagaggctctccttataggatgaggtcttagaacggagagccttcttcataggggagtctgaacttctggattttgtggagagattgaaaaaaattggtggaccagcacagaattaccagttatttattttacctatgaaagctagcaactaaactgaaacatagaactaccaccactatgtatatgtatatttaaagaatatttaaacacaaaatttaaaaggtcatgctgtcaatatattcaaaccttttttttttttgaggca

SEQ ID NO: 227077 - DNA, 429 bp, Homo sapiens
taaatagaaagagaagaagagggagagtgagaataaagcgaatgcagcaaaatgttaacaatggcgaatctactgaaatatatacttgcatttgtcatactatgctttcaacttttcagtctttttgtaatttttaaaaattaaatgaaaaggtggagtaagcacttacatccttttaggctatatgtactgtctatgaccagaagctgcagacacctgggaatcaaaggcaggtaacggttacctgggcctcagtgcgtgctctaccacctgtccaactcagggctgtgcatcagctctttctaccttccagcattctttttccttcctttcacacttcacacatttttgtctttttcttatgcctggtcctgtttttcatcatatgcctctgttttcttatgttgaatgtggtgaaacatggttatt

SEQ ID NO: 227078 - DNA, 403 bp, Homo sapiens
gattaaatttaaacatcatgaaatgcaactcaaaggccttctcgtcatctgacctcattctgctattctaacacacacacacaaacacacacattatcaccagccctccttcccccatgcactctcagggttcccataacatgtctacgattctccattttccctatttctacttggaatgtcctctctctcatctctgcataataaaaattttcacctattacaaagcctacgtgaagctacaccactctccttcatagagcattcactgattgaattgtcagaatttatctccccttttataatactttacctactgtggcatcgatcacattctgccttgtgttaaagttacttgtatatatgtcttacctcctctattagactgaaaacttgatgataa

SEQ ID NO: 227079 - DNA, 387 bp, Homo sapiens
cagtgaaattttattatatgctatattccaataagttgtagaacttagggataccattattaagaataaaatacattcgactaaatgtaagaatgccatggatcgttaagatacatcctgacttcagagatgtgtgaacaaatatacaccaatgagcaagtatccatcaattttaaaatcaatgagctatggtacttataagtctagaggaggtagtctcagggcttgttgagcagctcatcaatgtcatcaagagctcagacccttttcatcctttccctctgctattctcagtgtcaaggattgggacttgttgcttcatagttacaagatggctgtgagagttccaggcataagagaagtactccatttgccgaacaattaaac

SEQ ID NO: 227080 - DNA, 520 bp, Homo sapiens
agattacagaagagcactatgaagaaagagtgaaagaaaaaacagtcaatgacagagcttggcagagttcttgagggcagtacaaaggccaagaagtcttacaaaaaaaaaaaacccactaataacaatctaagagctaagaaaataaaagtttcaaaaaaagaagaatggtcaactgtcaattgtagcagagggcaagtaagaggaatgccgttgattttgtcagttaggggccgcgtgtggtggctcacgcctgtaatcccagtactttgggtggctgaggcagctggatcacctgaggtcaggagttcgagaccagcctggacaacatggcaaaaccctatatctactaaatatacaaaattagccgggtgtggtggtgcagcctgtagtcccagctacttgggaggctgagataggagaattgcttgaacctgggaggcagacactatagtaagccgagatcgcaccactgcactccagcctgggtgaatcagtgcgaaactctgtctcaaaaaaa

SEQ ID NO: 227081 - DNA, 386 bp, Homo sapiens
agattacagaagagcactatgaagaaagagtgaaagaaaaaacagtcaatgacagagcttggcagagttcttgagggcagtacaaaggccaagaagtcttacaaaaaaaaaaaacccactaataacaatctaagagctaagaaaataaaagtttcaaaaaaagaagaatggtcaactgtcaattgtagcagagggcaagtaagaggaatgccgttgattttgtcagttaggggccgcgtgtggtggctcacgcctgtaatcccagtactttgggtggctgaggcagagaattgcttgaacctgggaggcagacactatagtaagccgagatcgcaccactgcactccagcctgggtgaatcagtgcgaaactctgtctcaaaaaaa

SEQ ID NO: 227082 - DNA, 472 bp, Homo sapiens
cattgctatcacccaaagtccatagtttacattagggttcattcactcttcgtgttgtacattctatgggttttgacaaatgtcataacatgtatttataattatagaaatatgtagaagagttttattgctctaaaattcctctgtgctccatccattcatccctttcttctcccagtctcttgaaaccactgctactgttacggtctccatggttttgccttttccagaatgtcatatagttggaatcataccgtaggaagccttttcagattggcttttttcgcttagtaatatgcattttaggtttctccatagcttttcatggctaaatagctcatttccttttagtgctaatattccattgtctggatgtaccatagcttatttatctgcttatttactgatggcatcttggttgcttccaatattttgcagttattaataaagctgctataaacatctgtgtgca

SEQ ID NO: 227083 - DNA, 759 bp, Homo sapiens
aggttgcggtgagccgaggttgtgccattgcactccagcctgggcaacaagagcgagattccatctgaaaaaaaaaaaaaaacaccgatctcaaagagggagttgtgagaaccccaacttgaagctggttgctctcaagttccagaggcccggacttgcgactgacgtctggggagttgggggcagcagtcttgggaactgagctgtgagatctgatactatctctgggtctatagtgctggcattgaattggagaacacccagctggtgttcactgcttggtgtgtggcggaaaaaccctcacacatttggtcacagaagcccttttctgtgttggtgattgttgtgctggtgtgagaacagaggaaaaacaccgcttgcagagtttttcctgaaacaatactctttagagcgatagaaataaataccacgacctgcgcattcaaagctgttgtatctggattgtgactgcgtggaaggtcgaggcgggaagacaggggctgttgcttttcgttataaactctgcattacttgatttttgcactacgtacatttactttgataacactggaaagaataaattggccatgtagtgtagcttccaaaaaaaactattgcttgggtttcaaggtcaaggaaatttcattctcatcagtttcttgggaaagaggaagtggaatgatgttgtcagaaagtgaaaccatgggtcattttcagaactactcagagtaataaatattttttgtcagttttgttctt

SEQ ID NO: 227084 - DNA, 764 bp, Homo sapiens
caggagggggaaggtgccatttaaagcaatcattgcactccagcctgggcaacaagagcgagattccatctgaaaaaaaaaaaaaaacaccgatctcaaagagggagttgtgagaaccccaacttgaagctggttgctctcaagttccagaggcccggacttgcgactgacgtctggggagttgggggcagcagtcttgggaactgagctgtgagatctgatactatctctgggtctatagtgctggcattgaattggagaacacccagctggtgttcactgcttggtgtgtggcggaaaaaccctcacacatttggtcacagaagcccttttctgtgttggtgattgttgtgctggtgtgagaacagaggaaaaacaccgcttgcagagtttttcctgaaacaatactctttagagcgatagaaataaataccacgacctgcgcattcaaagctgttgtatctggattgtgactgcgtggaaggtcgaggcgggaagacaggggctgttgcttttcgttataaactctgcattacttgatttttgcactacgtacatttactttgataacactggaaagaataaattggccatgtagtgtagcttccaaaaaaaactattgcttgggtttcaaggtcaaggaaatttcattctcatcagtttcttgggaaagaggaagtggaatgatgttgtcagaaagtgaaaccatgggtcattttcagaactactcagagtaataaatattttttgtcagttttgttctt

SEQ ID NO: 227085 - DNA, 363 bp, Homo sapiens
gtgagccaccacgcccggcctggaactactcttttaaaagctgcactcctggctgggtgcggtggctcacaccttgttatctcagtaatttgggaagccaaggtgggaggattgcttgaggccaggagtttgagaccagtctgggcaacatagcgagactacatttttatgaaaaaaatttaaaaattagcttggcatggtccgtgcctgtcgtcctaactactttgggggttgcgggatggggcagggaggatgaggcaggagaatcacttgagcacaggagtttgaggctgcagcgagctaagactgtgtcactgcactctcgcctgggtgacagatggagaccctgtcactttaaattac

SEQ ID NO: 227086 - DNA, 311 bp, Homo sapiens
ggcattttaaggtagttttgtttagcaaatctattctctttctccatgcctggagggcttctttttcatagtacatccaaagaatctgcttttaaaaaaaaaaaaaaaattagcatgctcatatattttcatcagttaatatcgaaactgatgaaaatattaatacttaacattgtattaagtgtcatctttcccaacatttcaaaagtttcatatttaaaatgttaatagagttcaaagcctctaaagttaactatactttccaaagttaactttgggattattattattttccttgccccatctaaaca

SEQ ID NO: 227087 - DNA, 526 bp, Homo sapiens
agcgagatttacaataaagtagatgttggagctatgctgactgggttcaaatcctcataccatcactgcctagttgtataagcttgaacaaattacttgttattgctgtgcttcaatttcctcagctgtaaaatatggttttaaaatgaaaagcctttgagatcttttagaattaagtgaaaatttaagcagaacagaaggaacaccagatgggagtctctcaagaagtgtcctcagggatatcacatgaaagtgaggtgatcttagatattatcttatctgaaataaattacccattgtaaatgaatacaaggatggcacatcatcttttctcatacatatattcagagagctggcagctatgttgcaggaagatgaaaggaacctcaagtgtgtcagctgtgaagcatgtactgtattcttctggtggaaattagcatggccactatatcacaaatggatattatcgcaaaagttaattgtattactagttctgtttaaagataaagaatcagacatgtgcaat

SEQ ID NO: 227088 - DNA, 469 bp, Homo sapiens
caggagcttgtttcaaagccccacaccctcagacctgcagaatcagaggcaaggcccaagagtctatgttttaacgggcctccatggtgactctgaccgacactcaaggttgagaaccactgggatgcagaatactgggatggggacaggataccatgaccattttagagtgggcagtaagctaggtgtggtggctaacacctataatcccagcactttgggaggccgaggcgggaggatcggttgagcccaggagttcaagacctgcctgggcaacatagtgagacctatctctacaaaaaaaaaaatacaaaaattagccaggcatggtggtgtgtgcctgtagtcccagctacttgggaggctgaagcatgagaattgcttgaacctgggaggtggaggttgcagtgagctgagatcatgccactgcactccagcccgggcaacacagcgagactctttgtctcaa

SEQ ID NO: 227089 - DNA, 270 bp, Homo sapiens
tcatgttattagcatatgtcttggtgttctgggtcaatattcgaaggatatagcgtattctttcaaaaaagtttctttttttaattataggaaagtaactttggattatagttcttagtattcattctgtttcctccctttggttttcttctttaaggactgctatcacctgtataatagatttttacctattttcaatatttgttactatctctcaaatggtatctcttgtttttttttttcctctctcttttttttttttgagagaga

SEQ ID NO: 227090 - DNA, 542 bp, Homo sapiens
ctcagtcaatgaacaaaatttttgagctttgggtcacaataatggttattcttggagtgaagatactgatggggaggaagcatgaagcatctggagtgctatagatatgttccatatcttgatctgcatggtggttacaccggtatatacagatgtaaaaattcaacaaaatgtacacttaaaatttgggcattaactgtaggtaagtcaacctccactcctctaaagatatcctgaccaccactctgattgcaccaagaagttaggtcatatgcttacgtctgaacaaattgttgaggtaaggtggtggatgtgatgaaatcactaattaaggctttctcctgaactggaggtaaggtcagtaacacccaaccttacgtaagggctgctacccaagtggggaagagatggaagggggcaatagggtggtaattataaagtcctcacctaagagtatgtctggcaaaaaggccaagatggggaaaaggcaaatgaattgaatgtccagaataaacaaatctatgaagacagaaagtagatta

SEQ ID NO: 227091 - DNA, 439 bp, Homo sapiens
aagcgcaaaagctacaacccagccaggcttggccaggaggcagcagcccaggcggaactttcatctctggtggatggcagcgtaaacccgtgcaagcactttgggaactcgaatggtatctaggaaagaggaacacacatttgccctatgactgagcgattcattcctaggtttacactcaacaggagtgagtacatatgcccaagaaaagacgtgtgaaagaatgctcataccagctttcttcatcatcttgccaaacgggaaacgacccaaatgtccatcaacggttgaatgcataaatccattgtggtgtatttcacagcaatgaaaatgatccaaccgctgctccgatccacatgaatgaatcatgacacgttgctgagggaaagacgccagtctcaagcgaggacgtcgggcagaattcggttcatgtggagcc

SEQ ID NO: 227092 - DNA, 433 bp, Homo sapiens
ccaggaggaggtccctctgccaggtctctgcaaccccgtcaaggtgggtgaaaggctgcccctcaccccggacacacagtctgggctcagagagaacaaggggagccaggggaggggtcctgcatctccacccaggcctggtctcacctgttccctgcggcaacaggcgcagagcctgccccccccagccacctgctgtggtcataaatctccggccccagtcacctcctggccttgcgctccgggaaaaggtctgggacccgccgggcgccgctcttcccagtggtgaagcctctgaagcagaacatgccaccagcctcagcggccccagcggcccgggaaggcagcggcctcacggctcaggccctgggtgggcatggcctcctccagatgggatgtacagagggaaccgtcccgccttccagagcccacc

SEQ ID NO: 227093 - DNA, 727 bp, Homo sapiens
acatacacaagaccaaaatgacaataaatgactgaaatggaactcaaacctagcaagtcttctttatttttttcactctttttacttaaattttgctacctctccttaaaataatgagacatttaaagttgaaaataactttatatattggctagtgtatttgaacaccctcatattataataacaaaattattcctgagctgacagtattagaattttgatattttctcattatgtatatatacaagcacatgcacacacacaaatacatacacacacatacttttcacacatacttttttggaaaaatatccatagtcttagatgttataaagatatttttcattacaagttttaaaacatataaatcatggtctattttaaatgcctttttctagattgcagagatattgtgtaacattggtgtcaaactgtctgatgaagaatttgaaaatgtatggaatcttgcatcaaaaaagcatcacagaggagaagtttgtgttgagaacatcagaaatgttctagatgagctacggcatgcagaccggatcaagtgtaaaacactcatgtgatatttttggacttcattcattcaagcaaaagaattattaactctgtgtttatctaaaatgttgaatccattctggttttagatattatgttagagttcacagtggtaagactcatatgcctgtatgtgttgctaataaattagattttggatttt

SEQ ID NO: 227094 - DNA, 525 bp, Homo sapiens
catcaatctacttgttaccccatttgtggtgttccaaccattcgatctgacattcctgctccccgaattcgtcgcatcagtgacagaactaattatggtgaagaaggtagtgcatattcactactatatcctaccatttttgcccggaaaggagtgtttgaaagagacttcttcaagaccagatcaaaagaagagattgcagagatattgtgtaacattggtgtcaaactgtctgatgaagaatttgaaaatgtatggaatcttgcatcaaaaaagcatcacagaggagaagtttgtgttgagaacatcagaaatgttctagatgagctacggcatgcagaccggatcaagtgtaaaacactcatgtgatatttttggacttcattcattcaagcaaaagaattattaactctgtgtttatctaaaatgttgaatccattctggttttagatattatgttagagttcacagtggtaagactcatatgcctgtatgtgttgctaataaattagattttggatttta

SEQ ID NO: 227095 - DNA, 376 bp, Homo sapiens
gacttctttcatccactcataaaggactacaaagaaagggccaattttgttatatgaattctaggcctgaataacatggctcttaccaagctcaaaaactttaagtagtggagaaacaaagtctcacctcctcaaagatgacattcaaagactttaacaagttaccttatcacagttcttacgtcagtgcccaaatcatggagtctgcatagctaacactaacatgctcatgtattttttaaacgaactaagggtgactaccattttggccaagctgcaagctccttgagggaaagaattgtgtcttaaatccttaatgagtctgttcaagcaattctaagattaaaaatgaagtactgcatacaaataaaaaact

SEQ ID NO: 227096 - DNA, 456 bp, Homo sapiens
gctgtgctggggaacttgcgcatctgggctgttggctcaggcttttaaggctgatgagtcttgaggggaagcccatgtttttgctgcctctgtcaggttctctgagtacccctgcccatggctgggcatgaaggagcctcacatagggactgggctcacctaccaagaagggctggccggagggccaggggagaacagcctcgggtcgattcatttggagggctgatgggtgaagctgggtcctcctttacttagcccgcctttaagccagcttcacggtttccaaggtgcctgatgctggcttttggaaacacaaaggtttttaaaaagaggccaggtgcagtggctcatgcctataatcccagcactttgggaggccgaagcgggaggattgcttgaacccagaatttgagatcagcctgggcaacatactgaaaccccatctctatgaaaata

SEQ ID NO: 227097 - DNA, 415 bp, Homo sapiens
ctccaaaacagcatatatgcctaataactgagattaatatgatgtttaaaaatgttccagaaatgatgttgaagaaaacaaagtaaaatatacacaccaattgcattcattaaaaagaagtataattggctgggcgcggtggctcacgcctataatcccagcactttgggaggctgagatgggtgcgtcacctgaggtcaggagtttgagaccagcctggccaacatggtgaaaccccgtctctttactaaaaatatataaaaaattagtcaggcatggtggcacacacctgtaatcccagctactcggtaggctaaggcagaagaatcacttgaacctagtaggtggaggttgtagtgagccgagatcgtgccattgttctccgacttaggcaacaagagcaaagctcgtctca

SEQ ID NO: 227098 - DNA, 1204 bp, Homo sapiens
ccagggtagcattctttgcttatccaatgatgcctctttctaacctctccctctccacttacatcccaaacctgatgcgggtcttctctgattcggcactctaaggaggactcagccgccggctgcgaccaccgtggactccctctatggaagggaatcctgggagtcccggccgtcagaggggttcccaaatccaaagggtccatctccaaggcgtcactccaggggtccgcggttcactttgctgccccttgcaggtgatgctgtgattgttgcctgcggactgggaagcacgatggctccaaaaggccagcggggccgagaagcagggacagagaccagcatttaagggatctctggtgggggcctccctggagttctccacatgtaaatatagcgaaaaaagaaaacactacgttactagaataaacacgtcctaaaatttctgtgcaaaaacacctttttgaacagcaaagatttcacccaccaaaacaaggaagcaagaagcttccacagtgtgcaggatccgaaacaggaccggcccggcgttgggtgagagtgggggaggggttgtcggcttctccatccagcttgccatgttctgtcgtcggtttcacattttcagagagactttaccagatgcaggaaatgaggatgaaggcaactctggaaggatgcaaagaagggagagcaagcactgtacctactgtctgctgtctaagagggctggtctcataactaaaaggtccagtccctgagatcttgtgtgcaaccgtcagaaatagttcaggacatcaaattgcacagagaagattcagatgaagggaaacaagaactctgtggaaaactgttggggacagtggcacgagttgtcttgcaaggtgatgtctgtcccgtggagggacacaagagcgaggacagcatggttctaatggccagggcatgtcttcttattccatgtgacagtggctggctgagttgctagtacgtttttgaaatataccctttgaaatatgttgattattctggacatctgtaaggtgggagatttgaataaaaagacttctgctgtcattattggcttttatggctatgatttttttcagtcattattataaatcatgtgaaggtaaaataaatgatcattttagccattctgttctgcacagaatgctgttcaaataaaacatcatctgatatgttt

SEQ ID NO: 227099 - DNA, 777 bp, Homo sapiens
gtcctaaaatttctgtgcaaaaacacctttttgaacaacccctcccccactctcacccaacgccgggccggtcctgtttcggatcctgcacactgtggaagcttcttgcttccttgttttgttgggtgagagtgggggaggggttgtcggcttctccatccagcttgccatgttctgtcgtcggtttcacattttcagagagactttaccagatgcaggaaatgaggatgaaggcaactctggaaggatgcaaagaagggagagcaagcactgtacctactgtctgctgtctaagagggctggtctcataactaaaaggtccagtccctgagatcttgtgtgcaaccgtcagaaatagttcaggacatcaaattgcacagagaagattcagatgaagggaaacaagaactctgtggaaaactgttggggacagtggcacgagttgtcttgcaaggtgatgtctgtcccgtggagggacacaagagcgaggacagcatggttctaatggccagggcatgtcttcttattccatgtgacagtggctggctgagttgctagtacgtttttgaaatataccctttgaaatatgttgattattctggacatctgtaaggtgggagatttgaataaaaagacttctgctgtcattattggcttttatggctatgatttttttcagtcattattataaatcatgtgaaggtaaaataaatgatcattttagccattctgttctgcacagaatgctgttcaaataaaacatcatctgatatgttt

SEQ ID NO: 227100 - DNA, 463 bp, Homo sapiens
cgaattttagtttctctgaaattctttcctgtaaggcactaggctgtaatgcaaagagcatctcacacctttaagagcaaaaatatcaaatgtcaacagccactactgtggggtaagaagaaaacctcacctttaatcatccttaaacttcacctttaagcatgctgagggctaatgaatgcgcgaaagacgttagtaaagtcaccttctgctctattcacccactcacaaattctccctccttatgtaacttcctgtcttcactgggaattgtgtactgatgcagctcacctccagctgtggtgatgaagtaacgtttaaaagtcagatttggtttgcatgccatccctgcacttaatgactgagctgtcttatgcaagttactttagtatctcaaagtctcattttccccatctgcataatgggtttattaaagattaaaggatcatgtgtaaactacata

SEQ ID NO: 227101 - DNA, 1262 bp, Homo sapiens
caaagaaatcctttagggtcttgatcacacttgtttaaatttccattgaaagctttgctcttgtcttcagctgatctgggtgtacagttgtggcatccaatgagtggaaagtttgctcaaatttaattttccatcaaaattgtgtaagctgaaccaattgagatgttggcataaacaagattaacttttcccttgcaaatcgatgtgactggtctgctgctgcaggcttcatctaaaactttgcttcgtcttaaactagttatgcatttgtaaactgctactgatttctttggggcattgtccccataaactatttgtaaagtatcaatgatttcaccattcttccacatcacaactttcaccatcaatttgatgtttgtccttgctacaattttagcagaattgattttgccttgatagggactctttgcaaactgatgtcctatccttcttagtgcctcaaactagatcctgttcagacatgttataacaagttagtatgagtttattttggtgcaagaaaatttatgttctcacaaaactatatttttttcaataatgaaaaacaaatctctccttaatttgagaagcatctggttttcctgaacttattttttcttaattcaagttgaactaaagtatcagttacacttaagtctaatagaatggaattaaaagtcacaatgtagaaacaatgtagggtttgggacaatgccttgtcccaattagggaacccgcaaagattttgacaaaatgaagaataaatgcttactggacatttcaagctctaactagcatgtttaaaacagatttcatcatctttaccaaccagtggcttttcttgacttgccaaatcagtgaatggtactgctcgttccctctttcttaaatcttgagtatgtttcattttctttcttcttcacctctataatcagagatcaaatgctgtcaagttttcctccccccaccaaaacaattccttgctcacctattcctttctctctccagttcctactctagtttcatctcatgctgataccacttcaacagtatcttgtctccctacttccaattcctgtgtcatttcttcagttacaatgggcattgtttctaaataattttccaacactgtattttgtttatgacatgcctttctgtgcctattcaaaaactctcagcaaaagtaactaaaattaaaagggaaatctgtatggaaaaatatgtgcagcaagttaccactataataaactcaatcaattaag

SEQ ID NO: 227102 - DNA, 1244 bp, Homo sapiens
caaagaaatcctttagggtcttgatcacacttgtttaaatttccattgaaagctttgctcttgtcttcagctgatctgggtgtacagttgtggcatccaatgagtggaaagtttgctcaaatttaattttccatcaaaattgtgtaagctgaaccaattgagatgttggcataaacaagattaacttttcccttgcaaatcgatgtgactggtctgctgctgcaggcttcatctaaaactttgcttcgtcttaaactagttatgcatttgtaaactgctactgatttctttggggcattgtccccataaactatttgtaaagtatcaatgatttcaccattcttccacatcacaactttcaccatcaatttgatgtttgtccttgctacaattttagcagaattgattttgccttgatagggactctttgcaaactgatgtcctatccttcttagtgcctcaaactagatcctgttcagacatgttataacaagttagtatgagtttattttggtgcaagaaaatttatgttctcacaaaactatatttttttcaataatgaaaaacaaatctctccttaatttgagaagcatctggttttcctgaacttattttttcttaattcaagttgaactaaagtatcagttacacttaagtctaatagaatggaattaaaagtcacaatgtagaaacaatgtagggtttgggacaatgccttgtcccaattagggaacccgcaaagattttgacaaaatgaagaataaatgcttactggacatttcaagctctaactagcatgtttaaaacagatttcatcatctttaccaaccagtggcttttcttgacttgccaaatcagtgaatggtactgctcgttccctctttcttaaatcttgagtatgtttcattttctttcttcttcacctctataatcagagatcaaatgctgtcaagttttcctccccccaccaaaacaattccttgctcacctattcctttctctctccagttcctactctagtttcatctcatgctgataccacttcaacagtatcttgtctccctacttccaattcctgtgtcatttcttcagttacaatgggcattgtttctaaataattttccaacactgtattttgtttatgacatgcctttctgtgcctattcaaaaactctcagcaaaagtaactaaaattaaaagggaaatactagagggatcctcttagagtcgggcagcaccaggcg

SEQ ID NO: 227103 - DNA, 234 bp, Homo sapiens
gggggccacggcgcgcgcccccagcccccgggcccagcaccccaaggcggccaacgccaaaactctccctcctcctcttcctcaatctcgctctcgctctttttttttttcgcaaaaggaggggagagggggtaaaaaaatgctgcactgtgcggcgaagccggtgagtgagcggcgcggggccaatcagcgtgcgccgttccgaaagttgccttttatggctcgagcggccgc

SEQ ID NO: 227104 - DNA, 226 bp, Homo sapiens
atgccataatgaatgaccttctactgggtgacttaaaacagtggaaccgtctcctttcacagtcctaaaggccagaagcctgaaatcaacctgtctgcggtgctctgctccctctgtggggaagaatcttcttttgcctcttgcagctcctggtggctcctggcaccttggcagttccctggctgcaccactccagtcttcacctctgtctccacgtggccgcctc

SEQ ID NO: 227105 - DNA, 1601 bp, Homo sapiens
gattgaaaaagtgaagctttagcagcaagtagaaaaactgaagcatcagttgcagtaactcatccattgagtgaaaaggttcttcccatgtccctactctcagaaatgcattctgaaatttcgaagaaacaagacattacacaagtacatggcttcactaccaaggggaagggcaaaagaccatctttgatttaattccaggcttcagtgtctaattctgtggcaaagatagctcatgaattctttgttcctctgccaagcgcaacagggataagtagccttgctctgggaatatgagtttgatgattgggttgcatgaaccctggaagcctggaatattcatctattttcacattcttctgtccctcctgactgcagcactccccaaacctacatggaagagctaaaatcaattctggtaaatctcatcaacttctaggacactgtggtagatttccttcagtttaatctctagcattaactggaagaaacattttcttactcagtcactacatttgtcaagaaataatgctatggttgaacactgcacgaaatgatagagattaacagtagcacaatactagacatttcttttttgctattctacttaatgcctgatgtaacctcatgaggtggatgttgtactcctgactttagagataagaaaactgaacttttgggaggctaaataacttacttacagttacatagtcaagaaatggagatggcaagagttcaggcctaggtttgtctgattgcaaatactacatcctttctattgcttcacttgtttggctttaaagctgttaaatgagaatgaccattaataccccccagaacttctgtgaggattaaatggatatgcaaaagctctcgacataatacctggctcaagtatcaagaggagtgtagcacacacatgttacagctgaaaatgatgcgctgtgatgtcaagcactttcccaaggagatgcagctaatagttgccagagccataatgatattaggtgttgttccctttgtctgggacgccctctccgtacgtattagtctggaaaactccacttatcccatcagcctcagctctcacctcttccgagaccttccctgacatcactaggcaaatataaatgagccctctgaccatcccctttgtgcaagactcaggttaaaaaaatgaccccatgagagagtgttaatatttctttcctcaattagaatcttgaagtccagaactgtgcatttccatccttatatcagaatgtctagcacacaagaagcactgggaaatatgtgtggaataaataactgagcatgttgataaaggagcatatatttttaatatccatagaagtgcaaatctttgctgggtagcgttgtaggaatgtttttccacatgtcatgacgacatttgttttgcattttagtccattaccataataataactctccatttgcagcttatgaatttgaaaataaattgccttccctaggaaataggagaaaatactattaaatggccataattgttattactttgtcacctgtatattatgaaatctgaatagaaaaattcaactaaaagaactgaaatgcttagt

SEQ ID NO: 227106 - DNA, 1048 bp, Homo sapiens
gacggagtctcactctgtcacccaggctgaagtgcagtggcacgatctcggctcactgcaagctctgcctcctgggttcatgccattctcctgcctcagcctccaaagtagctggaactataggtgcctgccaccacgcccttctgattttttgtattttaatagagacagggtttcaccgagttagccaggatggtctcgatctcctgacctcgtgatccgcccgcctcagcctcccaaagtgctgggattacaggcatgagccaccacacccggccaattggggattatatttcaacacaaattttggaggggtcaccatcatccaaaccatagcagtgtctttgccaggggacagtggcctggagacaggatgatagaggtagagggaggtctgggaagcctttacaggggtggaaaactgggggcaaggatgggttgctgtctctgatgggccctcccaacaggcagacctgcttttggtcaaggttgaggcaaaccctgtgtattcttaaaacatatctcttctacccttgagtttcaggagctttacacagcagctaaagtcccccatggtcaggaccaaggatgttgggtttgggtgtgctcatggataaagaaggtgtataagaaaagaggaggacatgtcttgggtgtggctgagagtctgactcccagggagtcattcatttgctgaatccaccaaggtctttcccagtggagtcttgtgctgtactaatctggtgaccccttggacatgcctgttttgcactgacaagactgagtgtgggagcaagttgtgaaaaggatcttatgacactcccagcctggtatcaggcacagcaagcagatttcattccatcagcagctgtttcacaatagctctcgaggcctatcttggagcattcttcatttttttgctgacagcgctaggaatcctccctgatgggaaaggagctttatttgtaaacacatttgcaatgcattttcatatcactttgctgggtgaagcagagaagatataccatgcttacacataggattgttt

SEQ ID NO: 227107 - DNA, 460 bp, Homo sapiens
ctcatttcaccagaaataattgaattttaggggacttgtccaatttactatttttggctagttgtaggactcaaactagaactgcttcctggatctgtgctttttcattagaatatgttgtagccatgtggtagacagaaaaatctgctcccctcccctcttcagatgtccatattctattccatggaacttgtgaatatgttaggttacatggcaaagagagattaaggttgtagatgatattaaagtggctaattagctaaatttaaaatagggagattttcctgggttatctaggtgggtcctgtgtaatcacaagagtcctttaaatgttgaagggagaaacagaagagtgtcagagcaatatgctatggaaaagtttggctgccatcactggctttgaagatagaaggggccatgaaccagggaatgtggacctcttttggaagatgaaaaagcc

SEQ ID NO: 227108 - DNA, 636 bp, Homo sapiens
caagacagttctgaatacaaaaatgttttactgtctatcaccaccatctataaatctaattcactaaggataatctgtgtaaggtggctggaaagaaccttgaggagagaggcttatttaagtattggctcaggaccacacctaaaattctcaaaacgttgagattctgttgttttgtttttaagcgccagagacccaagttgaggaacagcctataaaataactggcctgtactcttacatacatgaaagccatcaaagacaaagactgaagaagaacttttgcagattaaaggactttaagagacatgatcctgaaccagaaaaagtaaaaaataaaaaaataaaaagatctgtagattagataatagttttatatccatgttaatttcccatttgttgtaatattactgtggttgggcaagagagtgtctttgttggtggaagtatctactgaagtatttaggggtaaagaggaatcatgtctgtaacttatgctcaaaaggttcagacaaaatatatgtaaagggaatgataaagcaaacgcaataaaatgttaacattggggaatctgtataagggaattattaacttttctgtaagtctaaaattatttcaaattaaaaataattttttt

SEQ ID NO: 227109 - DNA, 467 bp, Homo sapiens
catgcgctccttaccacggtcattctcagctgaatctacatcacattcacccggaagcctgggagtaatctgtacctaggagtctgtagggcatgaccagcctgcagtactgtgttgacgaggaagatggcagcctctttgatatgagatagggctcatctgcatgttacgtgtagtggcatgtcactgctgccactgctcttctgctaccaggatggcttgaatgcaatataggctgttccatgtgtgctttccctccgttatgaaacttcttcctgtggggtgagatgctgcagtgtgtgtcactttattcacttgaatcagaattcagctttgtatattgaatcccaatttttatggttacatctgaagagataatcacctatttgatattaactgtagaatcagtctttgaaatttataatctgaagcattactaactgcattaaagaacattaactgttttg

SEQ ID NO: 227110 - DNA, 504 bp, Homo sapiens
agtggtttccaatctttctattttgagccattaggcctgtctttcatttaatttttgaaacacagaccttaaatgttttgagatctttcatacaccaaactacttacttttgaagtatggaaaatcatttatcaatattcatcctgatcatcactggagctttttggcagcgtgaagtggctgggatggggtgtgtcggggtgctctgtgtaaggcaagcaggcctgacatttcagttggcccatatgtggtttggggtggggtacccatggtgcctgatagattttttgaggtaaggaagtcaacttgaggactcggcattccttctgttgaccctgagaggttggaaatttttggtctactccttacacccaaatcatgactcagatctttgtaaatgagtattgacagaataaccaaccctcctacttaatccctgagccacacaacaccctaagggggaaaaaagaacggagagggaaaaacccatatcttcccttaaaa

SEQ ID NO: 227111 - DNA, 211 bp, Homo sapiens
cgagcagcgtggtagagaaagagggaagagaagcagcatctgaatgttgagaggagtttggctggggacagtcggagaggagattggccgcaggacgacccaactccaggggaggaacatcttcctactccattcgcttccccactccccagccattccactgagagccacctccatctggcaataaaatctcttgcattcactatccttc

SEQ ID NO: 227112 - DNA, 472 bp, Homo sapiens
ctggtgttagtcttccttttgtttccaagcaaaagttatgcaataagacagaatataaagtctccgagagccttaagctttttttttcttcttcacgtctgtagtagatatttgtagatactaattcttgatgatcttagggttttgaatattatatccaaatataatagtacaggttaatttcctgaacaccttggtagtaagataatttaagaaacttaaggcatgatgggaaaaatagacatgagagtctgatgttcagaatttatctttgaaagcccttagaaatgttttaacacttaataaaataatttttagaaagaacaccacgtaaagaaaatatgttctgattttacactgttaatatctattaatagcatgatttttaacatttatctttatattgtgcaatgccagtttttactttttattgtttttcgagacagggtcttactttgttacccaggctgga

SEQ ID NO: 227113 - DNA, 831 bp, Homo sapiens
agggcaatacagtttttgtaaaattttacaaaaattggactccccccattgaaacactgtactttgaaagaaacttcaaattcagcatattttttaaaaatctggatgatgactcgttttctttctttcaaaccttttaatttcgacaacatttagcttaaggcaaattttatctttgttatagctatttcagaacagcttttaaaatgcaatttaaaaaatggcatttagcaagcaattgccttttcaaccttaaccatagagcctcttccatggattccattatattttattaacataagttaaaataggagtgttctgggtttcacaaggattaaagttcctatctaatgtgcatgtaactaaacgcacgtttacgtacataatagctattggtcacagtttgtatgatggtctttcagccagaaaacagggctgcagttcttacagtagtccttgaataatgacgttacattcaacgtcttttcattattgggttatgagaaaaaaatttgattccaggtgggtgcccctgtctgtgtggaatttgcacattctcctcaagtctgtttgggttttctctggatactacagttttctcccacatcccaaacacacgcatcgcatgttaggtttatcggcttgtttaaatggtcctacttttgagcaagtgcgctgtgtgtgtgtgtgtgtgtgtgtgtgtgtgtgtgtgtgtgtgttagtgcaccctgcgatgggatggcatcctggccagggttggttcctcctttgtgccctgagcttctgggatgggctctggcaacccataagcctgaactggaataagcaagt

SEQ ID NO: 227114 - DNA, 437 bp, Homo sapiens
gcttcagaataaagggcgcccgcggtcccccagcacctgcccaagccacacccctagcttccctccctatccctgcagcctgagggtcccttcagccacccctaagtccccacctgggctcctgccccgcccctggctagcagcgccttctccaccggggcccctctgctcacagagccccctcacctccctggggatgaggggccaggccatgaccctgaaagcctagccctggccttgacctcccaggagcgccctccccgccctctcccggccccggccccgtcctctgctgctggcctctgggtcgtgccccgcagactgagctgcgcttgggggtcctggcggcctgggccgtcccgcaccgaacccaggcggtcggagcccggcggggaggcgcgaggtccttctgggggctcctccgacgcctgagggcg

SEQ ID NO: 227115 - DNA, 413 bp, Homo sapiens
aggttgttttaatatctacttggtttttctcaaaatggaaataattttaaaatcaggaaagaataaatcagccaggtgtgatgacttgtaactgtaatcccagttataggggaggctgaagcaggaggatcacttgaggctggtctcgaactgctgacctcgtgatctacccgccttcgcctcccaatgtgctgggattacaggcatgagccaccacgtccagacttatgtatttgtttttattcatatgttcattattgtctcatataacacagttttaacagctttattatggtgtactttacataccataaaattcacctgtcttaagtgtataattcaaagatttttagtaaatgtacagaattatgcaatcattgccacaaagtggcaacagaaaattttcatcacca

SEQ ID NO: 227116 - DNA, 490 bp, Homo sapiens
ctgacgctcagccttggactttgaaaaggcacgactgtcctgtctgatggacaggatgcagaagcctttgggaatgggcattttgccagaataaataaaagaagacaattggcaaaagatggactgtaccccatggccccaggctgctgtgtggagagacttgtcctctcctctgcccacggtcaccagtgagcaccagggacggggtttcctgctgcacctgggcctcttcctgctgccaggagctgccttgctgcctccacctgtgacagtccaccccccataccccccccacccgcaccatgagaggatttccagggcccacccgcctccagtccccgttctctctgctgctttcgaggtcaccctgggctggaaggggtgcctgggatactgctcagacgtcttggccgccctcccaccccgcaacaccccgctcctggttttcaggatgaaattgtcctcaaataaagcaagcttttgagtcaac

SEQ ID NO: 227117 - DNA, 479 bp, Homo sapiens
gcgtgtcaggacggagggtgctgtaggactatggagttagcgtgtggtgcaagctgtaagccagtgagtgtctggttagaggctgggctggggctgagcacgagggccaagaggtgaccgccggccagaaccagccgtggctgcccagtcgcccagatggtggtcccagggcagggagtgttagcacctgccgggctcagcctgggcggctcagagggcgggacctggagaaggagggccgctcggcaaccgctgagccggcgcaagagctcaggccctcagggagcgtggccagatccggcagatgaaatccaggacacccagttcaatttgaatttcagatacacagcacacaagtacgtcccaaacacagccagcattttgttgtgtttaccgcatttattctattgattgactgaatttacagcatttgatctggggacctgcccccaggctcccaggccttttgcgatcccatt

SEQ ID NO: 227118 - DNA, 778 bp, Homo sapiens
ttgatccttccagatagtctgtgcacatacaaacatctacagttttttaacaaatggtagcatactatatatgtttcaccactttgctttccttgcttaaaaatattccttggtgagcatcccatatcaatacatatgaaactacttcaattaaaaaaaaaattttaggccaggtgtgatggctcatgtctgtaaccccagcactttgggaggccgaggtgagtggattgcctgagatcaggagtttgagaccagcctggccaacgtggtgaaacctcatctctacttaaaaaaatacaaaaattagctgggcgtggtggcaggcagctgtaatcccagctacttgggaggctgaggcaggagaattgtttgaactcaggaggcggaggtttcagtgagccaaggttgtgccattgcaccccagcccgggagacaagagtgacactgcatcttaaaaaaaataataaaaataaatttttttttaagttttattttattgttttaagaatataatttaggccgggcacagtggctcacgcctgtaattccagcactttgggaggccgaggcaggtggatcacgaggtcaggagttcaagaccagcatggccaagatggtgaaaccccatctctactaaaaatacaaaaattagacaggtgcagtggcagttacctgtaatcccagctactcaggaggctgaggcaggagaatcgcttgaacccgggtggggcagaggttgcaatgagctgaggtcatgccactggactccagcctgggt

SEQ ID NO: 227119 - DNA, 580 bp, Homo sapiens
gttcaaatggtaggttattttgaaataggatagactttgcagctaagattccagatttagttcagttaattcattctttagtgagtttttcttgggaaaatattttggaattttcatttcaaatgcatcctcctcatttaagaaaaatccagatgagtagtttatttcacaatataataactaaataggatttataaagcagaaatttataaatcctttcttttgctgggacaaaggcaatggtgaaaattaaaaaaaaataaagttaggacatttaggtaactcaaagacagaacttaatggctgttaagattggagtatttggttttgtagtttttaaaccatatttaattttggccatatctatcttatttagtagtttaaaggataaacagttcaaacagtaagaaaaaagcagtttgtgttttgtcagttttcaactttagatatcagtaaatcattgctgtagctttctttatcttttgtttgcacaaaaaacctgttagaattatgtctgcggggaccatctgctgtggttcccagtcttgtcagtgtgataagggataagctgtataaacag

SEQ ID NO: 227120 - DNA, 388 bp, Homo sapiens
tgagtatctcactcatggaagtggcatttttggaattgggaagggggaaggttaatggagagttagtgcacattgctttgatctgcactctcaaaaaaaaaaaattccggctgggcgcgatggcgcacgcctgtaatcccagcactttgggaggctgaggtgggcagatcacaaggtcaagaggtcaagaccatcctggccagcatggtgaaactccatctctactaaaaatacaaaaattagctaggtgtggtggtgggtgcctgtagtcccagcaacttgggaggctaatgcaagagaattgcttgaacccaggaggcagaggttgctgtgagccaagatggtgccactgcactccagcctgggcaacagagcgagactccgtctc

SEQ ID NO: 227121 - DNA, 490 bp, Homo sapiens
tgacattaggtatttcatttgcctacagatagaaactacattctctaatattatgtatataaatactaaaggtctctaattggccttagctttccctttctggtaaagttggataaggaagaattactgacttcctaaagataccagcaatcctgaggccttttctgaatcacaattccaataaatggaacccaaaataacattttattgatctcacatcaaagttgcagtatttattcgcaaatacatttttctttttttttgttgttttttttttttgagatggagtttcactgttggtgcctaagctggagtgcagtggcactatcttggctcactgcaagctgtgcctcccggattcaagcgattctcctgcctcagcttcccgtgtagttgggattacaggcgcccaccaccacgccccgctaattttttgtatgtttatttgagacgggcttcaccatgttgagcaggccggtctcgaacttct

SEQ ID NO: 227122 - DNA, 745 bp, Homo sapiens
agacatggcaggtggctttcccagagtggcagtctaagaaagaaggcaggagggagcgttgtggggctttcttatgatctgggcttggaagtgatattctgctacattctgtttgttagaagcaagtcactacgcccagtcgacacttagaagaattagcttccacttcctgaagggaggactgtgtaagaatttgtggacttatttaaaaactaccacatacctaatcacattgtaataacattaaagagcacaaagaccaagaaaataccttaaaatcagagagaaaggacatactaccttttgaggagcaacatagcagcagatatctcagctataaccagtgtaaacaggaatgaaagaaagttgtcatcctagaattgcatactcagggaaaatatgagacgtgttttttgtttttttgcagagatggggtctcactattttgcccaggctgatcttgaactcctgaactcaagtgatctgcccaccttggcctcccaaagtgctgggattacaggcctgagccaccgcacctggcctaagatgtttttagaccaacgaagtcagggattctgtcaccagcagactctcactaaatgaaaatctattttggggtaatgaaaatgttctaaaagtgattgtggttgcacaaatctgtgaatatgctgaatatgccaagagccattgaattgtacactttaatgggtgggctgtatatgtataaagttgttttttaaaaatg

SEQ ID NO: 227123 - DNA, 412 bp, Homo sapiens
ttgttgagtctcctctttgaagaaatactttttggcaatgatgacacccaaaagagcaagaagcaccaagacagaaatacagactccagcacagattcctttagtggtgttgaccatctgtggactatatgctggggacagttgagtttgattgttattccaaaggccatctgaagactctgtcatggtgtcattcccatctgttgtgaaagagtgcaatggtgagctggtgggttgtgtccttatttctccctgaagtgtcatagggtgggtttctgctggctgaggtgaagatggtgaagtggctactgattgatggttctgcgtgggcaatggcgttggaggaacaaaggtagagaccattgttgtcattggaacacttgttttcattgaaatgctcgttgttgttgga

SEQ ID NO: 227124 - DNA, 688 bp, Homo sapiens
agaaataacagagtttacacgtatttgaaatgactggattttatatcactgtggttgagaaagggaacagctcgctgtgatagaattatgatccctgtcaccgaggagcaaagagtatttgggtcaaatattttcccacgaatgttaacaaacttatggagtggatgtccataaagggttctctaaatgaggaacattaatgagctcagcagacattcatccagtgactcaaacagtgacattaaatgctattcctgctacacacaaaaacaaaaagtttgatatttacggaattccacacactgaatccttaaggcttattccttctttaaaaaatgacatcctatcccttgtttgcctctgtagcatcactgataagtctgtttatttgagagcttcaacccaacctctcaaacaggaaatgaatgaaggagtatggatagaggaaaaatggagaaaaagagtgtggtgataaaaattttgacatttctgaaaaaaaataaaaaattaaaattttaaaacttttgttttccctatgtaatagaaactttccaaaactacaagatagttacaagaggcaaaatacatgcacaaaaaaaggaaaagtttgataaaattttgggcttaaggactacagttagtatcagtcttctcccctcccgggatacagggctctcttagacatcac

SEQ ID NO: 227125 - DNA, 552 bp, Homo sapiens
aactggaagtttaagactgctcctcagccatttggggcttcttatgcctctaactcaatagacaaatgagttacagtgctggctgggtgattgttcctgactaccaagtagaaactggactaccccgaatggtggtaaggtaaagtatgttgggaatacacaggattccttagggcatctcttagtgttatcatgccctgtgattaaggtcaatggaaaactacagcctaattcagacaggaccactaatgatccagacctttcaggaatgaaggtttgggtcaccaccaggtaagtaccatgaccagatgaagtgcttgctgaaggcaaagggaatacagaataaatggtggaataaatactagctttgatcatatgaccagttacagaaacacagactgtgattgtcataagtatgtcctccatattttgctataactacattttgtgtgtgtgtagctttgttttcttctcatttccttattctgtaacataagatgcattgattttatagcatagtgtttaaatattgttaatttttttaactggctc

SEQ ID NO: 227126 - DNA, 455 bp, Homo sapiens
aattcatgctctaaggtgacctgggacagagtgaggcttaatccaaattatgtcataagctgcctctacattgcaagagtggggaataaatccaagaggggatgtaccttaaagcatcaggccagctccaggaagtgaatgattagagtgaataaaggccttgagagttaagaaggcaagtctcctgacccttgagaatctgcaaagagcccttaccaccttgcttatttctagtcctcataaagtttctgagaacagaatgcagtgttctcagaatgcatattatcttggcataactacaaatcttaaaaagcatattccttgagcctcaaaacatccctagaccatttaggacatacattatctaggttaatctttacaacgagaatatttttgcttgtcctttgtggaatggttctctatagaaataaaataaaacttaggaaactctggtc

SEQ ID NO: 227127 - DNA, 487 bp, Homo sapiens
gggccgtctcatttaactctgtggaaggcacacagtggaaatacagctagtactgtacttgcggattgatgatcaagtgcgttaattaactggaaaatgaacaaataaatagaaatatagctctgtcttcttgaatgaatttcccatgagccagtgaaaattacagctgggatttggaaataagcttggttcatagattgcaaaataaattttcttcagtggctttccaacagagataatgacaagatttgagagcttgcctcttaccagttaatttaaattaagatgacctaataaaggtctctgggcatttcttcataagaatggagactcctgctgaatagttagatatcagaaacaaggaaaagaatgcaaaggttctgaaatatgatattgaagacttgtatggaggatgttagaaaatgattagcaatatgttttaagcactttttttagagatagacattctatatacttattaatattt

SEQ ID NO: 227128 - DNA, 372 bp, Homo sapiens
ggatcctctccaactaggtaactcgattccctgcagcccagcaccagcccagctctggccaccagagccggagctctgaagagtttacctccaacatggcagtgagcagttttcaaggtcaaggagggtggccaccaggagctcctgagccagggtgcatggggagaacacagggctggcaggccaggttctagctccagctcttcactaacttgctgtgtgtctttgaatgtatcacctcctcactccggacctcagttctcataaaagggagactgacagaaggtccctaagtgcttacagatggactggccagggtcgtcttggtctatagcatccctttcaaataaagatctgactattctgtgcctg

SEQ ID NO: 227129 - DNA, 375 bp, Homo sapiens
aactgtgaaataattaatgtgtgttgcttaagccactatgatggtagtaatctgtcatgcagcaattaaaaaacactactacatcaataatcaacaaatatttactgagcacctactatgtgccagtagctgttctaatatttgggatacaatgttgaaaagaacagggaaagtctctgccttcaggaagtttctattatgtgttgaggaagaagatcattgctattgtcaatttaatgcaatcacttttttcttttctctgagtgatatctgttatgtggatttttccagtttcattaggttaacactagctgctgtcagcagatgaatacccaaacactggtgacttaataataaagcataattttttcttta

SEQ ID NO: 227130 - DNA, 199 bp, Homo sapiens
ctgagtggtgtccccccactaattcatatgatgatgtccttaccctaagtacttcagaatgtgaccttatttggaaatagggttgttgcagatgtaattggttaagatgaggtcgtactgcagtagggagggcccctggtcctgtacgactaggtgtccctatggaaaggggaaatgtagacacagagacagacacaca

SEQ ID NO: 227131 - DNA, 903 bp, Homo sapiens
  misc_feature (168)..(168): n is a, c, g, or t
  misc_feature (180)..(180): n is a, c, g, or t
  misc_feature (218)..(218): n is a, c, g, or t
  misc_feature (251)..(251): n is a, c, g, or t
  misc_feature (335)..(335): n is a, c, g, or t
  misc_feature (360)..(360): n is a, c, g, or t
atactgagactacataagtgtccttcaaataatgcagaagataaagatcataggcaggcaaaaattacttaataaattaagctctttaaagaagtgaaagaattctctccagaaccaacagctcttaaatattctatttcaataaaaacaatttatatacaattgcgngtgaaacttatnttttggcaaatactcttccggtaagttatgaacatttnctcttgataaattttatactaggtatataagtntcctttattggtgttttggatgacagcaaatgactttccataaggcagatgtagattttattcacacaacttttcaggagtagnctttatgtaaatatgttaggactgntctttccttgagctttacagttaaccaatgaaagtgagttattttagggaatggttagatttggacatggaccaaaattagttttctaatgagtggtgttaaagatgtgtaactactattacagagataatgtaaatggccttctactttttaattctctgattctgatcttgttttgtagtaagaaaggctcagtatgaatttgaggtacttaactaacttgttacagtggtggtcagtgaagaaagattctatcgggcaggactctctggaatgcatgtgtcagaagcccagcccaaattggcctcagcagaaaacaaaacatagcgaaaagcaaatgacaattcattggctaaagcaatggaaaaatacaaggatatctagcttgagactcagctagagccaaatattcaaatctggtcatccaacattgattggtttttttcactttacttagctgtgctaaacactgttggcttggttttggggcacgttcttctcaaacatggtgaaagtggcccctagcaccgccaagattgatcc

SEQ ID NO: 227132 - DNA, 696 bp, Homo sapiens
gggcagggagggcaacattgcagagagtttttgtgccacgccttggaatcggacaatactgggttttaaggctggatcagtcacatactagccttgtgtcctagggaaagtttcttaacctatgaaacctcagttttctcatcagggagaataataattactaatatatatttcatatggtggttgtaagggttaaatgacatactgtgtataaagcatagtgcttggatgtaatgagtgtttaataaatacccattacgtcacatttgtttgttaaatggctggaacattccacttggggaatgctttgagttcctagggaaaaaaaaaatatgtttaggtgacattacatgtaattaccaagttggttaaaaaagtgagattcgtgaattttaagcagattatctcagcaaaaggccgtgaacttaagttgtgatctggatgttagtagttgccattgagaataaatatatgatgtccaccactgaatttgctcaatgtctctggttcgctaaaagaatgcagttacttcatcttagctgaagatcagccattaaccatgacacagggctatggatagaatagtgcaggtttatctctgtgagtgtgggaaggaaatggtaagaacggtatatgccagtggctagagggtgaattcgtgcagagagataaggagtgcttgttaggatatttttg

SEQ ID NO: 227133 - DNA, 426 bp, Homo sapiens
gatgcctgcaggatcacactgagcagacacactagtttcatcacactagtttcatcttctgcaccagaaaggaagaatctattttgcctggccaggcatggtggttcacacctgtaatcctatagcactttgagaggcagaggcaagaggattgcctgaggccaggagtccaggaccagcctgggtgacatagcaagatcctatgtccaaaaaaacaaaattcaaaaacataagccaggcagggtggtgtgcacctgcagtcccagatacttgggagcctgaggtgggaggttcacttgagcccatgaggttgaggttgcaatgagccgtgattgcactactgcagtccagcctcagtgacagaacaagaccctgtctctaaaataaaaagtaaaataaataaatattttgcttggaaaccgagtt

SEQ ID NO: 227134 - DNA, 142 bp, Homo sapiens
tttttctacatttaagaacaggcaaaaatggctgtcaaatggagggacagtggagatcattacccctttattaattaggctgtatatagtaagtttgaatccttaaagatcctgatttaacttacattaggcctttgtgaat

SEQ ID NO: 227135 - DNA, 686 bp, Homo sapiens
gagctcccaacaagagggcagtgtattactcgtgtctgtggtgctgcagtaggtgtgaccaaacctactgccccagtcataccagagtatacacctacagttacgtacagtaccatacagtacgtaataattgatgataaacgactgttactactttgtgtatttgctatacttttaagagcatattctgcctacttactagaaacaaagtcaactgtaaagcagcctcaggcaggttcttcaggaggaatccagaagaaggcaattggtgtcacaggagatgacagctccatgtgtgttgttgcccctgaataccttccagtggggcaagatgtggaggtggaagatccagaccctgtgtaggcctaggctaatatgtgttttttgtgtctttttgggtttttggtttttttgttttgttttgttttgaggcagggtctctccctcacctgggcggaagtgcagtcatgactcattgcagccttgacctcctgggcccaagtgatcttcctgccttatttttgattttttgtagagatggggtctcactgtgttgcctgggctgttctcgaaatcctgggctgaagcagtcctcctgcctcggcctcccagagggctgggattataggcatgagccactgtgcctggccgtgtcttcatttataacaaaaaagttcaaaaagtta

SEQ ID NO: 227136 - DNA, 475 bp, Homo sapiens
ttcagccatgaataagaaaatcctaacatttgtgacagcataaatgaaactgaggacatgatgctaagtgaaataaatcaggcaggaaaagacaaacactgaataatctcacttagatgtggggtctacaagagtccaacttaaagagtaggatagtggttaccagggcctagggcttgggggagatggggagatgttggtcaaagggtacacactttctgttataaataagttctagagatctactgtacagcatggtgactctagtcagtgatattgtattgtgtgtttgaaacttgctaagagaaaagagcttaaatgttctcaccacaaaataaaagtaaaattgacaactaggtgaggtgatgtctaactgtataatcatttcacaatatatatgtgaattaaatcgttacattacacatgttaaatgtatacaattttatttgtcaattatacttctgcaaagcgggag

SEQ ID NO: 227137 - DNA, 246 bp, Homo sapiens
acctactctatccccagcaaacattaaagctgagggcagatctaccagtgttgtaatgaatggagttcattgactggctttctaagtgttttcttaaaggtgaggtggcatgtgatccctgtgtttggagtctgaagagaggcctccattctaaactggattctccttttagttagctgtgctttggactcaaaaccttcttgggatgaacatatttcttttgagtctccattcactggcccaagg

SEQ ID NO: 227138 - DNA, 142 bp, Homo sapiens
aaattgttcctgactttgttaagaatgaatctaaagttttaccatttaccatcatgtttgctgtagattttattaaggaagttcccttttgttactgattttctgttttattaaaattgtgagtgaaggtaaaaaacttttt

SEQ ID NO: 227139 - DNA, 520 bp, Homo sapiens
ctgggcctgctctactgttgtcagtgagaaaccaactggtaaatgggtgtcagctgtgaccctcgaaggaaagggatcaccctctttctgaccctataccaccttcagcagggatgaaggcagtcagagaaaacttagttaaaaaatttctaaactgctttgctgatttgatctggggccctggagtgccaacatcctgtgatagcggctgattgttgatgcctgggaggatacagcagtgacgatccaaatttacaagactcaacatggttttcaaaacctccttttaaaaaagatgttcctgagttctggaatctgaacaaaatatgtctggttattatataattctaatggtccttgtggatgctaccattagagttcagttagtgtctcatctatcactgtaatatttgtattgtaacactaatcgtggcaaagtatgatttgataaatgctcattctcaaatcttttattttagtgtgttcatgtaagattaatgaccatgatgacttgagatag

SEQ ID NO: 227140 - DNA, 418 bp, Homo sapiens
tcatactatgatattactactgtttatttttctaatgtacattatttctaaactgctttgctgatttgatctggggccctggagtgccaacatcctgtgatagcggctgattgttgatgcctgggaggatacagcagtgacgatccaaatttacaagactcaacatggttttcaaaacctccttttaaaaaagatgttcctgagttctggaatctgaacaaaatatgtctggttattatataattctaatggtccttgtggatgctaccattagagttcagttagtgtctcatctatcactgtaatatttgtattgtaacactaatcgtggcaaagtatgatttgataaatgctcattctcaaatcttttattttagtgtgttcatgtaagattaatgaccatgatgacttgagatag

SEQ ID NO: 227141 - DNA, 462 bp, Homo sapiens
ctgggcctgctctactgttgtcagtgagaaaccaactggtaaatgggtgtcagctgtgaccctcgaaggaaagggatcaccctctttctgaccctataccaccttcagcagggatgaaggcagtcagagaaaacttagttaaaaaatttctaaactgctttgctgatttgatctggggccctggagtgccaacatcctgtgatagcggctgattgttgatgcctgggaggatacagcagtgacgatccaaatttacaagactcaacatggttttcaaaacctccttttaaaaaagatgttcctgagttctggaatctgaacaaaatatgtctggttattatataattctaatggtccttgtggatgctaccattagagttcagttagtgtctcatctatcactgtaatatttgtattgtaacactaatcgtggcaaagtatgatttgataaatgctcattct

SEQ ID NO: 227142 - DNA, 415 bp, Homo sapiens
aggggaagctttggtccagcctggcagcctgaggtccagtcctactctgcctaccccgccgttaggcgagtccagccctgcaggagtgccctaagcactaaagagatttccccagcttgccagctttcaccccggagctcagcagatggctgtgactgcctatggtggggtctccggcagcttgcttcccgcaaagctccttccagggctcagggcttccttcggggtttcctgctacgggagatttggagacagatgtgccacatgaaggagaggatggccctctgcaagccaaggaggcaggcctggaacggacccttccctctggccctcggaagaacccagcctgctgacaccttgatttcagacttctggcctccggagctgtgaggcaataaatgcctgttgtttcagc

SEQ ID NO: 227143 - DNA, 383 bp, Homo sapiens
acaattgagggctgttcacctgcttagaatcacagtgagctgcggcagaggcctccaaagcacatttgtagaaatgaagagcggcccattcaaggaaaaaactccccctgtttgcttcttacagcagtttttgtttatctcattatctcccaacctgaagaacaggaccatctggcatgcgggcatgttaacaagatcataaattaggaggagaaatgaagccagatttccataatggtcgcaagacagaaatcaacagcgctgggatggaatttgcttggaaggtggggtgggagggaaatggagcaaaataaaaatgcctcagcacatccagcctgaatgaaaaacacaaatccagagtcatttagaaggagtgatttaaa

SEQ ID NO: 227144 - DNA, 349 bp, Homo sapiens
cttgtttatgggatatatccagagtaacaaatccatagagacaaagtagatttatggttcccaggagttgaggggaagggagatgagggagagtgactgctaatgggtacagatctttttgggggggtgatcaaaatgttctggaattagaaatggtgatggttgtacaactttatgaatatactaaggaacactaaattgtatattttaaaagggtgaattttataatatatagattatattgcaacaaaaattttaatatgtcatacagagagaactgactacaaataacactttataagtttgaaggctcttttttattttatgattcatgtacatggctttttaa

SEQ ID NO: 227145 - DNA, 532 bp, Homo sapiens
acaggctccatcagatctgagtgagggctcccaaaaaagagtgaaaaggcaattctctgtccaactgtgtggatgcctcagaacactgacacagcccatgtgaagtctggccatttcagaagcccacaggagatgaggctgagaccctttgcaccaaggcaagatggcacctctgcagccaacaccatggccatcttcactgttgccagggctgagtggggtggctcactcccgctgagcctccctgcttgaatctgaatcccaggcctgccccttcctagctggggacattggtcaagtttcataattgctctgtacttcagtgtcttcatctgtaaaatagggataacgacacccacctcactgggttgttgtgtcaggggttagacagcgcgtggaacacactggtgttaggtaagtgctaggcaccctcgagtcctcttcccatccaaagaagccagtgggaggggccctccctgacaagctgaacccacaccctctgcaaaagagagaaagactgaactgacttaga

SEQ ID NO: 227146 - DNA, 490 bp, Homo sapiens
cagggaagaaccaggtggttaaggaccagtgtcttaaagtaaatactctgtatttgagtccaaaatgaatttcaaactcaggttagatgtttcttcttaatcacttaggagccagtaagactctctaagccttccttcctacgctctttcactaaaggaccaggttctttcaggtgctatcctatttggaatttaatttgccctaacatttctccaagagccattacagcacaccacattgctgtatcccatttaactcccaaaccgcagagaagctggctgcagcatcaaacactattaaaaataccacaagggaaccttagagtgggatttcaggcacaagttacagcctaaggacaaacagcggttgtaaagagcttgaatgatactggaatggagatttaggagaattttcagagtctgaaaaaacagtccttaagattttagtgttggttcctagggctggttctccgtggttatatgggttagt

SEQ ID NO: 227147 - DNA, 598 bp, Homo sapiens
agtaaatctgttgacaatcaccatgtcaatcagcccttgtatatgaacatgaatatgattttacttactctgaaagggtatttaataacataacattaataatattttacctgttaatttatctttacctgacagctttccccataatgtgagtgcaataaacagaattgcctactgttgacctaattaaagattaaggaacaaatcaattaaaagtaattatttctagcctctctttcttgtaagtaccatatcctggattataggagacaaagcaaatcttcggtgctacctagatgctattatgtatcaaacatggattgggttatcaaagtgcctcctcctttttatatagctccaaattaggaacatgatcttaaaggaaggcagcattttaacatgttgtcagataagaatgcagatgcccagggaattgagaaggtcatagtattgcctagcttatttactaataactgtatcagaaagtacataagaaatgttagaattttaatttctctagaggccaggaatctttattattcttgtttcatttcggtattttgaaatactaaaaagcagcacaaaagcatgaaattga

SEQ ID NO: 227148 - DNA, 289 bp, Homo sapiens
agagccaggcacatagtcaacatgctccaaatgaatgtctgtgacgcagcactctataaactgtcgttcccgcaactttggtcccatctacccctgccatctgtggatgctgtgtaggcagcagcctgcattgaaccaggccttcacttagggcctagtgcctagctggtgctagggaaagatttgttcagtaaacccatgaggcatcaccaccaccattcttcccgagtccctggagctgggaggaagtagaagggagggttctaaataaatgcgtgtgaggcccctg

SEQ ID NO: 227149 - DNA, 358 bp, Homo sapiens
gagaaagggtctcacttccgttgcccaggctggagtgcagtggtgatcgcggctcactgcagcctcgacttcccaggctcagatgattctcccacctcagtctcctgagtagctgggactacaggcgtgcaccaccacactcagctagttttttcgtttgtttgttttgttttgtttttgtagagacagagttttgctgtgttgcccaggcaggtctcaaactcctgggctcaagcgatccgcctgcctcggcctcccaaattgctgggatgataggtgtgtgccactgtgcccggcccaagccattttttcagtccattctttttgctcctcctagtaacccttctgtcgtcttctc

SEQ ID NO: 227150 - DNA, 987 bp, Homo sapiens
gtggggagcgcctctgccccgccgccccgtctgggatgtgaggagcgcctctgcccggccgcgaccccgtctgggaggtgaggagaccctccgcccggcaaccgccccgtctgagaagtgaggagcccctccgcccggcagccgccccgtctgagaagtgaagagcccctccgcccggcagccaccccgtttgggagatattgaattttccaagaccactctggcccaccatgcccctcatcctgtgcccataaaaacccaagaccatagcaggcacacacacaaggggctggatgtcgagaggagcagaagagcagaagaacacaccaacagacaccagcagacactgacaggccatcgacaacaggacaacgtggaattctgtcaggggtggttcttgaagagcccagccgctaggtggcgcaactccaggggaagaccaccttcccactccatcctccttctggctccacatccatctcactgagagctacttcccccactcaataaaaccttgcacccatcctccaagcccacatgtgatccgatttttccagtacactagggcaagaagccgggatacagaaagcccttgtgataagacagagagtctaattgagctgcttaacacaagccacctgcagagagcaaaactgcaagagcacactgtaacacaggcccactggggcttcgagagctgtaaacacttaaccctagatgctgctgtggggtcggagcccaaaaacactccccagtacctgcatcctctacatgctccccctagaggtttgagcagccgaggactgaagaagcgagccacatccctgttgcatgccctgtgagggggataagggaactcctccagtttcagaggcaggcggatcgctcgagcccaggaatttgagactagcctgggcaacatggtgacatcctgtctgtatcaaaaatacaaaaaaattagccaggcatggtggtgtgtacttgtga

SEQ ID NO: 227151 - DNA, 401 bp, Homo sapiens
tcaaaaaatggtctttttcccctgaagactcaaagattcttatgggaacagaccttaaaagatgaccttttcaatttatccctaggttctgcttttctaaatatatgccacagaattcttgagttttctctcttaaaatagaaagctaaatgcaactatattatagctaacagaataaaaatttcacaatcatctagaaaaaaacccctgacaaccagtcagatcaagattcccttgatatttccctactccagaattttagattacctattctatgaaacaatccactgtaaaatctaaaatgtttacctcttattctagtattacaaatacataaaagtttcatataacagaggcaagttagtaacttctagttaaaaactaatactgtaacaaacaac

SEQ ID NO: 227152 - DNA, 342 bp, Homo sapiens
ataatagttgttctccttaagagtcccttaaaacttttttttttaattaaataactaggccaggtgtggtggctcacacctgtaatcccagcactttgggaggctgaggtgggtagatcccctgaggtcaggcattcaagaccagcctggccaacatggtgaaaccccgtctctactaaaaatacaaaaaaattagccaggcatggtggcgcatgcctgtactcccagttactagggaagctgaggcaggagaatcacttgaacccaggaggtggaggtttcagtgagccaggatcacaccactgcactccagtctgggcaatggagcgagactccgttttg

SEQ ID NO: 227153 - DNA, 235 bp, Homo sapiens
ggaggatcgcttgagcccagaagtttaagaccagcctggccaacatggtgagaccccatctttatttaaaaaataaaaattaaaaaaaagagccgggcatagtggcctgtggtagttccagctaccccacaggctgaaacaggaagatagcttgagcccaggagatagaggtgacaatgagctacagtggtgccactgcactccagcctgggcaacaaaatgagaccttgtctca

SEQ ID NO: 227154 - DNA, 676 bp, Homo sapiens
caggtagagcttggggttagtacatcactggcctgcgtgctccgctccaggaggtctcggtgattctgccacagcctcatcctccgtcgccctgtgacctactggtattggaacattcatagctaagactccaggacacccacaaagccgagaaatgctgagtttgcgggtcagggcgtccggagactggggaggcctcatcggagtcggccggaaatggcggtggcgggaccgagtctgtgagcctgagcccccctcagctcagccctcagtctcctctggtgcagggtacccaggcgtcctgtaccgtttcagcacagcggctttggccccagcctgtagccctctttgcgcagctctgcgcccgcatcttccccagcttgtgaggtgatgaggagaggttcaccagggaaagacgccgacttggtgtgcagggcttctgcgtggaaggagctctggtctgtggggtcaccagtccctactttaacctattcagacataaacggaggcaccattaaaacattaaagaatttatatgagcaaacagtgatgaaccagtgggacagccccagacatggtttgtcgtttgggggctaccagcgggtcttgaagaaaaggctttaaggtttgtgaagaggcaaagcaaactaaataattgattgggtaaaaaaaaaaa

SEQ ID NO: 227155 - DNA, 154 bp, Homo sapiens
gttgttttgtgacatcatctcctgagcaaaatcctggggacgtcatgcgagagaagacagcgtggtgttctgggaagagaccagccttgggaaggattcctagggataccgactgtctgaccctgggcccctcaaacctttgtttctctatctg

SEQ ID NO: 227156 - DNA, 516 bp, Homo sapiens
ttgcctaaaacatggttctaccagtgattttcttaagttcaagaagaaagtcgcttctccactgagatatttacaatcatctctgacattgcagaagtgaattactggttacagaatgcttccattatacattatctcacaagactggatcatccagccatgaggggaagaaaagatgtgcaaatattggaaggaaaaagggttatggagatgaatgatctgtgcacctgggctatggatcgagatctactatcacccagttgagtaacttcaaataagtcacccaacctccctgggccttgccctcctgtgtaaaatgagagactttgagtcactcacagataccacctagcttttaaaactcttattctgcaattcagctaattcggcaacatcgctgagacacggcccccgatggtctaagtccttgctggttctttgtcctctctcaaacactgtaatccctcttaacaatatctgtttctccacaatcgaaaaactggacttcattaagga

SEQ ID NO: 227157 - DNA, 414 bp, Homo sapiens
ttctctctttccaaagatgaaccaataaacaacttatgcttggcaccagcccttagttctgacagcacagagaatcaccaggagatctttcaaaatactgactctaggacaaacattgcatgattgcactcataggaggtaactgtcaactttgtagagccagaaggtacatggtggttaccaggagcggcaaggagtggaaatagggtgttagtgtttaatgggtaagagtttcaatttgggaagatgaaaaggttctggagctggatggtggtaatcgttgcatagcattgtgaatgtacttaatgccactaaattgtacacttaaaatggttaaaatggtaagttttatgttacatattttactaaaattttgtaaatgcaaaaattaaaataaaaaaatactgatgccca

SEQ ID NO: 227158 - DNA, 430 bp, Homo sapiens
atggggtgaagtctgtgccaggaacaatggtaattgtgggagtttcaatgaattgtgagtagagttggaggagttagggggtggaaagtatatacaccaagtgtgagtaggaaaatagatgttgaaagttatgagagctgtagagagtaagtggggcatggtttgtgagcttgaggtcctccagaagtattgaagcggcagctgctgctgcacgtagacatgagggccagcctagaactgtgaggttaagttgtttggacaggaaggctacaggtcatgggcctggatcctgtgtaaaaactctgaacgcacagccttgtatttcagctatatgtaataagaaggattgggacgagttagggagtgctaatgtggggactgtttctagggttgtctttaaggaatgaaaagaagagtggggaaaggactt

SEQ ID NO: 227159 - DNA, 267 bp, Homo sapiens
agttaaggagcagagagaggctagcatgtcgcactagtagagctgctggcacttgaaagattacacctgtcatttggaagtgaaggacatcaatttgaacactgtgcaaccaataacaaagtaatccaaaattctatcttaaaatggtgttaacatttgtattccaatacatgtattaaattgtgctcaataatattttcattttgcttagggaacatgtacaatgtaaagactatctcttgcaagatttaaataaaaaatatcaac

SEQ ID NO: 227160 - DNA, 406 bp, Homo sapiens
ttatattctgtcctgtactatgtcaatagtaatattgctaaaagtattctatttatatactatatatggaatatagagaggggactattttaaaaagttggacagcaagatgaaataatgatgaattctatgcttctgccttactcattgcttagagattcctaagttttacacagttgacattacagggagtcaggctgaaaatacatttctaggcccgggacaccaagaacagtcacacttcccaggcctgaggtgaagtggcacattgcacctggataactattaccttggctgagataagtagctccacttgccagagctggactgagatagcaccacccgttctagggaagcagagtagaagctgagctgagacaccccacgctacaggccaaacaactgt

SEQ ID NO: 227161 - DNA, 601 bp, Homo sapiens
gtgctgagcagggaggagatggattgttttagcctcccaggcctccaacaccgtaattttcaggcaaaggtaagatcagacagaatgatcctgtcaggaagcttctagaacgggaaagcatgtttttactttcatggctgtgatccttagtccactttttctctagacttgttctgatatctcttaagccaggagaaagttgggttttccttttccgtcagcgattggaacacagtatgtttctatttgaatgactgggcactcaagcgagtcccctgtacctgagtggtgggctgagaaagttcctccatcattgaaggagttgtctgagtgcagggaggggttttagagaagagctaagaaccctgtggtgggaagcagcagtcaggccatccccgttctgtgctgctcaggctctgacagtctcccttgcattgtctaatttacaggttgaggttgtgaggttctacccctggtaatccaaatagtcccactgtgatctcattccttctgcatattgtgagcaggcacacgatgggcgagacagagttttaattccccaagggcaaacacttactgattagaagaatgacgctgtggg

SEQ ID NO: 227162 - DNA, 330 bp, Homo sapiens
agtcagccctctatatatatatggatttcttatctcatgaatactgttcttgatccacatttggttgaaaaaaccaaatttgtatgattggcctcttgcagttcaaacctatgtttttatttagttatttattcaagggtcattcatatttattgattgataatattttggcacatttataaaaatctgtctttatatctgctatatattatatatcctttaaaaaccatttgaaagttacagacatctttacctcagaagcatcagcagtatctccacagaacaagttgctttcttacataaccagaataccattatcacaccccccca

SEQ ID NO: 227163 - DNA, 591 bp, Homo sapiens
aagtctgtgatgattgagatgtagaacagataaatttgtggttaactcagtatgaaaaggattgttaggtataagtgatggctgtgcaagattgcttttaagtagctagagggcttcttgagtgattgtccccttctattgggacaactataattggagggaccatttcacctggtatcatttgtggcaagatatttggtgttttgacagaaaaatatattctgtgtgagatagcttgctggatctatgcaggcctaaggtttttatgattgcagcccttaatacaactgtaaaaaaaattttttttttggcctggcatggtggctcatgcctgtaattccagcattttgggaggcccaggcggacggaacatgaggtcaagagattgagaccatcctggccaatatagtgaaaccctgtctcttctaaaaatacaaaaattagctgggcatggtggtgcacacctgtagtcccagctactcgggaggctgaggcgggagaattgcttgaacccaggaggcagaggttgcagtgagttgagattgcaccactgcactgcagcctgtgcgacagagcaagactccgtctcaa

SEQ ID NO: 227164 - DNA, 438 bp, Homo sapiens
ctgaagcaccacagcccaaaagcagagaaactccaagctgctgtcagtacctggagaagccctggagacagcagtcagcatcctgagggtagcacctggcaaagccaagccccttaggagttctcatctcagttctgccagttcctagtcacccatacagaagcctgatcaccacctttgactccttcccgtcttccttccccatatccagtgagagaccaagtcctgccaattctgactcctaaacatcttttgaatccatcaatcctctctgtctcacttttcctaggtcctcccatctgtgcctggactcctcaccagcctctctccagaaaaatcattttcccatacaaacctgataaagccattatcctgcttaaaagccttcaatggctcccaattgcctcagaataaaatccaagctccttgccgcaactc

SEQ ID NO: 227165 - DNA, 244 bp, Homo sapiens
gttttccctttccttgcatttgatagtagaatattttagggcaggatcatatgtgggtgttagattaagccattgggatgagaagggagaaatggcaagagtattttccttcattactttattatttattttccttttcctgaggtaaggaaggggatataaagaaatggcctttatggttcccacggtgatagggatgaacatacaatattctctcccttctcaccacagcagctccctgtct

SEQ ID NO: 227166 - DNA, 445 bp, Homo sapiens
cataaaagcagaagtcataatgaaaaatattagtgtacttaagactaaaaatttatatcatgtgatagatgctttttttaaaaacccagtttaaaattaacaaagaaaaaccttatagaacaaaaagtggggtttactccaggatagaaaaatattttaatatttaaaaatctattaatataattattcattttagtagctctaaagagaaaaggtgggcggatcacgaggtcaggagattgagaccatcctggctaacatggtgaaaccctgtctctactaaaaatgcaaaaacttagccgggcgtggtggtgggcgcctgtagtcccagctactcaggaggctgaggcaggagaatggtgtgaacccgggaggcggagcttgcagtgagccaagatcgcgccactgcactccagcctgggcgacagagagagactccgtctca

SEQ ID NO: 227167 - DNA, 411 bp, Homo sapiens
agactctaaaaatgagctggtcgcttccaagtgagatagctgccaacttatttcagattgctgagaatttattcattcacttctttctacttattcttcttccctccccctttccacatttattcaattttactatactaagagatacaatttagcacaatgcctgccacacggcaaacattcaataaatggtaattgtaattattcaaggcactaagctaatatcatggggagtttatgaagataaatcagacttagaatctgtgttcaaggaatttgtattcttggggcaatgtgatatgttcatacataaccattttaaaaagcagaaattagtaagttgctagagaggcatttaagaaattttaggccaagtttagaaaatacaataataaaaaaggaagaaagaaa

SEQ ID NO: 227168 - DNA, 192 bp, Homo sapiens
ataccaaagacctgcaaaattgggcctcacctgctgcaacctcagcccagacttgtgtacatttcaagggtggctggactcatggccgcctgggacgtcagagtggtacgaagtcctcttaacctaagactgtcggggtacaaggatcagcatttttttcctttctctccagggccagatggtaaatagttc

SEQ ID NO: 227169 - DNA, 359 bp, Homo sapiens
agataagattgaacatccaggaaagcttaagtggcttccactgtggggagacaagggataggggtaggagggtattggaaccagacagaccatggtagtatcacccaaaggtgactattaatgttttagaagtaagagggatacatgatgacccagaggagccagtcctagattcagtgctatttaacacttccatttaatggatagattagagaacaagccattagttactcaaatggcatcaagtaaaaatagttacttgcatattagtaaataagatttcagcataatcttaaaaaactggataactgattaaaacccaagagtagcttaacaaggacaaaagcacaacagtacct

SEQ ID NO: 227170 - DNA, 396 bp, Homo sapiens
ccacggaaggattaaaccaaaagtggaaagagctcgtgcctgggggccccactcccagggaggaagcgttgagcagtggctggaggaagcagcagacagttctggggcacacggagtcccccctcctgcccttctactcctcttacaccagagagagctaacaaggatgcagtggcttaaaaatcctatcaccaagccaaattcagcccttagcatgcctctgaaaccaccgaggaagacttagccacttaccaagaacaaggtaacctgtgttctcccgggtgtaaaccgcgtctctgtgaagggaaagggggaagagggccggcaaggacctccagtatcagcgaggactatcaggacgtccagctaataaacgactttttcactgtccacact

SEQ ID NO: 227171 - DNA, 811 bp, Homo sapiens
tgagaaatatgtaacatgacccaaagataaccacttaattgtcatgtatattccagactgtttatttcctgttcatatagatcacatcttatttttaaaaaatggagtcgccgggcacggtggctcacccctgtaatcctagcactttgggaggccgaggcgggtgaatcacctgaggtcaggagttccggaccagcctggccaacatggtgaaatcctgtctctactaaaaatacaaaaattagctgggcgtggtgacacacacctgtaatcccagctacttgggaggctgaggcaggagaatcgcttgaacccgggaggcggaggttgcagtgagccgagatcgcgccacttcactctagcctggacaaaagagcgaaactcattctcaaaaaaaaaaaaaaaaaaaaaaaaggagttatcctgaatatactgatttgtaacttggaattgcactgttctgtaacttgtttttttttttcctcttccaaacaatatgctgtgaacatctttccacatcagtaaatattctacttagtatcttaatgattatataatgttttgttgaagattgaaccgagatgtatttaattaatcctttatcgttactcatttacgttgtttaatttttttattttgctattgtaagcaatgctaaaacgaatatctttttatgtatgtctttgtttcttcctttaagttcctagaagtgaaattactccatcaaactcattcctggattctcttctagaaagattgtacttatttgtgcactggcatggtctgggaacacctggtttcctatacccag

SEQ ID NO: 227172 - DNA, 201 bp, Homo sapiens
ctccagagactgtgctgggagtggcgaggggttggctggctcttcctccagcttcccaggtactggcgtgtgcagttagagttgatgagactcgggctcagactttaagctagagttgctgctgagtgcctcctggtgcctcacagtggaggccatgatgtccaggtgtcctgccttgagtgaccacagcccatcaggggc

SEQ ID NO: 227173 - DNA, 651 bp, Homo sapiens
cacagcctggggcagcaaggacagcaggtttattccaagacgaaggtggccccactctgacacctatcttcaaaagtgagactggctctgatcccccactctcatgaggtatttggcctctcttgtatcctacgcacgtcatgcctgtgacccagaacccagcaagcccacagctccagccctgcattttatattttcagtctgtgatccacagagatagatgtcttgtttttgagttcagctatgttgttattttatttttatatgttatatacacatatctatcctgtgtatataacacaaaaacaaactttctttttcctgttttgagcagaggccgcatcaatgtgtgaacacatgaaaccatcttgatcccaaatctccttagcctgaagtctcttcagcaaacagaaccatagaatctcaacagtcagaaaaagtgtggaagctagagaaaataatcaacaagaaaaaaggaagggaaaggaaagagcaacatgctcttcgttaaattgaagcactgaaaaaaagacttcctccttcaaagaagtttgaaaacccccttcccaccggctttcttttattaggccctgatttcatttcttgcttttactaaaggtagtaaagaagacggtgtcactgggagaattt

SEQ ID NO: 227174 - DNA, 665 bp, Homo sapiens
aatccaatgggctcatttttaaaaaactgggtgtgaatttatgaccccttgtgactatactcatatactgcattcttaaaaagaaaatatttctttgccaaataattcccttataagcatcatacaacctgttggactaatggagaagttaaaatatgcatgggaaatttaatttttcaaaatttatgttaagtaattttgatcattcctatatcctgtcaatagtggaattgccttttttcttcttacataatgtcaggattgtatatagtagaatgatatcagcaaatatatttcattaaattacctaacaagttaaatatacctattctcatatttcaggattgcatatagtagaatgaaatcagtaaatgtacttaatcatcattcacaatttatatctaacaccaacctcacaacacttgttttagaggatgaccaatgtggtaataatagcgccaacattaccttttttgagttcttaacacaattaaaaaatattactgcttatgaaactaaaaataatttttagaaaatctgtaggcaagtgaacatgatgcttggtctaaaggaaaacagagtgcctaaatcaaggtgggtatgggctgtaataattttgcacatacaatatatgtgggaatatcggtaaaaaaattcaaattctg

SEQ ID NO: 227175 - DNA, 480 bp, Homo sapiens
atgatttgacttgaaattaatggactatgtacagtactactgataatccccagttcaagttaagtggtgaggatagcccccaaaatagaaacttccaaacagtgccagaaactcattttagcctttggttataattttgaaggttatgaataagccacaaactggaatttgaaattttgtcttcgttcagaaatgggaagagagctacagggggtttacatgttcacaaactagataactaatcccttaatgaatcagagttaaatacaattatgatggttccttaaatttatgtgtcctagatattatttacacctttaaatattagttatatgaaaacaaatttcatttactggaaaacactaaactatgaaaacaaagattgtatatctacatatagtagatctgtaacagtcactcttggaacattaagtcagttgcaaaaataaacatgaaatacaacttttgatgctcacaaga

SEQ ID NO: 227176 - DNA, 473 bp, Homo sapiens
aaggagactgccagtacaagaggctttcactccccttgaaggtttgcaggcaggagaaaagagtgacaaagttttttcttcctcctctgttctatgctccccgctgatacctctggtagagcattcacctactgggctgtagcctgttgggtgcattttccccctaataccacaggctctcaatttccagcacaaagctcaggacaccaggaaacatctggtgatggaaggctgaggtcataaaggacagcaatatcccagcccacagcagggtccccacacctgctgtactgcattcactcggtagtgactccatttcaaaaggggcctctcatggggtggccatgaggagctggagcttgtgagccccttaaaatgaaggcaaagtcatatacttcacgtctgcccattgcaagagttcatcaagaaagacagcactggtgtgtattaaaaaaccacaatgtattaagtac

SEQ ID NO: 227177 - DNA, 476 bp, Homo sapiens
atttatgtttataagatgttagatccaggcttaggttgtactttgtgattgtttaagaaagcaaagtaggtttgggcttagtgcattgtttttccatttattactgtagtataatgttacttagatgatatatatatatgtatgtttggagctccatacatgttaaatttcaataataaaggtcgaaacgagactgtatactatcctaaagtgattattactctccaagctgtactgtcttactagtgtgcgtggatgccctatgtgtaaattttgcgtgttgaatcactgaatggtttggaaagtgaccttaaagttgctgttttgtttgtactaaaaaatgacaaagtaggctatatccttatttttatgatatttttgaaattctaatttttctgtttatataacttcaaggtgagaagtagaaattgttatttgggtcaataaatatttcctttaatttaaacatcctaaag

SEQ ID NO: 227178 - DNA, 730 bp, Homo sapiens
gagttagcattggtgtttgaccaagcaaaaggcgcccatccatctatgagtcaagagggccaaacaaatcttcatttgttaaaaactaacccaccagttcctccctctggagacacagaattgctttcctttcctgtagaaattcaggtaacagcagctactcctatcccagaacaggataaagagtctaaagaagtgtttcaaactgaggagctggaacctaaagcaatgcctcaagatcaagttactcaatcaccaaaacacagatttgtatttttgtctgatattactaatgaaccaccaaaaatgttacaagaaatgccaaagcatgccaggtgtagagaaggggattccatcattcttgaatgtttaatatctggtgagccccagccagttgtaacatggtttcaaaatggagtccttttaaagcagaaccagaagtttcagtttgaagaagttaattgtagccaccaattatatattaaggatgttaattctcaagattctggaaaatataaatgtgttgctgaaaacaattcaggggcagttgaaagtgtttcagatctaacagtggagcctgtcacttatagagaaaatagtcaattcgaaaatattggtgaaatttatggaaaatattccagagatcagcaactgcaagaccagggagaatctgtaagggcacatttttatgattatccagctggtccctttactccctggacaaatgtaa

SEQ ID NO: 227179 - DNA, 362 bp, Homo sapiens
tgcacataatcacttctatgtatggctgatgttggttcagtgatggagtataaaatggttgacgtggtataactgagagtgctttgatgcagtagaaaaaggcaggggactggattctgaaaaacaagtggtaggtgaatcttcttgtagagcatgtgcctgcagcaccgagcaatgccgcctgctccgggatgtggggaataccttgcgcaggtggttctgcctgtgtccagagggcggccagggctggcatcggactcttccactgtgtccggagatttgaagagggtgggagtgggggttccttccgaattcctgcaggtgaacgtttaataaagtgtatcttttaaaagaacagcatc

SEQ ID NO: 227180 - DNA, 2394 bp, Homo sapiens
  misc_feature (49)..(49): n is a, c, g, or t
  misc_feature (79)..(79): n is a, c, g, or t
  misc_feature (314)..(314): n is a, c, g, or t
  misc_feature (599)..(599): n is a, c, g, or t
  misc_feature (1012)..(1012): n is a, c, g, or t
  misc_feature (1152)..(1152): n is a, c, g, or t
ttgtagagacagggttttgccatgttgcccaggctggtctcaaactccnaggctaaagcgatctgcctaccttggcctnccaaagtgctgtgattacaggcatgaaccatcacacccggccaaaattttgccgctgatttttagaaattgaattattattttagactgaagttgtatctttttaaaatgaaagccatacctccgtatttctaagaaatcagatgggatcatcatcccatcaggtattcactgagctcctgcttgtgctccactgtctgctcagtgctggttctgtattgcggagaggatctaancagaaagtaatccaaagggctacatctgtctttcttaatgacgaaccgacggctttccaccttacccttttggctacaaccagtgggattgactgctgtcttattgactctgtttatctagatatggtggacatattgcccagttagatgggctaagataccgatagccccccaaaatgccagattccagaataaatgaaatcactcagtcattaaggtgatatatttaactgggctggctgggctaatttgtccatgttaccaattattattgagcagacaaantcaggtaatgatggcagcaaaagcccatctggggcctgagactagaggaggaggaggctggccagaccctcctcagatgcgcagaggacagcttcaggataaggagagatcagatcatgcctgctccatctcggcgggctcatcttctctcgcccccatctgcatggtcctcttgattttcttcataataataacactgaaatcctttgagtgctaacattactgtaagtgtcagctgtttatgctgttatatgccttaagttatttcagccttaccacatgcagtgaaggagacactagtattatccttatgttgcagctgaggaaactgaagtgtggagtttaagtaactggcccaaggtaacagatgcagtgatcagaggagcagggacccacagccaggcactgtgacncagagcctgcgctcctcactcatatcctgcttcaggcttcacaggtcttgggaagaaaaagagaacgtttacaccctgaataacattgcaaaaggatagtgcgctgtgtctgccggtcagcagagctctttgatgatatnagtaggagacacctaagcaaagtaaagttgaggtcagtgtagctccataacaaaagatagggaatgctctaggtctcctcaagaaaaatctacaccatggttttctgttttcacctacagcttagttgcccaggaagattcatttattatttatttaagtaatacatcacagggacaagattcattgaagtgaaggtatttcacttccaactgtcctacagggaaacaatgagcctaaataaatcctacaaattctccctggagagggagcagtgattgattcatttttgcatctgtcaaatgcctctatagtccaaagagtgcgttttgttccctcccttaacaagattctcttacctttgttttgttcaggctttattggcgctgtgtgtataaataagattacaatgaatagaaattaacactgtatcccagttttctgagtcaaagccccaattccaaacagaaaaaaaaaatcttgttgttaaataatatatgggtattatttgtcacatatgataaatattgctactcatgcccaaaaagagactttacaactgtccttgtgctagacgaatgactggtctacaggctacagactattcacagagctttggggaagccctgaaactcacctgatagcagtgtccttgggactgaatataaacttctacagttacaaggccttaagaggttacaaagtagagcaagtttggggacttcaaaagcagtgcctgggatggcagacatcattgccgtggtgcaggggcctctctatgatcccatcgctgtgcccccaccgagacccaggtggacagtttggaggtggggagggagctgggatgtgactcagcagtcatgtggggcaaaaccagggtgggggcacgaccctgctagattagcctgaaggtggggcaaatgactggcaccttgtcacaagacattgttgtttttacgcatttgacttgatttcacccttcaggctcagggctggccctgtgaggcctttccactgcattcagttgttctttcttgaatgttagagggaggaagttggagtctctgttctggggaactgaacacaccgcacgcagcccatctggcctgtgccgtgacccacgcagcacaaatcactagttccagcggcgacaacactaacatttatacatcatgcaagttgtagtcttttattttaacttaaactttttattttcaaataatttcaaactcacaaaaagttat

SEQ ID NO: 227181 - DNA, 574 bp, Homo sapiens
gagcagaggaatggtatgatctaacttacattttgagaatagtactctggcttctgagtttagaatttattgtaggggtatgagatggaagcagggagactagattggctatcccatttatccacatgagagatgatattggcttaaaccaggatggtaacagtggaggtggtaagaagtagttgaattagattcaccttttttgtaagtcaaaccattaggatttgctggtgaattgcctgtggaatgtgtgagaaagagaggggggtaaaagggtgaatctaaggtttttggtcaaagcaagtggaatatatagagatgggcaagactgggtgagataggattgtggaaggatgatctcagttttgaacatgctaagtttgaggtatttaactgacacctaagtggatctgttgaggaaacagttggatatacaaatctagtgtttaaggcagacttccaggcttgaaggaaaaatttggaagtcatcacgacatatatgtggtatttaaaattgtgaggttcaaggaccaagccccataccatttagaggccaggaatgtgaggaagaagc

SEQ ID NO: 227182 - DNA, 2137 bp, Homo sapiens
caactcggccttcccagagtgctggaattgcagatgtgagccacagcgcttggctaaaaatatgcagttattgagtatgagtagcttcataaaagaagaaaaatatgtccctcgttttgatcatgtaaacagcctagacctaagaaattgagccgcacataaaatgaatcatgcaattgctgcattataatgaatctcgataccttacattgtttgagctgagaattttatgctagcaaatgtctcaaatgttcatcagattctagcacctctacgatagagcagttctacagagctaatgggcttaaagtgtcacccacctgtgaatgcagagagagggatttttaatgctgtactaaaatttagctgtacattggttttagacacataacagtgaagaaaagaaaaactgcggttatagcctcagttcagataagtgggtgataatttcagtttggttaatttccatctgtgtcaaccaaaattgaaaagctgccagagactccacatgtggagttggaagagtccgtgtacattgtggggagggagcattggtgggaagatggggaaatgaggggctctcagccctgggttattgcttcctgcctgcctcctgcactgtgagcggggagaggtcgaccaggaggctgctcttctgcccatagcggggtactctgacctcttctccctcttcccttctttgccacacatcagctcctctgggaagctgatttgctccagggacaggaggtgggggaaattgcctgttaaccttcccaacacatcacctcaagttaaaattggtggatttccagaatttgtataggatgggaatggggacgacacacttttgagctagtagcttctgctcgtttgttatcccgtaaatgttgtcttcccaaaaggtgattgattggagcagagttagagacattggtgacagcagctaccatgtctctgcctctcccctaaacacctctgcacttttgtaggctcaacaagtactggggagcctgccaccactgtatgcctttgaggcccctgccctgcctccctggctggccacggagctcgccctccctggtagggggtgagtttggaagtgagaggctggtgtgggtctgtcccatgagctgactcacacttgcctcaccacacataccatcagaagacccacgtggtggagctaccgctgctgctccccacagtgcacctaggcaccctcctgtccttcccatggcactcggttgacctgggggttcctgtccaacaggtgaggcctggtgtgcacagacactctgccattgctagaaggaggctgtgccccctgctaagatatcagtaggtccttcacagcctcaccttgttcctcccatttgtttttaaaaattgtttcttatatatacagtttatttagcttacgtaaacatttggtgcacataacttctctcaaagatcatgatgtttcttttgtggttttataaattcttattccatttttttctctttatttccactgttcacctcccattattgtcgaggcatgaagtcagttggaaatgtttttctgagatgtacctgactgactagaattttgagatggaattctcaaaattttgagatggtatttgataggtgcaatttctagtattttgtctccctaaatggctcattaagtgacttaaacactgaggatctgaacagattttgactgcaaagcagattctacagttcgtttcatctaaccgttggaattaaaatggaaaacgttgccagtttgtaaacccaaatccagatgctgtgttaagcatggtgcccaggtggaagcactgcctcttgttcccacgtgctgccacagagatggccctggtggggtgaaatggacggagaacaccgttcacaaggataactcatggtgtgggctccagaagcacatttcactgaaatcctaagaggacccagtctcagttttcattaataaaaaatacatggggggattctagaacctaagagtgttttgcaggaatttaaagccgggagaggagggtggcttgtttcactggtcgcgtgagctctttttttatctgtctcctccagagttgtcagcggcaataaaacgagactgggagtcatcaga

SEQ ID NO: 227183 - DNA, 415 bp, Homo sapiens
caactcggccttcccagagtgctggaattgcagatgtgagccacagcgcttggctaaaaatatgcagttattgagtatgagtagcttcataaaagaagaaaaatatgtccctcgttttgatcatgtaaacagcctagacctaagaaattgagccgcacataaaatgaatcatgcaattgctgcattataatgaatctcgataccttacattgtttgagctgagaattttatgctagcaaatgtctcaaatgttcatcagattctagcacctctacgatagagcagttctacagagctaatgggcttaaagtgtcacccacttatctgaactgaggctataaccgcagtttttcttttcttcactgttatgtgtctaaaaccaatgtacagctaaattttagtacagcattaaaaa

SEQ ID NO: 227184 - DNA, 693 bp, Homo sapiens
agaggaaggaagggcatctgatctagcctggggctcagagaaggatccctgaagagaggccttggactaataaaagttgtgtaggagttatccaaggcaacaaggagtagaggaggagggtatttaagacaatgagaaaaatgaataaagacatggaaatgcaaaacatcttggaaacctctccttgttgaggatgcagacagatccatcccactgccgagctctggctaccctttccaggacaggattgtactcctgcgacaccagtctccagaggcctggtgatattcaaggtcttcatccctctcgggcacgcctaactaacactcacctcttggatgagatgatgtcctcgtgctgcccttctgccgacccttccctgcaatcggccctgacctctcagaatgcagcttgccccagactgatatagctcatccctcattgggtgcatctgtgcccagctaccctggttctgatgaagtaaataggacacatatgtcaccgtggagcctcatgagtctctttagataaagataaatttggaaaattgcaaaactctccagagacaataccttcctaatgatttctgccttctttgacacctcattgcactgattaatggtcattcaaattgatcacctggcatagctcactgtcaaaataaaaaaggacatattttaaaaagtcaggtgc

SEQ ID NO: 227185 - DNA, 514 bp, Homo sapiens
actccaaccagcctgtacactgggaggaatgtgcactgggatggagccatagaagtttgtgtcgtttgcagtggggaggagcctggtccctcctcttcctgtgaggaacctggaattcaatctgtgaggttgttctggagatgttctggggagactgcattaaacacagcttcgcaccattgaataaactcagcaacaagccaatgcataaaagtaatctatgcttcaggtcacagaagcttcaaggggaaaaaaacagaatactctagggccattgttcacaaactcatctgaaaacatcctggaaaaattttcccaaacacatggaaagaaagagaggaaaaaagaagatatctgaataatgtggactagaataaagagctgccaggagctgtttatttaaaaacagtactttcttctctggctgagtccctggtattctctgctgcaatctgtagctgtagaattttgaagaatgcaattaaattcaaatggtttgatgagtaaaaaaatt

SEQ ID NO: 227186 - DNA, 554 bp, Homo sapiens
tgatcctagccaagccccctccctcatctcccattaaagggtccatcttcaaccaaacttaagtctcaataaatatctggacattgtccttccaactctgggaagctgctaagactctgtccttactgcagaagaaaaaacagccttgtaccctggtcttctcaacaggttgttctggagatgttctggggagactgcattaaacacagcttcgcaccattgaataaactcagcaacaagccaatgcataaaagtaatctatgcttcaggtcacagaagcttcaaggggaaaaaaacagaatactctagggccattgttcacaaactcatctgaaaacatcctggaaaaattttcccaaacacatggaaagaaagagaggaaaaaagaagatatctgaataatgtggactagaataaagagctgccaggagctgtttatttaaaaacagtactttcttctctggctgagtccctggtattctctgctgcaatctgtagctgtagaattttgaagaatgcaattaaattcaaatggtttgatgagtaaaaaaatt

SEQ ID NO: 227187 - DNA, 488 bp, Homo sapiens
ctgtttattcaggggaaagttggagaagggagggcgagtttagcagaaaagctcgagatgcctggataacaaaaagtttgcgctcatacttccttcgagggacaatttgctgaatatttacacacctttgcgtgctgcgaggtctttgttggctactgggatgcgagatgtgtatgatgtgaatgtgcaaatatgtttgcatgtgcgaaaagtggctgcacatttgtgggccggtgcagtaagtgtgtgtttgtgccggtgacagagagcacttggctgaatgtgtgcgtgggtgcgtaaggcattggtgcacacgggcgtgagtgcgcatgtgtatagtgtgtgcacgtgtcatgtgtagtgtctaagtgagtggggtgtgcatttgcaaaagtccgtgtgtattgtgcaagagcatcgtaaacgtgtgtgagcctgaactcacacgtggttttgtgtgcacgtgtgcgtatgaaattcagcaaaaa

SEQ ID NO: 227188 - DNA, 455 bp, Homo sapiens
aaaatacaagtgggaaactacactcaaacccttggatcaagcctcagtcctatgcttctgaagcaaatttcttgtttttggagtctggttttcaaccactgtagactcagatcatttattcttcaggcccccaatgggatcatcacaagcactttttctatcaatcatggcagtcacttgagatcaaaggtgaatttcttcttcctcaagttataagcaacactttggcatatttggtgaacttcaaagaaaatggctaagatagaggatgagagacataagaggcttcaggaatatttcagcagatgcaaagcagactacagggtaactcatttcccatatgatttgattgattgcaaaatgtgaaattaaatgcatacaaaggggaatgtgtgtcatttttcctcttaatgacaaagtaaaaaaaaagcaataaaacaaaaacaagcactatt

SEQ ID NO: 227189 - DNA, 466 bp, Homo sapiens
gactactgtacatccatacaatggaatgttatttggccataaaaaggaatggagtattgatacgtgtcatgacatggatgagccttaaaaacattgtgctaagtgaaagaaggtagtcacaaaagaccacgtattattatatgattccctttatatacattttctagaatgtccttcataatattcatccttctgatagacctgagtgtaggttcaggtctctgctcacataccactcctcagagaagtttcccctgaccacctagccaaaactgtaccctatccctctcagttcctctgcctttatttatttttttcatatcactctaatgttacattgcatacttatttatttggtttactatgtctttctcagtaggatgtaaagctccgtgagggaaaggactctatcccaataatggtgcatggccttagtagatgctaaataaaaatgattttaaatgca

SEQ ID NO: 227190 - DNA, 560 bp, Homo sapiens
cagttatcaacaccctggctttgtattcaagaggactacctcctctcatccgtctttttcataccacagtattgaaggggttgttttcctctttgaagaccttaaacatctcattaattaaagtaatgcttcttccctctccccatatgcatttagggaagtcgctaagcagtgattgaagtagtaaagcttatctaatggcacagcactcctattttgactctgatcccttcctgtatttatttgtaaacattttttcatgtgagtgtgtttgaaattccaagttttagtttcctacaggatgtgaaaaagacctagcagcacgggagataggaatgtatttttgtgcgtctgtctcttgccttcacgcttcccctttgtttttgtgctttgctaatggaagtgatgaatggtgctttcaaaaactttccagaatactcaagtgttttataacaaaattgcagagaaataattcggagaatttttgacagatcttagagtgttttgataggggggttgtaaatattgacattttaaaataaaacttttaaatcagcctt

SEQ ID NO: 227191 - DNA, 423 bp, Homo sapiens
cagtgcagagagctggagtctgagcacagtagggagatcccaccgggctgaggaggcagagatcaggctgagatggctgaaatggcagagaaatggggcagaaaaaagaaaggagggcactatgcaaagagggagttctagaaatctatatatgaaacaaacccacggctgaaggctggagtgatgggtaatttcaagtgtcaacttgaagggaccatggggtgcacagatacttggttgaacatttatttatgggtgtgtctataaaggcatttctggatgaggtagtcttttctttatttatttactgatttttattttttgagatggcctgttgctcgttgcccaggttggagtgcagtggcgcgatctcggctcactgcaacctccgcctcccaggttcaagcgattctcctgcctgag

SEQ ID NO: 227192 - DNA, 601 bp, Homo sapiens
ttctttactttaaattgtttttctttctttttttttgagtcagagtttcactcttgtcgcccaggctagagtgcagtggtgtgatcttggctcactgtaacctccacctctcgggttcaagcgattctcctgcctgagcctcccgagtagctgggattacaggtgcccgccaccatgcctggctaatttttgtatttttagtagagatggggtttcaccatgttggtcaggctggtcttaaactcctgaacccagatgatctgcctaccttggccccccaaagtgctgggattccaggcgtgagccaccgtgcccggcctaacaaaattgtatgcatttttaataaactcttaagctacttcttaggacaaaaatgacagctataaataattacatcttatttaaaaataaccatcttctcataaattttgattgtagaaagtacagtatacttttacttttgcactccctgcctctccaaggccgagattttgcaaaaatgtacctgaggctggagagacagcaaataacagatgggtcctgggctgagatttaactccaaagcaataccatgccacactcacgcctcttgtgaaactgg

SEQ ID NO: 227193 - DNA, 318 bp, Homo sapiens
gaggctaggaagtccaagagcatggtgctggcatcttgtgaggaccttcttgctgtgtcataacactatgaaaggcatcacatggtgagagagcaaatgtgtgccagctcaggtctctcttcctcttcttctaaactgccagtcccatcttaggggacccaacctggtgaccttatctaatcataagtatctaccaaaggccccatctccaaataccaccaacaaatgattttgagcattaagttttcaacacatgaaatctgggggacacaaccaaaccatagcaggaagagagagaaggagatgggccgggaatgt

SEQ ID NO: 227194 - DNA, 755 bp, Homo sapiens
tgggaaattattagcaaataaatatttttcctttaattttttattgtgaaaaaattcaaacatacaaaatacacgagtatgaccagctctcatttatgcatgcctagcttttatttttgttaacatctgtttctccacccagctcaccccactactccataatgataaagataatggattttttatcatttttagttttgattttgcattgggggtggtttactctcttttgtatatgtaggcatgtgcttttcctaagagctttgcaaataaactttttactgtaactttttcagaattaatatgacatgttaatgattattagatctcatctatccttggggtacatggagtcgttccaagagatacacaagcagatatagtttattgacttaagttaaatgccatttccagggtaaataatatgaacaaacaataatcaaatgcctttacatttaaatgaggaagtatgggggagaaacattctttagtcaatgcaattattcaatacaggcatacctcagagatattgcagatcacctaactaaagtgaagattgcaaaaaagcaagtcataccaattttttcgttaaccaatgcatacggaagttgtgtttatactatagtaagtgtgcagtagtattgcatctaaaaaaaaacagtgtgaataccttaattaaaaaatattttataggtaagaaatgctaaggatcatcggagccttcagtgagttctaatctttttgctggtggaagg

SEQ ID NO: 227195 - DNA, 614 bp, Homo sapiens
gatccatgggtggatatgcttagatgggcttatatccaggacaacctgggtactggaaggagcaggatagcactttgagtcagcttcctacattttgatctatgccctttggaagtcgtttcacttctcttggcctatttgcccatatttaaagaaaggggggtggaactgaatgtcctctaaggtccctttgagacctctgaacccaagcttctctattgaatgtaccttcctttgagatgcagttatagcaggcaaactgtttctaaagaaacttaaaaaaaaaaaaaaaaaaacccaacgctctcacattaaaaatatcttaaactacttcaaaaataactgggtttattttctcaatttataacttcttggtggcaaaaatcactgcatctcatacacaagcaatattctgctgcaaatcatttgtgaatggtatttggccttcagcattccgagaaaagtggggttctgagtccaaaacccaatgtgttcccctagtgaggaatgatttgaccccagtcagcttggatcagtcaggcattcagatttcctgagaggaggactcccagaaaccttattagcctaatctgtgagcagcgtgtttatgagag

SEQ ID NO: 227196 - DNA, 424 bp, Homo sapiens
agcaggaaggcagctcttcaaccctaccttaggttggccaccttgcgagaagccagtaatctaaaagtttcagccttgaattttccatgagtatcagcttgtgagaaaaagaggaaaacatgtggaagattctgtgacacgttctgaaacaatgggtagtgacttatgactggttaatgtaaagtgatcttgatcgtcttgtgagatattcagagtagctgtggagacttaaatattttagagttgatatgtgtatttgtgtctaggctggttatatgtttttagaacatttagggaatctggctaattcagaggatttttccattatgccaaccacaagtacagaagtcttgtgagagcatagcaaaagatgatgggcagttttcccttccactttggaaataaagaactttggctgaaaaaa

SEQ ID NO: 227197 - DNA, 435 bp, Homo sapiens
acattcccaagtcgtaaacttgcatatagtctgtccttaagttgctttggaaaaaccaaagagtataggggagtggttcttaaactgtggtcctaggaccagcagtgtcagcatcacttggaaacttgttagaaatacaaactcttggccaagtacggtggctcacgtctataatcccagcaatttgagaggctgaggccggcagatcagttgaggccaggtgttcgacaccagcctggtcaatgtggtgaaaccccatgtctactaaaaatacaaaaattagccaggcatggtggtaggtgcctgtaatcccagctactcgggaggctgaggcatgagaatcaattgatcttgggaggcggaggttgtagtgagccaagatcatgccactgcactccagtctggtcaacagtgagactctgtcttcaaacaaac

SEQ ID NO: 227198 - DNA, 804 bp, Homo sapiens
gagagactcgagggtgtggaaggtgtggcccatatcatcgaccccaaggccatcagcaaagaccacctctacggaaccctggaccccaacaccagggaatggacagatgggctcttcacacacgtgctgagaaagatcatcgacagcgtgagaggcgagctgcagaagcgccagtggatcgtcttcgatggcgatgtggatccagagtgggttgagaacttgaactcagtgctggatgacaataagctcctaactttgcccaatggagagcgcctcagtcttccacccaatgtgagaataatgtttgaggtacaggacttgaaatacgcgaccttggccacgtgcaacaacaacaagctgtcactgtccaatgccatctcaaccgcccttcccctgacgcagctgcgctgggtcaagcagacaaacaccgagaagaaggccagtgtggtaaccttacctgtctacctgaacttcacccgtgcagacctcatcttcaccgtggacttcgaaattgctacaaaggaggatcctcgcagcttctacgagcggggtgtcgcagtcttgtgcacagagtaaacttttctagctgcccctttctgtaatagtgaaagttggtatttaacatttattcatttttaaaatatttggaaggtctgagcttgtgaaaagaaagtggttggtctgaggttggaggaagctgaatggaatctgacggttgggagtggtggaaattggaaggataccaggaggtatttgggaaggccaatggcgtggctcctttgaggaaataaaacactaagcatg

SEQ ID NO: 227199 - DNA, 267 bp, Homo sapiens
gaggtgctgaggatgcagcactaaacaaacatatgaataaatgatgataagaaggacattgattgagctcttattgtgggctaggccctgagctcagtgctgtgtatacagttgacccttgaataacactggttgatttgaactgcatgagtccccacttatacgtgaagcttttttcaataaaagttataccatgggccaggcatggtggctcacgcctgtaatcccagcactttgggaggccaaggcgggcagatcatgaggtca

SEQ ID NO: 227200 - DNA, 110 bp, Homo sapiens
caggagtctgaggtaggaggacgacttgagcctgggaggcagatgtttcagtgagccaagactgtgccactatactccagcctgggcgacagagccaaaccctgtctcaa

SEQ ID NO: 227201 - DNA, 296 bp, Homo sapiens
aggctaggaataaatactagaatttcaataaaacattttcatgaatgtcatgaaaagatctatttaatccaataaaagattctgtgttttaaaattgtatattatttgtgactttctaagtttacaaaccagatttataaatttatcggtgactacaagtccttcttaaagcagattgggacatttcttctgaaattttgagtgctatcaaagttatcacctgtgttttgtacagttcatgtaaattgtacttcttgaaaatttcaaaaataaaaaagtagttactaaaggaaaag

SEQ ID NO: 227202 - DNA, 326 bp, Homo sapiens
atggaaagttgtgaccatcagaggaagatcagagatcaagccttgttgatgtaaaaggaattaaagttgagaaaccatttcctgcaaccagaattgtgaaagcatacaacgtagtaccaaaggaaaattaccgaagcctccttccctgaagaaccttcaggaaggggaggccagccgtctgacgtgatcacagtgatgtcttgccctgaaacaagaagcattcttcccaggtcctttccgccggaggattcttattctgtgatcaatgctgagctatgtggatgagtgtttgcgtggatttcttttaaaactatattgctaaataa

SEQ ID NO: 227203 - DNA, 1694 bp, Homo sapiens
  misc_feature (530)..(530): n is a, c, g, or t
  misc_feature (557)..(557): n is a, c, g, or t
  misc_feature (561)..(561): n is a, c, g, or t
tttttttttttaaatctaagctattcccatcttccccattctatgctggggtgatacaccacaagaagttacaggaacaactgctaaaagaattaaacatcttgggcctttacacagctgttgccatatcatggctttggtgcatggtcggtcacagatgctgtcaagaggcttatgtttagttatccttttgcttccccaacccccacattaaaggtctccttcaccttctctgtcctttttgctacctcccttcttcctgctccaagctcccacaaaccagccttaataaaagaggaaggatcaaggcaacactccacatcagtcatatttcagggcagcttgatgtttgtttgctaatagatggttggtattatctaaccaatagggtgactccaagttttaaaaaacagcaagactaattcagaaataatattatttcttaatttttttaaaaatagagatggggtctcactttgttgcctaggctggtcttgaatgcctaggctcaagcaatcctcccaccttgncctcccaaagtgctaggattacaggcntganccattgcacccgggctctcagaaatcttaaaaaggatttagtttcatttaaaaataacaaacacagttccccaaatctgaaatttagttattgaaactggaccatgttgtccatggaaaacatatcttactttataccagattttaaaattaacactggtgtaagtgcagcctaaaattcctctgagccccacttttacataagaaaaattattgaatatgataaaggtagcatttccaatcagtgagaaaagataggttattcaatttgtgttgggactggtggatatatatctaggaaaaaaaagtacagactctaaatattgaaaggtaaaactgaaaacataaaaatatttgaagaaatcactggaaaattattctacaaactgcatggggaatgacagtctgtgataatagtaaccaagaaccatgaaagaatagattggtaacaattcagctacataaaaatccctaaatttctctatggcagaaaccatgaaacagataaatttaccaaactggaaaaaattttcacaaatcatgtcacaaagagctaattttcttaaaatatataaaaaagatctttcaaagtgtcatacacaaaacactgcttttcgaaaaacataagctcctacaaagcagtaagaaaatgatgaacaaatagaaaaatgggcaaaggtgatgatttaacagttcacagagaaatacaaatggcttctaaaatatataaaaagatgcccaacttcgttcataatatgaaaaatgtaaattaagactacactaagatacaatttttcacagatctgttttctaaaaataaaataagcttgagagagagcctcttatctgaattctgggacagcctgatttgcatgagggaaataggcatcctcctgcactgctggtgggagggtaaaggtacagtctcagtggaggacagtttgctgttacctctcagaattacaaatgcatgtgtttgttttgatgtagcaatttcccatctaggaatttattcttgaaagacagtcatacaagattttcacaccagcattatttgtaatagcaaaaagatgggaaattacctaaatgctcatatataggggactgctaaattgtggaattccatgcaattct

SEQ ID NO: 227204 - DNA, 279 bp, Homo sapiens
tatttggttctgtctttacagctgagaacactgtaactggtaagtccctcaacaacacccgacggttccccaatgcttaatgaatcaagcatacactccttgccctaatattcaatgtccttcctttatggccccagcgtcatttttcagtgtcatttggtgtcactttgtatgtctgccatacatgcaagccagatgaatacactgggctctcctgacttctgcttatgctatctgccgagcaggtacccaaaatgtgttcctcacatatctcagcct

SEQ ID NO: 227205 - DNA, 499 bp, Homo sapiens
gaaaattttgttagaaagttgaaagagtgtgactatttttaaataacgagacgtggggccatagtgtcagcacagtcaaaaaggtaaaaaacatttgtatcttgctttcttccaccctccccttcaattcagatggatagactgcagaagaaaacaagggaagttaacacttcattcagagcttgccaaatgtcaggaacttgctttatcctggaccaggagttctcaactatgcaccgtgggacatctctctgccatatcttgcatcacacttggatggtgtaatggaaataacattagactgggagtcaggagacttgtgttccagcagaagggaaaaagaagtctcagagtggaatattgcaacatcccatattctcccgagaagggctgctggattcccttgctgatgaggaattaccatggggtcaccttgctacatggttcatcactgtcatccctcccttcagaaaaattaaatcattcaaaggtcacataa

SEQ ID NO: 227206 - DNA, 591 bp, Homo sapiens
agcactttggaaggccgaggcaggtggactacctgaggtcaggagttcgagaccagcctgaccaacatagtgaaacccagtctctactaaaaatacaaaaaatttgccggacgtgggggcgggtgcctgtaatcccatctactcgggaggctgaggcaggagaatcgcttgaacccaggaggtggaggttgcagtgagccgagatcccaccactgcactccagcctgggctcgacagtgcgagactccatctcaaataataataataataataataataaaacaaatagaatgtttttgtgtcatgaaacactctagcctctcccccaagcaccctcatgtatagggtgagtccatctaagtgaggccaagccctttaaccaaaacaaacatctttaaataaaattttatttgcttcgtttttggtctacatgggaccaaatatctgaatctaccacatttggataattttgccaatattaccccaaatatatgctggttatctgttcgtatcactaccttgtggttatggtacttgaaggacaatttcgtcactcctaagtcttcatcgtgagcaaggttttttgcatct

SEQ ID NO: 227207 - DNA, 391 bp, Homo sapiens
gaaaagaaaaagaaatgtttctggagttgtttctattaaaagggaaagccttactgaggcctccttaccctctctatctgcctagtataatttctgaataactcctctattaaaagtaccactgaggtgcttaatatgacatttctgatatttcccaatgctcctccacaaattcaatttggaaaggtaatctgttccaggagggcaaaccaaagaaaaagtcctaggctcctgagtcaaggcttgtttctttcctttgtacaagctgactactttttaatcatagtaaaaatgagaaaaatgcaagatgaagttaacagcattgctttatttcccatgaaaagctgttataaagcattctcaaaataaactgttattcagccacaaatga

SEQ ID NO: 227208 - DNA, 363 bp, Homo sapiens
  misc_feature (27)..(27): n is a, c, g, or t
agagcatgaaaaccaaaatccatgcanatgaaatgtaattggcacgaccctcacccccaaatcttacatctcaattcccatcctagcactcatactttatgcatccccgcagctacacacacacaacacacagcacacgcatgaacacagcacacacacgagcacagcacacacacgagcatacagcacacacaccgcacagcacatgtgctctgctcattggtggatgcagctaccagcatggctttaattaccttacagacacacacacacacgcgcgcacacacacacacacacacctcgtgccgttcggcacgagtaccagcagagggctcaccaccaccgacctacgtgagctgcctg

SEQ ID NO: 227209 - DNA, 387 bp, Homo sapiens
tctcaaaaggccacatgtagaatattcaaaaagtgttgaaggttcaaaaatcttctaacattttaaatgcctaatagacataaaacaaaagaccaaactctcctgcctgctcagcagtacatatggcttttgaatagccacactcaaatgacagcccctgttccccagttcaaactttctgagactgcaagcctactttgcaagaggaaaatctccacagctatgtcatctacctgcttatagggtgtaaaattcaatctatgactaacaaatcaatattgtaaattatattacttggatactcatttgtcttacatttatttatttagcctgctctgtgggtcaaataagaggagaatcttaataaacagtcttactactattaaa

SEQ ID NO: 227210 - DNA, 395 bp, Homo sapiens
ttgagcaagccagggtttaaatcctgcctctgctgtgtaacagcaatgaccttggacaaatgacctagcctctctgaacctgagtttcctcacctgtaaaatagtaaaacttcttgataggttggtgaatgggtacaaacttagggaagaaataccttctaatgtttggtagcagactagggtggctacagttagcaacaatatattgtgtatttcaaagttgctagaagagagaacttgaaatgttcccaacacataaaattataaattctcaaggtggtgaatacctcaaataccctggcttgataattacacattctgtgtatataaaacacattcatatgcaccccataatatgcaaaatttcatgtatcaataaatgaaaaaaagccaga

SEQ ID NO: 227211 - DNA, 547 bp, Homo sapiens
ggggtgcggcccacagctcagtcgcgccagcttgggtaggacggaggagcaaggagacacggaccgctcggccgaggccgcgccgcctcagagcgcggagcttgttttggcaaaactttgaaaagaaaaggactccgattacctgagcggcgcgggcgcgggctcgtctgcggtacggctgccgggccaggccggattttcagcagccgtaaagcgggagaagcgggcgcgagccgcggcgcgaaccctcgcccccgagcggcggccccggcgcctccgccgcgagcgtcagccgcttggcaaggaacgggctgggctgagtcataataaaagacgcgtttgtcgagccaagtgggaagaagagccgcgggcagcagtgttcaatggcacaagcctcaaaaattgggaaggattttttttttaatgggcaaaactggaaacttgcccccatggtgcccatcaaaagatatgtttcgtttataatttgcatatattttatacatagtctttgaatctaataaaacttttaaaagaatttttaaagccc

SEQ ID NO: 227212 - DNA, 333 bp, Homo sapiens
aatctatcttttcacagattgactgtcaaatgcattctgatgggaaaatgaatagtaaaaaaagacataatatactgacattgagcatattttatattgaacaagactgtttaaaattcttcacatagcatgttcaggctgcattttaattaaatgccatgcagaagtgctcagcttttgaaccatgtaatattcccaggacaatagtaaatttccagggaaaatttgaactgctaaaaagttatttctgaaattgtcctctgttatttattatttcaatgtaatgaccttgccactcaaaaaaatccattaaaatatttttctctcataagt

SEQ ID NO: 227213 - DNA, 738 bp, Homo sapiens
aaagaatagcatgggaaatacctgcctccatgattcaactacttcccattgggtccctcccacaacacatgggaattcaagatgagatctgagtggggacacagccaaaccatatcaaaaggatatacaaaataaccagaaaacaatgaacaaaatgacaggaataaatcctcgcctatcaataataacttcgaatatgggttaaattacctacctaaaagatacagtcaggcttaatggataaaaagtgacccaacatcacttcccttgtaaagacacacacagactgaaagtgaagggatggaaaaagatataccacacaaacagaaatcaaaaataatcaggagtagctaaacttacatcagataaaacagactttaagtcaaaaactgtaaaaaggacaaacaagatcattatatggtaataaagggatcaattcagcaacaaagtataacaattccaaatatgcatgcaaccaacacaagcgcatccagagacatatagcaaatattattaaatctacatggagagatagagtccaataaaatgatagttgagaacttcaatatcctactctcagcattggacagttcatctagacataaaatcaacaaagaaacattagatttaagctgcactttggaccaaatggacctaacagatattttcagaatagttcatccagcagcagcagaatatacaatcatctcatcaacacatggaatattctccaggata

SEQ ID NO: 227214 - DNA, 1742 bp, Homo sapiens
caggatattgagaagcgcacagttttcacataaaccaaaggggcagaggaaaaatatggggaatctgcattttacataagataacagacaaaatggggtagagggaacaatcagatatgcatttgtgtctggcgagcagggtgactgcacatgtaaagataagctatcaatttgcattgccatggtgaagttttaacagctcaccaggaatttccctgtgggcaaaatatgggagaggcatgtagcttttcatcttgtagccatcttatttaggaatcaaaagcgggaggcaggtttgtgtgacccagttcccagcttaacttttccctttggctaaatgagtttggggtcccaaagtttaatttcccttcacagaacacagttttattttataaaattaacaaaaacacacaatatgtagatacatattgataaaaataaaactatgtaaaaaggtaaacaacagaatattcaatttagtaataaaataaccaactgtggatggttatcttgaattgaagggttggaaataagggatacaggaaaatcacacacaataaactaaattggaagatgggcctaatgctaacaccaaaaatggacctcttgacggcagaattgcatttatctatccagcctcaggaagagttacacaacctcaagtttcctcaagtgaggctgtgtgtctatgaaatgtggggcatggagaagcaagcatagcacagttttccaggaggcgctggcttaataaaagagggtggaatgtgaggggccaaacttttcatgtgtagatcccctctcaaactctacaaccagataattcattagtttagtggtgagaactaaaagatgagacatgaaactaaagttattcaggtataattgtaccttatagaaactggacaagggggatgccacttttcccacttatacaatcattcagtgtattgaactaccctgtgaaaagataagtacaattgcattaatagattaagtaaactacaacaaggtatggggtcacacacctgtagtcccagctactcaggaggctgagacaggaggattggttgagctcaggagttaaaggctgtaatgagttataatcatgccactgcactccagtatgcgtgacagagtaatacttcatctcttgaaaaatagagaaaagagagaaagaaattatagcttcaaactctatgctattttgaagacataaagtaaaatgataaaaagagttgaaaataaaggagtggacaaagatacatctgaatctaatcaattttttgaacttttattttaggttcaggggtacattgggtatattttaggttcaggtgggtggagggatgtcctttagttctgtcctttgtccagtacccatgaagataagctgttaatttacattgttagggtgaaattcaacagaactattttagggtacagatatcaaggtccacaagaaatttccttgtgagcaaactgaagatggtatatagccttttgtctttgtagctctctatttagaggaaaaaataagaggccattttatgtgacttgggtccaagcttgacttttcccttcaacttagggaatttggggtcctagtatttttatttgcccttcctagctgttatatgtaagttgctctggtgatttttcctgaagtttatattgcctaacttcagttggcagggctttaagaaaaagcacaattttaatctttagtgagtctaaccaagaaa

SEQ ID NO: 227215 - DNA, 679 bp, Homo sapiens
ttgggtgtcacctaggcaacagactgcttccgggagagaaaagggaagcaatcagcccctgaaaccagcagttgcttatctcctcctacgcaatggcctccccaggcacacagagtggccagtgttgctgggggcagagccatgagggggtccagggagcagagccaccctggctagctctcacctgaggcccagtctgcagacctgtgggtgcccttctgcagcaccccttccttctgagcaccaggcaagcgcccgttctgggagaaagctggccagggctgccatgaacacatcagggccagggcgcaccttgcacccaaggagaaggccacccttgaaggtcaagctttcccatgagtggaaaaccagattttctccactaccattttccagactatgcttccctctaacaagatgtcccgcacaatctgtgccatctgacagtagctgaagctccccgcccccaaccctcagtgcacgaagcagcacacacccacagctagaggttcccagacatacctgcgcaaaggcattctggaagaggaggctgtgggatgccagttggtcaatgtttggggccttcactagttcatccctgcaacttgaaaggataggacatgtgctttggaaaataacacctgtagccagccacagtggctcatgcctgtaatcccag

SEQ ID NO: 227216 - DNA, 444 bp, Homo sapiens
cagataccttcaattatcgcacttgtgttaccgtggaaacccaagtccatcctttctttctgtaaaaggtgttggaaaaggtggtatgaagtgggaaaggtactgtattctgggacttcctgacaccagcaagaagcaaatatgcagataatttaatagaaacaaattagtagaggatgtttgtaatgcgaggggtacttttcgactgtaaaaccctgattcctaatgcttcttattaaagcctgcatgcctctgattaaacataaaggggaagggcatgtcaagtacatttagcacctgtgaaacgctgctggcaagtataaggagagcagacgatggtttcttgacctgtgaggctcctaatacagttgagaatctgcagtatatatgtggagtggaaaggaaggggcaaaataaactttgttcttcctttaaaaaatgtga

SEQ ID NO: 227217 - DNA, 941 bp, Homo sapiens
ctatgggatctgcactaactctggttggtgtcagaattgaactgaattgcaggacacccagttggggactgctgagtattggagaattgcttgggggtcggcgggaggaaaccacacatctggtgtcagagctgaagcactgagtgttgtgaatgagagtggagagatagagtttgttttgccttatgcaagaggactctaaggagtatagaaagagcaaatatgagaagcagctactttagaagaaaacataggaggaaagcttcgtgacattggagttggcaatgctttcttggatgtgacaccgaaaatacaacaaaagaaataaatgataaattggacttcaccaaaacttaaaacttttgtgcatcaaggaatactaccaatggcgtgaaaaggaaatccacagaatggaagaaagtatttgaaaatcgtatatccgataaaggactagtatccagaatatataaagaactcctacaactaagccacaaaacaaaaaaaaacaacccagtgaacagacatttttccacagaagacataccaatggccaagaagcacaggaagagatgcgcagtgtcactaatcatcagggaaatgaaaatcaaagccacaataaaatatgatttcacaccctttaaggtggctgttagccaaaacatggataacagcaagtgttggcaaggatatggagaaattggagccccgtgcactgctggtgggaatgtaaaatggtgcagctgctgtggaaaagatataacaattgctcaaaaaattaaactcagaatgaccataacatccagtgattccacttctagatgtatactccaaagaactgacagcagggacttgaacaggtgtgctacattcttgtttgtagcagcacttttcccataaccaaaagatgcaggcaacccaggtgtccaccagcggatgaatga

SEQ ID NO: 227218 - DNA, 483 bp, Homo sapiens
ttgaaccaaggaggtggaggttgcagtgagccgagattgtgccactgcactccagcctgggtaacaagagcaaaaactccataacaacagcagcagcaacaacaacaacaacaacaacaaagaaatatacaaattattgctgctaaatatagtccccgtagcaaacattagcatttagtccttctatctatgtatgtttgtacccatgaaccagcttctcttcagcctgccctaccttgctgctcgactgtggtctctctccctgcaatgagggagcagccggcgtggcatctcattagcagattctatgtgccacacgctgggggattttctggcctcacatttctcttaggttagaatcatcagggctctgttgtgtttctcagtacttacaagattgaaagctcactttatatgtatgctctatgggttttttcctgagaactctggggcaactgagtgttgggccaagttgtgggccag

SEQ ID NO: 227219 - DNA, 492 bp, Homo sapiens
atccgtgcttgaatgttggggtacaatgatgaacaagcacactccctgcatcaaggtgctcatcagacaggcggagcaggcacctgcaacatagtatgctgtgggaactctcggcagaggggttctgggggctttcctagggaagctgtagctaagttttagcacagctaagagatgttactgagaaacgattactcaggagaggggggctgtcttagtcttttcaattgctaaaacaaaataccacagtattgtggctcataaacaatagaaatgtatttctcgcagttttggaggctgtgaagtccaagatcaaggtgccagcagatccagtgtctgcggagggcctattttctggttcatagatggtgccttctcactgtatcctcaagtggtagaaaggacaaggcagctttctgaggactcttttataagggcactgtcccattcataagagctctcatgctcgtgatctaatcacttcccaacgtt

SEQ ID NO: 227220 - DNA, 396 bp, Homo sapiens
gtggtattgcaattttgtatgtagcatgaccatttttaaaaatgacatttcatagtgagtgattcagacacctatcattcagcttacctgccggggccctccaaaatgagcagaaggcctctgtctcattctagaagcttgaaggtctccacgtggtttgcccaggggcccacaacctccctgcagtccaggagtgctcccattaaccccagctgtgtgattcaggccagattcttaggactttttaagtgaaatgggacagaaaattgcttgatgtattttgccacatgaagtacattttgctgccgcttagttctttattgtcgttagattaaaaactctcctaacgttgtgtgggtaagtaaaaatctttttatttttatctggtatgttttg

SEQ ID NO: 227221 - DNA, 422 bp, Homo sapiens
ctgtatttaattttttaggagagtttttatcatttagaagaatcacaaaaagacaagaacattgcagacggtacagaaagtctcatttttatgtgtatacaaaaatatatgtaaatatgctacttttaataaaaataaagtatatgttgttttgtaaccctttttttcacttaatatatcatgaacatctttccatgtcattgaatacaggtatcccttgctatctgaatctacttggtttctgagtcagggagcttgagttcaggtagaaagggatacctgtacttctctgtggcttctaatagctgcacaatattgcctgtatgaatgcattgtggtttagttaacagacctttgaatattgaggctgatagtaacttttctctatttataaataaactttgtatgtgctaataaaaaaa

SEQ ID NO: 227222 - DNA, 357 bp, Homo sapiens
ctctctccacactggctctctctctctctctctccctctctccacactctctctccacactggctctctccacactatatgttgttttgtaaccctttttttcacttaatatatcatgaacatctttccatgtcattgaatacaggtatcccttgctatctgaatctacttggtttctgagtcagggagcttgagttcaggtagaaagggatacctgtacttctctgtggcttctaatagctgcacaatattgcctgtatgaatgcattgtggtttagttaacagacctttgaatattgaggctgatagtaacttttctctatttataaataaactttgtatgtgctaataaaaaaa

SEQ ID NO: 227223 - DNA, 443 bp, Homo sapiens
ccgcaccacccccttttcccgtgtcggctcccccttcccctcccgagaccgcggaagctccgacccccttccctcgctgactgtccatccccaggacccccgtccctgtgtgtggccagtcccagcggcctctccttcgcggcctcccttcgccttcgtggccagcgtggtggagcactcccgccccccttttctccgtacccccgcgctcccttatgttgtcccttcttgtccctctctaagtccctcccacactatgcccccccgcggtacacacacacccctccccgcgaggcgtcccccggcgcccctcccctacccccgctcgtctatgcccctcccacccaccccgtccttttgtctcctctttggtctctaagtcccccgcccctccctcgctcccgccctcactcccccgagcacgctcttatcttccccaggtc

SEQ ID NO: 227224 - DNA, 483 bp, Homo sapiens
agtttcattctttctttcaatgtggttgccttttgtttttatttttatttattttttagtgttacagtattaagcagatgggaaaataatttgtcatactgctataaaaatttgtgaacattttttctctgtttttgctcttcctttatggtggaccattataaaacagttcatggacacacggaggtccactgtctaatatttgaacttcactgttctaatgtatttttataggtcactagtgactgtacacacacacacacttttctttttaagtgagtgaggaaaggtaaagataagaagttattcaataggcatagatgatttaaagtattaaacatgttttgaatatatccatatattcagtattgaactttcaatattatgttaaggcccattcactgaagcaaaatcaataaaacaaacaaaaaaattccttaatgaaaaacaagtagcccttctttcaagatggaatggctgatt

SEQ ID NO: 227225 - DNA, 410 bp, Homo sapiens
gatcctctctacagttttgtagccagcttttttcaaacacatgcctcagttgtagtggctgtttaatattatgtttttatagttggaggccctactccttaaaacctatgaatgtaaacctcccatgcaagcctgagcactcaccatgctcaccacctgagctcaggtggggaacaagcgaatgagagacaggaccaggtactttctgggtgggacaagttgagagggtctgtgacaggtcacagcagcactagggagaagtgcccccccccaccaaccctgatgtgatttgggtagggatggtgggccttcgccagccacacctgggccattctgtcttcttgccttcctggccttgccttcccctattccagctttctgccaggtaaacagtactttccagcactacc

SEQ ID NO: 227226 - DNA, 450 bp, Homo sapiens
tgtcttcatctccatttcatatatccacctgcctatttggcatcttctcttgaatacagtagtatataaaaaggatactacatcactaccaactgagattcatttcaggaatacaaggctagtttaatctttaaaaatcaatcattgtatgacagtcatctcagacttaacacatctgaatggaactcatgatcctcccactataaatgaaaccatgttctccctgtattagtaatagcagcatccagtgcttcctctacccaaatctagccatgaacaagccctgttgattacctctctaaatgatacctgaaatctgtccacgttctgtctctccactgccacccctagtccaggataccatcagttcttccatggacttctgtaatagcttcttaattatacacctcacttctcttgccttattactatcccttctctactctgtta

SEQ ID NO: 227227 - DNA, 561 bp, Homo sapiens
tgggggagaatatattctttatatttttagctttttcctctttgttttcagagcaaattcacaccatccttgggatttaccctgtctttaatgactaggaaaaaaaataggatgttatgaagtttgtaggtaatataaaactacaagtcagccataaataacaactgtgaatatacagcaacagttgtagggagaggataaaatatcttttgtctaagaatgagttttgtttgttttttgtttgtttgtttgttttgagacagggtctcacgccctgggtgtcagagggagactctgtctcaaaataaaaacaaaaacaagccaaaaaacccttaaatccatttaaatacttacaagttctggtggaaagcagattagctatttgtttaaaatgtggtctggcagcaaaacactgagatttttagatggcatatatagagaaataaaacaagatagattgtttctctcctattctgattagatgacacctggaatactgctttctcttttgaacactttattactttgaaatttgaaatagttcagagagcagtaatgtga

SEQ ID NO: 227228 - DNA, 230 bp, Homo sapiens
ggaccgccagagatggatgcaagaggaagggtgataaggtggcacatcatgcccagcagctaattaacactctggagaagagaagttggagaccctcactgggccttttggcctccagctacgttttttttgttgttgttttttgttttttttttgagatggaaggttgcagtgaactgagatcacacttcagcctgggcgacagagcaagactccatctaaaaaaaaaa

SEQ ID NO: 227229 - DNA, 799 bp, Homo sapiens
atgtgtaatgaaacatgaagacgtcaaatataaaggatggcaattgctcagacttgtcctttgcttgtctagttatccatcaaacactatcagtgtgattgtgccagaaagtttcatgatcaaaaatcagcactgggatgtctgcttgcactattcccaggtttgcttccttggttcttcatatcatccagacccctgaactggaaatatcttgttaactctgcactgtttaatattctttggaaattaaactacttgggcatgtttagagctcaaatggaatctatgcattttgcttgacaaggtcgttggttgctttttagagcttacatattgaaaatcatgtttgcagtcagctgatagagaaatttccgtgtatcaaagcattgttgtgatgaaaccacctctgttgtgaagatcacctgaaataatgtgtgtgagagccctgtggaaaccaaaaagtgctgtgggcatttgaacactagactgttatgattagtgatgaacagcatctcagcctgccaagggagaacatgaaactagagaacaaatttggttccaggagcaaggggaaatgtaatgtggaatctcacagtttggggtttgtaattgggatctgttgctattataagaaaatgtagttcaaaagacacaggattttctgttgttaaaatcaatgaagttaaaagagcagctgcttgtaaaagttaattttatttgacatctgccttggtcccagtaataaaagtgattcggcctgcaagtgttttctatattcggatgtaattcaataatcaaa

SEQ ID NO: 227230 - DNA, 532 bp, Homo sapiens
attaaactacttgggcatgtttagagctcaaatggaatctatgcattttgcttgacaaggtcgttggttgctttttagagcttacatattgaaaatcatgtttgcagtcagctgatagagaaatttccgtgtatcaaagcattgttgtgatgaaaccacctctgttgtgaagatcacctgaaataatgtgtgtgagagccctgtggaaaccaaaaagtgctgtgggcatttgaacactagactgttatgattagtgatgaacagcatctcagcctgccaagggagaacatgaaactagagaacaaatttggttccaggagcaaggggaaatgtaatgtggaatctcacagtttggggtttgtaattgggatctgttgctattataagaaaatgtagttcaaaagacacaggattttctgttgttaaaatcaatgaagttaaaagagcagctgcttgtaaaagttaattttatttgacatctgccttggtcccagtaataaaagtgatagttctgttgaacaacctgttctct

SEQ ID NO: 227231 - DNA, 722 bp, Homo sapiens
caagtagagcttgttatagaggcacttttgtgaaggacacaggctgggattggagttctgggtctcaggtcccagagcttcaagtctgtttacgagtctcttgaaaatgcccacattctttgttctgtacttaagacgcttggataatcaaaactgccaaagccttaatgaaaatatttgctttgtcttacttttaagatgtttaatgcatttagtatggccctcacttcaagccttctggaatatttctcaaagtattcaagtagtttgtttcataaaagtaggccaaagttgatatcttttgtgtagaattagtcaaacagaaggagccaaagtaggtgtttgaatttgtataatctttgtctaatgcttatgacaatgcattctgtttttaaaattgcctgatttatgaactagtttgtaaataaagtataacgttagtttcagtggaattcgccaatgctgcagttttggatttagattctactaagagaaaaacatgtggtagacaagacagaaacaaaatttgtgatgatacctttttttctttacaacaatatattcacagttagtaaaaattgttgatgaagcacaaagttgtcaaactcaaactttaacagtttttttaatccttgtgtaactgttttttttttaaagcatttactcctttctttcagtataatgattattacagagactttattgcagttttttttttaata

SEQ ID NO: 227232 - DNA, 475 bp, Homo sapiens
acaccctcaaatgattggtggcattctgggaatagttagctgggtggagatgagcatgtctcagcagaataatttggtattattagcatgacatttgatattaaatatagtataataatcagggatcactgttacttgactcagagaagtcacaaacttaaaaagcattaaaaccagttaatcccaattagttaaaaacaaatacaagaatgactctggttcaatttgattgctgattagataattaacaattttgagaaataagcttgataataatagttactagagtaaaataggtttttattgttgttgttttgtgtcttttcggagagctgagctaggctggagttgggggagaagagatgctataggtatatgctatactgttttttctctccagaccatgaatttaatcagttactgttgtgcatatgtggaaaattacaaaataaaacattctgtaattgattgaatt

SEQ ID NO: 227233 - DNA, 167 bp, Homo sapiens
tggacgcagagggagacggaagagtggaatccatctgtttatggacactcaagtcgatccctgcaagaactaagcatgaaaggtggagaaaggaagactagcattttttggatgcctactgtgtgacaggtgctttcacttgcctcctcatttaaccctttcagcaa

SEQ ID NO: 227234 - DNA, 472 bp, Homo sapiens
cgagcctgggatgacagcttgggattcgaggaggctttttattgtctgactacagggtctggtctttatttggcccagatggagactttgtgcagggtggagacatgatcagaggagtacatttcaggatgtttatgactctaagaccttcttatgattccaacatcctttcatgctcctaagctcttccatgtgatgctgaggaaactcccctcccctccccagatgtctcctgcagcctcagcccttgagcattttcatctctgggtttctgtgctaaggaactcagggccctggcttcccatcctaccattctgaacatcagcacctttaaaaaaaacccctctcaattcttgggattctgagaagaaaactccttcatcttcccctttctgctctttcctagattttaacctaacttcagctatttcagaacgttttctgttcaataaatgaataattagatcttctt

SEQ ID NO: 227235 - DNA, 432 bp, Homo sapiens
ctttaattgcagtaattaaactatatttacatgttcagaatacttgtaatttagcaaattgcactctctgctctacatttaatcaaacaaccagttccagtatatttagtgtggaaagaagtaatttcaatgttttgattactatagcagatttgacagagtaagtgcccctctagtagagggcttgaaagggaaggcaaacatgaaatatagtcatggttttgattgtcatgtgaatgcctaattacatgttggaggattaactattaaagggtatcatggttgcagttgatgtttagaaacagccggtattacagatagcatagactgtcttttaggaaaatttcacaagaagttttctctttaaaggttgtgagatcataggaaaatttagtgaaaagatcgcctacattgtataattgttattatgtc

SEQ ID NO: 227236 - DNA, 306 bp, Homo sapiens
aattaaagaaaaaaaaaaacaagagtactagacaaccaagagtaaactgctcttctgaagctcaaagcctaatccactgtgtcttcaggtttggggggattcttgatttttaaatttcctttttttattcaaacttacacttggattttatcttcattactacttctaaaattaatgactcctatggtatttctttgggcttccttccccatcagaacaagccagttgttcataagctaacactcttgcatgcgtggtgagatacagagcattctgtcccacccattaaggcacgccatgaagaat

SEQ ID NO: 227237 - DNA, 601 bp, Homo sapiens
gcgtggtggtgcactcctataatcccagccacttgggaggctaaggtaggagaatcatttgaactcgggaggcggaggttgcagtgagccgagattgtgccactgcctgggcaacagagtgagactccgtctcaaaaaaaaaaaagaaagaaaggaaattttgaaaatacttaaaggtgaaaaaacaaaaacataacacatcaaaatgtatggaatgcagcaaaagcagtactgagaaatttatagttacaaacataaacacctacattaaaaaataagacagatttcatggccaggcgcggtggctcacgcctgcaattccagcactttgggaggctgaggcagcagatcatttgaggtcaggagttcaagaccagcctggccaacatggtgaaaccccgtctctactaaaaatacaaaaattagctgggcatggaggcacatgcctgtagtcccaggtactctacttgggaggctgtggtggaaggatcacttgaacccgggaaatggaggttgcagtaagccgagatcgcaccactgcactccagcctggaaaatacagtgagactctgtctcaaaaacaaaaacaaggccaggcatg

SEQ ID NO: 227238 - DNA, 549 bp, Homo sapiens
gagaaacgggagcagagggttggagggcaggaggctcgaccaggagggcgaggccgcagcccgaggctcgtggtagtctgccttcctgcgcctctgcgctgcaacggagctgcaatgcaagacgccttcatttcaatgtcccgggctccaatcccgggttctactccgtgaacttggctaagtcatgcagcttcttgggcctcaatttccttctctggcaatctcgtggatctccgaggtcccccagtctggacttgcgggggcttcgggggacggtcggcctcgcgggtgtcacctcccggcagtaggcagagcgcttccctccaaacgccctcagccctcatctcggcctggagaggaaatgctgctctctatatgacctcttagggctcactgaggggcctaggctgggaggggccccaaagcgacgcctcagactgctggggggcgggggcggacaggagcgctgaataatgaatgagacttaattgggcccgcactgcgcgacggcgcgctaagctttgcaaacagcgtgggcggcggcggccg

SEQ ID NO: 227239 - DNA, 475 bp, Homo sapiens
ccttagaacattattttcctctgaagcatggtttaccactgctgttcacagggtccagaaaattatttggactatgaggctgtgtattagagtgacttaaggagctgatgccctgaaagcagccaatctggctctgaatcccagtgttgccatttcctagcatgtagacttgggtagttaaaccaaaactctgttttcttatctgtacaaacatgttacacggttatgaggttaaaatggaagagtcactataatgcgcttagcacagaacttggcatgtagtcagaactcaaaataccagccatcctttttaaaaatcacatttgtttatcttctgggatggagggattactaaaagtacaggatttcctgcatcccgtttatgatgagatttgtttgatttaccttaaaatgtaaataccttctctttgaaaccctcccaacacaatgaaagtctctgttcccttcctaaggc

SEQ ID NO: 227240 - DNA, 737 bp, Homo sapiens
ctttatcacctagcagatgttagtggctgcaggatgggaataaaagtcaggttgggaggggatatttttagagcctggaacagagagaggtctaagatggttggctcagtgagggtcttgcactgggccctgaagcccggaagggaaggtggagaggagtgcaaatgatgaggaaattaagcctggcttccttcaagaatttatgtaaagctgagaactctgtttctttcttcttcttcctcagcagaaaggaagagagttaaaattagtaaagatttttttatgtgccacaaactttacatacattattttatttaaggcattattttatctccagtttatatttaggagccaggcctttttaattccagaattagtacatgtaaagctgacactctgcagccttttggtgctcaattaatgtctactgaatgaatgaatttattgtagaagtacttgatctcccatttggcataattcttcataaggccatcgtctttagactcagaattcctgttggtactattggtatgatggttgagttgcattcaggattgaattgggctttgcgtgctggtgtaacaacctgatcacctaatatgttattggttcaatagaattcattgagttccgaccattaacttaccgatgagcttttagagcacgaatcaatagtaagttggagattacctgtacgtgaatgtagaaatattataaaatgaaatcgtatgtagttg

SEQ ID NO: 227241 - DNA, 431 bp, Homo sapiens
tatcacaggtgagcaacagaaatgttcaaatacaggtgtgaatcttctgaatatgaaatcagtggtgaaatttctactcgcagtaataaggagacagttgtagaggaagggcaccaccagagtcgtgggtgcatgccttcaccccaggtcaggttcttggaggagagagaggagtgtgtgggtgggagcatggggatagcgtccagcactgctgccccttccagtacggtaagcaccaggctcaggtggctgctgcgtgcttgcagtgtggctctcacagattgagatgtgcttaaaatacacacgggatttcaaagacttgggtgaaaaaagtaaaatatttcaatatatttgtatatggatacatgttgaaataataatgttttgatgtattggcttaaataaaacataatttaacataaaatgtctca

SEQ ID NO: 227242 - DNA, 393 bp, Homo sapiens
tcacagtcacttcaaaagatggaatgacatgctatatcctcacagcatgagatgtttcttaatggttaccttccaatttgctcctttagcaccagctcaggcaaaccaacttgataaaactcacacactttcattggcttctcctccagcagcatttctaataatctatatttaatttcattcattcagaaaacatttattgagtgtctactccttgcaaggtatctgacagccaggaggctagactaggtcccggtacagggtctggtggtactctctgtagctagagtattgataattggaatgagagtaaggtaataacaattaccagttaccattcgaagtagaaataaaataagcccatcaaagttgattttttttagagaataatgc

SEQ ID NO: 227243 - DNA, 2037 bp, Homo sapiens
  misc_feature (1367)..(1367): n is a, c, g, or t
  misc_feature (1640)..(1640): n is a, c, g, or t
cagaaaaattagttaatttttttccttaaacaaatcattacttaagaatttaattgataattcccactgggagaaagcatcaagatgagcaaaaaacaagtggcattttatttggaatatttaagaagtaaaacaattccaattgttagaagagacttgacgtataagaactaagcattaaaaatggtaattaagattaattgaaggtttactctgtgaacgccattgtttcattgctctatgcaaattttgtagagcaaaaaattcattgaccagcagcatcaaaattaactggggagagtgatgccagcaagatgacataatagaaggtaacccactcattacccgccaccccccataacaacaataattctgcaccaccacagaccaaagtctctgtgcaggagcctcaggattcaggtataagattgtgaaaccccagtggatcccaagacctagaggttgttttgagagtgcagactaacaccctagtggctgatctgctgattttgcttctgggttcaagcctggaaatggttccattccccaaggagcttggctaaaaacccatttggtcttgagcctacaaccaaaaccatctgccaaggagtccagaaagaatcatgtacactagtgcctcaacagagagcctcctctgactgctgacaatgaatctgaaagttgccctgtgacttgacttcagcccttctctgctaaagtcccagctcagaactgctcacacaaggacctagagtgagactcgcccatgtcttgcatcctgggagtctgaacttccatgttgtgctctccagcctctgtcccataatagatcctgagggaagccagcctcagttctgacccctctgcagtcagggaactagcccatctgtgcagagacttgctgggagatgcacactcatctgagccaataagataggcttgccagctgccttctgcaggagatccaagggtccccagtctcagccctggcctcacctgctacaatcaatgaactacctcacctgtccagggactgtaggagatggacatccatcttagctaccagaacagtcttctgggtttaggtttctggccagatttttcatacaacctgggtacccttctttggtcttccccaggtctatctgggctagaaagctgcataaatctcagagctctcccaagactcatagcaaacctgggcttagcatgccctttaatgctctaatgctgagacagctgtactggtcttgggctcagggaagacaacagtcagtctccttagagtctgtggaagatctcctgaagaagaatggatataaacaaagccagattggggaaactagaataaatgcctaatccgtcantgtgcagacattgtcacacatccacaagcatcaagaacatttaggaaaatatgaccttaccaactggacaaaatgaggcaccagggactggccctaaagtgatggggattgtgatctttcagacaaaaaatgtaaaatagctgttttaaggaagatcaatgaacttcaagaatatacagaaaaacaattcagaaatttatcagataatttaatgaagattgaaataataattaaaaaaaccacaaacatgccggagttgaaaaatacagggancataatgaaaaatgaaatagagaccatcaagagcagaactgatcaaatagaataaaaacattagggaactcaaagacaggctgtttggaaataatcagaggaggtaaaaaaaagaatgaaaagacagtgaagaaggcttatggaattgatggaacaacattaaaagagaaaatattccagttgttggagttaaagagagagttgagaaagacaaagcagtgtgaaggttattcaaagaaataataataggactttccaaacctggagaaagatataaatatacaggaactggaagatcacagctaatcaatcagattcaacccaaataagaataccccaagatatattataatcaaactttggaaggtcaaagacaaatagaggaccctgaaaatag

SEQ ID NO: 227244 - DNA, 365 bp, Homo sapiens
aattttttgtgtttttggtagagacaggatttcgccatgttgggcaggctggtctcaaactcctcacgtcaggtgatccacccaccttgacctcccaaagtgctgggattacagacgtgaaccaccacacccagcctgctacagtcagttataatcacaccactgctttccagtctaggaaacagagcaagaccctgtctctcaaaaaataaataaaaagcaaatattacagtggagtgcagtggcattcacttgtagtctcagctactggggaaactgaggtatgattacttgagcccaggagttcaagctcggctgcagtgtgctatgatcgtgcctgcgaataactactgcactccatcctg

SEQ ID NO: 227245 - DNA, 370 bp, Homo sapiens
aaaaaaaaagagagaggacacaaattactaatatcagaagtgaaaaagggaacatcactacagatcttatggacattaaaaggataataaaggaatagtgtgcacaacctaattccttggaagacagtctgccaaaactcaaacaaaaagaactagataatctgaataggctgatatgtatcaaagaagttgaatcaataaataattaacctgcaaaatagaaaacaccaagcccagatgtcttcacaggtgaattctaccaaacattttaggaagaaatcataccaattcttgacaatgttttccagaagatagaagaaggataaatactttctaacacattctgcaaggccagcattacctaataaag

SEQ ID NO: 227246 - DNA, 292 bp, Homo sapiens
taagcctcccttctttcctttaccttccacccaagatgaatgcacgtgatcaagcaggaagtctctggaggatttgctaacgagacacacaggtccccaaagctcagtctttcttcattttgcaagtatgtatttccttcatctgtctgttttctcattccacagttactggaattaaagagttagatcttggggaaaagcaatcaatagcttttttaatgaaaggggacaaatgcaattggtatcacctaaggcttgagaagtagatctctactttctttaaaaaaagctc

SEQ ID NO: 227247 - DNA, 649 bp, Homo sapiens
agaaagaagaaaaatgggaggaggggggaaaggccttgctcagtgcctcaacaataccattctccacctgaaggcagagggcagagaggcagagcagctccaagaacagccatggggttatgagaacacgggcacgcgtggaagagaagctatctgggcctgactgggcccagacacacaaaggacgtacttgtggggagggggtcccccaagattccatttaggaacaagggcaagcttggggaaaaaagccagtaaagacatgagctccatacagctgatgacccacggttaaatgtgcccaattgctagggtaccgggagctggggtcaaaggcgagtgaggacgggtctccaccggctctcatctctgtgaggcacttggataatgaagtgatattcctctgccaaagtccaacagggccacgggcctatcagccccctcctccatggtccagcagagcagaaggctgaggacggagaagttggggaggaagggcgcctgggcaggcacggccgcctcctgcaggctccctgtgccaatcaggggcaaatgaagggcagaaatgtggacacagacagcttgcacctggcaacctgggagcgcaaacatcaccacgcctcgctaacgccaggtccagggtcctccc

SEQ ID NO: 227248 - DNA, 2709 bp, Homo sapiens
atgggggcgtgggccctggcaagtgcactcctcagccaatcagcgtcctgcccggctggtggattcggttacaagcccaagatcaccccatactccagcctctttcctcctcctcccgcagctccattcattggtcccgccgcaccgggcctgctgggctccgcttccgttccactgctcagctgccgcctggtggggccaccaagggcaggcatcccaggggctttgtctgactggactgggccagtgcagaatgggggttcaggcagggctgtttgggatgctgggcttcctgggggtggccctggggggctcccctgccctccgctggtacaggacctcctgccacttgaccaaggccgtccctggcaacccactggggtacctgagcttcctggccaaggatgctcagggactggccctgatccatgcccgctgggatgcgcataggaggctgcaggcatgtagctgggaggatgagccggagctcaccgcagcctacggtgctctctgtgctcatgagactgcctggggctccttcatccacacccccggacccgagctgcagagagcactggccactcttcagagtcagtgggaggcatgccgagcgcttgaggagagtccagcaggggccaggaagaagcgagcagcagggcagagtggagtccctggtggagggcaccagcgagagaagagaggatggaccatgcctggcacactgtggtgtggagttggagattctgctgggaactcctcggagctgggggtcttccagggacctgatctctgttgccgggaacatgaccgctgcccacagaacatctcacccttgcagtacaactatggcatccgaaactaccgattccacaccatctcccactgtgactgtgacaccaggtttcagcaatgcctacagaatcagcacgactccatctcggacatcgtgggcgtggccttcttcaacgtgctggagatcccctgctttgtgctggaggagcaggaggcgtgtgtggcgtggtactggtggggcgggtgtaggatgtacggcacagtgcccctcgctcgcctgcagcccaggaccttctacaatgcctcctggagctcccgggccacctccccaactcccagctcccggagcccagcccctcccaagcctcgacagaagcagcaccttcggaaggggccaccacatcagaaagggtccaagcgccccagcaaagccaacaccacagccctccaggaccctatggtctctcccaggcttgatgtggcccccacaggcctccagggcccacagggtggcctaaaacctcagggtgcccgctgggtctgccgcagcttccgccgccacctggaccagtgtgagcaccagattgggccccgggaaatcgagttccagctgctcaacagcgcccaagagcccctcttccactgcaactgcacgcgccgtctggcacgcttcctgaggctccacagcccacccgaggttaccaacatgctttgggagctgctgggcacaacctgcttcaagctggcccctccactggactgtgtggaaggcaaaaactgttccagagaccctagggccatcagggtgtcagcccggcacttgcggaggcttcagcagaggcgacaccagctccaggataaaggcacagatgagaggcagccatggccttcagagcccctgagaggccccatgtcattctacaaccagtgcctgcagctaacccaggcagccaggagacccgacaggcagcagaagtcctggagccagtgacctcagtttcagctttcctgggcaccagcctggaccttgcccatggctatgccaagccttgggaatctcagcctcccctccgtaggttagactgaagcatggcagaggctgttgtggacaatcaagaggatgaatggggggatctcaaggcccaaatgctggaccacatctcctgctgttctgggtaaccttgagctatgtatgacacaactcttctatgcctggatgtggtgttcaggaagctcattctgatgccctgggctttggccttgccagggaacttcacatacagatgagaatggggaaagggtaacttattgcagcagccccaggcagtaccaggaggaggtacatgtatgtccgtgttgcaaaaataatacatgcctcaaaaacctgcctaggggagccctagtgcctgggtgctgtggcctgaggtagcaggtgggaagttagggatgtcacagaaatgtctgtgtctgaatccaggattggggtgggtgttggagagggctttcagctcccctcctcccaggggggcctctttttttaacggctgccgtgcccttcctggcccagccctaaacctaaattcaaatctcctccatgcctttgcgcaaaggacctccctcttgcactctaagccttagtttcctcctctaaaaaaagggggtctctaaacaggagctacctcatagggttgttgaggattaagtgaaccaatacatatacagtgcttagcacttaataagtattcccccctgcgacacctagctgaactatggtttggtgtctgatcttgagaggttgatgtaaccttttaaaggcctcagttcgctcacctgtgaaatgggtctaagaatagcactgatctcacagggttgtgatgcagattaaaggagatggcatgtgtaatgtatacagctggt

SEQ ID NO: 227249 - DNA, 886 bp, Homo sapiens
tctccctgctagtttagaccagagcctagattctgacccagtcagtacaatgcgagaagccccattctcagcctcaaaggctgggtgcctcactgatgctttggccaaatcacaagcctcagttccctcagcggtgcgtggggatgatcatcctcagtttaacattttttgaatctgctcaatctcagagaccacagtagcaaagaaacatagtagagtaactcaaatcaatctcacaccaaactggtcttgacttgcactttttgaacaccatggagggaacagataacagagctcacagtgactcttctatcgattgatcaatctattgatctatttattatagataaaggtcaaaacaaggtctcacactgccaggttgggaggatagcttgagcccaggaggcagaggttgcagtgagccaaggtcacgtcactgcactctagcctgggcaacagagtaagacaaaaaaatatatattattgaaaatcaacggaggccaaattttgacagggaaggaagtaactgcaaaacactaggcttagtaggtacttatatacatctagtcccagttctctcatttacacacaatggacgaaccctgaagtacagacttaaatagctcagatagctaattaggaaattcagttggccataatagcatcctctctggcctttaaaatacttctatccaaatacatgcttattgtgatttcacctcatcccggggcacttctggccgtcggtcgcgcgggccgcaggcccaacacgctccaaaagggggtgtgaaaaacccggctgttttacaggcaattaaggcgcgttgccggacaaataatgatgcccacaaaaggatttgtccggcggaaacccctatagaggcga

SEQ ID NO: 227250 - DNA, 574 bp, Homo sapiens
tctccctgctagtttagaccagagcctagattctgacccagtcagtacaatgcgagaagccccattctcagcctcaaaggctgggtgcctcactgatgctttggccaaatcacaagcctcagttccctcagcggtgcgtggggatgatcatcctcagtttaacattttttgaatctgctcaatctcagagaccacagtagcaaagaaacatagtagagtaactcaaatcaatctcacaccaaactggtcttgacttgcactttttgaacaccatggagggaacagataacagagctcacagtgactcttctatcgattgatcaatctattgatctatttattatagataaaggtcaaaacaaggtctcacactgccaggttggaatgcagtgcatgatcacagctcacagcagcctcgaactcccaggtttaagctatcttcctacctcagctactcgggaggctgaggcaggcaggagaatggcatgaacctgggaggtggagcttgcagtgagatgagattgcgccactgcactccagcctgggcgacagagaaagactccatctcaaaaaa

SEQ ID NO: 227251 - DNA, 832 bp, Homo sapiens
tttaagtctcctcctcagacagacgtgggaagtaaaaatagcccagcccggtgtgtttgcattcctgagaaaacagctctgtggctttaaaaggcagtgcaaagaatggaggaggtgttatggaaacagtccctcagccatgtagcttgtcatcgttcaattggaagtcctagaagccaggaccttgtctctctcgttcacccacttatcctgcactgcgtttgatgccaggcacattgtaggcaccaagtaaatgtttgttgacttactgctggttgaagggaaccattttaaataagactcgagtcattgggttgacatgagaggttaggctagttggttctgtgtgagcacctcttaccacagttgacacaggagagctgcctgtccagctgacctggatagaaatggtgggcagcagggaatacagagattcagggtatacacgcagaatagtatgatagaggtcggtttatacaaatgcaaatgcagtagatacttatagttacagatagttattcaccgtagttactggacttcgtggtaattaggcatgaatagtaaacattttaaataagcaacaaattgacattccttttctctgcttattttccgttgtgtataaacattgtcagtatacatagtatcctttgcttccatgaagagcccctatccatacaagcatggtacttctaaattgttccctaccagaggagagaactgggatgcagaaagattatctgccttgccctaaggttacacatgaacactgacatttgttcttcaaaacaggtctcctgagctgcacccttaaaagtaatgcattttacca

SEQ ID NO: 227252 - DNA, 449 bp, Homo sapiens
ctttatgatttcgtctcttctatcatttttttggtatagatgggggtctcgctatttggattattgttgcaggcgtgtttggggtttttgagtagtggtagtgtctgaggtcagtcagggttgttctggccccagcagggctcttcgtagcttttcctgtgcaggtgaacaagcctgcggtttcacttgtttctcttaacttagaggagctgttgttcccaagagcagtcttgggctgaactttcaaataaaatgagtttcctcagggagcttcagagctctttccttatggacggcctctctccccaggctgatttctctgcaccacccttctgggcactgggtaagacagcagcctctgatcttcttggcctggctttcccagcatgggtgctctaccctactgttttaacctagaaagcctgaactgtatttaaaacttgtggttt

SEQ ID NO: 227253 - DNA, 359 bp, Homo sapiens
agggggcttgggtagtggctggaggacgatgaggtgatgaggtcgatattgtgtcatgacgatggcgcaggtgaccaatggatgggtgactgtgagttgtgtgtgggtgactgatgtgactgactgtagatgacgaaggtgatgatgacttagaaataaacacctggagcaaggtaaacacggcaggcaatgctcaataaagctaagagtatagattcttatccaaataatctaagaagcaaaatattcctatctggtacccaagggctgtttagctgtccaaccccaaaagctgaaaagctaaacagagctctgtcccatttctttctatttttgcaaaaaagatagatgctctttgt

SEQ ID NO: 227254 - DNA, 224 bp, Homo sapiens
gacaccccagaggagcctgacagctccttagatgcggacagcaagtgctcactgtggcactggcctttctgtgctcctgggctcagagctcttctccctccttccctcctctttcgtaggaagtctcactacctaaaattgtctgtccaataatcaccaccaagatgttacttctgagggagcatacacagtaggtgctcaataaatacttaataaatgaaggc

SEQ ID NO: 227255 - DNA, 224 bp, Homo sapiens
ctcttgcctagataactatgacatccttcactatttatattatttttaaaactctaaacaaataaattgcattattttcatacaatttctaaagtaattttaatgtcattttagccttataaaactcaatcataatgacagaagcaaaaatttatcttagttcccaaaactatagtagatttatttctaggttttgttgtttcccttaaaagatacagaccaaa

SEQ ID NO: 227256 - DNA, 429 bp, Homo sapiens
caatagtaatattttctaaactaatacaatacttgaagaaatttctgttaatgttaatgttattaatagccaataagttaaaaaataaaaggaagagtccattttgggggtgaacaattcattattttctactatacaataatggcttaaaaagataaatttatttttgagctttgatacaactattttcagacttgctttagaacaaagaggtgaatatacaagtaagcttttgcacacatcataagtattcagaagacgttctaaatttagcatgaggcttggtgcggtggctcacgcctgtaatcccagcactttgagagggcgaggctggcggattgcttgagcccagtagtttaacaccatcctggccaagatggtgaaaccccgtctctacgaaaaataccctagaacttaaagtataattta

SEQ ID NO: 227257 - DNA, 505 bp, Homo sapiens
ctgctcaccccctcagcctcatctctaactgccccctctggcccctggggattcagcttgcttgcttcctccaccagtctgacctcagtcctccctccctctgttgtcccctcctcaggcttctgttccattccttagattgtctggggtggggaggggggtatggagggaaaggagggtcatgtcatatgtctggggttcagcaaattgtacccacataccaggcacagaaacatacaaggaaggcacccccgctctgtgggcgagacaaagcagcaatcctcttcccacatgccaacccatctttttctttgccttcacaaacgtgccttttttctttcttctttttttggtcctctgcagcttggaatacatgaggaagaagagtgggagacaggaggaaaggtaaggttgggagagggcaagaggaaaggaggagagtagagggaacactccatcgattgccagcacaataaactgtatcatggactacttcaaactggcc

SEQ ID NO: 227258 - DNA, 805 bp, Homo sapiens
gacaacatggggtttcaccatgttaagacatgcctgaggaggaggagaaggttgtaaggaaattaagaggagacagttagaaacctaggtgttgcgtatagcaattcagctgctctcagtcagcattcactgagtgtccatatgccctgggtgtatctggagacaagtgagacttgacccttgacattaaactcagagtagtggccatcacccaattgccgtcaaccttctgaaacaagagacccctttctcgcaggccaatgtcagtcctattttctaaatgatagattgtgcttcattagcagtttatatgaggcactggagtccttcccaagcttaccctcctgtatcacccaggcccagaaaagccaggccttgcagccaagccaagagccttctgtccatgggagatggatggcctgaaagggacactccaggattgtctggggtggggaggggggtatggagggaaaggagggtcatgtcatatgtctggggttcagcaaattgtacccacataccaggcacagaaacatacaaggaaggcacccccgctctgtgggcgagacaaagcagcaatcctcttcccacatgccaacccatctttttctttgccttcacaaacgtgccttttttctttcttctttttttggtcctctgcagcttggaatacatgaggaagaagagtgggagacaggaggaaaggtaaggttgggagagggcaagaggaaaggaggagagtagagggaacactccatcgattgccagcacaataaactgtatcatggactacttcaaactggcc

SEQ ID NO: 227259 - DNA, 556 bp, Homo sapiens
tctgagccgtaggattagggctctgggtgaggccagagtccctaaagttgtacccatatctgcgtgtttgtatttcctgtttgtaattcctcctgtttgtactttttgtctcttatacggtacacttaaagtttctccacaaggtgtttcagcataaagtactcaaaaactaaaaacgtttaatttcattattaggttaagtgtgtaaaaaatgccccatcaaggttcttgtacaaactcccattattctcccagactccgaagtggcactccagaataattttacgtgggttagcatcttttataaaacgggcaggcagagcggcttatgaaattaaccttggaaaccacgcggccactctttcgggaaatgcctcctatttatgtttacatgggccagcaagagaatccaaggttggaaaggtcattcctcactacagaggctcatcgcaatcacagttccgtctccaaattcgagttttgggtgtgaagagtttataaagtccagccgctgtcctcgcagtgtttggggttagcggagggagagcttgtttgc

SEQ ID NO: 227260 - DNA, 365 bp, Homo sapiens
gtcagaaggttatgatacaccattattcatttttgtattttatccgcaacaaatagctagaaaatcaattcattattaaataccagagacataagagtagagtagtataaaatacaaaactgttttctactaaaaagcgttaagctgaaatatgattagatctctgttaaaacattgggaagtacagttctatttagtacatttttcagctacagttgatgtttatcactaggaaaaaagctttgttgaacctgcttttctacatgggtgaacctttactcagtgggatatttggaagaggtattaaagcgtaaacaatggttttggtagggtcaaacctgggtgcaagagaaggttcgggctcc

SEQ ID NO: 227261 - DNA, 409 bp, Homo sapiens
gcactggaaggtgggggggatcaacattttcaaaaaggtggtcagggtgagcttcgctaaggtgatacgtaaacaaaggcctaagaaaatgagaaccagctatgtaactatctgggaggaacgtttcaggcagaggggacagcaagtacaaaggcgctaggaggaaagagtgactggcaaggagcccatatgacttgagcagtgagtgaggggaaaatagtaaaagtcttgcggtaacagaggccagtgaaagactctgctttaaagccaggcagggggctcacatctgtaatcccagtgttttgggaggccaggatgggaggattgcttgagtccaggagtttgaggttacaatgagctaagatcatgccactgactccagcctgggtgacagaatgagactgtatct

SEQ ID NO: 227262 - DNA, 160 bp, Homo sapiens
ctacttcgacaccgtcatcggaagtcagaagttgagctcctttttgatgtttaaagcctgcataatatttgctgtattactattcagtgtattactatttcctttgtgatggaaatttggtttgtcccaattttctattctattaaaacactgctacata

SEQ ID NO: 227263 - DNA, 412 bp, Homo sapiens
ttgagtactatactaggttcattacatatatttccttttgacttcctgataatcctatcaggtagatattttacaactcagcaaagaagctgaagctcagagaggttaaatacctacttaagataacacagaaagctgatcaccaactctaatcacagtctccatcctgctgtgtgccagacaatgctttatgttctttctatattaactcttctaatctttaactcgtgagctgagtacttttattatccttattttatgatgaggaaattgaagcacacagagattagtactgtactctcctggctgtgtggcagaatccatgatttgaacccaggcagtctggctacagagctctgcaggttgagtatcccttacctgcaatgcttggaactatgttttggacttttag

SEQ ID NO: 227264 - DNA, 444 bp, Homo sapiens
caaaatgagaaatcaaattcaatgatataggtgcatttagtagacttcaaatttaatgttagcgtgtgtggctgttggtggctttttagcagtttactccattggttggctgaaatttggactcattggtggccttcagttaacaaggttgagatggctgaagtggcatgacaggaaagaaggaaaccaaaggctccttttccttagggagatggaaatgttgagtggccttatcatgcatgacctgtgtacccaccccatccccagctatcttttaccagtagacactggcttcactaagtctctgagaaaggcattaatgacaggatcacctgaatccttgaagagctctgtggttgctctgtgagatctgtgttcatctccatgactagcctagggctttgttagttgagaacataaaaattgctgtcttaaattactgag

SEQ ID NO: 227265 - DNA, 803 bp, Homo sapiens
ggaaaaaggcttgcgttttgaaaagcagcttttattcattcacataatctgaaatgcccctggccatgatcaccatcatctttgatgtggcttctgcatattgtctgtgcaacacactgccttccaagagaacggggacgcctacatgagagcagcatggtaaggcttgaaagaaatacttaactattgaacacaatgtcttaaaacagaagctctgcggatttccccctgttgatacaaaatgattcttctcaagagctcacagaaacttcttctcagattcactacacaggtcctgaagggaagcacattctttttgctcgttgtggcatatcttggcagagttccatttaaaatctcaaggaaacttgacacaagcaatggtttaataaatgcattcaaggttagggaaaatattttccagcattactgttgatctcttggtttactacggagaaattaggaatcactaacttcataaaatggttaaaagttctttgtggatgctcataaaatagttcctctgttgcccttcaattcttacattcctagagctccggttaaaatggaagaatggaaaggtaaactaataatgtctctctctctctctttttctctttctgcttttctttttcttaatctctcaaacgaatagatatgcaacacatacacaaatacatctgtgtatagctgtatttttttaaaaaaggatcttaagactcttccaaaaatatcaaacagatacaaaaaagtggatcttgtattaatctaaaactctagagattttacctctaatttatgta

SEQ ID NO: 227266 - DNA, 372 bp, Homo sapiens
agggcaagcaagatgatatatagcaaccaatgctttccttgttgggagaacaataagagtgatggcacctctggcaaactgaagaagacatgccccgtccggagggcacaggtatttctcaggtaaagtaggtgattgccaagtggcaatgtggtcccagtgttgtcagaacttctgttctgctagaagtgagacatttgacttcgtactagaaactttctaatttaaaaatattttctcaaaattgtttaaagactctatgtggtggctcacccttttaatcccagcactttgggaggccaaggcaagaggattgcatgagctcgggagctcaagaccagcctgtgcaacatagtgagattgcatctctac

SEQ ID NO: 227267 - DNA, 517 bp, Homo sapiens
agcagcctctttatttgaccatctagagtgaattcaagtatatatccataaaagatatatgttagttgtctctttatttgaccctttattaggaatatgcagatatagtgaatacatttttaagagcctatccctaatgacaccaaaaattagaatatgcctgtgtttatttctttttgcattttctaagaggtaatgtttcatccttaatacctagtatacatctaatcaaggataacattcatcatacaaccacaataagattttccagttctttatatttctttcttactttaagtcctttttctgactttccttcacaatatcctacttttttctccacagtattttattttattgtcatcacctacctttgattttattttcctcattcattcccagatgttttatagacccatctatgtgagctattttgtcagtctctacattaaagggacataaaaaatgaagcccaactgagaacatcttcataagccaatagcaatttcacccccta

SEQ ID NO: 227268 - DNA, 479 bp, Homo sapiens
tgtatacaagaggagggtaagaaagggaatacaaagcagtaggaagaaacttctagggatgatggatataatcataatcttgatggtttcatggatattaagatatgccaaagtgcaccaaattgtatcataaagggtcaacatatcaaattaaaaagtaaattgcaaaaggatgagtacttgtgtttttaaggacacacaagactgttaacagtaatttcctctgggaagtgactggaaagattgagggcagaaggaaagaggcttttacttttccttaaaccctctgtactgtattttttgccacaagaagtgcttttatagtttaaaaaaaatttttttttagttaagagtgttgaaggtgttgctacctgtagaatttaaaatcaatgcaatttctgatggaataccatgcatttatttcttaaatacagtaagtctacacatattctacgtgaaaagatgtctacaataataag

SEQ ID NO: 227269 - DNA, 462 bp, Homo sapiens
aaaccatggggcagcagagggcagaggagacatgtacagtacactcctttgagctctgtcttttctccttacagaatacccacttggaaaagagaagaagtacataccccttcatcttaggtcatgtctttttctgaggtcctatttcagtagtacagacgcctctgagctgaagagaggtaaagaaaagaacatgctgtctcgcacacaaaatctttgactgaccaccagccacctcccagtatctggagaaattctggcctcacgaactgtccgcaaagtaaaatgtttaagggatcttaacaatattgtaatgatcagttgcttaactgtgtgacagaaatactaatagtaatttgagtaacatgacaaaacatacaacgcatttacctaaatacagctctcaatctttataacttgtgacatgtataaggcagatattttgccttgtttaaatgatga

SEQ ID NO: 227270 - DNA, 371 bp, Homo sapiens
aaggcatggatatgactgcatttttttggagtttaatgtgatgtgggattattatgaatctctaccaaacttattatgtttaatacttttctaaaatatttgcatatctctggcctcatctggaagaacatttctgagttaaaattaataaaaggtgtttttccatcagctatgacaaataaatcaaaagagctggctataccctttgttgaacatgtatgtccaaagaagatcaattttgagaaagttgttgacagatttttagaaggtaaggctgaaaatagcaaatattattatttcttactatagcataccattatatatgttattccctttgtttataattttattaaatatattaatataatcaa

SEQ ID NO: 227271 - DNA, 513 bp, Homo sapiens
atccaattttatttttttattttttggacagagtctcactctgtcacccaggttggagtgcggtgacgcgatcttggctcactgcaacctctgcctcctgggttcaaagtgattctcctgcctcagcctcccgaatagctgggattacaggtgtccgccaccacacccggctaatttttgtatttttagtagagtcggggtttcactgtgttagccaggctggtctagaactcctgacctcaagtgatcttcccaccttggcttcccaaagtgctgggattacaggtgtgagccaccacacgtggccagaatccagttttagatatgttggtttgagatacctgttagatttccaactggaaattttggcagtttggttatacagatctgccaaaatgctgtggagtatttagatgatatttaaagcaatgagactgtatcaaataacagaaagaaaatatagaaaagggaagagggcccaagaagtatctggtgtcctttccagtgtgagtg

SEQ ID NO: 227272 - DNA, 350 bp, Homo sapiens
ttggttttagtgaaatgagttaagtagattacacacaggcaataagtactaaattgatcgggccgggtactgtcgctcgcacccagcactttgggtcacatcccagcactttgggaggctgaggcgggtagattacctgaggtcaggagttcaagaccaacctggccaacatagtgaaaccctgtctctactaaaaatacaaaaattagccaggcaggcgcctgtaatcccagctactcaggaggctgaggcaggataatcccttgaacctgggaggcaaaggttgcagtgagccgagatcgtgccactgtgctccagcctgggcaacagggtgactccctctcagaaaa

SEQ ID NO: 227273 - DNA, 187 bp, Homo sapiens
tatagaaaagtgtttgctgtagtttttgtagtggtggacttattttccttcattgctttcctgtgttttgtaagttttctgtaagtttgtatgacatcaataatcaaaattaaatcatttgctttttaaaaactttgttgcagagcaatcaatggagagaatgtaagagtgatattattttaccatg

SEQ ID NO: 227274 - DNA, 179 bp, Homo sapiens
tctgcaagaaaatgggaggcagaggggaagagcatgcagtcagcacttggtgatccctgagccaaactccacagcctcctgccttctggccggtgacaggtatgccttgagcacagttttggttaatgctggggggttattcctgcagactaggcttagcttcaacagcacgtggttac

SEQ ID NO: 227275 - DNA, 460 bp, Homo sapiens
cagcggggaggagcctggtccctcctcttcctaggtggaacctggagttcaatctgccaggcaggaagcactctaggagggactctggccttgtggagagtccctgtttccttctttttctttcacccaataaaccctgccctcttcactcttcaaattgtctgccagcctagttttttgtggtcttgtgataaggacccagtcttgagctcaactaaggaaaaagtcgcacaacattattatctggtacagtgtctgcctttcaagaaaaataaaaataaaacacgcaaaaaggcaagtgaaacacagtgttaagaatcaaaggaagaatcagaaccagactcagatacaacatagatattggagttgtaagatagacaatataaaataactgtgactaaaatgttaaggatactaaagggaaaaaaaggtaacacaaaagaacagtgatggaagcact

SEQ ID NO: 227276 - DNA, 662 bp, Homo sapiens
ggaaaaaatcgatgaactggataagaaaatagaatcaaatggcatgctcaactgagctgaaggctgtttctttggggaaaatgaataaaattgacacctccctggcaagactagccagaggaaaaacggagggcacagaaacatgaaaaggggcacagcagcgccactcatttagggaaaggccatttcaggccacagtgcaatgccactgcatgactactagagaggctaaaactaaagtaacagtgacaagaccaggtggtaataagaattcagagattcaaacccttgaagcaacagagcaagaccctgtctctaaaaacaaacaaaaaacaattgagcagtaacataagatgtatcgcattgcctttctcttctctacaagaaaatattacatatgaagaggcagctaaagattagacagtcaaaaaatatacaagaagtcttatagaggtggatcaggcagttaataaaaagactatgctttttccctggattctataatatttattgaatgcagccactttcttaaatgtataatttattgtaattttttctcatgctaaatattcattttgattttttaaaattatttttctttttaaaataaatagagagagggtctcactatgttgcccaggctagtttcaaactcctgagct

SEQ ID NO: 227277 - DNA, 661 bp, Homo sapiens
ggaagaacgcatgtggaatacttgacatagagtaagcattcaataattgttagctattaacagtgatacttattaatagctaacacagtgacatatgtgtattcagattctaagccggtgcacccagtcctcccttcacaagaggaaagtgtcagcattgccagaaacattgtatgtcctcagtgctggtggctccagctacctgtcctccccttagcaatttggtattgtccaaacatttaggttttctgaacatgcctgaggcttattttatgctccaaatttgaggcttgagacttgaaccctgccaatgttaaagtctccacttgcaatatgaagttgaataattgcattcctcctctgctccctacaaagaatcccaagatgcctctaaaaggttcctagagcctcagatataattaatagcctagaacttcagagagcagaagtctgaaaggtctctccctgcccacttcttccgtatctcgttcagtatgcaccgctgaaaccttctggactaggcctggtcctgagacagcaccacctctttcctggagggtgagaaatgtgccaaaggtttaacctgctatccactggcccaggcaacaggatctcagactttttgaaaattgtgaggcccctgaggagctgattcagcata

SEQ ID NO: 227278 - DNA, 476 bp, Homo sapiens
aatgtggctatttaaattgaaatttaaatcagttaacataaaactgaaaaaaacttcagcccttcagtctcagtagccacatttcaagtgctcaatagttacatgtgcccagtggctgctggactgggtggtgtagctatagaacttgcccatcattgccaagcctactggtcagcaacttccacgtggagactgaattcctgaaagaactttcaataattggaataaaggttatccaattaaattgcttttgagtggaggttttaagcagatttagatcagttaacaggaaacaaaaaaaaccccccttctttaacatgtgggcatcttcatacagtcctgtaaatttgcaaatatggttctgtaactttaaataattgaattatttgtttttccctgcagagtggcttttgttgtattacttttcctttcttgaatgtcttagggaattataataatgattacctctcctttga

SEQ ID NO: 227279 - DNA, 495 bp, Homo sapiens
tatcactcttttcctttccagagttgccacatgctagaatttggctgatgtccatttgagtgtctctgatgggtgagagaaagtgtgtcaagtctgctaactttgtctttcaatacagagtgtggctgcaaggccccgaggtacactcctctgattgattaacgtgggagcaaggaggcccaagacttgtttatttcttaagccaaataaatgacaaagtaatttgaagtaatgtctagcaactgaaaataacccagattatgtccagatagagagaaaaggctgttttaactggcagttatactggggttgtaaatgtagagaaatacacaaggttatatctggtttcagctgtatctacttgttggttactatcagcagccctagtgagtgggattggaatttatagtacctgatagatggatgcagttggaggttgggtcaaaggtgttgctaccattaaaattcctgaaatccaagaacaaaaagaatctt

SEQ ID NO: 227280 - DNA, 669 bp, Homo sapiens
caatgtcaaatgttcaggtatctaataactaagagatacgaaaaacatgctaagggaaacatatatgaacaaataaaagcaactctaggagaacaatgaataacatctcagctcaaaggaaaattagaattaattactaaattgaaaagacatattaaaataacaccagagccttttaaatgtaggcagagatgacaatgtttgttataacccagcaaatgcagaataacaggtgctctgcgtgatttgcaacatgttcattaaaaaaacaaaaaccagccaggcacagtggctcacacctgtagtcccagcactttgagaagccaaggagggtggatcacttgagcccagcctgggcaacatggtgaaaccccgtctctacaaaaaattaaaaaatcagccaggtatggtggctcacacctgtagttccagatactcgggaggctgaggtgggatgatcacttgagcccagggaggtggaagctgcagtgagctgggatagcaccactgtactccagcctgggcgacagagtgagactctgtctcaaaacaaaaataaaaacttgtcttctttagatgaaaatttaagcaattatttctagaaaattgaagtgcacatgtctaattattagtatatatgtgaggaaaagaagaacatatttgcaatct

SEQ ID NO: 227281 - DNA, 298 bp, Homo sapiens
cgtaagaagttggctagggtattagtgttctgattgagatccagctgacaagctgacaagcatttcctcggggcctgctctgtgccaagcactgtgttgggcagtggggatacgaaaatgactaaggcccagtttctgccctgaaagggttcacagtctggtggaggagagaatacagagaggcgaacatcaatataatgtagacagtgggttctagattctacaggagtagaacctgcctgaggggtcaggaaagtgaaggctgagctggtctcgaaggacaaattggaatttgtgt

SEQ ID NO: 227282 - DNA, 304 bp, Homo sapiens
aaacaatggaatattagttcatagtggctatgaaagcattagtgctgttaatctttgcaaatagaaccactggccttttgtttgtcataatggccctgctattattttccacctggactaatagtctgtgatttttttaaaaaatgtacttaaaaaaaatgtattcagggccaggggtgtggctcaggcctgtaatcctggcagtttcgggggctgattcaggagatggcttgaggccaggagttcaagaccagcctgggcaacatagtgagaccctgtctctacaaaaaacaagaaataattt

SEQ ID NO: 227283 - DNA, 546 bp, Homo sapiens
agagctaccaagtagaaaggttagctttcctgaaacatatccaagtcttcactctatacttatttttaaggtagaactcacaaaactaactctaattctaacccagaacaaaattcactggttcaagaattttaaaatagggtctctacaaaacaacaaagtagctattctagtctattactcagaaatcaaaaccaataccctcctttcattttttagagatcataaaaggaatacaaaaaaattaataaaacaaaataaatggtcattacagaaaaattagaaaatatagtaagggacaaagataaaaatgaagaacactcacaattccaccactctgtgattactactactattttcttccagctttttttctacatacataatttttaaagttttcaaatttgatattagactatatagtttgaattctccccttctcacttaacattatatcatgaaaatatctgtataagtcaaggttccaccaaagaaacagaagcagcagatatagtcagccctcgctatccatgggttccatagccc

SEQ ID NO: 227284 - DNA, 500 bp, Homo sapiens
ctggaattgcgtaatagatgttggttgttggtggatgcagttaacacttacagtccagttactttcttaatattcattcaggtgagtcattcttatgtgaaaaaacaatttgcattttagttgatcatcataaaaaaattatgcagcccacaatgcttgccaagagtgtaggacactgttttcttatttagtttaattgacaaaacaactggagttctgggctttacgggttctcggagtaagggggttagattatttttatagtttagctttccacctggcatgtctcgtttttccattgctctcccctcaacacccctgacccaaatgaaacaattctagtcatcaatttcaaagatgagtttcataaattaaagtttggcatctatcatctacttttatgatattctcttacatttggggggagaattggagatttagttatcagatataatggtcaaatcaagtcagataaaaatgggaaattgtatactattgtg

SEQ ID NO: 227285 - DNA, 405 bp, Homo sapiens
ctgggtgaggaaggcgcgggacccgggtgcgaggactgcgtagcgtccccggctcccgcttccgcccgctttccacgcccacttctgcaagtcccctccggcacctcggcgtccaccggactcctaggggcgagccctcatttccgaggaatgggaccgccttcgtgcccccggggctgccagtccctagactagccctaggggcttctcgtcccggcggagccgggcggtgcctcctgcctgcgcctcgcacctccccgcctggcacggcccacccgggcacggcgccgccacgcgtgaaggcccgcatcggctccctacgtgggggacgtgcaggatgatgcggggtcgggggggatttcgctgcgtcgcccgccccctttccggcgcaggagggagcggccg

SEQ ID NO: 227286 - DNA, 502 bp, Homo sapiens
ctgtttgcagattcagctcccaaatcatcatccttccctgagtgctcggcctgtgctccctcgcctgcctgcctgctgattggctcttgctctcatgtgcacacatgctgtgttacacttaccctaccactgttacccaccagctttccacagcttccctccatcaccacgtgcagcataacccaggccagcctgaggagagttgctgatctctttctctttggtcactggccatccttggaacaagtagctctcacctgttccacaggctggatgtggtttctgtgctttgagagggtcccagcctgggcaacatggtgaaaccctgtctctactaaaaatagaaaaattagccaggcgtggtggcatgtgcctgtagtcccagctactcaggaggctgaggtgggaggatcacctgagcccagggaggtcgaggctgcagtgagctgagatcatgccactgcactccagcctgggtgacagagtaagaccctgtctcaga

SEQ ID NO: 227287 - DNA, 376 bp, Homo sapiens
atgatgctaatgtgcacagtagctcttattatttttgtgtttgcttacttttaaaaaatgctttcccttcgacagacgaactgtaacaggctattatttctcatccttttatttatccctgatggtcagacctgctctctttagcttgtcacaccaatataaagtggtttggaaaatcggatcactgacttattttagaattgtatatttaaaaagaataataatctcagcatagtgatagagaccaaagactgctttttaattttgtgggggagggggtggaattgtttgttatttgtttgttttatgagttattttgctttctttggttttcttgtaagctgatcccatatagatgacttaatcatcagaacag

SEQ ID NO: 227288 - DNA, 453 bp, Homo sapiens
ggccactgggagcccagctccatggattggaggtgaaggagttccaaataaaaaaagaggtaagataattatgacttgaacagacataccaaatgtttctactatatcttatccctctgttactcaatgtgagtgcatactttacattgcctactaaaattcatgttatatagactggctgcggtggctcatgcctgtaatcccagtactttgggaggctgaggcgggtggatcacgaggtcaggagatcaagaccatcctgcctaacacagtgaaaccccgtctctactaaaaatacaaaaatttagccggctgtagtggcaggtgcctgtagcctcagctacttgggaggctgaggcaggagaatgcatgaacccgggaggcggagcttgcagtgagcagagatcacgccactgcactccagcctgggtgacagagcaagactccgtctca

SEQ ID NO: 227289 - DNA, 254 bp, Homo sapiens
cgctgtccgattgcttttaaaaccttaaaccgggtggagagcggtggctcacacctgtaatcccagcactgtgcgagactgaggcaggaggctcacttgagctcagaagttcaataccagcctcatctctactaaataacaaaatatggctcacacctgtaatcccagcactttgggagcccaaggcagggcggatcacgaggttaggagatcgagaccatcctggctaatagggtgaaaccccatctctacta

SEQ ID NO: 227290 - DNA, 474 bp, Homo sapiens
ccccatggccagggtttgtctttccacagctaatggattgttctctccaagtttcttacattaccttttgaagcttatgcccttcctttctcttatctattaatatagatcatttagaaaattggcctgcgtgattctggcattcaaatagattctgtgatttttctttctgacaaagttaagtgattgtaagtactgctgagaagttgcttcatggacgtgccattagtcagagaaataatacctgagtctccataaatgttcggagaagtaatatctgagcttaattgccaaggaggctctccattccatcacgtgagatgcatctgaaaacataatcatccaaaatctggtataacaatagaccttggaaagcctcaataccagtggacatatggctgtctgtacatatttttacattctcagaatattcagacatttggaattagtcaatggaataaacatttaaattca

SEQ ID NO: 227291 - DNA, 1206 bp, Homo sapiens
  misc_feature (1139)..(1140): n is a, c, g, or t
aagatgtctttatggttgaaatactctacttcttcagtgtaattctgtgtataggcagtattgaaattatttgtcccttcagtgttactatatttactcaaatatgtgtgcagtgagggaagtagattgttatttgaaaaagataaaacattggtataaggcaggggctggcaaaatactgcctgtggccaaatcctgcccaccaccggtttttgtaaataaacttctcttggaatatagccacatccattaatttatgtgttttctggccgcattcacaatacaacatcagagctgaaacagagcccttatgtcccgtgaagccaattttctctctggacctttacagaaaaagtgctgaccccagagataaggtaaccttataaattgttgattacacacacacacacacacacacacacacacacacacacacacacacacacacaatttaacaaactaccctgactttttataccttctggttacatttccaggtgatattgtgattcaagagagtgcattcattttctttactaagtctccaaagcactgtggtctaggagcagcaataaggaatgcatagagagttgagacggttgattttgttgttaagtgtgggttatttaaatgtgaatgtgaatttacatgtgtggcaatcagtaagctgcagatagacttctatgcagtctatgatgtcttttggagaccctgttgtgagctgtagcggtaataagagagccaggcatggtagtgtttttgctcctgaaactgctatgtgatctttaagtacatagtagtaagagcctatcaaactgagcttagactgttggtttattattttgtttgtacaacttccttttttataacgaagcagttgacactttagttcttttaagtgttctaagtgtaatgttgaaaatggaaattgagtaaagacaggtggctgtgtatttagaaagtaataagtctccatctctcatcatacacaaaaataacttaagaatatattttaaaaatctaagtatatattttaaaaaatcttctggaaagtgtaagacatcataacccagttaaaaagacaagtgatggccgggcactgcagctcacgcctataatcccagcactttgggaggccnnggtgggaagattgcttgagcccaggagtttgagaccagcctggacaacatagtgagaccctgtctc

SEQ ID NO: 227292 - DNA, 802 bp, Homo sapiens
aggtgcccaccactatgcccagctaatttttgtatttttagtagagatggggtttcaccatcttggccaagctgttcctgaactcctgacctggtgatccgcccgcctcggcctcccaaagtgctgggattacaggcgtgagccaccacgcccggccaaccctggttttcttattgcaatatgcgctcttcatgctatactgatagcaaaattcagttggaagcagacagtagatcagggcctctcaaaaagtgatgtgaacaaaacacagtatctaggtctcaggtcatcactttaaaaatgtcatcacttcaaactagaaaagaaaaatccttaatactaaagttagttaacaaagtgcttcttatgtttgatatataagattctttcattctttactgtggcttgttatcttgactcaagtatcagaaaagtttatagatagctccaaattgtgctaataaagtaattttaggtttaataaacaagtatacaatactattcaaaaaactcttcaagattttcagcactagcatatagaactggtttatagaaaatggcagtggactagaataaagttggaagagaaatgtataaaatgagattacatagtccccaagagaaatggccctagaagtctaacaaaaaaacagtaatacctagattatgatctgcaattcctacctctttacctgacacacagcaaatgcttgataattttttcacctaagcctcaaaatttcaaatctagtatttatctgaaggagaagaatgagaagacctaagaaacaaacgagacata

SEQ ID NO: 227293 - DNA, 409 bp, Homo sapiens
cctccccgagctcggggactgagtggcagcgcgcttgggaaccccaggagccgccgggattggacccgttccccgccaccgttattgcgctcccacgcgcgctccaaaccccggggtgggagggggctggagaaaggacgcgaggaaacccgaagaacattcattttctctttcccagggaacctgggtctgggcaggtcggcaccctaggaaagggggcggagtggggcaatggaaaggaatttcttgggaatttcacgactccaccgccgccccccccggccccgccccaccccaccccaccctacaaggcgcgacccggctgatccctgccctgcaggaacccggtttctcgccagcgaactgctctcagaggctaccgagcgttcccgcctcgccgcaggaactc

SEQ ID NO: 227294 - DNA, 368 bp, Homo sapiens
tctagttcaggcgcgggagtttcccgggtaagggatgtttcgcgcgtcacctcggcgtaggtggctaaaccgcgccctcagagccgagatcccaggctccagcggctcctctccctcagtcctaattcccgagccggggcgagtcgccctcggggggccgcggatggggtcccagactcgcaagggcgcgccctctccgcctcgggcgggcactcggagccgctggaccgctctcctcgcgccacgctgtgcggtggcccaacttctggatggaggagacgcctctctgaccacgaaaccccgcggggaaaagtgacccaagacagtgagtgtgaaattagcgcgggaaggaggagagggcgccccgg

SEQ ID NO: 227295 - DNA, 423 bp, Homo sapiens
atgcagccatgcagcacaaacaagatagaacgttttttgtttggaacctattgaaaaaacaaatgggtagcatttttaaacactcattgattatggcagggtggcatgccccaaatggtctctattgctgaagagtagttttaaactttggccctttaagtatcatagtcaaccaaagaatagtgcccccagaaagaaaagatcgctggccgatcaattcccagatcgtctctttctgagaattaatgtttgcctttttctcccatgatgttgggatagcaaagagaaagattccgatatatgataggccaggtattttagcttaaaattttgcttcttctggggaagaattataacttttcatgtgaaatgaaaagatgatttacttgtatgtaactggatggttgctgagtgtgttaatta

SEQ ID NO: 227296 - DNA, 146 bp, Homo sapiens
gctttgcttgagacagggatcccagttgcactagtcttcaaacacttataatcatggcagcaggctgggtatgcatcttcgggttcctggcagcatataccacctctggtggtagtgagtatgagtgagcttctccttaggcctcc

SEQ ID NO: 227297 - DNA, 443 bp, Homo sapiens
ctttgtgcatgcaaagagacgtacatgctacttcttcatcaagcgtgtacactgtaaaacagaaaggcttttttattttcaaagtttgggtatttacacagaggcccttgcatatgcgtgatcatttcagtggctcatttgtttgtcttgctgtgtataatagtaagacacaagcccctcctgaagccatcggcagtctcctcactgctttgaaagttgatttcctttgtcatccttacttcctaagggttagcctgagtcatccagcatcaggatgccagctttgcgttagaagttaattattcttctttatcatattgaggacacttaatttttttagtgatttactctgctttgtaattatagatgtggtgattagaatgtcttatatttgacattacagatttttaaaaacatgatttattcccaccactgatttaaaa

SEQ ID NO: 227298 - DNA, 416 bp, Homo sapiens
ctcaaagagctcaccttctagctggggagacagcttatgcacacatgcaggcatcggatggctcacggacggcaccatatgcctgccatcatcattattgttggagctcaagtacccaggactgggtaacaagaaaggctttctggaggaggaaaaacttgagctgggcttcagaagaccaagcgtctcagactggaaggggccttggcgatcgtttattccagcagttttcaaattttgtagcctcaggactctttcttcaaagaagctctgtgtggaaaaacaatatataaaacagttttttattattgagacctacttcctactccaagtagcccatgagaagtggagcagaaaccgaaaagagacatgggagttgtggaagagacagaaggcaataggcaggtacggcagga

SEQ ID NO: 227299 - DNA, 497 bp, Homo sapiens
gaaagaacagttcacgggagggtggaggggacactgtgaggaggggactctgacctcaccatgtgcacatgaggggatccagattctcaatgagggagaccctcgcagggcaatgaccttcccctgggtttcaaacccatcaatctcctccatggtggtggcagagaggaactatgcacagtgcagagaatgtcccagctatgagtcatattcccagcagcttttcctgaccattaaatgggtaattctgatggaagagggcaaaatatgctctataaaggtaagcaggcagacagtgcaaaaactgcatttccagaccagcctggtcaacgtggtgaaaccgcgtctctactaaaaatacaaaaaatagccaggtgtggcggcacaccatgggaggctgaggcaggagaattgtttgaacccaggcagggggaggctgcagtgagctgggatcgcgccattgtactccaggctgggcgacagagcaagactctgtc

SEQ ID NO: 227300 - DNA, 583 bp, Homo sapiens
agacacacccaggaatgatactttgcatccttcaagccaatcaagttgacacagtactaatcatcacacctgcatatactgttattttctgtggttgcagtactatagacttttctgaggatcctaattagaatttttaaaaattttacttcatcggaggtgggaacgtggattctggcccttccttgaacaaagaaggaaacggccagaaagaggaagggatgtggggacttactcctctagaggtgatttatcagtttgatcatgttgatctttcatttcttgctgtatctctttttttttttcttttttaactgttgttggagactcacgtttgcctgtctgtaattacaaaccaggctggagtagggacagtcattggccaacctcatagtgggatgaggagagctggtcttcaagccaggggcctggacatatgaagggtaatggtctctgggaatcagtgagcctccttgatccgtctgcagaaaccccttccttctggttccctgctgctgctgggcatcaggatgctctcccaccattcgagctccttgcaaacctcatcctaaccctaaccctg

SEQ ID NO: 227301 - DNA, 405 bp, Homo sapiens
cagcatgtgtcttgtggatcagcagcattagcaccacatagaagcttattagaaatgtggaattgcaggccgtatcccagacctcctgatttcatatgcctttttgtttgaaaaagccctactctaaagcacaatatacattttgatgcttttctcatgatgtaataattttctagtatgtttgtgactaaatgcagtcaagaaagccctcaatttcttatttttctatgttcccttattttaaaataataaataatgaagagagtcttcattgcctgttagaaaacaatcacttatttacaacaatagctttacaagtccagcaattcatctaaatgcccaatttgccctgtagctctacagcatgcccacagagccaacctaggtaagctatattctttatgg

SEQ ID NO: 227302 - DNA, 498 bp, Homo sapiens
aacatatcttttaaagtcaataagaggctgtatgaagtataccgaactgccgaaggctttgttctgactaatatattggaagagtatcttttgtaatctttttgggaaaactctacagttccgtctttcattttttgaaaatgccccatattatgagtacatgaaaaaagtgcatgagtactcaaagatatttcttcattagattagccgtcaaattagtatgttgatgttaagcatatataaacatactatattctgactgaagtggacttactcttcatactaatataaacatactatattctgattgaagtggacttactactcttcactggtttgtaatttgctaaattatggcctagaaaccaatcagtttgcttaatacagtatatgtgtaatcaaagcagtatcagatacactaggcttaacgagaagtggagataagccaggtaaaatacttggcagtgatgctaataaaacctaatttggatttttaaa

SEQ ID NO: 227303 - DNA, 305 bp, Homo sapiens
caaagatgtagatacatagacatttattataatactttttttagtaggagaaaacttaaaaaaacagttttccattcatagacaacatagttggaacatttacaacagtagtaaactataaagccataaaggaagaatgaagtagttttgttgtagctctaaaatatattgttaagtgactagaaaaaaaatcctaaacattatatatggtatgtgccttttatgtaaaacaaaatgcggcatgtttgtttcagtagactcaagaatgaaaagataactgctcaataaatgttcaagtagaaaac

SEQ ID NO: 227304 - DNA, 251 bp, Homo sapiens
tcatatgtgattgttgggtcaatgatgaaattaagtggaaaaaaacccaattttctgaaacacatgaaaatagagacataacataccaaaacctctgggatacagcaacggcagtgccaagaggcaagtttttaaaggattaaatgcctgcataaaaacatagaaagatctcaaattaacaacctaaccttatacctagaaaaacaagaacaaactagaaaaacaagaacaaaccacacccagagctagca

SEQ ID NO: 227305 - DNA, 441 bp, Homo sapiens
aatcattatctggactgactcagttttattgaccagtaagtttagaaaaataatggaattcagaaattaggttaacctttgtacttggagctgagaatagggacctagatgtaaaagatctcttttattctaccttagaacagccaaataaggctcagagctatggtgagcttgtcccaggagtcaaagcccttcaggtgaacagattatcaaatctgggaattagaaggtcttctgttgtcaagtagtcaaactcttcctttcttattaaggcaaagaacattatacactttctgagctagaaaaaaattcattaaaataaaaacaagaatttatttatttatttatttattgagacaaggtctctgttgcccaggcttattaaggcaaagaacattatacacttgctgagctagaaaaaaaattcattaaaataaagac

SEQ ID NO: 227306 - DNA, 467 bp, Homo sapiens
atggaggcttctaaaccccttggaattccctgactgataggggcaagaggaaatcttttgttattcctaacgagcccctttcatccatgcctgtgtttatgctaatgaggtgactcctggaggatgagggctggttgccaggggaatcaactttgccttgcaactttcagctccagtccgtgacttccagggaaagaacaggggctggagattgagtttaatcgccaatgaccagtgatttgatcattcatgcttaaataatggaaccataagaaacctaaagaaaaggtttggagagctgctgggttcaggagcacattcgtgtgctgggagggtgttgtgcctggtgaaggtgtggaagcgctgactctgcctcgcataccttgtcctgtctgtgtctttcatctggctgttgctgagttgtgctgtttataataataaactggtaacaggaagtaaagcaaaaa

SEQ ID NO: 227307 - DNA, 447 bp, Homo sapiens
gaagtgatgcagttctagaagcttctggtggtgaactccacatgcctggaggatggtacatgtcaaactccgtgggaacagaagcccctgaaatcaggccctttcccaacctaggcacctcttcatcgggatgcttgtctatatcctttatgtattatatcctttcgaataagctggtaattaatagtaagtaaagtgtcccttgagtgctgtgagctgtcatagcaaattatccaacctgaggaggggaaccctcgatttgtagccaacttggacagaagcgtggtaacctgagggcccactacttgagactggcatctgaagtggggggcagtcttgtgggatggggccctaaccctgggggggcctgcactaactctgagtagctagtgtcaggatcgaattaaattgtgggacatccagttggtgtccacagagaactggttg

SEQ ID NO: 227308 - DNA, 266 bp, Homo sapiens
tctggctggattaagaaaaaaagggacatagaaacaactgtaaaacatggataaatgctaattaattttaaaaacagagaatgaccataacatcagaatatttgagaggagacactaaatgggaaagtagactgaaatgtaatcatgagtcaacatataatatctctcctaactaagatcctatcagtaaaaaaactgtgtacaatatatcaggtaattagtatttttaaactagatttgtgattgtgcctggaaaaagaagagaa

SEQ ID NO: 227309 - DNA, 156 bp, Homo sapiens
catgaagcccacagaagggagactcatcatcattttcaatgtcgtcattaccaaaagcctttcttatgcgattcattgtgcaaggctgtgtacagaaactgttgaaggatccttttgctttcttgtgacttaaaatccatgacatttcacaatgct

SEQ ID NO: 227310 - DNA, 465 bp, Homo sapiens
tggacaccagtggctactgagcactcgaactgtggctggtgcaaccaaggaaccgaatttttttttacttaatttttattttacttaattttttttacttaatttttattttactttattctaattagctaaagcttaatttttagtagctagtggctgccatcagagtccagcatactttaacatttatattgtcttaatcttttctctttttttttttttaaaatatacacagagacagtgtctccctttgttgcccattcttggcttgaactcctgggctagagcagtcctcttgcctcagcctcccaaagatgggattacgggtgcgagccaccacactctgccacttacagtatcttcttgttttacatgttttctccagatcttgatcctcaaaattgaaaatcagttgtgagtattgcattattatgcctgtaaaaattatccttaacttcacaagca

SEQ ID NO: 227311 - DNA, 875 bp, Homo sapiens
catgacatccatgttattgacttacgaacttactctagcaaggcagtacccaggcaacccacagccattgtagaggtgtggttgtttcctgaaatggcccaatctcatgctcttcctgtgttgacatcaagcaccgacagctttttatgaaagtctctttagccaggaaggctgaagtagtgacacagcagcattgttcagttcggaatagttaacagtggtttcagagtttggctggaatcttgggtcttgatgaaacacattgtacccattcctgtctcaagccaggccctagcagaattagtgacctaaagctttcatttaagtagtattttaatgtttccagacatagccaagctaaagactttaaagcaacctaaagaaccagaggagatgggaggagtacagttcaggagtcggatggctctgagtttaaagccaggccatgctactgtgcagctggtgattttgaataaagcggtgtacttctctgatccttgggttcttagtagagctacctctgagactaatcttgtgagttaagctctgtaaagcacttggcaccttgtatgtcacaaagaaggccttcacggatgcagtggctcacgcctgtaatcccagcagtttgggaggccgaggtaggtggatcacctgaggtgaggagtttgagaccagtctggccaacatggtgaaaccccatctttattaaaaatgtaaaaattagccaggcaacgtggcatgtacttgtaatcccagctactctggaggctgaggcagaagaatcacttgaacctgggaggtggaggttgcagtgagctgagatcacaccactctactccagcctgggcaacagagcgagactacgtctccaaaaa

SEQ ID NO: 227312 - DNA, 478 bp, Homo sapiens
tcgaactccaggctcaagcgatcttcccgccttggcctcccaaagtgctgggattacaggcatgagctatagagcccggccaattctttctatttttattggtttcaataggtaatacacttacacagggtgcaataatcaaaacaacatagagaggaaaagtgggccacattgcaaagtcaccctcccacctgtgtctgcccactgcactcaggggccagcatggttcgtgcttcctgggtgcagtgcgagcgtcgtcctgtgcagcggggagcacacatcagtatgatctagtcctgctcctgtggggctagttcttctccgcagatccacacacctgctctgtgccctggggactgtgccacctggctcttttgccctctggctttcagaggttcagccagttggggggatgggcaggagacgggagagcaggtggcgtgagaggtgggggcccccgtttgatgggagcttctcc

SEQ ID NO: 227313 - DNA, 529 bp, Homo sapiens
cctttcagagaatttctgctgggatttaaatgtatgtctagctggctttagacattagaagactgtaatatgtaccttaataagttgcctttcccatggtgtttgttatcctcagaagacccccatagtgactctaggagacaattctcatatcttctgaactgtgcatgttcatagtttttctgagcagggtttgcatctagcagcgatggaggtataggaggtcacaggcaacactgcgtgcctcacacaacattgtagatcaagacacagttaaatgggctggcaattctgagtttctgagtccagtcccatgactagtatagctgtcagaactagaggggccaaccctgggaatcttggagatgctttatgaatatatgagatttcaggcatccaagctcttctatttgtttacatgtattctcaatgtctatctcccattatcaaatctattccaaaagtattttttcaacacttgctggagactcttggataaagctagtaaacgtgcttttattaagctcca

SEQ ID NO: 227314 - DNA, 199 bp, Homo sapiens
tagttgactggcagaaacagagaaataaaaagacacaggcataacatatatcttctgtcattgccacatggattttacatgaaatagccagattaagaggatgtaaccttgtaggccttcaagaacagtaaagaagttttcccttttctgcactgagctattcttttccccactgccttttatctcttttttttttttt

SEQ ID NO: 227315 - DNA, 256 bp, Homo sapiens
tcatatccatccagcttttcaaacagactgaaccttaggaaaaataatgcagacccagtgggccatcttaaggttcagcggggctctaagggggaggtggcacagagagcggctgattatttgcagggtagggtgggaagctttttgtggtctgtccacacaagagcagcccacttggttcacagtcaccaattcctataggatttggcaggttccatgacttttttttttttttttttgagacagagtctcactc

SEQ ID NO: 227316 - DNA, 293 bp, Homo sapiens
tcttcatctacaaagagagaagctgaaaccctttatatagtgtctgcagatgagagagcttcaaggttttccacagaacctgtttctcttcttcatcccactcaatagactatgtaactctgatgtacttctgtttgtttatgtaagtgggagaagcgttctagtgaccatctattttcaaaaatgaccagatactaaaattgatttgggtatcaccataagtctagaatctctatgctgtactctgtacacaattcttcctagtacttaatagatttaaataaacttttgtt

SEQ ID NO: 227317 - DNA, 462 bp, Homo sapiens
tgtatgatggttttcacggatccattatcttttttgataagaaggctctctctttcccatgttccctgaagattgtgaatgctgtagtcagttatataaagggcatatgatagtaaccctggggccccgaggaggaaggggcaagtatggactctaccagaaaccgggtgctttagtgagttctattttattgactaaagaggtgctacatcaatgcttggggcagctgggaagggtgagaagtaagctaacagtcttgcttagtattcaagaaaatccaaactgtgtctgtttccttccagcactaacaatgtccattgctggatctagcgacattctctaacattcccatttaggtgaaataaatatcaaaaggagaaaaaaatgcctttaaaaatttctcaaagccccaacatataagatctgtgcagaataaatgccaacaactggtcataccgtcag

SEQ ID NO: 227318 - DNA, 447 bp, Homo sapiens
aaataaaaatcttgcataactcactcagactgcctcctaggcccagctcatagaggcctcaacccatattccgcgtgcaggtcatgaggtcagcgttttccctgctccatgggacacagcactgtctgacgtgtaatgcggtttgtgtgtttactttcttgaatgtaggccccgggaggcagggggtttggtgagtcctggtcacttttgtatcctcaatacctagaacagggcctggctcagtataaatgcccaatagttactgaatgagtgaatgaataaatgaatgggttaagatgacacaccaggttgttgcagaattaaatgagataagaccctggaagtaattagcacacagcacccagttggctcctgacatccttaatctacaccttatggcctgagtacaatgttctgattggccagccctgggtcacatgacatcct

SEQ ID NO: 227319 - DNA, 918 bp, Homo sapiens
tccttactggaaaaaccaactgctggggagtgccaagagtccctagcaacaccctgcagcgtttgaaatctgaggggaaaagactgtagtcagcccttagtggatgagagcgcctatgctccagaaacagcaggctcccaggatggacaccccgccccctgaagaacgcttagagaagcaaaatgaaaaactgaacaaccaggaagaggagacggagtttaaggaactggacggtctgagggaagccttggcaaacctccggggactgtcagaggaggagaggagcgagaaggctatgcttcgctcccgcattgaagagcagtcccagctcatctgcatcctgaagcggaggtcagatgaggccctggagcgctgccagatcctagagctgctcaatgcagagctggaggagaagatgatgcaggaggctgagaagctcaaggcccagggtgagtacagtcggaaactagaggaacgctttatgaccctagcagccaaccacgagttgatgctccgcttcaaggatgaatacaagagtgagaacatcaagctgagggaggagaatgagaagctgaggctggagaatagcagcctcttcagccaggctctgaaggatgaggaggcgaaagtattacagctcacagtccggtgtgaggccctcactggggagctagaaacgctgaaggagaggtgtgctcaggatgcctgccaggcacaggcgcgcgagaaggagctgctggagctacagagccagcaggcctgcacccacaccaaggagacagaacagctgcgcagccagctgcagaccctcaagcagcagcaccagcaggctgtggagcagatagctaaggcagaggagacacacagcagcctgagccaggagctgcaggccaggctgcagaccgtcactagagagaa

SEQ ID NO: 227320 - DNA, 446 bp, Homo sapiens
cacctgagcagaacgtggaaggtggatcccccactgtctctactggggaccatcagccagaaaaagtacccatgctggagagaattggagttaagtcaatctggaagttattttctacttatctatctaagagattcaaaaactagtgtttcctcgagaatggtgtcatcaagcacaagataatgaggaagattgcctaattcaggaaaaaatatggagaaataaaaccccacattgcaatcacatgtaattgggtgaaagcaaaggctcctattctctgctgatccactgacagatctctcgtttagatgctctgcttacattacctcatttaaaacctgctacagtaaaataaggtaccatgtatgtagtaagcatttactaaatgccaggtacattgctaaatgctttctgtgaataaacttacttttaattttcacaacaaa

SEQ ID NO: 227321 - DNA, 669 bp, Homo sapiens
acagaactgaaagctactataaaccaggatgtgtgttgatagatgagtgaaaagtggagaaaagaggataaagctccttttacctccattccttattcaggtgaagacaacatcccaaactctaaataaatgttctttcaaagggcacagaaagccttcctaaaacagtcctgataaggaccagttatcacactataggcgtaactccaaggatccctgtccttgaaggcgcatgacatagcctactcagaggccaaaggctcctgggcttctgctaagtcatagctctagtgtctgttgtctctcattctctgtagacgtggatttttcactgttcctctgtctttggcctgttgcagtggaacaacaaacaggaccacaggatgagagccttaaaatacaggccaggcagtggctcatgcttgtaatgccagtactttcagaggctgaggcaggaggattgcttgagcccaggaggttgagacaagcctaggcaacatagcaaaaccctagctctacaaaaaaattagccgggcagagcagcctatagtcccagcaccttgggaggctggggtgggaggattgcatgagctcaggagttcaaggctgcagtgtgccatgattatgccactgcacttcagcctaggcaacagagcaagactctgttta

SEQ ID NO: 227322 - DNA, 556 bp, Homo sapiens
tgagtgaaaatttaagaaggtaaagtatgttttcattgtctcatagcacttccactcatatggtttattaattgcaaagagaaaaagtggtaacttaacagtagagaaacccagcaggtcctcccttaatgagctgaacaaagttaacaacaccaggaaataggacaaatgggtgccaagtgtctcttgatgtgatacactgagaacacagcattgcttctgtagcattccggtccctggaggaaacatcagacaaacacagatggagggaccttcaaggactgacctgaactgttcttcggtgtcaaccccatgatagacaaaaagaggcagaggaactgttccagattaagggagactaaaaaggtgtgacagctggatcaggggaaacgtgccttaaagggcattattgggactgttggcgaaattttaagtgaactgtatattagacaattatcaaggactacacgattgtatggcatcaacctcaaattccccgaacttgagcactagagtcttcttgttctgatggaatatgttctgaatgggttttaag

SEQ ID NO: 227323 - DNA, 512 bp, Homo sapiens
aaaaattgccatagtgaattcacttccaactcagagtgtgatcttaaactcacggggattctcacttctttatgaaagtttggggttggatgacccctaaggctccttcttagcacttttattctttgcttccaaagtagaatcttcaactcagagagtgctgctgatgagtcgatagtactcattttgggctgggtgggggaggagagtgaaatgtctaggagaagtgggatgtgtcaaagccaggaagagagcctcctgctgtattcagcattaactacatactacgtgaaaaatctaatacggttttggtccccctaattttaaaaaagaatgtgaaaaaatcagtaactgctacctggagtgtgaagggaagtctggtggacagggtgagggaattatttatcatcctgctctttgaagtaagcaccatattaatgtcatgtattacctattaaaaatatataaaatgagaaatacatgaagatattagtgaagaaagaggggaaaaa

SEQ ID NO: 227324 - DNA, 667 bp, Homo sapiens
ccagccttcctccaagaaattgagatgcaataggtctgaaatgagagccaggaattcctaagccttgtccacaaagtggatatcacctggcagctggttagaattgcaggatcccagccccacaaagaccaactaaaatagaatcatctgcatcataaccgagtcccagtggtgtgtgtgcattgcagtatttgtgagacactgttggaatcaaagatgctgtaaagtgggtgcaactctgaggctgatttcaccaaagggggaaggagatgagaaatggtgtcagttggcgggtttctgaagcaaaccctacttctcactggatccacagctgcattggaagaaagattccttttaagaagtagttaatgggccgggcgcggtggctcatgcccgtaatcctagcactttgcgaggcctaggtaggtggatcacctgaggtcaggagttccagaccagcctggccaacatggcgaaacctcttctctactaaatacaaaaaattagctgggcgtgatggcatatgcctgtaatcccagctacttgggaggctgaggcagaagaatcacttgaacccgggaggcggaggttgcagtgagccgagattgcggcgccatcgcactccagcctgggcaacaagagcaaaactccatctcaggaaaaaaaa

SEQ ID NO: 227325 - DNA, 982 bp, Homo sapiens
agctgatgttccagtttgatggccgtgcagctggagactctgctgggagctgatgttgcaatttgagggccattgcagctggagacctggcgggaagctgatgttccagtttgagggccgtgcagctggtgacctggcggggagctgatgttccagtttgagggccgtgcacctggagacccggcggggagctgatgttccagtttgagggccgtgcagctggagacccagcggggagctgatgttccagttcgagggccatgaagctggacacccggggggaaactgatgttgcagtttgagggccatgcagctggatacctggctgggagctgatgttccagtttgagggccgtgcatctggagacctggcggggagctgatgttccagtttgagggccgtgcagctggagaccctggctgggagctgatgtttgagggccgtgcatctggagaaccggtggggagccagtgttgccggttgagggtcgtggagctggagacccgggtgggtaggagctaatgttccaggttgaggtccgtgctgctggagacccagcagggagctgatgttgcagtttgaggtggtgcagctggagacccaggggggaactgatgttgcaatttgagggccgtgcagctggagaccctgtggggagctgatgttcctgtttgagggcctaggagctgatgttccagtttaaggccatgcagctggagacccggtggggagccagtgttccagtttgagggctgtgcatctggagacccagtggggagctaatgttgcaggttgagggccgtggagctggagacctgggcggggagctgatgttccagtttgaaggccgtgaagctggagacctggcggggagctaatgttgcagtttgagggccgtggagctggagacccgggggggagctgatgttgcagtttgagggccatgcagctggatacctggctgggagctgatattgcagt

SEQ ID NO: 227326 - DNA, 371 bp, Homo sapiens
taaatactatttaatcttggggaaaaatgtctgtcaaaatttacttgatttgtcctctgaggatatttaaatgatctaccactggtctaagtaaatctaaaaatggggtacatgcagatcaatttatttttttttaaaaaatcttttaaaatttcatttggggttacattttaaacttatcattaaatatacacatattgttataaatagaagttatagtagttcagctttgaaaacactagtgcaggccaggcgctgtggctcacgcctgtaatcccagcgctttgggaggccgaggcgggcgatcacgaggtcaggagatcgagaccatcctggctaagacggtgaaaccccgtctctactaaaaatcc

SEQ ID NO: 227327 - DNA, 330 bp, Homo sapiens
gggaagtgctgcgtagagaagggcgtggtccctgcttagggctccacccccacgaacactaggtgaggacaggcatttcctgcccaaatgttgcatttcccaagaccaccctggcctgccatgcctccatcctatgcctataaaaacccaagaccctagcaaggcagagacagaagcctctgtgtggggagaggaacacactggtggaagaagacaagctgctggacatcccgagaatgttgcctgactccaggggaaaaccatctcccctctggctcccccatctgctgagagctacttccactcaataaaaccttgcactcattctcc

SEQ ID NO: 227328 - DNA, 559 bp, Homo sapiens
actcaaagttatctttcatatgtgaaggtagtagagagacattttcagatatgaaaacacttataccacaggcacacttcccatatttttaaaaagaaattttaaaaatttcttgatgaggtcagttcagctgactgatagatgaattaaaattagcaattaaaaatgaagaattaaaaaggcattggaaacaattagacgtagtgaaatctaaatcattattgtcaattttattgtcaaactaaaggtagaagtgtccatttagttttgatagaatttaacagcaccatggatctgcagcttcaggttatattaatgcctgaaataggtggagaggcaggagcatataggagatcctaaataatagtttttcttcaagaagatttaaaaaataccaacttctggtgagagtgatatttcgtattccattgccttcacttactatcagtgtactgttaactcctcaaacatctgtctctgctgagaaaagtctcctaagttctagacccactggccaagtggatagctctcttgggatggcccattagcagctccattt

SEQ ID NO: 227329 - DNA, 404 bp, Homo sapiens
atggcatcagcctgtgctgctctccgctggcaagggtgggctcagcccctctggtcagcctgacctgagcacctcagcgctccccactggccgctgccctgcaatggaagagggcagggatgggctgccactctgcattaggggaagagggacctttcaattgggcccatcacaaggaatgagggagaaggctcagcctggaccacacacacccaaagggccttgaggtttaactctctccaaaggagacagacgagtttgaaaggagccctcatcatccaatttcaaacttgggtcccatttctggaccacactgcctgaagcatgccatgaactaaggttcttcttttataaacactgtaattaccttgggaatggcacaattatatttctgtgtgtccgtt

SEQ ID NO: 227330 - DNA, 377 bp, Homo sapiens
atagactaaacaaaaatcttgagagaaagtactgggaatgagatgctttggggaatatgggctttgaaaagcttcaacatatttctgagaatttgcaaactgtgtatgtcaaggctgtgtgcatgttcagtaaaaacctgggaaatttctaccttccctgcacaagcagaaagtgtaggccaaggcagagttgtaaactgtctggctgagtgttgaaagcagggcccaacacatacacaaagcccctctgcaagttccaaacacatatggaaatctttgtcaaattattagctgacttctaagctaatggaaaaaatattttaatcgacataggtgacaaaaaatagagaccacaaagtttattcagaaaagatact

SEQ ID NO: 227331 - DNA, 481 bp, Homo sapiens
aagaagaaactcaggcagctgatctccacacagaagtgagaggcaggccttcttgtcagctccagacgagagggtaccttctttagccacacttgctgagaggtctggggcatctgtttagaagcaggaagggagtgccttgttcatgttcaggaatgctggagagtttgcacgtactggcagatcaccccatggccaggtggaagatagggaagccagtggttggttacacaggcgaagtgggctctgaccagctctggtggagttccctgcatcactgccctcagggagcccaacatctctccccctcctcacacctggagagagttctgcaaaccctacagaaaccccgcctctctaggtagaggaagaaaatcttaagaactgcacgatgattggaacctcacctccagagctgggaagacaacagtcctttaagacagtggtttctaaggaacacactgttgaaagatatgctacc

SEQ ID NO: 227332 - DNA, 449 bp, Homo sapiens
gaagcccaagatcatctaagatggaccaagaagtttatccttcaccagtcagactgacatatcaaaattagatgtacgcatatagcagcaacccagaggcattgacaacagggtggggagaaaaatcaaaggcgagaccttgatccccaacattggttgtgggagcaaaaagaagcaaaacacatgctccccagtggcttccaaaaattcctgttccacgatgtcaaagagctggaagtgctgctgatgtgcaacaaatcttactgtgctgagattgctcaacatgcttctccaagaacggttaaagccactgtggagagagtaacccgacagcccagcagagtcactagtcccaatgccaggctgcacagcaagaaaaattaatagacagctcatgtacacattttatttgtgttaaataaaaccataaatactctgtcatctggcat

SEQ ID NO: 227333 - DNA, 485 bp, Homo sapiens
agccaaactcccttcattccaacttccaccaaaaccacttctctggatccatccctggagttgacacaacagggatcttcagccccaggtgccaggtttctcagtgatccattacacagatttaacagggaaatgggggcagtatcaaaaacacccagtataaaccattgaattaccccagcccttgtctctgcccatgaacaactgcctggggccagagaattaggcatccctgctcttctttccctcagaaagcccttgagacgttctccttgaagctcccctaggtgggagtagaagttcatctcctgacactccacgttttattcatgagtcctgagttatgacacagaggacacagttgtgctccccttactatggactagcagataaagcaccttaaccactcagccaccatgcaaacccttcttatatttgattcaatatacttttccgcaagcaaaataaaagttctgaccaaggag

SEQ ID NO: 227334 - DNA, 442 bp, Homo sapiens
gagtcttgctcagtagtctgcactgctccgattcggaggacaggtgtgaagttcctgtttgtgttcgtggacttgcgctcttctgacccttattctttaactaaagtgctcatttgatctctgcaaaccttgacccacctgtggtggccgttgccccagaattgctgagttgactgtcatcatcctgtggcttattggttctcattcacatgcaagggaagggactgtggctctttaatgcttaaagcacgttttgctgggatttgtccattgtcccaaggactctcaaatgtactgaacacctcccaacccagatctttggcccttctaggtgactgtcacagggaaggagcaacattaaagtaatcataaaataatataattgtatacttgtaatttccagagagacttgcaatttataaataaatatataatttaataa

SEQ ID NO: 227335 - DNA, 465 bp, Homo sapiens
tagtcattgatacttgtgtgtcttttaaaaattttagctgtcctagtgggtgtgaagtggtttttttcctgtggttttgattgcatttccctgaggactaatgatgttaaacatctttttatgtgcctatggcaatttgcataccttctttggagaaagtctattcaaatcctttgttcaattttaaactggaaattttatctgtctgttgttgacttgtaagaattctttatgcttgctctaattgttttagatcttaatgttattaattttattttttccagggtcaattctgctcatgtttcattttatgttttaaaatttatttttctcctgtaatttgttctttttatatgtcaattctcatttatgtcatcctgttgtcttatatttatgccagggaattcattttttctgtaatttctatgagcaacaattgtgtggattaaaatacactttggggga

SEQ ID NO: 227336 - DNA, 792 bp, Homo sapiens
gaaatgctctgtatccaaatgccagctgagatcattagccacgctgaaattcgttgactcgtactgtgctaaggttgctgctagacgttgttaacagagttagtggtctttggttatggtggttagcagccccacttatctgttccatactaccagtgaatagtttaaaattcatgttgcacctataatttatcccacataaataattcaggctatttattttggcattcaattgatttttttctcactttaaaaaactgaggtatggagactggtgctagcaacacgggattggctaacgcatcctcttgctgttcccggtgtttgggccttgcctgtgacagtgggaaaaaaaatggccttgctgtgctacaaccggagctgcggtcagcgcttcgatcctgagaccaattccgacgatgcttgcacatatcacccaggcgttccagtctttcacgatgcattaaagggttggtcttgctgtaagagaagaacaactgatttttctgatttcttaagcattgtaggctgtacaaaaggtagacataatagtgagaagccacctgagccagtcaaacctgaggtcaagactactgagaagaaggaactatctgaattaaaaccaaaatttcaggaacacattcaagcccctaagacagtagacgcgataaaaagaccaagcccagatgaaccaatgacaaatttggaattaaaaatatctgcctccctaaaacaagcacttgataaacttaaactgtcatcagggaatgaagaaaataagaaaagaagaca

SEQ ID NO: 227337 - DNA, 340 bp, Homo sapiens
ctgttatgctgtccttttggaatataaatttacaaatgcattcttttgatgaattacttgactgacccagaacaagaatagggtttaccttattaaattgttatagtatagtccaaaggttgttctttttggtgaatgttcatgataggtgaccatggccaagtatataatgactattgtctttaaatgttggtttcaggttctgactttcactctgtggtatacactgtgagaatgcttaatagaaagaaaaagaaaaaatcatagtctcttctctagccagacagtactaggcatgatgatgtttgtggtagtgtgggtactgaaaactatcagaaaa

SEQ ID NO: 227338 - DNA, 359 bp, Homo sapiens
cagtgaatacatgaatctatacatgagtgtgttaaaactcataaaagtatataccaaaaagttttttacagctgggcgtggtggcttgcgcctgtaatcttagcactttgagaggcagaggcggatggtggatcacctgaggtcaggagtttgagaccagcctggccaacacggtgaaaccccatctctactaaaaatacaaaaattcgtcgggcatggtggcagccacctataatcccagctacttgggagggtgaggcaggagaatcgcttgaacacgggaggtgcagattacactgaactgagatcatgccattgcactttagcctgggcaacaagagcaaaactccatctcaaaa

SEQ ID NO: 227339 - DNA, 207 bp, Homo sapiens
tgactgtggacacccagagaggggcaggaccaggaatatgcacctggcctccacccaccagccccaacaaagtggccctggcctggggacctgtatcacaggatggacacctaccctggccctgcccctgccccaaggcttagctttcagtggagttgtgatggcaggtgtacctggagtctcaggtgtgactgaagcacactgatg

SEQ ID NO: 227340 - DNA, 110 bp, Homo sapiens
ggtcagaattgaaagaaagatgaatgacgctgattttctgttttctagtcaagttcagctaaatgggtagatgaggaaatagcagagttctgatgtaacttaggaaacat

SEQ ID NO: 227341 - DNA, 399 bp, Homo sapiens
aggaaggtgtgaaaatttgaaatgttatctattctcatttaatttcctactttccgtggagagtattccatacccagattaaatgtcatttccaattgttgctcacacttaccaaagggaaggtctctgctcagttttgagcagaggctccctgtgtaggagtatgacagtcctcagtaaagttttgtcacctatgtttggcaaaacatcctgggcagatgagcgattcatgtggcaagagcactgccaattgaaaaggtgcattagtatgaatattagcacctctaagtgtttgtgaaatagcaaaggtagaaggactagaatattgacaaagcattttcaaaaaattatactacttctaatagcttaacatgttgatagaaaagacgattcagtgta

SEQ ID NO: 227342 - DNA, 603 bp, Homo sapiens
aaaggagagagagcctaacttttagcatggaatcttaatggaaatatgattttgcagaaaggattgtatgtaaaaaaaaatctgtatttgaaaattgggagattaatctcaatttctgggttgtctgtcacacgtgacaaaaatttactgaagtaatagtgtgtgtgattgatataagttgtaatggagaaccacaaaagtgtatgagaagagcagaaaaatcgtctttcacagcagaggtgatatattggaaaatataaaatcaaaatattatagtttaaaaatagatggaaatgtaaaaagttaagtacttcatcatgctttatactaaatgcattggtactttatcattgatcaaggctcttgccaatgtttgagggtaagattgcagtcagtttgtgagtttttctcttgaatactatccctacagcaggaagttgctaaacagatctattattacctgagttcagggaagcaagcttaacggaagggtctgatgacacaacatcctcctttgtctgcagtataaaagggaaagaaagtcaactttgaactgccttaagctataagttattttgtagttggtaatggctttcctaactg

SEQ ID NO: 227343 - DNA, 926 bp, Homo sapiens
gtcgctcctccccacctcgggcaccctcacctccccccagcggcctccagggcgtcccgcgtttctctctccgagcgctcgcggtttcccgtcggtctctcccggtgcccgttgctcactcacactcttgggtctggttagtccagacctgcagcttgtctttgacttcccaagtgggaaacgtttgcagttccaaggcaagccaagagctaaggtttagaacaaagtctgccttggaccctttcagaagatgacaggattttttaaaaaaataattgcgcccccccgccccgtgccttggagatagtaagaattggagcagagcactgggacttcaattcacgcatggaaagagatctttgttagttggaggaaggagaacttgcctgagcttcgggcctttgttttgtttttgtgagagggacgtgtctcctaaatgaatgtttgctccagcgttgcacctcaaataagtcacctaaatatccacgccctctttatccaccccctctttactcgtgtgactagaatagttttcatttttcttctcaagggaatggctaaacagctcctatctgggcgtttgatagactgtcattcaagaatgagtgaagttgaggtgcctataagcaactcagaaattgttgtggccacgcttgggggaaatagagccctacactcaggtgatgagaggagacctcagaggtgaccgatccagggccttgctccctgcgccaccccagctcgtacctccagtggaacttggctgggcttatcaagagctcctttcattcattgcaacttcatttgttagaaagcttctctgtgtatttagtaggcattgtctccaacatgtaccactggtctggcttttgttaggcccattaatagtgtacatgtgacagcctttcaagtataggtgctccccg

SEQ ID NO: 227344 - DNA, 1138 bp, Homo sapiens
accaattccaatcgacctgaaagtcccttgcactaaagaaatgtgatttttttttaacccaaggagaaagttggttgtaacaatttttcaccagaattagcaatctgatagaataggcttttttaacaggaattttaaactggcggtgccagttgcagtgaaggtgaagtggctattgctttatattcgacaaatatttattgagcatctactatatactaggccctgaagatagagcgttgaacaaacccaatagtcttggccctcaaaaagctttatgtgacatagagcatccagctcgacaattagcaaacccctgatattattcatggacttgacatgaggtttggactattcatgagcaacagcagaaggtccatgacccctacaaatttacatttttctatggcccatatttgaaaacctcacattcggagcaggccactttatattcgtgagtgatcccaagctcactgaccaacagaaaagatgctaaaaaaatgtgtcctatcatgtgcctgctccaactgatgggtaatgtctgcctttaagccccagaatggattctccaggcacagtgtggaagagtgctgtggttgattagcaatgtctgccttgggtgaggaaaggggaacactcctcaagtgcctcctactgtcatctccattcagcctagcaccacatccccatgtagaagtgttgtcttctactgcttgccacgtacaagtgtgaaatgccaaggtgagactcgtacacttggggatttgcaatggtttttacccctcatgaaggtcagaggtggactatttgtacacatacacacatgcacaccctctcacgtcctccagaggctgaaagaccatcagcatcttggtaactgccatgcatgagcagcaaggacagccttccataatccatgccccatttcctctggaagcctggaaacttttcatttcctgttccttgctaattaacatctaaacatgcttctcatttccagccattgctgatgcttctcagttgaagtttgagccacatccctcttacagctagtgaatgagttggtagcagctactgtatataataataataatagttttaataataggggagggtgggatggggtgtgggtaagttt

SEQ ID NO: 227345 - DNA, 946 bp, Homo sapiens
gagggcgggagaggcagatgagtaaatggatccttacactaagtgtgatgagcagaaacccaggcgctctggggcatgagcagggatacctaacccagccctgggggctcaatctctccccacccctgcaggagaggcttggggtgagttttgggaataaggaccatccagccacatgacgaaggggaaggaaaatccccatcaaggcaaaaacacagtccaaggctctgaggcccaaattccggggagaggggtgaaggttgtttgtcgcacctgggttaaagggtgggggtggagagtaggagaagaggctacacaggtgagaaggtgtcagatcacaaagggccttgtatgccaaactaagaagactgaacttgaccatgaagttaggcagaccctctggagagttttaaagcaaggagtcgtgtggatgaacaaacctgtgatgggctggggttaccaaggagggcttcctggaggaggtcagacttgagctgagggaaggataggatttggagagctgacattctgatgagcggcttcggttaaagctcacaaaaacccttccctcccccatgccctttgaaatcatttgaatcaaagattgcgtgtgttaaagacgtgtttgtctgttatctgaaagctgtggtttctctttaacagattcagggcctcatcctttgactcggaaccaggaaggaattaggagcgagtcctcctgcccagagagctaattactgaaattcagtggcctcaccagggcgagtggcgtcaccggcctgcatcccccaacagctcctaatttctaactggtcaaagttagacatttcagtacatttttatgggctgcccaaagccagctggaagctttttttccataaactctccctgagacaagtagccaggtttcacatattaaaatgaaaacgtcaaaagcgttaacagg

SEQ ID NO: 227346 - DNA, 344 bp, Homo sapiens
gtctgagacagagtctcactctgtcgcccaggctgcaatgcaatggccctaactcagctcactgcaacctctgcctctgggttcaagcgatttatcctgcctcagcctcccgagtagctggaattataggcacccgccatcatgcccagctaatttttgtagagatggggtttcataatgttggctggtctcgaactcctgacctcaggtgatccacccaccttggcctcccagagtgttgggattacaggcgtgagccaccacactgggcccctttgcccatttttgaattgtctttttgttgttgagttgtagaatctctatctctttctattcctttatat

SEQ ID NO: 227347 - DNA, 414 bp, Homo sapiens
tgtaaataaacggctgtggctatgtaccagtaaaactttgtttacaaaatacgtggtcaatctaaggattatagttcgatagcctctgctctaaaggttgtatttaaagaagcaacaaaaaacagattgagagacaggaagccataggtactatgaaaacaaatgtaaagaaagtacacaataaaacaatgttacataaatttataaattgagtgagagagatttagaatttgggttttctttattttagtcaagggagaaagggagatacagatattaattaactttaggtcttgttaagttgctaaaaatttatttgtgtaataaaaatacaaggataaccagtgaaaggatagaaatatcaagtataaattctaaactgtagtgagagaaatagactaagaaggatacacc

SEQ ID NO: 227348 - DNA, 245 bp, Homo sapiens
aagaagtagtaagggccatgcaaggccttgcaagccatcataagatgggagccttgaagagttttgagaagataaattggcctgaattacattttattgaagccattctggcttgggtgctgacaatagattttgggaggcaagagtagaacctgacggactagataggaggctattaggctaattcagttaagagatagtagtggcttggaccagggtaatggaggtagatgggaaagtgattg

SEQ ID NO: 227349 - DNA, 5434 bp, Homo sapiens
ttcgcctctctcatgatcccaggaagactaacaggctctttgtgacactggcactgcgctgtcggatccagctgttgtcattgtgaaggggtgttctcttcctcatttcctgaaggattgttgcagaaggagacggcgtcgacgtctgactggactcgcggcgacttacctttcagtcgtgcgctcctgatccggcgctcggaatttgtccccggcttcagggctgcggggcctggaaggaggcgtatcgaggcggctcgaaaacgatccaggggagccgaggcgctcctcttgtcatcccactcagcgccatgtcctggatgttcaagagggatccagtttggaagtacttgcagactgtccagtatggagttcatggaaattttccacgcctctcatatccaactttctttccacgttttgaattccaagatgttatccctccagatgactttctaactagtgatgaagaagtagattccgttttatttggaagtttgagaggtcatgtggttggactacgctattacacgggagtagttaataataatgaaatggttgcattacaacgagatcctaataacccttatgataagaatgcaattaaagtaaacaatgtgaatggaaatcaagttggccatttaaagaaagagcttgcaggtgctttggcctatatcatggacaacaaattggcacaaattgaaggggtagttccttttggtgcaaacaatgcttttaccatgcctctgcatatgactttttggggaaaagaagaaaatagaaaagcggtttcagatcagttgaagaaacatggatttaaattgggtcctgcaccaaaaactttaggattcaatttggaaagtggttggggctctggaagagctggaccaagctatagtatgccagtgcatgctgcagtacagatgacaactgaacagcttaaaacagaatttgacaaattgtttgaagatttaaaagaagatgataaaacccatgaaatggaaccagctgaggctattgaaacaccactgcttccacatcaaaaacaagctctagcttggatggtgtcacgggaaaatagcaaagaacttccaccattctgggaacagcgaaatgacttatactataacacaataacaaatttttctgagaaggaccgaccagaaaatgtccatggaggaattttagctgatgatatgggtttgggtaaaactcttacggccattgcagtaatccttaccaacttccatgatggcagacctcttcctattgaaagagttaaaaagaatctactgaagaaggaatataatgttaacgatgactctatgaaacttggaggaaacaataccagtgaaaaggcagatggactaagcaaagacgcatctagatgtagtgaacaacccagtatttcagatatcaaggagaagagtaagtttcgcatgtcagaattgtctagctcccgccccaaaagaagaaaaactgctgtccagtacatagaaagcagtgattcagaggaaattgaaacaagtgaattgccgcagaaaatgaaaggcaaactgaaaaatgtacagtctgaaactaaaggcagggcgaaagcaggatcttctaaggttatagaagatgtggcatttgcatgtgcattaacttcatctgttcctacaacaaaaaagaaaatgttgaaaaagggagcttgtgcagtggaggggtcaaagaaaactgatgttgaggagagaccaagaacaacactgatcatctgtccgctttctgtgttaagcaactggattgaccagtttggacaacatataaaatcagatgtacacttgaatttttatgtttattatggtcctgatcgtattagagaaccggccttactttcaaaacaggatattgttttgactacgtataatattttaactcatgactatggaactaaaggagatagtccattacatagcataaggtggctaagagtgatcctggatgaaggacatgccatacgaaatccaaatgctcagcagacaaaagctgtacttgacttagaatcagaaagaagatgggttttgacaggtactccaatccagaattctttaaaggacttgtggtctcttctttcctttttaaaacttaaaccatttattgatagagaatggtggcatagaacaatacagcgtcctgtcacaatgggagatgaaggaggacttaggcgtttacagtccctaattaaaaatattacacttagaagaacaaagacaagcaaaattaaaggaaaacctgttttggagttaccagaacgtaaagtatttattcagcacattacactttcagatgaagagagaaagatttatcagtctgtgaaaaatgaaggcagagccactattggaaggtattttaatgaagggactgtcctggcacattatgcagatgtcctgggtcttttgcttagactgcggcaaatttgttgccatacttaccttcttacaaatgcagtgtcttccaatggcccctcaggaaatgatacacctgaagaactgagaaagaagttaataaggaagatgaagttaattctgagctcaggttcagatgaggaatgtgcaatttgcctggattctttaacagttcctgtgataacacattgtgcacatgtattttgtaaaccctgtatttgccaagtcattcagaatgagcagccacatgctaaatgccctttatgcagaaatgatatacatgaagataatttattagaatgtcctccagaagaattagcacgtgacagtgagaaaaagtctgatatggaatggacatccagttcaaagattaatgcgctaatgcacgcattgactgacttaagaaagaagaatcccaacataaaaagtttggttgtttctcagtttacaacattcctgtctttaatagaaataccacttaaagcctctggatttgtgtttactcgtttggatggttccatggcccaaaagaaaagagttgaatcaattcagtgttttcaaaacactgaagcaggatctccaactataatgcttctgtccttaaaagcaggtggagttggtttgaatctgtctgcagcttctcgagtgtttttaatggatccagcctggaatcctgctgctgaagatcagtgctttgacagatgccatagacttggtcagaagcaagaagttatcatcacaaaattcattgtaaaggactctgttgaagaaaatatgctgaaaatacaaaacaaaaagagagaacttgcagcaggagcctttggaactaaaaaaccaaatgctgacgaaatgaaacaagccaaaattaatgaaatcagaacattaattgacttataatttgtgggattttagtaaggtcagtttgattggatacttaagttttagaaatgagaaaaatacagagttttagaaatgagatctagagaacacgtcttctaaaaggggcatattttatattagtgaagaggtattactgacacaatttcttctatatatgaacctatttttaatgaaacttcaaatagcaataagttccgttatatactgtggcctgaaataatttgagaaaaaaggttactttgttattcagcttttcataatatctatgctgagtattttcacgtatcttccaagtactcagctttttcgtatttcaaataaggtcagaccttttatacttttgaccaaatagttattttctatgttggacacttagttatttaccaaagcctccgatttgtgatgcagtgtttgtagtccttgtaaacaatatatacagactatacaagaattaattttattgggctttcaaaaaccatatttgcattccagaaccaaatcttaaatgagaccaaagtccaggttagcacaggtttttatttttcctacagctacattgagatatagttcacataaatgacttggagttttatgttcatgaaaaaattagggattatgttaagagtactattttttccattttagttaagtagtactacactcattgtttaaatgtaacttgctgtgtctgaggtataaatatagtctgtgggagtgagaggcaaaccagtcctacccaatttgatttgaatattttaaattatggaactgctaaatagatatttctataaatagataatttttatttatgtagctttttttggaagtaactttataaatttttataattcagaagactactatatgtgagaggcgtgatatctggatggaagttgggctggatgatctccaaagtcgtttcaactcttaaagacatcttaatcctgaatgtaaacaattgttatgtgtttagaatcagaatttgattttgaacttgagtaattcatccttacagctatctgtagaattagtcatcttttttcttttcttttttttttacttttttgttaataagcaaacttatttgctgcagaatttgggttgactcctgagcatatttaaaacaaagaagctagaaatttagcagtcagattaggtaggtggttttatttcaaagggaaactttaatccaaagaaagattaattactctaacaaacaagagaagcttcatgtttgatgatacagatttaagaatacctgagacttaagagtgttggaagtcatttgatagaaagatgagatcggagacaatgttgtgttatagggcacacattgaaggtatatgccaaatctctcaccagataagtccttttctccctgtgccgttttcttgctcaaagggaacagtgaattagccagctagaatcttcctggtccctttttgaggcagtagcaggtaaggaaagggctgattttcatcaaaaccaagacctttctgcagggatgatagtggaataataatgtgggattagcccgctagcattaggagcagttgggaagttacctggtagatcaagcattacacacaaaaaatcaagttgatcagagtatgggttctccatatagcaatacttcagtgagattaagtataaacagtttttggcaaaaaacaacacagtctactctttctgcttacaaagacaaagccttacaaactcactatgaaggtaaagggaggacagcttgcttctttgcccagacatttacaaagttgtttttaaaacacactcataagtaagtttggcaagttgtttaaaaaatgtctctttgttttgtacagttctgttagatgttgttatattttaaaagtttaatttaaaaaatttaatttgtccttcctaagaaggataaatatataaaaaagccactggaatgaaaacttcctatatgctatgctgttgtcttattattatatagaaaaataactttagaaaaatattgaagacattgtattaccacttgtgattcaaacaattttgtggttaaaactggattttaaatttaaaaatcaataaaaatttcaaatgtt

SEQ ID NO: 227350 - DNA, 4505 bp, Homo sapiens
cacagagcgacgctggtctcccagattgttgcagaaggagacggcgtcgacgtctgactggactcgcggcgacttacctttcagtcgtgcgctcctgatccggcgctcggaatttgtccccggcttcagggctgcggggcctggaaggaggcgtatcgaggcggctcgaaaacgatccaggggagccgaggcgctcctcttgtcatcccactcagcgccatgtcctggatgttcaagagggatccagtttggaagtacttgcagactgtccagtatggagttcatggaaattttccacgcctctcatatccaactttctttccacgttttgaattccaagatgttatccctccagatgactttctaactagtgatgaagaagtagattccgttttatttggaagtttgagaggtcatgtggttggactacgctattacacgggagtagttaataataatgaaatggttgcattacaacgagatcctaataacccttatgataagaatgcaattaaagtaaacaatgtgaatggaaatcaagttggccatttaaagaaagagcttgcaggtgctttggcctatatcatggacaacaaattggcacaaattgaaggggtagttccttttggtgcaaacaatgcttttaccatgcctctgcatatgactttttggggaaaagaagaaaatagaaaagcggtttcagatcagttgaagaaacatggatttaaattgggtcctgcaccaaaaactttaggattcaatttggaaagtggttggggctctggaagagctggaccaagctatagtatgccagtgcatgctgcagtacagatgacaactgaacagcttaaaacagaatttgacaaattgtttgaagatttaaaagaagatgataaaacccatgaaatggaaccagctgaggctattgaaacaccactgcttccacatcaaaaacaagctctagcttggatggtgtcacgggaaaatagcaaagaacttccaccattctgggaacagcgaaatgacttatactataacacaataacaaatttttctgagaaggaccgaccagaaaatgtccatggaggaattttagctgatgatatgggtttgggtaaaactcttacggccattgcagtaatccttaccaacttccatgatggcagacctcttcctattgaaagagttaaaaagaatctactgaagaaggaatataatgttaacgatgactctatgaaacttggaggaaacaataccagtgaaaaggcagatggactaagcaaagacgcatctagatgtagtgaacaacccagtatttcagatatcaaggagaagagtaagtttcgcatgtcagaattgtctagctcccgccccaaaagaagaaaaactgctgtccagtacatagaaagcagtgattcagaggaaattgaaacaagtgaattgccgcagaaaatgaaaggcaaactgaaaaatgtacagtctgaaactaaaggcagggcgaaagcaggatcttctaaggttatagaagatgtggcatttgcatgtgcattaacttcatctgttcctacaacaaaaaagaaaatgttgaaaaagggagcttgtgcagtggaggggtcaaagaaaactgatgttgaggagagaccaagaacaacactgatcatctgtccgctttctgtgttaagcaactggattgaccagtttggacaacatataaaatcagatgtacacttgaatttttatgtttattatggtcctgatcgtattagagaaccggccttactttcaaaacaggatattgttttgactacgtataatattttaactcatgactatggaactaaaggagatagtccattacatagcataaggtggctaagagtgatcctggatgaaggacatgccatacgaaatccaaatgctcagcagacaaaagctgtacttgacttagaatcagaaagaagatgggttttgacaggtactccaatccagaattctttaaaggacttgtggtctcttctttcctttttaaaacttaaaccatttattgatagagaatggtggcatagaacaatacagcgtcctgtcacaatgggagatgaaggaggacttaggcgtttacagtccctaattaaaaatattacacttagaagaacaaagacaagcaaaattaaaggaaaacctgttttggagttaccagaacgtaaagtatttattcagcacattacactttcagatgaagagagaaagatttatcagtctgtgaaaaatgaaggcagagccactattggaaggtattttaatgaagggactgtcctggcacattatgcagatgtcctgggtcttttgcttagactgcggcaaatttgttgccatacttaccttcttacaaatgcagtgtcttccaatggcccctcaggaaatgatacacctgaagaactgagaaagaagttaataaggaagatgaagttaattctgagctcaggttcagatgaggaatgtgcaatttgcctggattctttaacagttcctgtgataacacattgtgcacatgtattttgtaaaccctgtatttgccaagtcattcagaatgagcagccacatgctaaatgccctttatgcagaaatgatatacatgaagataatttattagaatgtcctccagaagaattagcacgtgacagtgagaaaaagtctgatatggaatggacatccagttcaaagattaatgcgctaatgcacgcattgactgacttaagaaagaagaatcccaacataaaaagtttggttgtttctcagtttacaacattcctgtctttaatagaaataccacttaaagcctctggatttgtgtttactcgtttggatggttccatggcccaaaagaaaagagttgaatcaattcagtgttttcaaaacactgaagcaggatctccaactataatgcttctgtccttaaaagcaggtggagttggtttgaatctgtctgcagcttctcgagtgtttttaatggatccagcctggaatcctgctgctgaagatcagtgctttgacagatgccatagacttggtcagaagcaagaagttatcatcacaaaattcattgtaaaggactctgttgaagaaaatatgctgaaaatacaaaacaaaaagagagaacttgcagcaggagcctttggaactaaaaaaccaaatgctgacgaaatgaaacaagccaaaattaatgaaatcagaacattaattgacttataatttgtgggattttagtaagaagactactatatgtgagaggcgtgatatctggatggaagttgggctggatgatctccaaagtcgtttcaactcttaaagacatcttaatcctgaatgtaaacaattgttatgtgtttagaatcagaatttgattttgaacttgagtaattcatccttacagctatctgtagaattagtcatcttttttcttttcttttttttttacttttttgttaataagcaaacttatttgctgcagaatttgggttgactcctgagcatatttaaaacaaagaagctagaaatttagcagtcagattaggtaggtggttttatttcaaagggaaactttaatccaaagaaagattaattactctaacaaacaagagaagcttcatgtttgatgatacagatttaagaatacctgagacttaagagtgttggaagtcatttgatagaaagatgagatcggagacaatgttgtgttatagggcacacattgaaggtatatgccaaatctctcaccagataagtccttttctccctgtgccgttttcttgctcaaagggaacagtgaattagccagctagaatcttcctggtccctttttgaggcagtagcaggtaaggaaagggctgattttcatcaaaaccaagacctttctgcagggatgatagtggaataataatgtgggattagcccgctagcattaggagcagttgggaagttacctggtagatcaagcattacacacaaaaaatcaagttgatcagagtatgggttctccatatagcaatacttcagtgagattaagtataaacagtttttggcaaaaaacaacacagtctactctttctgcttacaaagacaaagccttacaaactcactatgaaggtaaagggaggacagcttgcttctttgcccagacatttacaaagttgtttttaaaacacactcataagtaagtttggcaagttgtttaaaaaatgtctctttgttttgtacagttctgttagatgttgttatattttaaaagtttaatttaaaaaatttaatttgtccttcctaagaaggataaatatataaaaaagccactggaatgaaaacttcctatatgctatgctgttgtcttattattatatagaaaaataactttagaaaaatattgaagacattgtattaccacttgtgattcaaacaattttgtggttaaaactggattttaaatttaaaaatcaataaaaatttcaaatgtt

SEQ ID NO: 227351 - DNA, 4782 bp, Homo sapiens
cacagagcgacgctggtctcccagattgttgcagaaggagacggcgtcgacgtctgactggactcgcggcgacttacctttcagtcgtgcgctcctgatccggcgctcggaatttgtccccggcttcagggctgcggggcctggaaggaggcgtatcgaggcggctcgaaaacgatccaggggagccgaggcgctcctcttgtcatcccactcagcgccatgtcctggatgttcaagagggatccagtttggaagtacttgcagactgtccagtatggagttcatggaaattttccacgcctctcatatccaactttctttccacgttttgaattccaagatgttatccctccagatgactttctaactagtgatgaagaagtagattccgttttatttggaagtttgagaggtcatgtggttggactacgctattacacgggagtagttaataataatgaaatggttgcattacaacgagatcctaataacccttatgataagaatgcaattaaagtaaacaatgtgaatggaaatcaagttggccatttaaagaaagagcttgcaggtgctttggcctatatcatggacaacaaattggcacaaattgaaggggtagttccttttggtgcaaacaatgcttttaccatgcctctgcatatgactttttggggaaaagaagaaaatagaaaagcggtttcagatcagttgaagaaacatggatttaaattgggtcctgcaccaaaaactttaggattcaatttggaaagtggttggggctctggaagagctggaccaagctatagtatgccagtgcatgctgcagtacagatgacaactgaacagcttaaaacagaatttgacaaattgtttgaagatttaaaagaagatgataaaacccatgaaatggaaccagctgaggctattgaaacaccactgcttccacatcaaaaacaagctctagcttggatggtgtcacgggaaaatagcaaagaacttccaccattctgggaacagcgaaatgacttatactataacacaataacaaatttttctgagaaggaccgaccagaaaatgtccatggaggaattttagctgatgatatgggtttgggtaaaactcttacggccattgcagtaatccttaccaacttccatgatggcagacctcttcctattgaaagagttaaaaagaatctactgaagaaggaatataatgttaacgatgactctatgaaacttggaggaaacaataccagtgaaaaggcagatggactaagcaaagacgcatctagatgtagtgaacaacccagtatttcagatatcaaggagaagagtaagtttcgcatgtcagaattgtctagctcccgccccaaaagaagaaaaactgctgtccagtacatagaaagcagtgattcagaggaaattgaaacaagtgaattgccgcagaaaatgaaaggcaaactgaaaaatgtacagtctgaaactaaaggcagggcgaaagcaggatcttctaaggttatagaagatgtggcatttgcatgtgcattaacttcatctgttcctacaacaaaaaagaaaatgttgaaaaagggagcttgtgcagtggaggggtcaaagaaaactgatgttgaggagagaccaagaacaacactgatcatctgtccgctttctgtgttaagcaactggattgaccagtttggacaacatataaaatcagatgtacacttgaatttttatgtttattatggtcctgatcgtattagagaaccggccttactttcaaaacaggatattgttttgactacgtataatattttaactcatgactatggaactaaaggagatagtccattacatagcataaggtggctaagagtgatcctggatgaaggacatgccatacgaaatccaaatgctcagcagacaaaagctgtacttgacttagaatcagaaagaagatgggttttgacaggtactccaatccagaattctttaaaggacttgtggtctcttctttcctttttaaaacttaaaccatttattgatagagaatggtggcatagaacaatacagcgtcctgtcacaatgggagatgaaggaggacttaggcgtttacagtccctaattaaaaatattacacttagaagaacaaagacaagcaaaattaaaggaaaacctgttttggagttaccagaacgtaaagtatttattcagcacattacactttcagatgaagagagaaagatttatcagtctgtgaaaaatgaaggcagagccactattggaaggtattttaatgaagggactgtcctggcacattatgcagatgtcctgggtcttttgcttagactgcggcaaatttgttgccatacttaccttcttacaaatgcagtgtcttccaatggcccctcaggaaatgatacacctgaagaactgagaaagaagttaataaggaagatgaagttaattctgagctcaggttcagatgaggaatgtgcaatttgcctggattctttaacagttcctgtgataacacattgtgcacatgtattttgtaaaccctgtatttgccaagtcattcagaatgagcagccacatgctaaatgccctttatgcagaaatgatatacatgaagataatttattagaatgtcctccagaagaattagcacgtgacagtgagaaaaagtctgatatggaatggacatccagttcaaagattaatgcgctaatgcacgcattgactgacttaagaaagaagaatcccaacataaaaagtttggttgtttctcagtttacaacattcctgtctttaatagaaataccacttaaagcctctggatttgtgtttactcgtttggatggttccatggcccaaaagaaaagagttgaatcaattcagtgttttcaaaacactgaagcaggatctccaactataatgcttctgtccttaaaagcaggtggagttggtttgaatctgtctgcagcttctcgagtgtttttaatggatccagcctggaatcctgctgctgaagatcagtgctttgacagatgccatagacttggtcagaagcaagaagttatcatcacaaaattcattgtaaaggactctgttgaagaaaatatgctgaaaatacaaaacaaaaagagagaacttgcagcaggagcctttggaactaaaaaaccaaatgctgacgaaatgaaacaagccaaaattaatgaaatcagaacattaattgacttataatttgtgggattttagtaagaagactactatatgtgagaggcgtgatatctggatggaagttgggctggatgatctccaaagtcgtttcaactcttaaagacatcttaatcctgaatgtaaacaattgttatgtgtttagaatcagaatttgattttgaacttgagtaattcatccttacagctatctgtagaattagtcatcttttttcttttcttttttttttacttttttgttaataagcaaacttatttgctgcagaatttgggttgactcctgagcatatttaaaacaaagaagctagaaatttagcagtcagattaggtaggtggttttatttcaaagggaaactttaatccaaagaaagattaattactctaacaaacaagagaagcttcatgtttgatgatacagatttaagaatacctgagacttaagagtgttggaagtcatttgatagaaagatgagatcggagacaatgttgtgttatagggcacacattgaaggtatatgccaaatctctcaccagataagtccttttctccctgtgccgttttcttgctcaaagggaacagtgaattagccagctagaatcttcctggtccctttttgaggcagtagcaggtaaggaaagggctgattttcatcaaaaccaagacctttctgcagggatgatagtggaataataatgtgggattagcccgctagcattaggagcagttgggaagttacctggtagatcaagcattacacacaaaaaatcaagttgatcagagtatgggttctccatatagcaatacttcagtgagattaagtataaacagtttttggcaaaaaacaacacagtctactctttctgcttacaaagacaaagccttacaaactcactatgaaggtaaagggaggacagcttgcttctttgcccagacatttacaaagttgtttttaaaacacactcataagtaagtttggcaagttgtttaaaaaatgtctctttgttttgtacagttctgttagatgttgttatattttaaaagtttaatttaaaaaatttaatttgtccttcctaagaaggataaatatataaaaaagccactggaatgaaaacttcctatatgctatgctgttgtcttattattatatagaaaaataactttagaaaaatattgaagacattgtattaccacttgtgattcaaacaattttgtggttaaaactggattttaaatttaaaaatcaataaaaatttcaaatgtttattaccttcctcggtgccataattttgactttatcttcaaataaaatccttcattaattgtgacatttctatgcaagtgttacatttttttgagagtacatgaagattactgtaacagaataatgtcctcatatcctaactaactttattttgctcaatttagctggttgaaattcttgttcagaaatcaagagtgcttatttaaaatgccttgatctaaaaacattggtcccaattaatttcttcatctggaagaaaaaaaggagttgtgataat

SEQ ID NO: 227352 - DNA, 5074 bp, Homo sapiens
cacagagcgacgctggtctcccagattgttgcagaaggagacggcgtcgacgtctgactggactcgcggcgacttacctttcagtcgtgcgctcctgatccggcgctcggaatttgtccccggcttcagggctgcggggcctggaaggaggcgtatcgaggcggctcgaaaacgatccaggggagccgaggcgctcctcttgtcatcccactcagcgccatgtcctggatgttcaagagggatccagtttggaagtacttgcagactgtccagtatggagttcatggaaattttccacgcctctcatatccaactttctttccacgttttgaattccaagatgttatccctccagatgactttctaactagtgatgaagaagtagattccgttttatttggaagtttgagaggtcatgtggttggactacgctattacacgggagtagttaataataatgaaatggttgcattacaacgagatcctaataacccttatgataagaatgcaattaaagtaaacaatgtgaatggaaatcaagttggccatttaaagaaagagcttgcaggtgctttggcctatatcatggacaacaaattggcacaaattgaaggggtagttccttttggtgcaaacaatgcttttaccatgcctctgcatatgactttttggggaaaagaagaaaatagaaaagcggtttcagatcagttgaagaaacatggatttaaattgggtcctgcaccaaaaactttaggattcaatttggaaagtggttggggctctggaagagctggaccaagctatagtatgccagtgcatgctgcagtacagatgacaactgaacagcttaaaacagaatttgacaaattgtttgaagatttaaaagaagatgataaaacccatgaaatggaaccagctgaggctattgaaacaccactgcttccacatcaaaaacaagctctagcttggatggtgtcacgggaaaatagcaaagaacttccaccattctgggaacagcgaaatgacttatactataacacaataacaaatttttctgagaaggaccgaccagaaaatgtccatggaggaattttagctgatgatatgggtttgggtaaaactcttacggccattgcagtaatccttaccaacttccatgatggcagacctcttcctattgaaagagttaaaaagaatctactgaagaaggaatataatgttaacgatgactctatgaaacttggaggaaacaataccagtgaaaaggcagatggactaagcaaagacgcatctagatgtagtgaacaacccagtatttcagatatcaaggagaagagtaagtttcgcatgtcagaattgtctagctcccgccccaaaagaagaaaaactgctgtccagtacatagaaagcagtgattcagaggaaattgaaacaagtgaattgccgcagaaaatgaaaggcaaactgaaaaatgtacagtctgaaactaaaggcagggcgaaagcaggatcttctaaggttatagaagatgtggcatttgcatgtgcattaacttcatctgttcctacaacaaaaaagaaaatgttgaaaaagggagcttgtgcagtggaggggtcaaagaaaactgatgttgaggagagaccaagaacaacactgatcatctgtccgctttctgtgttaagcaactggattgaccagtttggacaacatataaaatcagatgtacacttgaatttttatgtttattatggtcctgatcgtattagagaaccggccttactttcaaaacaggatattgttttgactacgtataatattttaactcatgactatggaactaaaggagatagtccattacatagcataaggtggctaagagtgatcctggatgaaggacatgccatacgaaatccaaatgctcagcagacaaaagctgtacttgacttagaatcagaaagaagatgggttttgacaggtactccaatccagaattctttaaaggacttgtggtctcttctttcctttttaaaacttaaaccatttattgatagagaatggtggcatagaacaatacagcgtcctgtcacaatgggagatgaaggaggacttaggcgtttacagtccctaattaaaaatattacacttagaagaacaaagacaagcaaaattaaaggaaaacctgttttggagttaccagaacgtaaagtatttattcagcacattacactttcagatgaagagagaaagatttatcagtctgtgaaaaatgaaggcagagccactattggaaggtattttaatgaagggactgtcctggcacattatgcagatgtcctgggtcttttgcttagactgcggcaaatttgttgccatacttaccttcttacaaatgcagtgtcttccaatggcccctcaggaaatgatacacctgaagaactgagaaagaagttaataaggaagatgaagttaattctgagctcaggttcagatgaggaatgtgcaatttgcctggattctttaacagttcctgtgataacacattgtgcacatgtattttgtaaaccctgtatttgccaagtcattcagaatgagcagccacatgctaaatgccctttatgcagaaatgatatacatgaagataatttattagaatgtcctccagaagaattagcacgtgacagtgagaaaaagtctgatatggaatggacatccagttcaaagattaatgcgctaatgcacgcattgactgacttaagaaagaagaatcccaacataaaaagtttggttgtttctcagtttacaacattcctgtctttaatagaaataccacttaaagcctctggatttgtgtttactcgtttggatggttccatggcccaaaagaaaagagttgaatcaattcagtgttttcaaaacactgaagcaggatctccaactataatgcttctgtccttaaaagcaggtggagttggtttgaatctgtctgcagcttctcgagtgtttttaatggatccagcctggaatcctgctgctgaagatcagtgctttgacagatgccatagacttggtcagaagcaagaagttatcatcacaaaattcattgtaaaggactctgttgaagaaaatatgctgaaaatacaaaacaaaaagagagaacttgcagcaggagcctttggaactaaaaaaccaaatgctgacgaaatgaaacaagccaaaattaatgaaatcagaacattaattgacttataatttgtgggattttagtaagaagactactatatgtgagaggcgtgatatctggatggaagttgggctggatgatctccaaagtcgtttcaactcttaaagacatcttaatcctgaatgtaaacaattgttatgtgtttagaatcagaatttgattttgaacttgagtaattcatccttacagctatctgtagaattagtcatcttttttcttttcttttttttttacttttttgttaataagcaaacttatttgctgcagaatttgggttgactcctgagcatatttaaaacaaagaagctagaaatttagcagtcagattaggtaggtggttttatttcaaagggaaactttaatccaaagaaagattaattactctaacaaacaagagaagcttcatgtttgatgatacagatttaagaatacctgagacttaagagtgttggaagtcatttgatagaaagatgagatcggagacaatgttgtgttatagggcacacattgaaggtatatgccaaatctctcaccagataagtccttttctccctgtgccgttttcttgctcaaagggaacagtgaattagccagctagaatcttcctggtccctttttgaggcagtagcaggtaaggaaagggctgattttcatcaaaaccaagacctttctgcagggatgatagtggaataataatgtgggattagcccgctagcattaggagcagttgggaagttacctggtagatcaagcattacacacaaaaaatcaagttgatcagagtatgggttctccatatagcaatacttcagtgagattaagtataaacagtttttggcaaaaaacaacacagtctactctttctgcttacaaagacaaagccttacaaactcactatgaaggtaaagggaggacagcttgcttctttgcccagacatttacaaagttgtttttaaaacacactcataagtaagtttggcaagttgtttaaaaaatgtctctttgttttgtacagttctgttagatgttgttatattttaaaagtttaatttaaaaaatttaatttgtccttcctaagaaggataaatatataaaaaagccactggaatgaaaacttcctatatgctatgctgttgtcttattattatatagaaaaataactttagaaaaatattgaagacattgtattaccacttgtgattcaaacaattttgtggttaaaactggattttaaatttaaaaatcaataaaaatttcaaatgttaaaaaaaaaaaaaaaaaaaaaaaaaaaaaaaaaaaaaaaaaaaaaaaaaaaaaaaaagggggagccgaccgacacataaagaattatcccccaacagggagagcacccagataattaagcagcacacacaccgaagatgtttagtagacaaaaaaggggggccccacaaaaagggaacggcaccgataatatcaacacggccgaggagcggggccagccgccgtttaaacaacgactcagacgaggtggaaaaacaaacgttgtacagcggaggacaactttgtttgggagagagaacaccacataacattttcggggggggtgaaaacattattggggaaccacctcccctccagagaatatttacgagctccagcagaggacaagtaataaaattttacgacgggtaaaacggtggtgaaacacccagtcagatattgcgcgcggtcaaagaaatttgtcacccacaggatcattactttacagaaattttacccggccgggataaatcatcatagctatatatacattaatataactgcctactaacaatcacgagttgatatata

SEQ ID NO: 227353 - DNA, 5288 bp, Homo sapiens
cacagagcgacgctggtctcccagattgttgcagaaggagacggcgtcgacgtctgactggactcgcggcgacttacctttcagtcgtgcgctcctgatccggcgctcggaatttgtccccggcttcagggctgcggggcctggaaggaggcgtatcgaggcggctcgaaaacgatccaggggagccgaggcgctcctcttgtcatcccactcagcgccatgtcctggatgttcaagagggatccagtttggaagtacttgcagactgtccagtatggagttcatggaaattttccacgcctctcatatccaactttctttccacgttttgaattccaagatgttatccctccagatgactttctaactagtgatgaagaagtagattccgttttatttggaagtttgagaggtcatgtggttggactacgctattacacgggagtagttaataataatgaaatggttgcattacaacgagatcctaataacccttatgataagaatgcaattaaagtaaacaatgtgaatggaaatcaagttggccatttaaagaaagagcttgcaggtgctttggcctatatcatggacaacaaattggcacaaattgaaggggtagttccttttggtgcaaacaatgcttttaccatgcctctgcatatgactttttggggaaaagaagaaaatagaaaagcggtttcagatcagttgaagaaacatggatttaaattgggtcctgcaccaaaaactttaggattcaatttggaaagtggttggggctctggaagagctggaccaagctatagtatgccagtgcatgctgcagtacagatgacaactgaacagcttaaaacagaatttgacaaattgtttgaagatttaaaagaagatgataaaacccatgaaatggaaccagctgaggctattgaaacaccactgcttccacatcaaaaacaagctctagcttggatggtgtcacgggaaaatagcaaagaacttccaccattctgggaacagcgaaatgacttatactataacacaataacaaatttttctgagaaggaccgaccagaaaatgtccatggaggaattttagctgatgatatgggtttgggtaaaactcttacggccattgcagtaatccttaccaacttccatgatggcagacctcttcctattgaaagagttaaaaagaatctactgaagaaggaatataatgttaacgatgactctatgaaacttggaggaaacaataccagtgaaaaggcagatggactaagcaaagacgcatctagatgtagtgaacaacccagtatttcagatatcaaggagaagagtaagtttcgcatgtcagaattgtctagctcccgccccaaaagaagaaaaactgctgtccagtacatagaaagcagtgattcagaggaaattgaaacaagtgaattgccgcagaaaatgaaaggcaaactgaaaaatgtacagtctgaaactaaaggcagggcgaaagcaggatcttctaaggttatagaagatgtggcatttgcatgtgcattaacttcatctgttcctacaacaaaaaagaaaatgttgaaaaagggagcttgtgcagtggaggggtcaaagaaaactgatgttgaggagagaccaagaacaacactgatcatctgtccgctttctgtgttaagcaactggattgaccagtttggacaacatataaaatcagatgtacacttgaatttttatgtttattatggtcctgatcgtattagagaaccggccttactttcaaaacaggatattgttttgactacgtataatattttaactcatgactatggaactaaaggagatagtccattacatagcataaggtggctaagagtgatcctggatgaaggacatgccatacgaaatccaaatgctcagcagacaaaagctgtacttgacttagaatcagaaagaagatgggttttgacaggtactccaatccagaattctttaaaggacttgtggtctcttctttcctttttaaaacttaaaccatttattgatagagaatggtggcatagaacaatacagcgtcctgtcacaatgggagatgaaggaggacttaggcgtttacagtccctaattaaaaatattacacttagaagaacaaagacaagcaaaattaaaggaaaacctgttttggagttaccagaacgtaaagtatttattcagcacattacactttcagatgaagagagaaagatttatcagtctgtgacacattatgcagatgtcctgggtcttttgcttagactgcggcaaatttgttgccatacttaccttcttacaaatgcagtgtcttccaatggcccctcaggaaatgatacacctgaagaactgagaaagaagttaataaggaagatgaagttaattctgagctcaggttcagatgaggaatgtgcaatttgcctggattctttaacagttcctgtgataacacattgtgcacatgtattttgtaaaccctgtatttgccaagtcattcagaatgagcagccacatgctaaatgccctttatgcagaaatgatatacatgaagataatttattagaatgtcctccagaagaattagcacgtgacagtgagaaaaagtctgatatggaatggacatccagttcaaagattaatgcgctaatgcacgcattgactgacttaagaaagaagaatcccaacataaaaagtttggttgtttctcagtttacaacattcctgtctttaatagaaataccacttaaagcctctggatttgtgtttactcgtttggatggttccatggcccaaaagaaaagagttgaatcaattcagtgttttcaaaacactgaagcaggatctccaactataatgcttctgtccttaaaagcaggtggagttggtttgaatctgtctgcagcttctcgagtgtttttaatggatccagcctggaatcctgctgctgaagatcagtgctttgacagatgccatagacttggtcagaagcaagaagttatcatcacaaaattcattgtaaaggactctgttgaagaaaatatgctgaaaatacaaaacaaaaagagagaacttgcagcaggagcctttggaactaaaaaaccaaatgctgacgaaatgaaacaagccaaaattaatgaaatcagaacattaattgacttataatttgtgggattttagtaaggtcagtttgattggatacttaagttttagaaatgagaaaaatacagagttttagaaatgagatctagagaacacgtcttctaaaaggggcatattttatattagtgaagaggtattactgacacaatttcttctatatatgaacctatttttaatgaaacttcaaatagcaataagttccgttatatactgtggcctgaaataatttgagaaaaaaggttactttgttattcagcttttcataatatctatgctgagtattttcacgtatcttccaagtactcagctttttcgtatttcaaataaggtcagaccttttatacttttgaccaaatagttattttctatgttggacacttagttatttaccaaagcctccgatttgtgatgcagtgtttgtagtccttgtaaacaatatatacagactatacaagaattaattttattgggctttcaaaaaccatatttgcattccagaaccaaatcttaaatgagaccaaagtccaggttagcacaggtttttatttttcctacagctacattgagatatagttcacataaatgacttggagttttatgttcatgaaaaaattagggattatgttaagagtactattttttccattttagttaagtagtactacactcattgtttaaatgtaacttgctgtgtctgaggtataaatatagtctgtgggagtgagaggcaaaccagtcctacccaatttgatttgaatattttaaattatggaactgctaaatagatatttctataaatagataatttttatttatgtagctttttttggaagtaactttataaatttttataattcagaagactactatatgtgagaggcgtgatatctggatggaagttgggctggatgatctccaaagtcgtttcaactcttaaagacatcttaatcctgaatgtaaacaattgttatgtgtttagaatcagaatttgattttgaacttgagtaattcatccttacagctatctgtagaattagtcatcttttttcttttcttttttttttacttttttgttaataagcaaacttatttgctgcagaatttgggttgactcctgagcatatttaaaacaaagaagctagaaatttagcagtcagattaggtaggtggttttatttcaaagggaaactttaatccaaagaaagattaattactctaacaaacaagagaagcttcatgtttgatgatacagatttaagaatacctgagacttaagagtgttggaagtcatttgatagaaagatgagatcggagacaatgttgtgttatagggcacacattgaaggtatatgccaaatctctcaccagataagtccttttctccctgtgccgttttcttgctcaaagggaacagtgaattagccagctagaatcttcctggtccctttttgaggcagtagcaggtaaggaaagggctgattttcatcaaaaccaagacctttctgcagggatgatagtggaataataatgtgggattagcccgctagcattaggagcagttgggaagttacctggtagatcaagcattacacacaaaaaatcaagttgatcagagtatgggttctccatatagcaatacttcagtgagattaagtataaacagtttttggcaaaaaacaacacagtctactctttctgcttacaaagacaaagccttacaaactcactatgaaggtaaagggaggacagcttgcttctttgcccagacatttacaaagttgtttttaaaacacactcataagtaagtttggcaagttgtttaaaaaatgtctctttgttttgtacagttctgttagatgttgttatattttaaaagtttaatttaaaaaatttaatttgtccttcctaagaaggataaatatataaaaaagccactggaatgaaaacttcctatatgctatgctgttgtcttattattatatagaaaaataactttagaaaaatattgaagacattgtattaccacttgtgattcaaacaattttgtggttaaaactggattttaaatttaaaaatcaataaaaatttcaaatgtt

SEQ ID NO: 227354 - DNA, 5280 bp, Homo sapiens
cacagagcgacgctggtctcccagattgttgcagaaggagacggcgtcgacgtctgactggactcgcggcgacttacctttcagtcgtgcgctcctgatccggcgctcggaatttgtccccggcttcagggctgcggggcctggaaggaggcgtatcgaggcggctcgaaaacgatccaggggagccgaggcgctcctcttgtcatcccactcagcgccatgtcctggatgttcaagagggatccagtttggaagtacttgcagactgtccagtatggagttcatggaaattttccacgcctctcatatccaactttctttccacgttttgaattccaagatgttatccctccagatgactttctaactagtgatgaagaagtagattccgttttatttggaagtttgagaggtcatgtggttggactacgctattacacgggagtagttaataataatgaaatggttgcattacaacgagatcctaataacccttatgataagaatgcaattaaagtaaacaatgtgaatggaaatcaagttggccatttaaagaaagagcttgcaggtgctttggcctatatcatggacaacaaattggcacaaattgaaggggtagttccttttggtgcaaacaatgcttttaccatgcctctgcatatgactttttggggaaaagaagaaaatagaaaagcggtttcagatcagttgaagaaacatggatttaaattgggtcctgcaccaaaaactttaggattcaatttggaaagtggttggggctctggaagagctggaccaagctatagtatgccagtgcatgctgcagtacagatgacaactgaacagcttaaaacagaatttgacaaattgtttgaagatttaaaagaagatgataaaacccatgaaatggaaccagctgaggctattgaaacaccactgcttccacatcaaaaacaagctctagcttggatggtgtcacgggaaaatagcaaagaacttccaccattctgggaacagcgaaatgacttatactataacacaataacaaatttttctgagaaggaccgaccagaaaatgtccatggaggaattttagctgatgatatgggtttgggtaaaactcttacggccattgcagtaatccttaccaacttccatgatggcagacctcttcctattgaaagagttaaaaagaatctactgaagaaggaatataatgttaacgatgactctatgaaacttggaggaaacaataccagtgaaaaggcagatggactaagcaaagacgcatctagatgtagtgaacaacccagtatttcagatatcaaggagaagagtaagtttcgcatgtcagaattgtctagctcccgccccaaaagaagaaaaactgctgtccagtacatagaaagcagtgattcagaggaaattgaaacaagtgaattgccgcagaaaatgaaaggcaaactgaaaaatgtacagtctgaaactaaaggcagggcgaaagcaggatcttctaaggttatagaagatgtggcatttgcatgtgcattaacttcatctgttcctacaacaaaaaagaaaatgttgaaaaagggagcttgtgcagtggaggggtcaaagaaaactgatgttgaggagagaccaagaacaacactgatcatctgtccgctttctgtgttaagcaactggattgaccagtttggacaacatataaaatcagatgtacacttgaatttttatgtttattatggtcctgatcgtattagagaaccggccttactttcaaaacaggatattgttttgactacgtataatattttaactcatgactatggaactaaaggagatagtccattacatagcataaggtggctaagagtgatcctggatgaaggacatgccatacgaaatccaaatgctcagcagacaaaagctgtacttgacttagaatcagaaagaagatgggttttgacaggtactccaatccagaattctttaaaggacttgtggtctcttctttcctttttaaaacttaaaccatttattgatagagaatggtggcatagaacaatacagcgtcctgtcacaatgggagatgaaggaggacttaggcgtttacagtccctaattaaaaatattacacttagaagaacaaagacaagcaaaattaaaggaaaacctgttttggagttaccagaacgtaaagtatttattcagcacattacactttcagatgaagagagaaagatttatcagtctgtgaaaaatgaaggcagagccactattggaaggtattttaatgaagggactgtcctggcacattatgcagatgtcctgggtcttttgcttagactgcggcaaatttgttgccatacttaccttcttacaaatgcagtgtcttccaatggcccctcaggaaatgatacacctgaagaactgagaaagaagttaataaggaagatgaagttaattctgagctcaggttcagatgaggaatgtgcaatttgcctggattctttaacagttcctgtgataacacattgtgcacatgtattttgtaaaccctgtatttgccaagtcattcagaatgagcagccacatgctaaatgccctttatgcagaaatgatatacatgaagataatttattagaatgtcctccagaagaattagcacgtgacagtgagaaaaagtctgatatggaatggacatccagttcaaagattaatgcgctaatgcacgcattgactgacttaagaaagaagaatcccaacagcctctggatttgtgtttactcgtttggatggttccatggcccaaaagaaaagagttgaatcaattcagtgttttcaaaacactgaagcaggatctccaactataatgcttctgtccttaaaagcaggtggagttggtttgaatctgtctgcagcttctcgagtgtttttaatggatccagcctggaatcctgctgctgaagatcagtgctttgacagatgccatagacttggtcagaagcaagaagttatcatcacaaaattcattgtaaaggactctgttgaagaaaatatgctgaaaatacaaaacaaaaagagagaacttgcagcaggagcctttggaactaaaaaaccaaatgctgacgaaatgaaacaagccaaaattaatgaaatcagaacattaattgacttataatttgtgggattttagtaaggtcagtttgattggatacttaagttttagaaatgagaaaaatacagagttttagaaatgagatctagagaacacgtcttctaaaaggggcatattttatattagtgaagaggtattactgacacaatttcttctatatatgaacctatttttaatgaaacttcaaatagcaataagttccgttatatactgtggcctgaaataatttgagaaaaaaggttactttgttattcagcttttcataatatctatgctgagtattttcacgtatcttccaagtactcagctttttcgtatttcaaataaggtcagaccttttatacttttgaccaaatagttattttctatgttggacacttagttatttaccaaagcctccgatttgtgatgcagtgtttgtagtccttgtaaacaatatatacagactatacaagaattaattttattgggctttcaaaaaccatatttgcattccagaaccaaatcttaaatgagaccaaagtccaggttagcacaggtttttatttttcctacagctacattgagatatagttcacataaatgacttggagttttatgttcatgaaaaaattagggattatgttaagagtactattttttccattttagttaagtagtactacactcattgtttaaatgtaacttgctgtgtctgaggtataaatatagtctgtgggagtgagaggcaaaccagtcctacccaatttgatttgaatattttaaattatggaactgctaaatagatatttctataaatagataatttttatttatgtagctttttttggaagtaactttataaatttttataattcagaagactactatatgtgagaggcgtgatatctggatggaagttgggctggatgatctccaaagtcgtttcaactcttaaagacatcttaatcctgaatgtaaacaattgttatgtgtttagaatcagaatttgattttgaacttgagtaattcatccttacagctatctgtagaattagtcatcttttttcttttcttttttttttacttttttgttaataagcaaacttatttgctgcagaatttgggttgactcctgagcatatttaaaacaaagaagctagaaatttagcagtcagattaggtaggtggttttatttcaaagggaaactttaatccaaagaaagattaattactctaacaaacaagagaagcttcatgtttgatgatacagatttaagaatacctgagacttaagagtgttggaagtcatttgatagaaagatgagatcggagacaatgttgtgttatagggcacacattgaaggtatatgccaaatctctcaccagataagtccttttctccctgtgccgttttcttgctcaaagggaacagtgaattagccagctagaatcttcctggtccctttttgaggcagtagcaggtaaggaaagggctgattttcatcaaaaccaagacctttctgcagggatgatagtggaataataatgtgggattagcccgctagcattaggagcagttgggaagttacctggtagatcaagcattacacacaaaaaatcaagttgatcagagtatgggttctccatatagcaatacttcagtgagattaagtataaacagtttttggcaaaaaacaacacagtctactctttctgcttacaaagacaaagccttacaaactcactatgaaggtaaagggaggacagcttgcttctttgcccagacatttacaaagttgtttttaaaacacactcataagtaagtttggcaagttgtttaaaaaatgtctctttgttttgtacagttctgttagatgttgttatattttaaaagtttaatttaaaaaatttaatttgtccttcctaagaaggataaatatataaaaaagccactggaatgaaaacttcctatatgctatgctgttgtcttattattatatagaaaaataactttagaaaaatattgaagacattgtattaccacttgtgattcaaacaattttgtggttaaaactggattttaaatttaaaaatcaataaaaatttcaaatgtt

SEQ ID NO: 227355 - DNA, 4365 bp, Homo sapiens
cacagagcgacgctggtctcccagattgttgcagaaggagacggcgtcgacgtctgactggactcgcggcgacttacctttcagtcgtgcgctcctgatccggcgctcggaatttgtccccggcttcagggctgcggggcctggaaggaggcgtatcgaggcggctcgaaaacgatccaggggagccgaggcgctcctcttgtcatcccactcagcgccatgtcctggatgttcaagagggatccagtttggaagtacttgcagactgtccagtatggagttcatggaaattttccacgcctctcatatccaactttctttccacgttttgaattccaagatgttatccctccagatgactttctaactagtgatgaagaagtagattccgttttatttggaagtttgagaggtcatgtggttggactacgctattacacgggagtagttaataataatgaaatggttgcattacaacgagatcctaataacccttatgataagaatgcaattaaagtaaacaatgtgaatggaaatcaagttggccatttaaagaaagagcttgcaggtgctttggcctatatcatggacaacaaattggcacaaattgaaggggtagttccttttggtgcaaacaatgcttttaccatgcctctgcatatgactttttggggaaaagaagaaaatagaaaagcggtttcagatcagttgaagaaacatggatttaaattgggtcctgcaccaaaaactttaggattcaatttggaaagtggttggggctctggaagagctggaccaagctatagtatgccagtgcatgctgcagtacagatgacaactgaacagcttaaaacagaatttgacaaattgtttgaagatttaaaagaagatgataaaacccatgaaatggaaccagctgaggctattgaaacaccactgcttccacatcaaaaacaagctctagcttggatggtgtcacgggaaaatagcaaagaacttccaccattctgggaacagcgaaatgacttatactataacacaataacaaatttttctgagaaggaccgaccagaaaatgtccatggaggaattttagctgatgatatgggtttgggtaaaactcttacggccattgcagtaatccttaccaacttccatgatggcagacctcttcctattgaaagagttaaaaagaatctactgaagaaggaatataatgttaacgatgactctatgaaacttggaggaaacaataccagtgaaaaggcagatggactaagcaaagacgcatctagatgtagtgaacaacccagtatttcagatatcaaggagaagagtaagtttcgcatgtcagaattgtctagctcccgccccaaaagaagaaaaactgctgtccagtacatagaaagcagtgattcagaggaaattgaaacaagtgaattgccgcagaaaatgaaaggcaaactgaaaaatgtacagtctgaaactaaaggcagggcgaaagcaggatcttctaaggttatagaagatgtggcatttgcatgtgcattaacttcatctgttcctacaacaaaaaagaaaatgttgaaaaagggagcttgtgcagtggaggggtcaaagaaaactgatgttgaggagagaccaagaacaacactgatcatctgtccgctttctgtgttaagcaactggattgaccagtttggacaacatataaaatcagatgtacacttgaatttttatgtttattatggtcctgatcgtattagagaaccggccttactttcaaaacaggatattgttttgactacgtataatattttaactcatgactatggaactaaaggagatagtccattacatagcataaggtggctaagagtgatcctggatgaaggacatgccatacgaaatccaaatgctcagcagacaaaagctgtacttgacttagaatcagaaagaagatgggttttgacaggtactccaatccagaattctttaaaggacttgtggtctcttctttcctttttaaaacttaaaccatttattgatagagaatggtggcatagaacaatacagcgtcctgtcacaatgggagatgaaggaggacttaggcgtttacagtccctaattaaaaatattacacttagaagaacaaagacaagcaaaattaaaggaaaacctgttttggagttaccagaacgtaaagtatttattcagcacattacactttcagatgaagagagaaagatttatcagtctgtgaaaaatgaaggcagagccactattggaaggtattttaatgaagggactgtcctggcacattatgcagatgtcctgggtcttttgcttagactgcggcaaatttgttgccatacttaccttcttacaaatgcagtgtcttccaatggcccctcaggaaatgatacacctgaagaactgagaaagaagttaataaggaagatgaagttaattctgagctcaggttcagatgaggaatgtgcaatttgcctggattctttaacagttcctgtgataacacattgtgcacatgtattttgtaaaccctgtatttgccaagtcattcagaatgagcagccacatgctaaatgccctttatgcagaaatgatatacatgaagataatttattagaatgtcctccagaagaattagcacgtgacagtgagaaaaagtctgatatggaatggacatccagttcaaagattaatgcgctaatgcacgcattgactgacttaagaaagaagaatcccaacataaaaagtttggttgtttctcagtttacaacattcctgtctttaatagaaataccacttaaagcctctggatttgtgtttactcgtttggatggttccatggcccaaaagaaaagagttgaatcaattcagtgttttcaaaacactgaagcaggatctccaactataatgcttctgtccttaaaagcaggtggagttggtttgaatctgtctgcagcttctcgagtgtttttaatggatccagcctggaatcctgctgctgaagatcagtgctttgacagatgccatagacttggtcagaagcaagaagttatcatcacaaaattcattgtaaaggactctgttgaagaaaatatgctgaaaatacaaaacaaaaagagagaacttgcagcaggagcctttggaactaaaaaaccaaatgctgacgaaatgaaacaagccaaaattaatgaaatcagaacattaattgacttataatttgtgggattttagtaagaagactactatatgtgagaggcgtgatatctggatggaagttgggctggatgatctccaaagtcgtttcaactcttaaagacatcttaatcctgaatgtaaacaattgttatgtgtttagaatcagaatttgattttgaacttgagtaattcatccttacagctatctgtagaattagtcatcttttttcttttcttttttttttacttttttgttaataagcaaacttatttgctgcagaatttgggttgactcctgagcatatttaaaacaaagaagctagaaatttagcagtcagattaggtaggtggttttatttcaaagggaaactttaatccaaagaaagattaattactctaacaaacaagagaagcttcatgtttgatgatacagatttaagaatacctgagacttaagagtgttggaagtcatttgatagaaagatgagatcggagacaatgttgtgttatagggcacacattgaaggtatatgccaaatctctcaccagataagtccttttctccctgtgccgttttcttgctcaaagggaacagtgaattagccagctagaatcttcctggtccctttttgaggcagtagcaggtaaggaaagggctgattttcatcaaaaccaagacctttctgcagggatgatagtggaataataatgtgggattagcccgctagcattaggagcagttgggaagttacctggtagatcaagcattacacacaaaaaatcaagttgatcagagtatgggttctccatatagcaatacttcagtgagattaagtataaacataagtttggcaagttgtttaaaaaatgtctctttgttttgtacagttctgttagatgttgttatattttaaaagtttaatttaaaaaatttaatttgtccttcctaagaaggataaatatataaaaaagccactggaatgaaaacttcctatatgctatgctgttgtcttattattatatagaaaaataactttagaaaaatattgaagacattgtattaccacttgtgattcaaacaattttgtggttaaaactggattttaaatttaaaaatcaataaaaatttcaaatgtt

SEQ ID NO: 227356 - DNA, 4166 bp, Homo sapiens
cacagagcgacgctggtctcccagattgttgcagaaggagacggcgtcgacgtctgactggactcgcggcgacttacctttcagtcgtgcgctcctgatccggcgctcggaatttgtccccggcttcagggctgcggggcctggaaggaggcgtatcgaggcggctcgaaaacgatccaggggagccgaggcgctcctcttgtcatcccactcagcgccatgtcctggatgttcaagagggatccagtttggaagtacttgcagactgtccagtatggagttcatggaaattttccacgcctctcatatccaactttctttccacgttttgaattccaagatgttatccctccagatgactttctaactagtgatgaagaagtagattccgttttatttggaagtttgagaggtcatgtggttggactacgctattacacgggagtagttaataataatgaaatggttgcattacaacgagatcctaataacccttatgataagaatgcaattaaagtaaacaatgtgaatggaaatcaagttggccatttaaagaaagagcttgcaggtgctttggcctatatcatggacaacaaattggcacaaattgaaggggtagttccttttggtgcaaacaatgcttttaccatgcctctgcatatgactttttggggaaaagaagaaaatagaaaagcggtttcagatcagttgaagaaacatggatttaaattgggtcctgcaccaaaaactttaggattcaatttggaaagtggttggggctctggaagagctggaccaagctatagtatgccagtgcatgctgcagtacagatgacaactgaacagcttaaaacagaatttgacaaattgtttgaagatttaaaagaagatgataaaacccatgaaatggaaccagctgaggctattgaaacaccactgcttccacatcaaaaacaagctctagcttggatggtgtcacgggaaaatagcaaagaacttccaccattctgggaacagcgaaatgacttatactataacacaataacaaatttttctgagaaggaccgaccagaaaatgtccatggaggaattttagctgatgatatgggtttgggtaaaactcttacggccattgcagtaatccttaccaacttccatgatggcagacctcttcctattgaaagagttaaaaagaatctactgaagaaggaatataatgttaacgatgactctatgaaacttggaggaaacaataccagtgaaaaggcagatggactaagcaaagacgcatctagatgtagtgaacaacccagtatttcagatatcaaggagaagagtaagtttcgcatgtcagaattgtctagctcccgccccaaaagaagaaaaactgctgtccagtacatagaaagcagtgattcagaggaaattgaaacaagtgaattgccgcagaaaatgaaaggcaaactgaaaaatgtacagtctgaaactaaaggcagggcgaaagcaggatcttctaaggttatagaagatgtggcatttgcatgtgcattaacttcatctgttcctacaacaaaaaagaaaatgttgaaaaagggagcttgtgcagtggaggggtcaaagaaaactgatgttgaggagagaccaagaacaacactgatcatctgtccgctttctgtgttaagcaactggattgaccagtttggacaacatataaaatcagatgtacacttgaatttttatgtttattatggtcctgatcgtattagagaaccggccttactttcaaaacaggatattgttttgactacgtataatattttaactcatgactatggaactaaaggagatagtccattacatagcataaggtggctaagagtgatcctggatgaaggacatgccatacgaaatccaaatgctcagcagacaaaagctgtacttgacttagaatcagaaagaagatgggttttgacaggtactccaatccagaattctttaaaggacttgtggtctcttctttcctttttaaaacttaaaccatttattgatagagaatggtggcatagaacaatacagcgtcctgtcacaatgggagatgaaggaggacttaggcgtttacagtccctaattaaaaatattacacttagaagaacaaagacaagcaaaattaaaggaaaacctgttttggagttaccagaacgtaaagtatttattcagcacattacactttcagatgaagagagaaagatttatcagtctgtgaaaaatgaaggcagagccactattggaaggtattttaatgaagggactgtcctggcacattatgcagatgtcctgggtcttttgcttagactgcggcaaatttgttgccatacttaccttcttacaaatgcagtgtcttccaatggcccctcaggaaatgatacacctgaagaactgagaaagaagttaataaggaagatgaagttaattctgagctcaggttcagatgaggaatgtgcaatttgcctggattctttaacagttcctgtgataacacattgtgcacatgtattttgtaaaccctgtatttgccaagtcattcagaatgagcagccacatgctaaatgccctttatgcagaaatgatatacatgaagataatttattagaatgtcctccagaagaattagcacgtgacagtgagaaaaagtctgatatggaatggacatccagttcaaagattaatgcgctaatgcacgcattgactgacttaagaaagaagaatcccaacataaaaagtttggttgtttctcagtttacaacattcctgtctttaatagaaataccacttaaagcctctggatttgtgtttactcgtttggatggttccatggcccaaaagaaaagagttgaatcaattcagtgttttcaaaacactgaagcaggatctccaactataatgcttctgtccttaaaagcaggtggagttggtttgaatctgtctgcagcttctcgagtgtttttaatggatccagcctggaatcctgctgctgaagatcagtgctttgacagatgccatagacttggtcagaagcaagaagttatcatcacaaaattcattgtaaaggactctgttgaagaaaatatgctgaaaatacaaaacaaaaagagagaacttgcagcaggagcctttggaactaaaaaaccaaatgctgacgaaatgaaacaagccaaaattaatgaaatcagaacattaattgacttataatttgtgggattttagtaagaagactactatatgtgagaggcgtgatatctggatggaagttgggctggatgatctccaaagtcgtttcaactcttaaagacatcttaatcctgaatgtaaacaattgttatgtgtttagaatcagaatttgattttgaacttgagtaattcatccttacagctatctgtagaattagtcatcttttttcttttcttttttttttacttttttgttaataagcaaacttatttgctgcagaatttgggttgactcctgagcatatttaaaacaaagaagctagaaatttagcagtcagattaggtaggtggttttatttcaaagggaaactttaatccaaagaaagattaattactctaacaaacaagagaagcttcatgtttgatgatacagatttaagaatacctgagacttaagagtgttggaagtcatttgatagaaagatgagatcggagacaatgttgtgttatagggcacacattgaaggtatatgccaaatctctcaccagataagtccttttctccctgtgccgttttcttgctcaaagggaacagttacctaaatggctgtttaccaagctattgtcactgcagtgcattataccaaagagcgaagtcagtgccactgaaaatacagaacccattaatatcgtggctatctgattacatttatattccaagatgaaccttttttatatatgctaaaaattttggggaatatgtttggggatgtattatggagctaaaactctaacctcttaatagtttaatagaacttaaaaatttttaatacaattacccaattggtgatatgatcttaagcttttgtgtcagattatttagtatgatgacttcatgcttaattatgcctgattatggatgacgtattactgtggtg

SEQ ID NO: 227357 - DNA, 1637 bp, Homo sapiens
caaagtccaggttagcacaggtttttggtctcatttaagatttggttctggaatgagaccaaagtccaggttagcacaggtttttatttttcctacagctacattgagatatagttcacataaatgacttggagttttatgttcatgaaaaaattagggattatgttaagagtactattttttccattttagttaagtagtactacactcattgtttaaatgtaacttgctgtgtctgaggtataaatatagtctgtgggagtgagaggcaaaccagtcctacccaatttgatttgaatattttaaattatggaactgctaaatagatatttctataaatagataatttttatttatgtagctttttttggaagtaactttataaatttttataattcagaagactactatatgtgagaggcgtgatatctggatggaagttgggctggatgatctccaaagtcgtttcaactcttaaagacatcttaatcctgaatgtaaacaattgttatgtgtttagaatcagaatttgattttgaacttgagtaattcatccttacagctatctgtagaattagtcatcttttttcttttcttttttttttacttttttgttaataagcaaacttatttgctgcagaatttgggttgactcctgagcatatttaaaacaaagaagctagaaatttagcagtcagattaggtaggtggttttatttcaaagggaaactttaatccaaagaaagattaattactctaacaaacaagagaagcttcatgtttgatgatacagatttaagaatacctgagacttaagagtgttggaagtcatttgatagaaagatgagatcggagacaatgttgtgttatagggcacacattgaaggtatatgccaaatctctcaccagataagtccttttctccctgtgccgttttcttgctcaaagggaacagtgaattagccagctagaatcttcctggtccctttttgaggcagtagcaggtaaggaaagggctgattttcatcaaaaccaagacctttctgcagggatgatagtggaataataatgtgggattagcccgctagcattaggagcagttgggaagttacctggtagatcaagcattacacacaaaaaatcaagttgatcagagtatgggttctccatatagcaatacttcagtgagattaagtataaacagtttttggcaaaaaacaacacagtctactctttctgcttacaaagacaaagccttacaaactcactatgaaggtaaagggaggacagcttgcttctttgcccagacatttacaaagttgtttttaaaacacactcataagtaagtttggcaagttgtttaaaaaatgtctctttgttttgtacagttctgttagatgttgttatattttaaaagtttaatttaaaaaatttaatttgtccttcctaagaaggataaatatataaaaaagccactggaatgaaaacttcctatatgctatgctgttgtcttattattatatagaaaaataactttagaaaaatattgaagacattgtattaccacttgtgattcaaacaattttgtggttaaaactggattttaaatttaaaaatcaataaaaatttcaaatgtt

SEQ ID NO: 227358 - DNA, 1523 bp, Homo sapiens
gggcaggaagttggagaaacagaaggcaccgagacagaatgtgcaggcagacacaggaaaggagacactgaacgggtcaaaagcacgtctgaaaggaccctggccaagaactaccccaaatggctaaaagacaccagggaaaatatgctgaaaatacaaaacaaaaagagagaacttgcagcaggagcctttggaactaaaaaaccaaatgctgacgaaatgaaacaagccaaaattaatgaaatcagaacattaattgacttataatttgtgggattttagtaagaagactactatatgtgagaggcgtgatatctggatggaagttgggctggatgatctccaaagtcgtttcaactcttaaagacatcttaatcctgaatgtaaacaattgttatgtgtttagaatcagaatttgattttgaacttgagtaattcatccttacagctatctgtagaattagtcatcttttttcttttcttttttttttacttttttgttaataagcaaacttatttgctgcagaatttgggttgactcctgagcatatttaaaacaaagaagctagaaatttagcagtcagattaggtaggtggttttatttcaaagggaaactttaatccaaagaaagattaattactctaacaaacaagagaagcttcatgtttgatgatacagatttaagaatacctgagacttaagagtgttggaagtcatttgatagaaagatgagatcggagacaatgttgtgttatagggcacacattgaaggtatatgccaaatctctcaccagataagtccttttctccctgtgccgttttcttgctcaaagggaacagtgaattagccagctagaatcttcctggtccctttttgaggcagtagcaggtaaggaaagggctgattttcatcaaaaccaagacctttctgcagggatgatagtggaataataatgtgggattagcccgctagcattaggagcagttgggaagttacctggtagatcaagcattacacacaaaaaatcaagttgatcagagtatgggttctccatatagcaatacttcagtgagattaagtataaacagtttttggcaaaaaacaacacagtctactctttctgcttacaaagacaaagccttacaaactcactatgaaggtaaagggaggacagcttgcttctttgcccagacatttacaaagttgtttttaaaacacactcataagtaagtttggcaagttgtttaaaaaatgtctctttgttttgtacagttctgttagatgttgttatattttaaaagtttaatttaaaaaatttaatttgtccttcctaagaaggataaatatataaaaaagccactggaatgaaaacttcctatatgctatgctgttgtcttattattatatagaaaaataactttagaaaaatattgaagacattgtattaccacttgtgattcaaacaattttgtggttaaaactggattttaaatttaaaaatcaataaaaatttcaaatgtt

SEQ ID NO: 227359 - DNA, 956 bp, Homo sapiens
gagcggccgcccgggcaggtacgcgggtggttttatttcaaagggaaactttaatccaaagaaagattaattactctaacaaacaagagaagcttcatgtttgatgatacagatttaagaatacctgagacttaagagtgttggaagtcatttgatagaaagatgagatcggagacaatgttgtgttatagggcacacattgaaggtatatgccaaatctctcaccagataagtccttttctccctgtgccgttttcttgctcaaagggaacagtgaattagccagctagaatcttcctggtccctttttgaggcagtagcaggtaaggaaagggctgattttcatcaaaaccaagacctttctgcagggatgatagtggaataataatgtgggattagcccgctagcattaggagcagttgggaagttacctggtagatcaagcattacacacaaaaaatcaagttgatcagagtatgggttctccatatagcaatacttcagtgagattaagtataaacagtttttggcaaaaaacaacacagtctactctttctgcttacaaagacaaagccttacaaactcactatgaaggtaaagggaggacagcttgcttctttgcccagacatttacaaagttgtttttaaaacacactcataagtaagtttggcaagttgtttaaaaaatgtctctttgttttgtacagttctgttagatgttgttatattttaaaagtttaatttaaaaaatttaatttgtccttcctaagaaggataaatatataaaaaagccactggaatgaaaacttcctatatgctatgctgttgtcttattattatatagaaaaataactttagaaaaatattgaagacattgtattaccacttgtgattcaaacaattttgtggttaaaactggattttaaatttaaaaatcaataaaaatttcaaatgtt

SEQ ID NO: 227360 - DNA, 1239 bp, Homo sapiens
cacagagcgacgctggtctcccagattgttgcagaaggagacggcgtcgacgtctgactggactcgcggcgacttacctttcagtcgtgcgctcctgatccggcgctcggaatttgtccccggcttcagggctgcggggcctggaaggaggcgtatcgaggcggctcgaaaacgatccaggggagccgaggcgctcctcttgtcatcccactcagcgccatgtcctggatgttcaagagggatccagtttggaagtacttgcagactgtccagtatggagttcatggaaattttccacgcctctcatatccaactttctttccacgttttgaattccaagatgttatccctccagatgactttctaactagtgatgaagaagtagattccgttttatttggaagtttgagaggtcatgtggttggactacgctattacacgggagtagttaataataatgaaatggttgcattacaacgagatcctaataacccttatgataagaatgcaattaaagtaaacaatgtgaatggaaatcaagttggccatttaaagaaagagcttgcaggtgctttggcctatatcatggacaacaaattggcacaaattgaaggggtagttccttttggtgcaaacaatgcttttaccatgcctctgcatatgactttttggggaaaagaagaaaatagaaaagcggtttcagatcagttgaagaaacatggatttaaattgggtcctgcaccaaaaactttaggattcaatttggaaagtggttggggctctggaagagctggaccaagctatagtatgccagtgcatgctgcagtacagatgacaactgaacagcttaaaacagaatttgacaaattgtttgaagatttaaaagaagatgataaaacccatgaaatggaaccagctgaggctattgaaacaccactgcttccacatcaaaaacaagctctagcttggatggtgtcacgggaaaatagcaaagaacttccaccattctgggaacagcgaaatgacttatactataacacaataacaaatttttctgagaaggaccgaccagaaaatgtccatggaggaattttagctgatgatatgggtttggtaattatttttttctttagttaataaaatctaattttgtgattatgattttctagaaagtaattttgaagtaaaaagagataggaatatgttggtaccagtttgggactagatcttactatcttt

SEQ ID NO: 227361 - DNA, 435 bp, Homo sapiens
gtaattctgctttcattcctgtcattttagtgttctgttgttgaccactggctttttatttttagtggtgaatttgaggggaaatggaatgggttcagattattagagtgttctttcagtcttaattttttgttttaaatgagtagtcttttgcattttagggaaataacatttcaggaccttttctttatgataaaaacttttagactaattttactgatttaaaatggaatctaatggacatcttaatattttttgcagattaatgcgctaatgcacgcattgactgacttaagaaagaagaatcccaacataaaaagtttggttgtttctcagtttacaacattcctgtctttaatagaaataccacttaagtaagttccacagtgtttttcactttcagtaaaaggattttatataatcatattgatttgg

SEQ ID NO: 227362 - DNA, 499 bp, Homo sapiens
atcaagagttcaggattaaatgtagaattgtagaatagcagtcattcaataaaatgacacttctcagagatacttgtagtattttatagtgtaaatcatttaataattccctaataatgcagtgggggaaagcattttctaactaaatgaaatactcatttttcattaatatacagtacacttttgtgaccttgaatgatatttgatattcgattacttgattttaaaatgggaacgtttttctggtgaactgggtttcacaatctgaccatttatctttttaaaacatttttaagggtaaaactcttacggccattgcagtaatccttaccaacttccatgatggcagacctcttcctattgaaagagttaaaaagaatctactgaagaaggtaaagtagtagtaagtgcgctttatgtgaaacctccagtttattgtgaaatctttaaatttcatcattaaaaaaaactaccaagaaattgtgttttcagaaatgcg

SEQ ID NO: 227363 - DNA, 398 bp, Homo sapiens
caccgtgttggtcgggctgatcttgaagtcctggtctcaggtgatccacctgtcttggcctcccaaagtgctgggattacaggtatgagccactgcttcctgctgatgttataattttaaagaacatcagtgtatttgcagtcactgaccgaaatattgtgtggtgcatgactgtacttgggttaaagtacctagtttagttattaagtatgttgtattaattttatgttccctcctgttatcaaaaggttatttatgaacattaataactgctaactagttaacactggggtgtcaggatctcctcaaaaagaatagtaatctgacttcgaactctaagaagaatctatctttctctttgtgcatgcccaaaataaatgacaaatacattcttatta

SEQ ID NO: 227364 - DNA, 536 bp, Homo sapiens
ggtaatttgttttagtgatggaaaactcatacagcagcagaagctttttgacacagatagtccagatgtttattatatgtttaaatctcagctttcatttttaaatttccaagcgctgtttctcatacaaagaagtttctttgtttcaaatcatactagtcttgtttagtgtataaaataagagtcagatggaaatggcatactacttttaatttgctttgaagaaagtaactctcatcttaggattcaacattgagggtggaaaaaagagggaaggaagagggaaagaagaaaaacaaaagtaaagaccagttgtttgtataaatgcccctcaatttggatctttatgatgttttacaattagtcctaattgtatcacattacgaggtgtacaatatcagtttgttccattattggtgatgttggctatggtggcatccttcaaattttaatatgataaagttactatctttaactctttgtaattgataagtaatttatgagacagtaaagattttcttttctattcatccact

SEQ ID NO: 227365 - DNA, 418 bp, Homo sapiens
gctactgcctacaagaagaagtgtgtcaaggatatttcatccccattttcaagaatttttgcctataggactcccaggagcacaggagcccactacaaggaaggttatacaaagaagtctctctgtgataagagcaacagctgcaaagatggcggctcactacctccatagtgtggtcggttcatgcaaccccagacgctaaccgagagtgcctgcctttcccatgggaaggatgtgaagacggtcccaggaggcacgccctctacatttccgggagtcaggctttcagaggggactggaagaacgtttttcacagtttggcaaaagattgtcttaagcactgttgattgattgtctctgcccccatcaatgttgtgattatccaagagatataataaagggctctctttatcacagt

SEQ ID NO: 227366 - DNA, 791 bp, Homo sapiens
gcagtttgatttggattccatttggacattcatctttggagttcctgcctccagcggaactgtggtctcttctatccataacgtatgcacagaagctgtttttttattattgggaatgctccgcagcatgctgacttcaccttggcaatcagaagaagagggatcttggctccgagaatatcctgtgaccctgatgcagttcttcagatatttgtatcacaacgtgccagaccttgcctccatgtggatgagccctgacttcctgtgtgcattagcagccaccgtcttccccttcaatattcgcccttactcagagatggtgactgaccttgatgatgaagttggatctccagcagaagagtttaaagcgtttgcagcagacacagggatgaacaggagccaatcagagtactgcaatgtgggcaccaagacatatctgaccaatcacccggctaaaaagttcgtttttgacttcatgcgggtcttaatcatagacaacctctgtctcactcctgccagcaagcaaactccactaattgatcttttgttggaggtaaagaaaaagaaacgcatttacatctcttttgcattactttttaaattagaacattagtaaccaaacaagttctataacaaggatttctaattcctcttgtttatgtgtaggcagaacatgttataggctgtggaaagttcttaatcccacatgtgctttaaaccctatcagtttgttcttttccttccctcaaggatgtctctaattcagtcctttatcatcctttctctaagag

SEQ ID NO: 227367 - DNA, 519 bp, Homo sapiens
gtcagagtctaatgtgattaccgtatctttccacttgattttactaggtgactgaccttgatgatgaagttggatctccagcagaagagtttaaagcgtttgcagcagacacagggatgaacaggagccaatcagagtactgcaatgtgggcaccaagacatatctgaccaatcacccggctaaaaagttcgtttttgacttcatgcgggtcttaatcatagacaacctctgtctcactcctgccagcaagcaaactccactaattgatcttttgttggaggtaaagaaaaagaaacgcatttacatctcttttgcattactttttaaattagaacattagtaaccaaacaagttctataacaaggatttctaattcctcttgtttatgtgtaggcagaacatgttataggctgtggaaagttcttaatcccacatgtgctttaaaccctatcagtttgttcttttccttccctcaaggatgtctctaattcagtcctttatcatcctttctctaagag

SEQ ID NO: 227368 - DNA, 474 bp, Homo sapiens
ctgcagagtcccatacgtctccttaaatagctaagaaacttgccatattcatccattttgcattgctacgaaggaatacctgaggctgggtacttcataaacaaagtttatttggctcacgttctgcagtctatacaagaagcatggcacccgcatctgcttctggtgaggccctcggggagcttttactcatggcagaaggcaaggggagctggcgtgccacatggcaagagggggcaagagggggaaaaggggaggtcccagcctctttaacaaccagatctcccacgaactcattaccatagggtgggcacaaaggcattcctgaaggatccacccccatgacccaaacaccacccactaggcccacctccaacattagggatcacatctcaacatgaaattggaagaggacaaacttctaaactgtatcattgtcctaacacaaagaaccagtcagatcatcaaaatcac

SEQ ID NO: 227369 - DNA, 1358 bp, Homo sapiens
ggcggtctgtttctcagccagcgggagccgcgtggcctgggtaagccacgacagcaccgtctgcctggctgatgccgacaagaagatggccgtcgcgactctggcctctgaaacactaccactgctggcgctgaccttcatcacagacaacagcctggtggcagcgggccacgactgcttcccggtgctgttcacctatgacgccgccgcggggatgctgagcttcggcgggcggctggacgttcctaagcagagctcgcagcgtggcttgacggcccgcgagcgcttccagaacctggacaagaaggcgagctccgagggtggcacggctgcgggcgcgggcctagactcgctgcacaagaacagcgtcagccagatctcggtgctcagcggcggcaaggccaagtgctcgcagttctgcaccactggcatggatggcggcatgagtatctgggatgtgaagagcttggagtcagccttgaaggacctcaagatcaaatgacctgtgaggaatatgttgccttcatcctagctgctggggaagcggggagaggggtcagggaggctaatggttgctttgctgaatgtttctggggtaccaatacgagttcccataggggctgctccctcaaaaagggaggggacagatggggagcttttcttacctattcaaggaatacgtgcctttttcttaaatgctttcatttattgaaaaaaaaaaaaaatgcccccaaagcactatgctggtcatgaactgcttcaaaatgtggaggtaataaaatgcaactgtgtaaaaaaaaaaaaaaaaaaaaaaaaaaaaaaaaaaaaagaaaaaaaagaaaaaaaaaaaaaaagaaaaaaaaaaaaagaaaaaagagagggggcggcgcgcacaaaaaatctaccccggagggggcggcacacaaggcagcgagcacccgccgatttttagtaacaaaagggcgccgccccacaaaagggggacgcctactatacaacggcaccgaagaggggcggcagcgctcgatattacaccacgcaggctgcgggaggaggaggagaagcaccacgccgccatcgtggagatatctttggcagaagaggagcagaccacccacatcgggggagggggcggaagacgaccacaggcggggagaacaaaccgccccaccgaaagcggagatattatattacgccccgcccgcgggggggagactaactataagcacttcgagcgagggtgatttaggtggtggtcctacaccccacccgcgctcttatagttgccgcccggcgtgaagaaaaatcattgctggcaccgcgggagtgataatgcgcgcaaaaattttaccccgggg

SEQ ID NO: 227370 - DNA, 1463 bp, Homo sapiens
ctcactagtatgtaagaagataacactttggaaagcttaaggattttaggagctgtgtgcttattatatcacaatattatattcccacatagagaactgccgtgtccctagatttatcatgggctgcttctaatttctccatgtaggactttccgataggatttattcctaattatctctgactttatagccctagtccctgtagttttcagccctctattctacgtttttgtgggcgaaagattacctaggtgccgaggcaagagactgaaggcacaaactgtttcagtataataaagaaaatagttaaaataagaatagttataatacaaattagatatagagatgatcatggacaattatcaatcattattataaacattaatcattagcttttaatattactctttgttgctttactaatataacctaggaataaccggtgggtatagggtcaggtgttgacgggatattgtgagaagtgacctagaaggcaagaggtgagccttctgtcacgcccacataagggccgcttgagggctctttggtcaagtggtaacgccagtgtctgtgaaggcacctgttacttagcagaccgcgaaagggagtctcctttccttggaggagtcagggaacactctgctccaccagcttcttgtggaaggctggatattatctaggcctgcccgcagtcatctggaggcctaaacccctccctgtggtgctgtgcttcagtggtcactctccttgtccactttcatgttcctcccgtactcctggttcctctttgaagttcgtagtagatagcagtagaagaaatagtgaaagtcttaaagtatttgatctttcttataagtgcatagaagaaaacgctgacatatgctgccttctctatctctgcggtggctacctaaaagggaagggccccctgtcccatgatcatgtgacttgcttcaccttatcacttagaagattcatcctccttaccctgcgccccctcgtcttgtatgcaataaatatcagcacgcccagtcgtttgaggccactgccggtctccgcgtcttggtggtagtggtcccccgggcccagctattgtctctttatctctttgtcttgtgtctttatttattacaatctcttgtctctgcacacagggagaacacctgctaagccccgtaggactggaccctacacgttttcctctgtttgaaggcagtccaatgtactgtctacattcatttcagttcagttcaatatatatttacatcagattactgagcactattatgtcttaatgatgggtaaacaattatgaatgcaataccatggactttacaatgtggttggggacacacatacttaaacatgattttcaagttgtgggtgagaactaaggtggtggtatacatagggaatggccagtcactgaacaaacttctgtattaaaggcagttataagatac

SEQ ID NO: 227371 - DNA, 1505 bp, Homo sapiens
ctcactagtatgtaagaagataacactttggaaagcttaaggattttaggagctgtgtgcttattatatcacaatattatattcccacatagagaactgccgtgtccctagatttatcatgggctgcttctaatttctccatgtaggactttccgataggatttattcctaattatctctgactttatagccctagtccctgtagttttcagccctctattctacgtttttgtgggcgaaagattacctaggtgccgaggcaagagactgaaggcacaaactgtttcagtataataaagaaaatagttaaaataagaatagttataatacaaattagatatagagatgatcatggacaattatcaatcattattataaacattaatcattagcttttaatattactctttgttgctttactaatataacctaggaataaccggtgggtatagggtcaggtgttgacgggatattgtgagaagtgacctagaaggcaagaggtgagccttctgtcacgcccacataagggccgcttgagggctctttggtcaagtggtaacgccagtgtctgtgaaggcacctgttacttagcagaccgcgaaagggagtctcctttccttggaggagtcagggaacactctgctccaccagcttcttgtggaaggctggatattatctaggcctgcccgcagtcatctggaggcctaaacccctccctgtggtgctgtgcttcagtggtcactctccttgtccactttcatgttcctcccgtactcctggttcctctttgaagttcgtagtagatagcagtagaagaaatagtgaaagtcttaaagtatttgatctttcttataagtgcatagaagaaaacgctgacatatgctgccttctctatctctgcggtggctacctaaaagggaagggccccctgtcccatgatcatgtgacttgcttcaccttatcacttagaagattcatcctccttaccctgcgccccctcgtcttgtatgcaataaatatcagcacgcccagtcgtttgaggccactgccggtctccgcgtcttggtggtagtggtcccccgggcccagctattgtctctttatctctttgtcttgtgtctttatttattacaatctcttgtctctgcacacagggagaacacctgctaagccccgtaggactggaccctacacgttttcctctgtttgaaggcagtccaatgtactgtctacattcatttcagttcagttcaatatatatttacatcagattactgagcactattatgtcttaatgatgggtaaacaattatgaatgcaataccatggactttacaatgtggttggggacacacatacttaaacatgattttcaagttgtgggtgagaactaaggtggtggtatacatagggaatggccagtcactgaacaaacttctgtattaaaggcagttataagatacgtcgacgcggccgcgaatttagtagtagtagtaggcggccgc

SEQ ID NO: 227372 - DNA, 465 bp, Homo sapiens
aggggcttcaactaaccacacccattccctggcgcccaaccacatatgtgactaaaataatacgtgaggtttttgtgttttgtttttatttttgcctatatcaaacagacatttaggtgaatacattttggaaatatcctagtttatattaatacttttccattactatggttcagttttttggtaagcagctctgtccaggattagctctttttttttttttttaatcaaatgggaccagctaatgaaaataaaccttgataaccagaggaaaaaaaatacacaaaggatttaacattattatcctgctttcttggtccatgagacaaagtaactgaaatctctcttttagatcgtattattaacaatcagctatcgattttcaggtttacattgttttgggtcatttgttatatttctctccagaaaactgcttgatggtaataaagaaaatattctataaaa

SEQ ID NO: 227373 - DNA, 189 bp, Homo sapiens
aatttgctttatagatgtactcgcaaaattatgtcaagattatgtaccagagttttttgcagcacaattttaaacaagaaaaacaaccttaattctgtcaatgaaataccatgccggccgcgcacagtggctcacgcctgcaatctcagcactttgggaggccgaggcaaatggatcagctaaggtcag

SEQ ID NO: 227374 - DNA, 446 bp, Homo sapiens
gtatgtttcccaaactctgtgccatggaacactggcttccagtgacccaggagctccctgagagcagggaccatggccacctcactcagcagagatgcctaaggcctgacacatacagtaggtcctgtccttccctgaagcctccccacatcataggtgctggagaagcatttgctgaatgaatgaacatggagtgactctgactggtgctgcatgatgaaacactcctgtgtcagaaacacttgggaaatgcccagttaggcaaacgcgacgccttaagaagtcttgtgttaacacggattgtgaacctctcagagaaggatacgattttcggggtcccctaaactgaccccccaactcctctacttctaagcaggtggcccacagaacacactcagagagtccctgtaatgcatcctctcgtttcccccaaaacacacgcccag

SEQ ID NO: 227375 - DNA, 446 bp, Homo sapiens
gagaaaaggagaaaataaatacacgacctgatcattatgatcatggaaacattgccacaatgatgagccaatactgctttaatatatttccagagggcttaaatagcctgttccatctagttctatgaagaaatcagtatcctcagaaagaaagtgctactgatcacatgatcagagaaagaggttgccaagtatttagacattctgatttagccttctgattttagagatgagacaactaaagcagagtaaatgattattcagttataaactttgattagcattgatatttttcctactctttacttcatctcataatatctatatctatatttaggatcacatacacttgaatctctatatccatgggttccgtatacatgaattcaactggattgaaaatatttcagtaaaaaaatggatggctgcacctgtactgaacatta

SEQ ID NO: 227376 - DNA, 257 bp, Homo sapiens
ccaggtacagaggaaggctgtagagagaggtgaaaagaaggggaatgagtctcttctcctacgtgttcctgaatgctagtggctgggtttaaatcactccagccaggagattagaaaattattctctggagcaatggaaccatccacaggaagatgtatatagtctaaccattgggagtgcccagaaaaaaaatctgtttagccactcacttgtgtccccgccagtgaagccagttgtggcaaggcatgcacacaga

SEQ ID NO: 227377 - DNA, 1504 bp, Homo sapiens
ggcaaaacaaaacaaaacaaaaacaaaaacaccatgttatttggggcccaaaactccccaaacctggggaagaaaatgggtattcagactcaaggaagccaatgaatcctaatgaggatagaccaaaataagtccatattcagacatgttatgttcaaattgttgaaaaccaaggagaagaaagcagccaagacgcaagctactcatcacatacaagggagtccccaaaatactttacaaagcaggagagagtgaaataacatattcaaagtactgaaagaaaacaactgccaaccaagaatactgtgtgtgtgtgtggtaggggggaggggggagcagtacatcgtactattaaaaatggtatacaattttttatttctggaattttccatttaatattttcagaccatagttgactaggtgttactgaaactgtggaaagcaaaaccatggataaaggggactactacatatccagaaaaaccatccttcaaaaatgaataaagattttttcagaataaaagccaagggagttaatcatcactagaactgcctcacaagaaatgctaaagtgactccaagttaaatgaaaggatgctacctagcaatgcaaaagcatatgaaaatataaagcttgctgataaaggtaaatatatagacaaaatcagaatactgtaacactgtaatggacgatccactgttcagtttcatatattaggcatgaaatgtaagatttgtgaatcctataatactgctcaagctggaggacgtagaatttcactggatcagcaatgacgagcctacacagtactggagaacttggcattttctgatatagaaaaaggctttccttggtatcgtgttatcatgtgtcgtcatctatgcattagagttgatgtgttttgtactagtgtcacagcataaaatcatattacaagtacgtaaggattcagggtctcttgatagacttatcatagctctatattgaatgaaagccactgtgcttgtgttttgattggaaattcctttagtgtcagttttttggaagccaatgatgtttgccactgatacattcatagaagtgtattatattttcatgaagctttgctttaagtgacactacgcgtgcagttcatttctagttcttgatagaactgcacttaattttcagtagtagtcttgactttttaagggctgtgttatattaagttctcccttactgttaaaacctaattaaatatgctttagaattttctaagacagtcctctggatcctctaaatgtgaattttgatgtaataactgctaataaaattatattgaaactgttttatagaaagttttttccaaagttttctatgtttggctcaattagggcagtatcatcagttctataatgtaaaagaaattttctttcttttgaggtattccataaaagtagttgggaaaattattatgtaaaataataagactcttccaaagccttaataaaaacatcaacattg

SEQ ID NO: 227378 - DNA, 534 bp, Homo sapiens
cattgtcactcctattttatacaaactaaggcacataagttaaaataacttgccctacctcagttgtctggcccatagtctaaatgcttttcaaaaattattattattattattattagtatttttagagacagggtctcactctgttacccaggctggagtgcagtggcacaatcataactcactgcagcctcaaactcctgggctcaagcgatcttcctgcgttggcctcccctgtagtcccagctactcgggaggctgaggcaggagaatggtgtgaacccaggaggcggagcttgcacatcacgccaccgcactccagcctgggcgacagagcgagactccgtctcaagacaaaaaaaagaaaaatgaccaaatttaaaagatatcctttaggccttggctgaacacaggatctctttaaaaagaaaaaaaagataccattttaggctaagtgcgttaaaattcctacagtcagatttacaatattaaagagatggaaatcacataccaaggggacaaaattaactttag

SEQ ID NO: 227379 - DNA, 1437 bp, Homo sapiens
gaatgagaccctcttgtgtttttagttataattgttttaatattttgagattatacatttttgttttaatgataaaatatttcaagcattcagagaatataaacacccatgtaaatatcacccacagattaaacagatacgaaaattttgcttgtttttcaggtttttattcaaaaatatttcagaaacagttgaaacatcctcgtgtataccgttccccactcttctttcccagacatatctaaatatcctgaagctgatgtgcatcttccctttcttggttttagatgttcatttcatttgtatccataaatgatacatagtagtgcttattatgtgtttataatttacataaatattacctgtatccttctgtaatttttttcattcagaagtctgcttttcaggtttattcctacagatatgtgttcatttagttcattcattataactgtggcatataccacaactacttatccattctcctgcagttggatatttaggttgtttccaatttttcattattatcagtgctgaaattaatatcctaatatctatttttgcaaatgtacagagtttgtttggcatgtatacttagtggaattactgagttgtatgttatatgcattttcaagtttaactggatcttgccaaattgttttccacagtggttggaccaattttcactcccccagcagtgtgtgtgagttccccatttccccacatcctcacctcacagtcacacattaacttttgccagcttgatgggtattaagtgtcatttttgtattacatctgttttctagtgttattcagcatctttttgtatgtttattgaccattgatgatttgcctgtttgtgtcctttgttgttctattgaatcatttttcttatagctttttgtgttcattatatactctagatactaattctttgctagctatatgcattgcaaatattttctcccagtctgtggcttattttaaaattttatttgtggtgtctttttgtcttgcaaaagttttgattttaaaatagtcagatttatcagtctttttctttatgacttctgctttttatgtctttttaaaacagttcttctctatgcagagattataaagattttcttctatattttcttctaaaagtttttaaattttgcttttacttgtttaggaccttaatcaaactgatatatattgttatgtataatgggaaatgggcttctaatgtctttttcccatgtgaacaagtgaccctgctatatttccccccatcgatttgtaatggctatttctgctttatatgcatggatctgtttggatactctcaattcttttccattgttcttttggtttttcctgcattggcagtaaattgtcttaattacaattactttcactctaaaataattcctgatacctggtatggtgagc

SEQ ID NO: 227380 - DNA, 392 bp, Homo sapiens
aaatatagaaattagaattttagagagtttatggtaagtgaaccatattaaattattattttttaagacagagcctcactgtcacccaggctggagtacagtgtcacaatctgggctcactgcaacctacatcttccaggttcaagcagttctgcctcagcctcccaaatagcggggattgtaggcgcccgccatcatgcctggctaatttttgtgtttttgtagaggcggagtttcgccatgttggccaggctggtctcaaaactcctcgtgatccgccagcctcggcctcccagggtgctgggattacaggcgtgagccaccgcgcccagcaaagaaaactaatttgtatgaaagaataaaagagcccaaatagtcaaggcaacgtcaga

SEQ ID NO: 227381 - DNA, 354 bp, Homo sapiens
tgaacgaggaagtgaggtggggaggaaacactttatctatagcataaaggcctgggagttaggcaagggtatctgaatgaggggaaaatgtttgggaaaatgtttggaaaaagctgttccatgcagggcagccctatgtgcattggcttggagatgtgaatggctcaggctgagggaatgggcaggtggagggaatgtggctaagggtaggcatgtgaggctaagatatctgtggggccacaatggcgagcagatcaggctggatagtacttgagcattagattgtggaaggcctgcggaccatgcttaggagtcaggactctattctgtatccagcagagatttccttttatg

SEQ ID NO: 227382 - DNA, 456 bp, Homo sapiens
gtgattaagtgttatgtaagaggcatgtacatagtatccattggttttaatgctattgggcagagtagaaacaggagtagtaacttggtttccttttattacattccttattgggtacttttggcgacagagtgagaaccttaaagttcaattaataattgatgtaataactgaagagaaaaattaatgaacaggaaggtagatcagaaaacattgcccagaaagtagcatacagaaggaaatggaaaatgagagagaaattaaaggatattaaggataaactaaagttatacacatactcacacacatttaaaaattgtttaaaaagaaaagaagagttggaaggggaaaaaaagagaatgagaggagacagtgtttagagagatactgagaattttcctgacttgaagacaaatacttgagtatttaagttattgcttaaaagaaaaaaaaaat

SEQ ID NO: 227383 - DNA, 598 bp, Homo sapiens
gtagtgcacgcctgtagtcccagctacttgggaggttgaggtgggaggatcacctgagcccaggaagtcaaggctgcagtgagccatgatcatgccactgcactccagcctgagtgacagagcaagaccccctcaatagatagagaaaaagtattgtacacaaattacttgtgaagtatgaaagagaagggtacatttttaatgaggaaatctgaagtacacttccttcaccaagtgatcaaactttagcaccaataataatggtacaaaatgctaatatgtacccctggatgtgatacaatgggaaaggcacattatacctatgtagtatttctaccaaaatgcttaatctgaatttaatcatgagaaagtagtcagataaatctaggctgttagacccattctataagacatctggcccgtattctaaaacacacacacccacagacacagattgaaagagagaatgcacaagagcccagatatggcacaattttatcaattattcaattggtgaatctaggtgaatggttgttcattctatcattttttcaacttttctgtaagtttgaaatttttaaaaataaaatctttagag

SEQ ID NO: 227384 - DNA, 1692 bp, Homo sapiens
gaggtgggaagggttgtgtgtgcaggtggtgggtagtgcccctgccacacgtacagatccagggcatctcctctggacccctcccagggactgtaaaactttactatgggaacagactcagtagtattttggggcagcgggaatggttctttactaatgcctaagatcacttaacagggcagaagccataattgggcagaccttacgggccaagaatcttttgcactttatctgatttaatctgcaccctgtgaggtaggtggcattacccgctttcatgtgttaggaaatgtgtgtaaagatcagtaacttgcccagggtcacccaactagtagctaaagtggctaaagtcccaggtctgtcactctaaccacccagagtggccttaccctgtacattctcaccctgtacattctcacccttaccctgtacattctcaccctgctgcccctctgaaatagtcactgctggcttccctagctgaggacactgggcacaaaggctgggcttctggattgcaagtctgtgcttgcagcctgaggcccactctaagggaaggcagatggcctgcctctcctttctgcaaaaccccctgccacctgctgcgtgctgccagcctgactcactgactccagctacctctgggcctctggcccttctaggatgggcttgttttccaggaaagggtttggagattaagataagccagctgcctccagtgaaaggccctgctgccttggaaagggccgggaaggctgccattccagctccttggtttgctcgcttctctccgtggctggggctgcctcgcctttcatccgtccctgcctatcgttgggcatgaataatgaggctctttggagacaggcataggactccctgcagagcgagggatttgtaaaatgggtgcccaagctccctctggggctccggctccctcatgtctctgtctgttcttcctggggaagctgctgcttgtatttagataatgaagaactagaaaacagacctggcctcctttcaacctgccgcttcctccagcctgggtaggatccaaagctctggccttcctaagcagtgcttgttcctgacttacacatggatggttttctaaactaagttcattttctgaagcagagaatgaataactcactctactacctcctccccttcatggcaaaattttttcttttgtctgtattttcacggctgctggattctaaaatcaaggtgcaagttgctttggggcttactaaagtcccgtggccttcccaggccctgtggaaaggttagatgcaccccagataaccagggttggttattccctgtgagagagtcagaggggtgcaggctggaagcatagcgctcctccacccctgcgctggtcatcatgtggagcgtgtgctttctaagaagtgccagcctgtgtccagagcctgctgggcagatgttaagccagctgtggacttagtcacagtgactctgctaccaacaacagcaacatggacatttagggaggagcaaatgagaggaaggaagaaataggcaagataacaaggcttgacatctgatctctgggcatttccaatggagggatttggtttgtttatgtttccaccaccaagaattaacagtggttaacagctgttcatatctgtctgctttacatttttaaataaacattacagataa

SEQ ID NO: 227385 - DNA, 238 bp, Homo sapiens
tgacgaagccgaaaacagccatattcagaggccatgaccactcgccagaggagtaaaccagcaggccgtcagaagactctagcccacggctcggaagccatcctgaccactaagtctttgcagctgaggccccagacatcaaggaccagagacaagccatccttgccctgtccttggctacccagacccactgaatccacaagcctaataaaatggttgctatttttcaactaagaag

SEQ ID NO: 227386 - DNA, 434 bp, Homo sapiens
aggctgtttagtaagtttctgaacagaaattcatgtgaaatttccccttttaagaactgtttgttgcttttctctgatatctgattaactttgtgttgagatagcatttagacaaatattagtttaccttcatatcttttttataactgttttactttccaatttctctgtgagatgtgtctttaaaaccaagtttcactatgccttcttattttttcatcaagggttggtttctcatttgtatagtttctttcctagagaagtcccatttcattcatttctatccttattcttcttaaatcctgtgatggagaactcactgccttataagatatctcactgaaatctcagaaagttctaatcattcagagttttaaaattaattaattaattgatttttgcttctgttgagttaaaatctgcctcccagtagt

SEQ ID NO: 227387 - DNA, 597 bp, Homo sapiens
actgaatgtctgggcactccatgacccagtcaagttgaagcataaattagacatcatagttggagtcaacaataatccagacagcagacctccaccctctttgcctccacccctggcaactgggagcccatctccttttctacgttttgcacaggcagctcagctgtagggtctactctgctctgttggcggccttccttccagaggggaatgctgtcaggaacacagccctactgcagtaataaaaacacttcaacattcactgcctgagcctgtgtaaggaccgaatgagagagtgcgtgggaacacactgtgtatgctgttgagttctacagaggtgaaaggctgtcattattctactattttcctgtggattagcagcattcacattatctttatgttttctaggcagaaataaaaaaaatagcatatctgaaaagctaagctcctgtgaattcaaaagaaaggatggctgggattgcctgcatcaaagaaaagaatagcaactcgcatttctgtgctgctcttggcacacaagccactttctaatgtattatctcatgtgatctttacaaaatcttgtacaatggagtgtgc

SEQ ID NO: 227388 - DNA, 417 bp, Homo sapiens
agcatgctccatccacttcattcaccttttctctccatggtcacgagagatgaacttgctttatgcttaagtctagtcttcagtattactggggacttctggtccatttctcctttcagttggccagcagtttagagaatgaggagatttattcttttcagtttaaatctggaaaatactatataaatgtaagccctggtatgttctcatgaggaggcacttactgaggaagtgcataagcccaagggtcaagctgcctggactctagcatttcagttctgtcgtatgtcagttctatgaaactgggcaaattacttaactgcttttaaggtttcttcatctgaaagagggtaaaaatagggcagaaatacagtgttgttgtgagtataaaatgagataaatcatataaaacttacg

SEQ ID NO: 227389 - DNA, 615 bp, Homo sapiens
gagcctgcggggtggctcacgcctgtaatcccagagacgcaggagtctgaggcaggaggatgacttgagcccaggagttcaaggctgcagtgagccgtgatcgcgccaccgcactccagtctgggggacaaagcgagatcccatctctttaaaaaaaaaaaaaaaaaagtagagctccgctcccacttgccccccattctctctctctctctctttctctctctctctctctccctcttgctctactctcgcccgtctgcgttctacattggttctgcggccgtgtccctttcgtgtgtgtctgccctgtgtttctccgtcgtctccgtgtggatctcggtctttgtctcgccctctagctctctcgtgcgcctgtgtttaatcgtgcgcttctctcaatctctctgtccctccctttgccccctacacgcgtgttctcgtcaacagatctccagaggtggtacagaaacgaccccgcgccggcgccccatcctgcggccagtgcctccgcgccccggctccggtccccaccgtccccgccccagatttccggaggagcaggcgggcggggtcccgcggggccggctgccgtcagcgccccttcccggcggccgc

SEQ ID NO: 227390 - DNA, 541 bp, Homo sapiens
tagctagtgtttattaagaatttaatacgagccaggcatttttctaagaacattacatagatgcacaaacacagttaattctcacaactttaggaggtttatcagtgaggaaatggaggaagagaaggggaaagtaactagaaaatagtggagagagggttgagacccaaggattctgattctggaggcagtgctataaatgaccatacaatataatttcccaggagtaatggtgtatgcataggtggtaaggaaaaagtcatttaaaactgcttctttggggtgattgctgaattttaaaatgtttaggcatttgtttaaattaaaggcttttaaatccccaaactttataagcaaggatgaaatgacaggtcataagatcaataggtcataagggtgtttatttagtagcaaatatatgttgaatcctttagctctctctcctcattttgcagaaatcctgaatgtttgttaaacagggtaagatttcttaaggtaacttaagaaatgtagaggatagaattaaccactggattttctg

SEQ ID NO: 227391 - DNA, 572 bp, Homo sapiens
taaattaattgtatagatgatggctgtaattcagtataaggagaaatctttttttgcacagggaattctgggactcttctaacaaaataagatcagatccaatctgtgttagtcttcgggcaaagaggagaaagaaaaagcatttctggcaggtggagtgaaatacaaatttgaggctgagtgaaaatacaaagttgaggaaatacaagtgtttagaagttaacaagtaaactggtttttgtataggctcaggaaggttagtagtttaaattggaatggcaggagaagccattccagattcctggagcactttaaatgccagactggtagactgtctcagccaggagtggcccagaagaaagcagggtttgtagcaatgaactgtggcctgtagtttccaaaccatgcatctgcatctgcttctgaatttaagtaacagtcattgtctgcttaatgccaatccattcttaatagtattctgggtctaattatatagctcatctgtcagctatagttctgactcatatcatgattttactgctctagaattgtttaaccatggaatatttgcc

SEQ ID NO: 227392 - DNA, 605 bp, Homo sapiens
aaaggaatctagaataaactaggattagctagcaaaagtgttttagcaagatataaggtaaaacgtgaaggatttagtccactgaaaaattagagaaatacaagttctggtacaggtgatggtagatgtgaagattttgctgggtaaacttgaggtcatgaaagaatgggttgggtgaagcatagagagcaggtaatggaaaaggagaaagagaacataaaatgaggtaaattccatcccactgattgattcagttggagaaaaatactacttcagtacttttactcttgttgatgcctgaaagaactagatattcctattaagctatcagtactaaaacctttaaacatccaaagtaaatgatcataccacccctcccagcattctattacaggagcaccttgttttattgcacattgctttgatgcactttgtaaatgctaggttttttgcacattgaaagtttttggcaaccctgcctcaagcaaatctgtcagtgccattttttgaatagcatgggcttatttcctgtctctgtcacattttgttaatttttaaacgatttcaaaccttttcattattattataatatctgttatagtgat

SEQ ID NO: 227393 - DNA, 513 bp, Homo sapiens
atttatggttaaatagatatagataacaaacagaatacgcctgtttaaaactgttaaaatgacattggttctaattatacttttatttaaattgaaagacaaggcatttatatggtatctctaaccatcacaacttttgtgtgacaaaaagaaattatcaccaaaatacacctccttaagtaagtgtctgatttcacacttccagaaaaagtgctctttctggtcaagccagcaagaattgagaaagattaagaaagtgcttcaaagatgtttattaaaaagttgtcataaaaatgtgaagtagatgtagcatcaagcataccaaataaagtaaaactgtcatcaagaagattcaacagctatgaaaagagttcttcaaaatatgatatgtttttctagatgataataaaatttatcaattccaaatgtccacattagtctttcataaagacaccaatgagtcacaggaaaaaaaattaaaaataaaaaaaccctatctcagggaatcatgct

SEQ ID NO: 227394 - DNA, 497 bp, Homo sapiens
gggcaggtgtttcgggcgttagcaggctccacctccgaccagcccatctccctcccatcttctgcctttccctggagaaacaaagcaaagcagggatcatgaggggctgtgaaggaggacagtggggattcggagagaagctcttgaagctgggcacatgtgggcgcttcggtgtgtttttctggggaggaggcaccaggtttcatcagattcccagaggggccatgaggcaagacaagccaggaaccacctagccagaggcgcaaaccccgaacagttctccatccgtgcggcttgcttgcctccagggatggggcgctcagccctcaggaggtggttgttccagcctgcaacgctcaggccttccctctggtgtcttctgttctgccccacccccactctgccccatcagctcccctgacacgtgaactcagacacgcggtttccagacttttcttattcattattctgctgtgaccatggggcttggcggccgc

SEQ ID NO: 227395 - DNA, 495 bp, Homo sapiens
agacaaagtctcactctgtcaccaggctggagtgcagtggcacgatctcagctcgctgcaacctccgcctcccgggttcaagcgattctcctgcctcagcctcccaagtagctgggactacaggcacatgacaccaaacccagctaattttttttttgtttgtgtaattttagtagagacggggtttcaccatgttggccaggatggtcttgatctcttgacctcgtgatccacccgcctcagcctcccaaaatgctgggattacaggcatgagccaccacgcccagcctcaggtgttatctttatagcagtgtgataacagactaatagagtaaattggtaccaacgtagtgggacatttttataagctacctgagaatgtggaagtgactttggaactgggtaatgggcagaggttggaacagcttgaagggcgcagaagaagacaggaagatgttggaaagtttggaacttcctagaaatgtgttgaatggc

SEQ ID NO: 227396 - DNA, 503 bp, Homo sapiens
tttttttcagtagagatggggtttcactatgttgcccaggcttgtctccaactcatgagttcaagcaatctgcccatcttggcctccaaaagtgctgagatttacagataacaaaatcctggaaaagagatgccaagtaacttttccaagatcaatgatctagtaactggcagagctgggtgcaaaccaaagtggtctgactttggaactaatatatgaaatataaatcatcttttaagtggagtggcccaagaacactttatatatgacctatagaaagaacactcaactctttcctgaaaaacagtaccaagttgaaggctgaagagggagtgaataaatggaaaagtatttttttcttaggtaagaagactatattgcacatgtacacaaattatgttatgtaccatttgttacacaaacattttcaatagcaatgactgagaataccctgagattccatctgtaaatggacagtataaataaatgtggtatattcatat

SEQ ID NO: 227397 - DNA, 145 bp, Homo sapiens
tgaaacagatgaaagttataatagtttacataccttaccttaaagtatggtttttaaatacttaagatgtgatatgacatatagtgtgtatatatatcttatgctaaggaaaaagggacattaaaaaagcttatgttaaaagata

SEQ ID NO: 227398 - DNA, 272 bp, Homo sapiens
accaaattgctttagtgaacatgtatgtaaaaaggcggatgtaagcttattataaccgcacagttccacatatttccttcacttcctgcttatgtttcttaaacaatattgcaaacagaagataatccaaaaactcccaatattatatggtttttccttaatctgaatatgtttggaacagcttgggtcatataaccagttccactgaggaagctggaaattctacacacatatgattttgagggtcttacctttgggagcaggaattgaca

SEQ ID NO: 227399 - DNA, 428 bp, Homo sapiens
cagtggcccagaaacagctctttccttcttgactccccagctgcctcacctacctccctgctcccctaagctccttcctgtttaggctctctgggattagtgcttcagaagctatgcttccctgaagtcaaatgagaccagtttagtatgcgtatatgggattccagtttgtgcctcttcaaccatccaaagccacatctgtctacataccctacaaggtgtgacctctgcaaggccaaaatcagcacagataactaaaaggcagctgtctacagaagagaattaataatggtgtctgctgagggaggatacactgatgccaaatcagaccctcaaagatcttctaaacctatgcttcccctatcagatcttactattactgctgttaatgataataattaaagctcattcttgcataatgctttaca

SEQ ID NO: 227400 - DNA, 551 bp, Homo sapiens
  misc_feature (347)..(347): n is a, c, g, or t
tatacaacttttgtatatataaaagcttaggaactttctgtttagcaggaaggcaacacattcctacacttttaatgtatatgtttgttataatgtccatgtaaacatgccctatgtttgtgccttttaattagtttgtctcaataaacaaaatgtagagaaaaatatgtagctatgactttgttacaactgttcttatccacagtacaaaaatggtttgtttttaatatgtagagcattatgtgtggactactggaaggactcgtgtggggaaagcccaagaatgaccttgctgaggcctggattgggtggcacagtggccacatttggaggaagttcacatttcntggcatgcagacccaaaactgggttcttggctcctgcctgctgggatcggttatctctggtggggctggcagtcataattccaatttaagccacccagggtttcttcccaattgttccaagaaccattcttcagtgggggcaggtttggcccttccccttaagttagaatgtggtggtcagacccttgaaggaataagttttaa

SEQ ID NO: 227401 - DNA, 391 bp, Homo sapiens
agactccgtctcaaaattaattaatgaattaattaaaagccagtagcaataaaatttaattatacaatttttaagaatatgaaataaaaaaacagcaaaattaaacttcgaagataaaaactaagtgaaaaaaagaaacagaaaattaaaaatccaaaatattaaaaacaaaggcacataaccttcgcacctttccaaactaggattcgtacagatgccacctaaatgaaaaacactgctcgctttccccagcctctgcctctgccaagactcttaagtcatagcgacttctgggccaccattgtcctcatccagaatccgctttctcccttttccaaaaaattccactagccctacaaacgtggcctctttgggaaagctttcattttgg

SEQ ID NO: 227402 - DNA, 646 bp, Homo sapiens
ctggattcaacacctctctatttctataaatcatctactgcgttaaaaagtgtctcactaacaaccttatttgtgccataattttctcatttttgatgggaaaatatttctcctgttctctttcttggtcaagatatattgctcaagtatttttttcttttgtgtttttgtagtgaactgtatcaattctattgacttcctgctgctttctcatcaggtatagacttaaatctcccaaggggattttttttaaaactacaataagatgtttttggtcatatgcttttccttttccggtgctccatgttacatcctttgttcattttcagttctttctcacactttgtgttcttagaaattccatctgaaatttagaaatagtctcccattcgctaaaatgaactgctgaaattaggactttgcaacccaaaaagatattttaattgggctaggataacgatcttgaacttttaatctatactaggttattgcatgttttcagctcctgttacttatttgactctactgtgtaaacactgtcattcattaacaagttgatgcctgattagtgctactaactttttttatgctggcatactcaagtgtttcttgtttagcttgtaaagaatggccataagataccatc

SEQ ID NO: 227403 - DNA, 249 bp, Homo sapiens
taatctttttagttattttcttagtggttgccctgagaattttaataagcattttaatttataacaatctagtttaatagcaacttagtttcaatagtatataaaaactttgtttcactgtagctgttctgtttagtaattttgtcacaaattgcatctgtatgcattgtgtgcccattaatgtagatgtgtaatcatttatgcttttgtctttaaattatgtagtaataaaagagaagttataaacca

SEQ ID NO: 227404 - DNA, 518 bp, Homo sapiens
atcacttatttacttggtaggagtagaataaaagaatgtttttactggcactgaatgttaaagttgaaagaatcccacgacactacgatttggaaaggtcttggttctgtgtttgttggcatagaatgtgaccatgagtgtcagtagtttgtagaggcttgtctgttaaataagttaaagaaattattgaatttgtggccacctgaaacctagattcaaatgcaatcagagctccacatgtatttgttgtctccacagcagtagctaatataaaataccaaccatttgttatttggcctccccagtaaacaaagggagctggtagtgtgctctcctatgatcagactacaaaagagaaggagaagtgactcagagcaatgtttaccaaaccagaaagaactattgaagaagtcgaaatttagtaaacaatggggaaaaaaatccaatcatgtttttaaaaatagagcaccaggttttttctataatgtaaaattaaaatgtcttgtggtttgatgtat

SEQ ID NO: 227405 - DNA, 364 bp, Homo sapiens
caatccagcctgggtactgagcgggaaactctgtatcaaaaaaacaaaacaaaaaaaaaaaaacaactttattcagcaaaataacatcttctatatgcaaaacactgtgaggtgctagagttacaacattttcaaagtagacagcctacccaaactactctgaatgacaagggactcaattattaatatataatgataatagttctcaagaagatacaaaaaagtatatgcataatagctagctgtgctgatttctgaagatccattgcattggagagaattcatgtacatagccttaatatatgactatatgtgccaatgtaaaactgctacagaaatactttagactgcagcttaagtaaaa

SEQ ID NO: 227406 - DNA, 315 bp, Homo sapiens
gtcacaacctcactgctccccagaacctctacctagagagaagtagctttctcaaggtctttaacatgaattggtaagtacagtgagtatagagaaccctcctctgggaagctggaaacttgtactatcttagcactgacataaacagcatgacaccggacagtccttagctctgttttaccttaaaacttgaagttttttttgagacgggagccttgctctgtcgcccaggctggaggttgcggtgagctgaggttgcgccattgtactccagcctgggggacaagagcgagactccatcacaaaaaaaaaaaa

SEQ ID NO: 227407 - DNA, 118 bp, Homo sapiens
gaaggttagaatgacaaagtacactgcatgaaatgcctttgccaagaactaacttccttggagaaaggggagaggttggttggtatatattcagagtggggatagctgttactggcca

SEQ ID NO: 227408 - DNA, 349 bp, Homo sapiens
ggaggaaaaactacaatcaaaatgtttgtttaaacctatataaatttgatggctattttatacagattgatactttaccaaaggtttgcattctaggtaaggttttgcttaaactctataaaattattaatagatacaaagaagacaggttttcccttttatcatttttcagttaaaccaaactgtgagaggcagttataggtggttggagcagaagagataaggtggagaggggaactgacattttttaagtgcctgtttcattctgtacttgtgcctgtacatatgttattccatttaatcttcttagtaaacttaggagggttttaagagcctagtgggaatgttg

SEQ ID NO: 227409 - DNA, 531 bp, Homo sapiens
gcaaaaaaaaattatactctatgaaacccatatatggcatgatacatagtatgattgtatatatggtataaatatatggtatgatcccatgatatgcatatacgtacatatgaaaattagagtaaataaccaattagttatatctctattttagtaacccatagggatactcctgatctttttacctgctaagcaaaaagtaaacacaaaagcagcaggtaaatatatgtattatgattctactttggtaaaaacaattgaatccccacatatgtgcatctaaccttgcataggtttgcacgagcaaggtaaaagctgtggaaagacacacaggctgttattagctacctcaggatactgagattgagggttgaggtagagaaaaaggggataattaacttcatacatatttgtatcatttcacacattaaaacagcaagtctatacttcaaaagtcatcaaataaagaaaacattatatatcaataacattatctttagcagtctagtaatgtacttctttgtggggaaa

SEQ ID NO: 227410 - DNA, 420 bp, Homo sapiens
aggagtttgagaccagcctgggcaacatagtgagacctcgtctctacagaaaataaaaacaaaattagtggaatggtggtgtgcacctgtaattctagctactcagaaggctgaggtgggaggatcgcttaagcccaggaggtcaaggctgcagtgagccgtgatcacaccactgtactccatcctgggtgacagagcaagaccctgtctcaaataataatacttacttctttagttttttggggggattgaggactaactatataaatttagaacagtatctagcacatggttaagtgcaactgttattgtttcattgtagtcatttttagaagcatttttaatagaagtgttactttaaaaataatgttttcagttatgaaataaaacactcctattctcaataaaaattttacaaga

SEQ ID NO: 227411 - DNA, 448 bp, Homo sapiens
gctcgcctcaggagtcctactgaatcctgggtctccagtgcctcccaggcccctgtcggtgtgcaaagtcatgctccttcttgtaaagaacagtaggaatgagccccaaaaggagtgcatagaggagctagtttgggtgaaccattaaaataaattttttttaaggccgggtgaggtggctcacacctgtaatcccagcactttgagaggctgaggcagccagatcacttgaggtcaggagtttgaaatgagcctggccaacatggtgaaatgctgtctctactaaaaatacaaaaattagccaggcatggtgacacatgcctgtaatcccagctactccggaggctgaggaaggagaattgcttgaacccgagaggtggaagttgcagtgagctgagattgcgccactgcactccagcctgggcagcaagagtgaaactccatctca

SEQ ID NO: 227412 - DNA, 278 bp, Homo sapiens
tctgccataggatgatgcaacagaaaagccgtcaccagataccagcaccttaatgttggacttctcagcctccagaactgagacctcaaggcacaaagcaaaagaagaatgaatttcatcatgggaatatacaaagcaaggcattaacatctatagttaaataagtcagcatcaaacttcttgctgtaccacccaccatttcacacagttcagctagctgactcgttcatactttaaggctaatcagaataaattaatgattcatcactaataaagat

SEQ ID NO: 227413 - DNA, 395 bp, Homo sapiens
tggattatagcattagctgcagaaatggtctcccacctccacacttgtgccctctcccatcccatagtttcttgtcaaaagagcagctggagtcctcctttaaaaatatgagtcaggcgcggtggctcacacctgtaatcccagcactttgggaggccgaggagggcagatcacgaggtcaggagatcaagaccatcctggttaacatggtgacaccctgtctctactaaaaatacaaaaaaaaattagccgggtgtggtggcaggcgcctgtagtcccagctacttgggaggctgaggcaggagaatggagtgaacccaggaggcggagcttgcagtgagccgagatcgcgccactgcactccagcctgggtgacagagtgagactccatctca

SEQ ID NO: 227414 - DNA, 471 bp, Homo sapiens
ggttggcatgtttgcctctgtaagccattttcatgactgctgggtttatttaacactcattcaaaaagttttggagaacctactatgtgccaggcacgtgatgtatgttctggaaggggtgaggagaggcagagcgtgagaggggtggtaccactcctgaactagagacctgggtgccccttccaggtgggaggtcttgcaaagtctcaacagaatagcattcacttatctttttaaagtgggtattgcctaatgagggccctttctagcccatcttttggattaaaatacatttcaagaactgtgacatttgaagtgcactggttttgtgcgtaacattctgtgagagttttacaccatagcagaaaaaatgcagtcctcgcctctcattgcttctatctaggcattttctgcctaggaaacctcaaggaaatttaaataatacacttcccaaatcatacctcaataaag

SEQ ID NO: 227415 - DNA, 456 bp, Homo sapiens
aggtgacctagaagccaaatgaagaaagtgttttaaggaagagagagtgatcactgctactgattatcgaataatatgaggactcagaattgatcattgggtttagcagcattgggtcattggtgacctgacaagaagagttttcaccaattgtaatgaaagcctgattggaatgggtttaagagagagtgggaagacactaatggcagttcctttgaagagttttactgcaaaggcgagaaaaatatttgagtgtatctgggggagtttcttttaaaagctgggaaaatgacaagtttgttaaatgatgagaatgatcaagtagagatgtaaaaatggatgatgtaggagaaaggggacacttgttagagtgatgtcctttggtataagtgaagggatttgctttatatcatgtggttttaacacatgtccacccacaagcctaaaataaaagtt

SEQ ID NO: 227416 - DNA, 412 bp, Homo sapiens
cctcagctccagggagggggctgtgctcagtcgctcacagtgacctcagcctgagcactcatgttcttgggagaatcctagggtggggaggcacatattcaggaccccagtaataactttattacttagtaactttactattagaaagcacccaaatccatagctgtgtgccaggcactgtgctaagtatcctacaggttttatgtgatttattttatttattaatttaatttaatttttttgagacgaagtctcgctctgtcacccaagctggagtgcagtggcgtgatctcagctcactgtaacctccacctcctgggttcaagagattctcctgcctcaggcctcccaagtagctgggactacaggcgcataccaccatgcccagcttttttgtatttttagtagagac

SEQ ID NO: 227417 - DNA, 454 bp, Homo sapiens
tgttatgtgaggggctaatcagtggaattgtgatcaaagtatggtttttggtggcaaatatagatattggccctagatagctcctgtatccccaacaaatatttttcaaattgaagtttgggtggatccaatacagtttcatagacctcagcagtgggagttcagagaccttcttctccccagcatgatttgtccttaatgcagtttagctccaaccagcatattggctttgggtaatttatttaacctttctgaattttgatttgctcatctgtaaaatgggaacaataatacctacttcatcagatagttaagaggattcagtgagaagaatataatttaagtgctttacataatatctagcacctagcaagcacctaataagtgttacctttcctgccatttatgaccatggtatttcttactttgaaaagaggtgaatgtagtttgagga

SEQ ID NO: 227418 - DNA, 597 bp, Homo sapiens
aaatcgcgggggcacagggagagcggtcagatgtcctgcaggcagaaccccaggggaaccactcccaggggtgaaaccgtgctgactcggaggtagtgtgccacttggaagcagtgggaccgtctggtggtagatgcttcacttcttcatttatgactccacattcgtggaagagagcaaaggtctgtctggctttctcatgttcccagttttacaaattttctttttgcagaacaacagagcaggaatgtgtttcgaggagccaacaaatccaaacccctctgcagacaagaaatgaacgacaattttatgtctaaaatgaaaagagctaccaatcatcttttagattaaaaaaaaaacttatagaaggaacaacaaatgctggatgatagttattttacctaaaccaaactgtaccccaaaatataacttttgtacaagtatattagctttccttaagcattgataacagatcatgcaatctcataatctcattttttatgctaatggacccttatcaattgcctgactgtatatttattctttaatgataacagttattcagaaggtaaatattttggaaagaagtaaaatttt

SEQ ID NO: 227419 - DNA, 437 bp, Homo sapiens
ctccgcctcccagtttcaagcaattcttgtgcctcagcctcccgagtagctgggatcacaagtgtgcaccacatctggctaatttttgtatttttagtagagatcgggtttcaccatgttggccaggcttgtctcgaattcctggcctcaagtgatctgcccgcctcagcctcccaaagtgctgggattacgggcgtgagccaccgtgcctggccctttggattacagaatttgacgataatgggttcaaagctgtctggaggcataacctccggggcagctgaacaagattataggaaaggaataataaaatattctgaagtctgtctatgcaaacaaacacagatgtctactctggaagaataaaatgtaccctagaattgcttttttttttttctagtatgattgagatgttatggtaatattaaaaatgaaaa

SEQ ID NO: 227420 - DNA, 781 bp, Homo sapiens
  misc_feature (665)..(665): n is a, c, g, or t
cggataccccaagcccgagatcggacaaactttttttttattctgggaagcggcccattgggtggggaccggaaatggccctttagcccggcttaggccagggaattgaactgaatttattttcacaggctttaaaaaaaacaacaactttgtatcttacttattttaacattcctgtttcgttcccattgtgctcctaaaaagtgtagaatataggagcaattttttaaatggttttgctttctgactcatttttggagtcaaatatttcatttattatttggcatgttagaccccctagcaattttacctgaacccaaagagaatagacagagacttctgagctttgaaaaattatgcattcgagccgggcacagtggctcacacctgtaatcccagtactttgggaggctgcagtgcatggattacttgaggtcaagagttaaagaccagcctggccaacatgatgaagccctgtctctactaaaaatacaaaaatttagctaggcgtggtggcatgcacctgtaagcccagttactcgggaggctgaggcaggagaattgcttgaatgcagaaggcagaggttgcagtgagccaagattgtgccactgcactccagcctgggtgacagagcgagaatccacctaagaaaaaaaaaatccanaaacaaaaattgccgccgaattcgggctcacttggccaatttgcccttttggggggtcgattacaattcactgggccggcgtttacaacggtttgacttgggaaaccccttggcgt

SEQ ID NO: 227421 - DNA, 393 bp, Homo sapiens
gctgcagcatacccaaagaatacaacacactctagtcaatacagtgattcccaaatagatacaggtcagaatctgagaagggagggcaggtataaatttgaaaatgtcagggccaggcacagtggctcacgcctgtaatcccagcactttgagaggctgaggcgggcggatcacctgaggtcaggagttcaagaccagcctggccaacatggtgaaaccccatctctactaaaaatccaaaaatcagccatgtgtggtggcaagcgcctgtaatcctagctactcaggaggctgaggcaggagaatcacttgaacctgggaggcggaggttgcggtgagctgaggttgcaccattgcactccagcctgggcaacaagagcaaaactctatctt

SEQ ID NO: 227422 - DNA, 695 bp, Homo sapiens
gggtgaagtggctcatgcctgtaaccccagcactttgggagaggccaaggcaggcagatcacttgctgtcaagagtttgagaccagcctgtccaacatggtgaaaccccgtctctactaaaaatataaaaattagtcgggcatggtggcacacacctgtaatcccagctactcaggaggctgaggccggagaattgcttgaacccaggaggcagaggttgcagtgagctgaggtcacaccactgcactccagcctggggtacaaagcaaggctctgtctctaaattcttataattcttattcttaaatgtatggactggccacccatactttcaatatatcctgagatgctacgcatgagtaaatttaacttaattatgttagggaccaaaaaacgttttatgactccaaaatttttggcttctgacgttgggtaatcaaaaagatagaaatcaaagggaatggcaagagtatatatgattactattgctgtaacagttataaatgcttactatgtgctaggcactgtgtactttgacgtgccttagttcatttcaatcttacgactatccattttatagatgagaaaattaaagcacagagagatgaagtaagctgcccaacatcacacctatgagcagtgaagctgagtcgaagcttaaggaagaggtatgaaaacagcagaagacagagtcg

SEQ ID NO: 227423 - DNA, 285 bp, Homo sapiens
atttgagattgtgatgcttagaataaagaatgagatgatgagtgaatctccatgtccttacaccacctctgagtaccttgtagaattcactgtgcaagtgctcctgtcagcccaaagatcagtaaagtcaccatgacccattttactctgtgctgtgtccagcagctggtatctgttttaacggttggtatttggattacggtatttctaagagcccagggacaatcttacattgaaacagttctgtaacaattactagaaacctaactactgcataagtatttg

SEQ ID NO: 227424 - DNA, 532 bp, Homo sapiens
catcagaggcattgttcatttctgttaccatgttgatttctggcatttccctttggttctttcttagagttttcatctctccatttacatttacccatctgttcttgcatgttgtccactttttccattaaatcctttgacatattgatcataatcattttaaattccaagtctgacaatttcaaaatctgtgccatatcttgagtgtggtcctggtgcttgctttgtctcttcagactgtgttttttgctttttagcatgtttataatattttgctgatagctagacatgatatatcaggtaaaaggaaatgagataaatgatcctttaatgtgaggttttatgtttatctgtctaggagttaccgtttgtagctgtaggtgtcaaaggctaaaatttcctttagtgtcctgtttttgtctctcttgttgtctctgggtttccctagagactgctttttaataagaatctgagggacctctttcaactataacgcccaggatcctgactaatgtagtggtaaggtaagggg

SEQ ID NO: 227425 - DNA, 1091 bp, Homo sapiens
tatacttcatttctttgctgagtgctgtaacttccctgaggaccagaaatttcacatctagggtcagatcgaatggcatcccgctgaggaagtacctaaggcagttaaactgccagttttggtcccaccaagtcatctagtgcatcctgtaagatgcagacagatgctttttgagagatcgtagcagatttttgagatgatagctgttgggtccccagctaattcagcatagggtcccaagagatgagatacttgtttgggaaggaggttcagtagttgtgatcccaaattttggctctttatattgtctgtaatagacccttttgggagcaccttcatccacgtgacaattctaatgttcccagtgtggatttcttttctagtaggactttagataatcactctaagtaggatttgtatgaaacttttgacggtcattcctcaaattacctactctctgtgggttccactgggtatattgttatcagaggaactaagcaagcacaatcagatgtaaaaacacaccctgaaaaaaagttgttttggtccctcccagatctgagcctagaaatttttagctgtcttgtctctacgtaatattctagtgctgataaaaggtgttgggtcaagataacattgacagccttagtgtacgctgacttgaaaagaaagagtgcattcatgcattgtaaaatagcatatacagcctgtgctaaggtcagactcagtgataagatatgaacgttagcatacattgcatttttccttggcagtacttttattggttcacatgatcaaatgagtaattaagattgaagtcttattctggaaacaagtttaacaacagtgaaagtcttccctcagactcctaccttgacaggcatgactgaggatgagaagtacagtctccttttgttcctctccttggtctttctgctgagctcatcttccagagggcccattagtttgtctgattggtaacagcataaatgacttcactttcagacccactgcttattattgggatgacccagagttcattttaattacataatgccaacatgatgataatgatacttgctttaaaaaaa

SEQ ID NO: 227426 - DNA, 304 bp, Homo sapiens
ctctaatatgtatcaataaaaataaataattaaatatataaatatttaaaattaatcaatgcaatccatcatattaatagtctaacaaaaaacacaattttattagttgacagaaaaaaactttgacaaattcagaatgtgtgcattgatttttaataaacatacacagttaatttaatggagaaaggatagctttttaacaaatgttattgtaaaaattggacgtttatataaaaatgttaacctttgacttaaacttcacatctatgctaattaacacaaaagagaccaagacctaaaggta

SEQ ID NO: 227427 - DNA, 1112 bp, Homo sapiens
  misc_feature (1064)..(1064): n is a, c, g, or t
  misc_feature (1108)..(1108): n is a, c, g, or t
gaacttgggaggcggacgctgcagtgagccaagatcacaccactgcactccagcctaggcgacagggcgagactactccgtctcaaaaaaaaaaaaaaaaaaaaaagtaagggttctgaggccgggtgcagtggctcacgcctgtaatcccagcactttgggaggaccaggcgggcggatcacctgaggtcaggagttcaagacaagactggttgatatggtgaaaccctgtctctactaaaaatacaaaaattagctgtgcacagtggcaagcgcctgtaattccaactactcaggaggctgaggcagaagaactgcttgaacctgggagatggaggttgcagttgagctgagatcgcaccactgcactccagcctgggcaacagagcaagactctgtctcaaaaaaaagtacaggttctggagctaaactgccaggttgaaatcttgcctccttcatttctcagctgtgtgggaatgttacagaactactctgtacttcagtttccacaactctaaaattgtaaaactattaaaatttggatgtttacataatgtagtaactactttaccgggatttagaaaaaacttggctaaggccaggtgtggtggctcacgcctgtaatcccagcactctgggaggcttaggtgggcagatcacttgaggtcgggagtttgagaccagcctgaccaacatggagaaaccctgtctctgctaaaagtacaaaattagcccggcatggtggcacatgcctgtaatcccagctactcgggaggctgaggcaggagaatcgcttgaacttgggaggtggaggttgcggtgagctgagatcgcaccactgcactccaagcggggcaacgagactctgtctcaaaaacaaaacaaaaaagaaaaaacttgactttcaagttatccagccactcctcttcttaaaaattaaacctaaactctggcatctataagacaaaaagctgaattcctatgaatgcctatctattgcatctgaagtataaaacgtattttataagcaaattagaagttggatgtctacatactatagtaantacttgacaggatacctaccttataggtttcttgtaaaaattanatgg

SEQ ID NO: 227428 - DNA, 1103 bp, Homo sapiens
  misc_feature (733)..(733): n is a, c, g, or t
  misc_feature (799)..(799): n is a, c, g, or t
  misc_feature (916)..(916): n is a, c, g, or t
cgcccggtgcactgtggacgatgagtcagggttaggggcgccaggacgtgggcgtgcaggacgccagagctgggtcagagctcgagccagcggcgcccggagagattcggagatgcaggcggctcggatggccgcgagcttggggcggcagctgctgaggctcgggggcggaagctcgcggctcacggcgctcctggggcagccccggcccggccctgcccggcggccctatgccgggggtgcgctcaggaatctaagtcctttgctgtgggaatgttcaaaggccagctcaccacagatcaggtgttcccatacccgtccgtgctcaacgaagagcagacacagtttcttaaagagctggtggagcctgtgtcccgtttcttcgaggaagtgaacgatcccgccaagaatgacgctctggagatggtggaggagaccacttggcagggcctcaaggagctgggggcctttggtctgcaagtgcccagtgagctgggtggtgtgggcctttgcaacacccagtacgcccgtttggtggagatcgtgggcatgcatgaccttggcgtgggcattaccctgggggcccatcagagcatcggtttcaaaggcatcctgctctttggcacaaaggcccagaaagaaaaatacctccccaagctggcatctggggagactgtggccgctttctgtctaaccgagccctcaagcgggtcagatgcagctccatccgaanctctgtgtgcccagcccctgtggaaaatactataccctcaatggaagcagcttggatcagtaatgngggcctagcagacatcttcacggtctttgccaagacaccagttacagatccagccacaggagccgtgaaggagaagatcacagcttttgtggtggagaggggcttcgggggcattanccatgggcccctgggagaaatgggcctagcgtcaacaaagcgaaggtgtcttgggggaacagggcatccgggaacacgcggggggggggcaggcccagggtcgggagcccacacagaggtggtagtggccccggagacgaaagccctatacggatcgccacaccgcgcggaacactggtacccacgt

SEQ ID NO: 227429 - DNA, 1169 bp, Homo sapiens
  misc_feature (799)..(799): n is a, c, g, or t
  misc_feature (865)..(865): n is a, c, g, or t
  misc_feature (982)..(982): n is a, c, g, or t
cgcccggtgcactgtggacgatgagtcagggttaggggcgccaggacgtgggcgtgcaggacgccagagctgggtcagagctcgagccagcggcgcccggagagattcggagatgcaggcggctcggatggccgcgagcttggggcggcagctgctgaggctcgggggcggaagctcgcggctcacggcgctcctggggcagccccggcccggccctgcccggcggccctatgccgggggtgcgctcagctggctctggacaagtcagattcccacccctctgacgctctgaccaggaaaaaaccggccaaggcggaatctaagtcctttgctgtgggaatgttcaaaggccagctcaccacagatcaggtgttcccatacccgtccgtgctcaacgaagagcagacacagtttcttaaagagctggtggagcctgtgtcccgtttcttcgaggaagtgaacgatcccgccaagaatgacgctctggagatggtggaggagaccacttggcagggcctcaaggagctgggggcctttggtctgcaagtgcccagtgagctgggtggtgtgggcctttgcaacacccagtacgcccgtttggtggagatcgtgggcatgcatgaccttggcgtgggcattaccctgggggcccatcagagcatcggtttcaaaggcatcctgctctttggcacaaaggcccagaaagaaaaatacctccccaagctggcatctggggagactgtggccgctttctgtctaaccgagccctcaagcgggtcagatgcagctccatccgaanctctgtgtgcccagcccctgtggaaaatactataccctcaatggaagcagcttggatcagtaatgngggcctagcagacatcttcacggtctttgccaagacaccagttacagatccagccacaggagccgtgaaggagaagatcacagcttttgtggtggagaggggcttcgggggcattanccatgggcccctgggagaaatgggcctagcgtcaacaaagcgaaggtgtcttgggggaacagggcatccgggaacacgcggggggggggcaggcccagggtcgggagcccacacagaggtggtagtggccccggagacgaaagccctatacggatcgccacaccgcgcggaacactggtacccacgt

SEQ ID NO: 227430 - DNA, 557 bp, Homo sapiens
ccgcaagatccacccatctgcccctgtcagggggctgccacccgcactgccgattcgcggacagcgcccgcaggcgtgcagatctgtccctctgcactcaggttcacgccgtccttgggcgcgtggtctcggggtggggaacccggccccctggtcggctcttgaatctttatccttcccctccccagtattgagctcccactggtgcccagtcagacgctgggactaccctttttctattccactcagcaacgcgggctccatccagcagctccaagttgctctgcaacccaccctcccgccttccagcgcctctgcatccacccttccattcattctcccattcattcattcatccttttctcctcgtccctccttcattcattcatagccccccgccctgcccgcttcagcatttcattcattcattcattcattcatttcccggagctccgctagcgcacaccccttcagccgaaggccccagcgcgcaggcgcaggccgggagaggcaggcaccctccaatcgtcgggcgtccttcctcctccgggcggccg

SEQ ID NO: 227431 - DNA, 381 bp, Homo sapiens
aggtaggtagatggcttgcgtccaggagtttgaggtcagcctgagcaacatggcaagacctcgtctctacaaaaaaatttaaaaattagctgggtgtagtggcgcatgcctgtaatcccagaactgaggtgggaggactgtttgagcccgggagttcgaggctgcagtgagcctcgaaccccagcctgggcaacagagtaagaccctgtctcaaaaaataaaaaataaggtgtgagcagagctggatccttctggaggccccagggcttagggttagggtaccccccaacagtcaacagaacggcccccaccagagaatgatctggacccaaatgttcacagggcctgggggtcggggggaagagatgctgcattgtttgg

SEQ ID NO: 227432 - DNA, 460 bp, Homo sapiens
ttgcaggttcattagattgtttttcttcattctcttttctttctgttcagactgagtattttcaattgccttgtctacaggtttactgaatcttttttctgcctgctgtagtcggccattgaatcctcctagagtgaatttttaatttcagctgttataattttctgtcctggaattcctacttggttccttttaattatttctgtctctttatcagtattctctacttgttcatacatatgattatctttatttcttttatctcattgagcatatttaagacagttgatttaatgtctttgactagtaactctaaaatctgggcctcctcagggttaattcctaattctttcttcttccctgtgaattagtcatatttgcctgattctttatgtgatttgtagtttttcgttaggaattggacttttaagtactataatgtgataactctaaaatctgg

SEQ ID NO: 227433 - DNA, 1046 bp, Homo sapiens
gcttttccgtgctacctgcagaggggtccatacggcgttgttctggattcccgtcgtaacttaaagggaaactttcacaatgtccggagcccttgatgtcctgcaaatgaaggaggaggatgtccttaagttccttgcagcaggaacccacttaggtggcaccaatcttgacttccagatggaacagtacatctataaaaggaaaagtgatggcatctatatcataaatctcaagaggacctgggagaagcttctgctggcagctcgtgcaattgttgccattgaaaaccctgctgatgtcagtgttatatcctccaggaatactggccagagggctgtgctgaagtttgctgctgccactggagccactccaattgctggccgcttcactcctggaaccttcactaaccagatccaggcagccttccgggagccacggcttcttgtggttactgaccccagggctgaccaccagcctctcacggaggcatcttatgttaacctacctaccattgcgctgtgtaacacagattctcctctgcgctatgtggacattgccatcccatgcaacaacaagggagctcactcagtgggtttgatgtggtggatgctggctcgggaagttctgcgcatgcgtggcaccatttcccgtgaacacccatgggaggtcatgcctgatctgtacttctacagagatcctgaagagattgacacaagaagagcaggctgctgctgagaaggcagtgaccaaggaaggaatttcagggtgaatggactgctcccgctcctgagttcactgctactcaagctgaaggttgcagactggtctgaaggtgtacaggtgccctctgtgcctattcagcagttcctactgaacaatggagcactcagcctgccacggaatactggtctgcagctcccactgctcaggccactgaatgggtaggagcaaccactgaatggtcttaagctgttcttgcatgggctcttaagcaacatggaaaaatggttgatggaaaataaacatcagtttctaaaaaataaaa

SEQ ID NO: 227434 - DNA, 423 bp, Homo sapiens
ggaacctgcaggcaaaaactgtgctgagactgattccccagtggtcagccccacagctggactgcaagctgctttccctgggcagactcagcctcctgcaggaggggtgtgggagggaaggagcagtatctgtgtgcagacctgggttcccccagaactgagatgctggatgaggtgcctgcatcccctgagctgcttggcgaggaggacggtccatgttttccatcacagctgggagtaagagcagatatgtgcaaggcaaggacgttgtttcaccttttgaaggaaggttgttaggaaaacgcctgcattttctaatcactggagaagcccttttaagcagaccagatttataagggttttgatgaaaacagtggtttgggagcagcaatgtctttaatagcaacaaagcccagagatggg

SEQ ID NO: 227435 - DNA, 721 bp, Homo sapiens
tgaaatcatacctggagcagcatgaaggtgcaggttagcacattgatgatacagggtcaaactctgcagcctgcacgtcttgggtgtgagccttgccactcctggtaaccagctttgtgaccttaggcaagttacttaaatatgtttgtttcttcatttggaaaataggattaatcgttatacttatttcatagagtagttgtgagcattaaatgatacaaggcatattaagggcttgcatattaatacggtgctttatataggtaactcaatacatgtttatattgctaactgaaaagtcttaccagaggtcatgccattgttgtcctttataaccagattgacagcaatcttcctaatcttttcctttccaattaataggcttttatatagcctagatcttcaaaagtccacctgctttagcccttttcctgagggagataagtggtatctctatttttcaattatgaaaaaaatttattgagcacttgggctaagcactgcagggtgagaggatgaggaagataagaagaggctcatagttttgtgggggagctccatgagcagataatataaggtaataagtgctgtgatagaggactgtacaaggtactgatctagtctggggcagaagagtggggagtcattgagggttttttttgtaggataagctgctgctgctgctgtcttttaaaaattgagatgagattgtcaaaacata

SEQ ID NO: 227436 - DNA, 484 bp, Homo sapiens
tctactaaaaatacaaaaattagcccagcgtggtggtgggcacctgtaatcccagctacttgggaggctgaggcaggagaattgcttgaaccctggaggcagaggttgcactgagccgagagtgggtatcatgccactgcactccagcctgggcaacagagcaaaactctgtctcaaaaaaaaaaaaatgaaaaccaaacagaaaaggacaaatattgtctgattccatttatgaggtacctagaataatcaaatccattgagatagtaaaacagaggttactcagactggagaaaagaggggatagggagttactgtttaacatgtacagagttttagtacaggatgatgaaaaaccctggagatgtatagtggccatgatcaatgtgaatgtactcaatgcctctgaactgtacacttaaccatgcttaaaatggtactttttatgttatgtatattttaccacaataaaaatcaattttaa

SEQ ID NO: 227437 - DNA, 283 bp, Homo sapiens
cacagaaattacgcaattcagaaactatcatctagttataacaagttttatgaaagaatcaatatatttgctgtaagatgaatcactaacatacttggctcaagagacttaaaccccaaataccaggaagctccacagactaaaacaggagacagcaagcccagtgccctcttcttcccctcaactctttaatttaggatcccaggggcatgactgaactagaagagatgcccttactttttaaccagaattatgaattaaacagaaaacaactgttgatgca

SEQ ID NO: 227438 - DNA, 502 bp, Homo sapiens
tccaaattattggctgatttatacatccctttgattaagaaaagacaacaataaacagtttaagcactgcaaagattagctaaattggaattatcctgttagtgaagtttgtgaacaaactttgtattcaggtcacactatcactaaaaccagtttacagaaaagcctccaaaaattattgatttatccaatttttgtcacataaaaagtaaattaggagaatgcctctacagattatgttaagaaaaaaaattattgggacttttattagattatttgtaaatacttgattaaaaatgcagaagtttgaaaaagctcagctgagttcattgatgaattaattcatgtagtaataaaaaaactcacacttgtacagtgtttttaacttttcaatgtgttctcacataacctgtcttgtttcaccttcaaaataatcttgctaggtaagaaggataggattattttctatgagaggaaactgaaggattaaatgatgtggcca

SEQ ID NO: 227439 - DNA, 237 bp, Homo sapiens
agaacataaatatacagcatggcaaaactacatctaaaacaagtattataggtctcatggtggaaaaattggacccacaagaaaagttgttaattatctctgatattctgaaccattgatatctgcaaaatgattactaggtatgtgcaatgaaggctattgatgttaccctgtatatctgcacactgtgtacaaatgctgttaaatgatgtaataaaaaattaaaaaggaaattaa

SEQ ID NO: 227440 - DNA, 409 bp, Homo sapiens
gaggcagaagataaattccaagatgtcattaacaaaatgagaagaaaaaggatatctacctgaacaagttttatggcagacaaaagtgacctattctggaaaaaaaaaaaaaaaagccacaaaaaggccaggcgcagtggctcacacctgtaatcccagcactttgggaggctgaggcgggtggatcacctgaggtcaggagttcaagaccagcctggccaacatggtgaaaccctgtctctactgaaaatataaaatttagctgggagtgatggcaggtgcctgtaatcccagctacttgggagactgaggcaggagaatcacttgaactcgggaggcagaggttgcagtgagccgagatcacgccactgcactccagcctaggagacagagtaagactcttgtctca

SEQ ID NO: 227441 - DNA, 382 bp, Homo sapiens
aaactcaaacgggtcagtaggctgcacagcataggcaggattcgtgtcccaccacagggaaggtctggtcctcgagtttcttctgtgaccgatctgacgccaaacattctttccatctgaatcactcacataaaagtcccagaaaaaagcacttctgactcctggctgaactaaggattcagccctgcagactaaagaccagaagtggaagtctgaagtcagggaacacccatcctttctagattctacacactagagaagtcctacaaaagggcgatgtggtcctagaaggtatgcgttgggggatgggagagtggtatgtgctccacaggaaaaaaaaataaaaagcataaacctatatattgttcaaaatattaataaa

SEQ ID NO: 227442 - DNA, 458 bp, Homo sapiens
ctgacacaagagtggattttctgagagctgtttgagcagagaaaacttgaaggagatacagtgagtagaacacaacctgtaggtggtttgaagacctgaggactccaatacctcccaactctcatattctctatagtttttctagaaaagcccatgtattggggcataacctataaagatgatagcaactaaaatggataaatcaatgacataaaatgtttatttcttctcttgattaaatgacagataccccaatctgcaggcatcatatgttatgactgcctccactctctgcattttgagaaagcctctacagaaattctcaaaggaatgggtaaagacatgagtatttttaactacatatactttaaatttattttttttttttgcatttaaaaggcttgagaggatttgggttgtatccaaactgaaaaaataaaaataggttaagtacatga

SEQ ID NO: 227443 - DNA, 324 bp, Homo sapiens
tcccatccctatcttcccactcacactcactggttcttctgctttggtttagcctccaatgatcacagaactcatcagtgaggcttttccatctgtggtagcttttctaatataaagaaagaaagatactgagaacattttaaggcttagcagccttctggcttagttgtttgtaaatgaaaatatgagtagaagaattaaacagccaaaaagataacccacaaaatgggagaaaatattgacaaatcatatatctgataaaggatttgtatctagaatataaaaataactctgataactcagcaataaaaagacaacttgatt

SEQ ID NO: 227444 - DNA, 877 bp, Homo sapiens
taagtcaatctccagttccttttgcctcctggagttcagcaggtgaggctgaaaagttccaagcctcaaaaaatgtggttggggccaggtgcggtggctcactcctgtaatcctagcagtttggaaggctgagcacatggaccacttgaggtcaagagtttgagaccagcctgaccaacatggtgaaaccccatttctactaaaaataacaacagttagctaggcgttgtggcacatccctataattccagctactcgggaggccgaggcaggagaattgcttgaacccgggaggtggaggttgtagtgagctgagattgtgccattgcactccagcctgggctacaagagccaaactccgttttaaaaaaaaaatgtggttgctttctctggcagctagccctcctcctgaagcagtctcggagcttgcagccaccctgttagctcaacagcatcccacatgcattcttaccatgctgcagatctgaaagaccttagaggcccttgtgtcaggaacctgggactaagactaaatatcaaaacagaaaatgctcctattacctctgtcacgaagggctttataagagctttggaagctttatgccaggaaccaggggcagagaccaaatgtatatttcttttcttatatcggagacagagtctcactctgccactgaggctggagtgcagtgatgtgatcatagctcactgcagccttgacctcctaggctaaagcaatcctcccaccttagcctctccagtagctggaactacaggcatgcatcaccatgtccagctgattttaattttgtaaaggcaggatcttccttttttccccaggctgatctctaactcttggcctcaagcaatccttcct

SEQ ID NO: 227445 - DNA, 761 bp, Homo sapiens
taaggcttttcgggctcttttattaaagaagaggcgtacagaatctcgccccctgcctaataagttaaatgcaaatcagggtggttttgaaaatggtgagattggtgaatctgaggagaataatccacttgatgtccactcaatttatattgtcccttttcaatgtccaaagtgtgaaaagtgttttgaatcagagcagattctcaatgaacacagctgttttgctgctagaagtggcaaaattccaagcaggttcaaaagaagctacaactataaaaccattgttaaaaaaatcttggccaagcttaagcgtgctaggagtaaaaaattagataactttcaatctgagaaaaaagtatttaaaaagagtttcttgagaaattgtgatcttatttctggtgagcagagctctgaacaaacccagagaacatttgtgggttctcttggcaaacatggaacatataaaacaattggcaatagaaagaagaaaacattgactttgccattttcttggcaaaatatgggaaaaaatttgaaaggcatccttacgacagaaaacatattaagcattgataattcagtgaataagaaagacttgtcaatctgtggttcatcaggtgaggaattctttaataactgtgaggtacttcagtgtggtttttcagttccaagggaaaacatacgtactagacataagatatgtccttgtgacaaatgtgagaaggtatttccttctatatccaaactaaaaagacactatt

SEQ ID NO: 227446 - DNA, 742 bp, Homo sapiens
taaggcttttcgggctcttttattaaagaagaggcgtacagaatctcgccccctgcctaataagttaaatgcaaatcagggtggttttgaaaatggtgagattggtgaatctgaggagaataatccacttgatgtccactcaatttatattgtcccttttcaatgtccaaagtgtgaaaagtgttttgaatcagagcagattctcaatgaacacagctgttttgctgctagaagtggcaaaattccaagcaggttcaaaagaagctacaactataaaaccattgttaaaaaaatcttggccaagcttaagcgtgctaggagtaaaaaattagataactttcaatctgagaaaaaagtatttaaaaagagtttcttgagaaattgtgatcttatttctggtgagcagagctctgaacaaacccagagaacatttgtgggttctcttggcaaacatggaacatataaaacaattggcaatagaaagaagaaaacattgactttgccattttcttggcaaaatatgggaaaaaatttgaaaggcatccttacgacagaaaacatattaagcattgataattcagtgaataagaaagacttgtcaatctgggggtcaccgtgagatccttaaactgtagtctcagttgtttcatcccgggcaaccatcgtcacacaaattgcgtgcaaggtatttcatacacagcattattggaagcctgtctggggactacacgcctaagagtgc

SEQ ID NO: 227447 - DNA, 423 bp, Homo sapiens
agtagcattggcaattgttgtccttagcagcagccgacaaggcggaattggaatggtgctgctcctgactacctctactccacgctaggcttaggggctggagtgacccaagccctcagggacctgcagcggctgaagtcctctcagcacctgcaatatcccagagggcaaagacagggccaaatactggattctggattctcttcattgttgtccccctgcaagtggagaggtatccaggctgggccttgtcctaagatatgacggaactgaattcttccagcaagcatgtgagcttggaagagaacaccatgcgccacacgagaatgcatactggccaacaccctgtgcaaagatccagagaagctgtgctcagactcctgactcatgaaaatagtgaacttataaatgtatattgtttta

SEQ ID NO: 227448 - DNA, 954 bp, Homo sapiens
agcggagctgactgcagatgttgagagaagaggtaactttgaccaaatgcagtcatgacctcaggtgtgggcaagtccttgttccctacctggacttggctaggcctgcaggtcatacaggaagaacagtccctctgaaggtgaccataatccacagggcagggtgtggaaagtgacagaggtgaatttattaaatgacttggtcaagtccccacagctggtcactggcagaagcagcagaaacaaataggcagcattatctattctcccagtcaacaaacagcctttgagcccagctatgcctggcactgtctctgcagtcaagccccagacttacaatactgattttaagtccaactatataattagctggactacattttaaatatgtgtactagggaaacaggagggaccctatagtcttttatatgctcaagtgttcagtgcttctgcaggaggcagagagctaaaagaagagagaagtttgatgggagaaaataatttcctggttgcaaaagataagaaaaggaattcactcaggaactcaagaccacaaggtagacacacacagtctctgctcaagttttgccaagctctgtacagaagaaaccatgttctttgttttttcaagttccttttaagtgggataaaaaagtggattggggccaggcgcggtggctcatgcctgtaatcccagcactttgggaggcctaggcaggcagatcatgaggtcaggagatcgagaccatcctggctaacatggtgaaaccccgtctctactaaaaatacacacaaaaaattagctgggcatggtggtgggcgcctgtggtcccagctacttgggaggctgaggcaggagaatggcatgaacccaggaggcggagcttgcagtgatccgagatctcaccactgcactacatcctgggtgacagagcgagactccatctcaaaaaa

SEQ ID NO: 227449 - DNA, 343 bp, Homo sapiens
tgataagtcgaagaactgcaattaaaacccaggtctgtttggctcccactcctgtgctctggaatgcttaagggattagaaatgtcccaaagagactaagaatccaaagcagtagtgggtatggaaggtaacagcagtgatttcctaaggacctgggttctagccccagagacatggttaaaattttatagcagttgcctgctttttgagtctgacaagcctccattttactgtcaaaaatgtgaaattcataattaggcaataatgtgctgaagcctgattttatttggttattttatttccattaaagtcatcaaaagtgatttattgattacaaaagaaa

SEQ ID NO: 227450 - DNA, 485 bp, Homo sapiens
caaaaaaaaaaaaaaaagaaaagaaaagaaaagaattgccatgtgtttctaagtacagtacatggatcagatgcctggtctccacctcagacatcctgaacctaatgctcatgggcatataacagagaagacagtttgagaagcagtgccttaatatatagtgttccagaaaaacaggcacagtggggtagagaaaagaacacagcagaggaagtgatgaataatgcagatgggaaaagagagaaactcttagaacaatttttactcaccctaaggtcagtcctggacacagagagcaattagagaccatggtagagactcttggggtgaagattattacaactaaggccaagagtgagttttctccctatagcaccaaagaaacagcatgttcctcttttaaatatccctcccttcagccactatgtcagaaaaatggagctgcaattgtcccttaggtcttttccagcttccacaacccatgc

SEQ ID NO: 227451 - DNA, 396 bp, Homo sapiens
cctcttgaggattgaggtcccctcagctggggatacaagatagcaagaggtgagtttaagacaatggataaaagcaatgctagaggcatatgggagcaccagattctgacagagtgggagagaagtcttccagactgaaaactgaagaataagcaggcaccaggatgtggatggaaaatgatcctgagcttacctttcattcataatttccttccttctttggctatctatttgattcataagatgtttccaaggtcatttcattttcttattattagagtttaattaaatgataatttaacctaaatataatttcattttaccacgatgtttctagggtatctcagagtaaatgcttcttttgattgataaataaattttagatcttaagcaaaa

SEQ ID NO: 227452 - DNA, 358 bp, Homo sapiens
gcaaaaaatttgaagtaccccatgcacgtgttccagctgaggttgtgtggttgaacagtgcgatgccctgccttcttgtttcagctctcaactgaagcaagtgggctgtctaatgccaaacttcttggattttgtgctttttgttggtgattttgctttggccccaaacgtggtgctgaagtgctgtctagtattcctgagcacagaaggtcatgatatgccttttggagaaaatacatgtgtgagataagctttatttgggcatgagttatagtgctgctgagtcaatattacctattaaataaggtgtctttaaacacacataaaacaaagttatatattaatcagctggcaaaaa

SEQ ID NO: 227453 - DNA, 460 bp, Homo sapiens
gttagcaaaattcaataatatttctaataaatacttctagagaaaataggacgaagtgatatttctttaatgttatgtaaactctctctctgtgtgtttgtgtgtgtgtgtatttgtaatcaaaaggcagcatgaggctggatgtggtggctcacacatgtaatcccagcacattggaaggccgaggcaggaggattgcttgagtctgggagtttgagagtagcctgggcaacatagcaacacagtgaaacctcatctctactaaaaaaaaataaaataaaataaaaaaaaaaaatagctgggcatggtggtgtgcacctgtagtcccagctgctcaggaagctgaggtagaaggattgcttgaacctggaaagtcaaggctaaagtgagggggggtcatgccactgcactccagcctgggtgacagagcaagaccctgtctcacacacacaaaaaggaa

SEQ ID NO: 227454 - DNA, 632 bp, Homo sapiens
aacccaccaaactgtttttcaaagtgttgtatcattttgtattcacatcagcaattaatgagagtgtctgttgttccacacagtaaacagcatttagtgttgttagtgttctggattgtggccattctaatagctgtgtggcagagaggtggtggtattgcattgttgtcttagtatatttatttatatatatataatttatagacttatttatgagcatttctacaaaacaatgaaaacattaaccaagatggtatattctctatcctagtttttgtttggactgagcaatttttgttgtctattatgttgtaaaattattacaaataaccatatttgttccaaatcaaattaactgttagtttcattctttgatacctgggtcagcaaaatagtccttgagttattaagccataaaccaatatgcccactcttcagaatagtagtgttagaaatatttataaaattgctaacctaagggtggtcatattcagtaatgacaattttttaataaaattaaacatctatattaattttgtattggttttgtattagtctgttttcacactgccaagaagacatgacctgagactgggtaatttataagcaaaagttaattgactcatagttcc

SEQ ID NO: 227455 - DNA, 558 bp, Homo sapiens
tagggcaatgcaagggagcagctaacaacacagctcaagtcagactgccagcttcctgctcaaattcttcctccaacatctcccagctgggtaatcttggacacattgattaatctccatctccacaactttaaaatggtgctaacaaatgcgtgcactaatgaatattattattagaatggtggttggatgagtatattacatacaaaatgtttaaagaatatgtggctcataaaaagcactgtaagtttagctaaatattgtttcctgtaaaatagggctaccttattaggataagaggagattatataagataggctatgttcatcctggttctgagaaaactctcaaaaatacattagtctgtgctctttatttgatgattaaaatcttgaaaaagtatttgtaaatcagtgcatatttcacatacactaggaggggctatttaaaggaaattatcagggtaatgcaattattgttgtaaatttagattccaataaagtatttttttctgtaaggcacacctataataaaggaatatgaataattaaaaaaaaa

SEQ ID NO: 227456 - DNA, 1159 bp, Homo sapiens
gctacagtgcatatagtctcttatgtataattaccttgtttggtaatactcactttgacatgtgttaattccattattttttcatgatgtttaatacacatttttagtacaggttttgtcttggtaagagtacaatttatgaaaaggagaatggagaaggaaagggccagtaacaatgaaagatactcttcattagcccatgaatgttaaacgtagatatgcagaacagtttggaaacatgaaaatcttttagagattctgagtaagcataaattattaagaaaatcagttctctttgcagggacctctatttgtgatacagaaactacaatgaatgttattaaatgaaacttgtttcttgtgaatgtttataagtcattaaaaacacatgttcttgcttcccacagagtttctttagagggtactagttgtgcacatgtttagttctgtgggagcaacatttatagtactgggatgagagtgttgtgcaaatgaatcaacatcacttcctttagtaaagtggaaactcctttttcatttttcttttttcctcccctttggacaaaattttagcataaggctatatcctggtgtcttttttccccttttatataataagggcaaagagatagggtattacttttatgtcactggtttttatctaaaaataaaaaattctcagccgattgtatgctttcttcactttgtgttatggctgggtggagataatccaggtaaagcagcattttaatgttttttcgtcctaacatttgtggaagtatatgtagccctcaatttgtgaaagcggatggaatgtttagagatgtgaatttatatagtttgataaagctccctgggtaattctgatagatttccttcaaattgagaaccattccattaattaattcttttctgctggttggacattctagtcctggatgtagaataattggtaacaattttgatatttattcagttagaagaaggtcttaagatgtaattacctaattaactttgatatttgcctcacacacacctgtcactccatttttaaagctaatattttgattccctttgagatcttgagcaaattacttaaccttttagagtcctagtttactaatttgcaataaagagataaataatacctcatttacaa

SEQ ID NO: 227457 - DNA, 556 bp, Homo sapiens
gtcctttcatgaatacattgatctacttgttttacatcccatgttttaatttttttgtaatttaatattttgtgttatatatttttgggaatgtcacatcacatcatttaattatgtgttgattttttagtttatattataattgtatataacaatatattttttagtttataattgtatgtaacaatatttaactgtacaatttaagacagtgaagagcaaaattaaatatgaaaaagccatgtatctattgccaatataattgtttctgtgtttctttgcctgtataaatattatccctgtagctttgtgtcacttgtatatttgttttgtaggtatggtgtaacaggtttttggttttggttttggttttggtttttttgagagggaatttcactcttgttatgcaggctgcagtacaatggtgggatctcagctcactgaaacctccaacttctaggttcatgccattctcctacctcagcctcctgagtagctgggattacaggaatgtgccaccacacccggctaattttgtacttttagtagagacagg

SEQ ID NO: 227458 - DNA, 537 bp, Homo sapiens
gtcattttgcatggatatttaataatatgggaaaatagtcatgatatagtgttaaaggaaaaatgaagcaggatatattttatgattcatatgtttagtaacacataaaattaactgtgtgccatgtgctgctctaaatcttttacacaggggactcatataggaagattaccaatgtatgaccttgagctagtaatttagccactctaggattaatttcctcatctgaaaaatgaagacagttatatttgtcttactgatgatgtgatcgaatgaattaatgcttgtaaagcatcaaaaacaaagcacgtgcttaaacaaatgttcctttattatgttctagactggccatcctatagtgcagtagtgaggatttttaggttggtgcaaaagttattgctatttttgccaacacttccaattaatattttgctcacttggtttgtttgtcatcaagtgatatgttagtaattattgaacagtagtacatgttttaggttcattagttaacagagatagttgcctaaatcattatgt

SEQ ID NO: 227459 - DNA, 428 bp, Homo sapiens
ggttgtattttggggcatagcttctggtatttcattcaatccctgaggtcttcaaaggcaaatctttagatacctgcaactatgaactcaatctggggattttacaaagcacatgaaagttttccccaagcataagttatttgaaataaacatgcaacaaatgagcaagaagattacttgcaattaggtagtgctttatcctggggcaatggaattatgattgtagggcaagtaatatatggaatatagaaacttctattaaagaaaaatgtacaaatctcaaatgccccaaagaaatgcacagtaaaatcagacactccaattgagaagagactctacttagccactttgtgaatttgttacaagttgtgactctcaaattgctggataattaaaaatgggattaaattgcatctatttctacacca

SEQ ID NO: 227460 - DNA, 321 bp, Homo sapiens
ttcaagtgattctcctgcctcaccctcccgagtagctgggattacaggtgcacgccatgacacctggctaatttttgtatttttagtagagaaggggtttcaccatgttggccaggctggtctcgaactcctgaccccaggtgattcgcccatctcagcctccgaaagtgctgggattacaggtgtgagccaccacacctggcctgaagtatgaccattataaagtgtacatttcttaagtacaaactcagtggattttacatatgtatccacccaaggaaccaccacctaggtcaagatacagaacattttccacaccct

SEQ ID NO: 227461 - DNA, 424 bp, Homo sapiens
accaaagaagaaaaaaattagccaggtgtggtggtgtatgcctgtagtcccagatactctggtggctgaggtgagaggatagcttgagcccaggaaattgaggctgcagtgaactatgattgcactactgtgctccagcttgggcaacagagtgagatcttgtctccaaaagtccttgaaggattttaggaagttgttaaaagtcttgaaacgatgtttgggggcatgttagggttcttgaatgtttaattcctctaataactgcttattcaagagaagcatttctgactgggtgcagggcagtggctcatgcccataatcccagtactttgggaggctgaggcaggagcattgcttgagcccaggacttcaagaccagcctgggtaacatagggagacgcccgtctctacaaatagtaaaaat

SEQ ID NO: 227462 - DNA, 409 bp, Homo sapiens
ggagtcaaggccaaaaggtcttataaataagagtgaattttgagaaaggatgtgtgaaaatgactctgttcttttcttttatctcacttcagttacttgggatggaggaagcagaaactgggagtcagacatctaaaatatgaagttccaccctcatgttggccatttctttcagcctcctttccccattcctaggggccaatctgtttctccctctcctgctctttctctttgcctctgtcttcttctttcctgtggagacaatagcgtgtggtggaactgcctgagtgcttactgagaaggagaaaccaagcgcagattgtacagaagctgacgaatgagtcctctgattgtggacaagtgatggcgctttttgtaaaattgtgtatgtgtttacctcaagtagtga

SEQ ID NO: 227463 - DNA, 699 bp, Homo sapiens
tccacaatggttgaactaatttacactcccaccaacagtgtaaaagcattcctatttctccacatcctctccagcatctattgtttcctgactttttaatgatcgccattccaactggtgtgagagtctcattctcattttttatggcccctgtgaaactttactttcttgccagctcaacaacttattttgaaatattttaaaaaataatttattcagcatttgtacttatttttaagataaggattgtatattatactgcccaaaatggaattcattgtatttcttcttcatttatttatttatttatttatttttgttttcattaatttaaaccacaaaaaagcaggagaaaatggtgtgggctcttttttctaaagaagtaatcattggacttataaaaataacacttgatatttatctgtctgtatacacacacatacactcataaacacgtatcttcataaaatgggttaagcaagtattaattgaggttgtttcttagtgttttttgtaatttgcttcactttattttctataatgagtatatattgctttttcaataagagaaactaaaatcattgtgggaaaaaggacttttttggaataaaaatacaattgaaccaacacacagagtatgtgttgaacatgtaactatcataatatctcatgtatatatcatcaaacctagttaaataa

SEQ ID NO: 227464 - DNA, 553 bp, Homo sapiens
catcttatggtggaagcagtcgctatgatgattacagcagctcacgtgacggatatggtggaagtccagacagttactcaagcagccgaagtgatctctactcaaatggtggtgatcgggttggcagacaagaaagagggcttcccccttctatggaaagggggcaccctcctccacgtgattcctacagcagttcaagccgtggagcaccaagaggtggtggccgtggacgaagccgatctgatagagggggaggcagaagcagatactagaaacaaacaaaactttggaccaaaatcccagttcaaagaaacaaaaagtggaaactattctatcataactacccaaggactattaaaaggaaaaattgtgttactttttttaaattccctgttaagttcccctccataatttttatgttcttgtgaggaaaaaagtaaaacatgtttaattttatttgacttttgcattgcttttcaacaagcaaatgttaaatgtgttaagacttgtactagtgttgtaactttccaagtaaaagtatccctaaaggcca

SEQ ID NO: 227465 - DNA, 368 bp, Homo sapiens
cggcacgagggagtccactagaaactcactcccaatctgccttcctggtatcatcttgcgttggtggaagaagagggctgaagaccacaacttatttaacccatgtaccctggacaagttattgaggcttcctgtgctcatcataaagatggggccagcatgctgaacctcctagagttggcctcaggacatgagggaaggccagttacatgccaagcgtggttcctggcatgtagcaggcactcaatgttcatttctttcttttccaagatgaaggtgatttttcttctgtgacttttgatgttatctgcctcccttcctaccctccatggctcaaaggctctaataaatggttccctactaaaaaa

SEQ ID NO: 227466 - DNA, 547 bp, Homo sapiens
catagttacacaatgtaggaatgatatttgtgaagtgatccacatgcccaagaaatgcaaatgcaaatagtgttgttagcatttatattgaaatataaaatctaaagcagcttaaaataagctaagctaaacaaactgcaagaagctaaatgatttaaacatgttaaagttttaaagcactagctgtaaatattaatcttcagattttcaatttaacatgtattcacttacaaactgttctaataataacactaattattttccaagtcaccatttaaagttttatttacagttgacctaatccaattgaagttgatgaaagcttcaacttattttttaactctttctggtccacgatgcctggaggcaagtgaaatatatatgacaaataatagataaaccaatttattttctgttagtgtatgtttattttttaattattaataatgtatattgtgtgtatatatgacggtgtatgaaagttggcaatgaaagctaatacaatcatgttagtcggctggatataataaagaacaagaaaggaata

SEQ ID NO: 227467 - DNA, 455 bp, Homo sapiens
gagtaacatcacagaaggattgagtaggatactggtttaaccatgggcataacattttttttttcagtattgaagagtaaagctaaagtttgttcactaagatgtttaattcaagccccagtaacagagatacacaactgccaaagtcagctcttaggggtgttgtaccaggaggtggtgtaaacagatctggacccagagaattagaaagaaaaggcagaatgaagttcacaacagcagctgctacatttaaaaatgttagagctgttttacaattattttcacttccctagctttctgagcctgtaagtctctcttccctatttcaacattcatcctaaagagttttcaattagtatgtgaaaccaaaaggtcagagtgttttagtctgatacaaatcatccctaactaaaatgattccagtatgtgcttccatttcattaaaactgttctgt

SEQ ID NO: 227468 - DNA, 173 bp, Homo sapiens
gatcattaaggcttagctattatgctgaataggccagatattacctttaaactaaacattgatataagacctgccttggctcttctttaagagctgcacttggatattatccccttggtaaaggtagtaagaattaatacaatatttgggagattttcctcattgtaaagtcc

SEQ ID NO: 227469 - DNA, 555 bp, Homo sapiens
gcattgagaagcccatgttgtagtgagaaaaatagacaagattcagaatgctctgtaccagagaagagtcttgtgagacatgctacagaaactcaaatgacggactggctccccacatttagtctggggataaaggcagtgaactgttggagggtcacagaagagatcacattcaaatgggggtttgaagggtgaataggagttcaccagatacagaaaagtgggaaggaataatgctaatgaagtcatgcagagaaaagagcaagcagaaaggcgtagaggcctaaatagcctctaaaatagcccaaatttgtttattttggactccatttaaactacagactttcagggctggaatagatttttaagattgctggaccctctcatttataaccaaggtgtatttaaaagtaagcatttagggatatttttcttagccaacttctttttatacaatccattcttctctcattaaagatgttacattttctagaaaagaatagactcacataattttgctcatgttcattttgatcctgagtttcagcatgatac

SEQ ID NO: 227470 - DNA, 443 bp, Homo sapiens
ctacaagccttccttagaagcttagtaatttccagcttttgatttaaaatgatagacatgcaactaactctttcacttgaacacttggaggccattttagggttattaatttgcccgatttcaacgtgtttcaaggaatagggagggctgaggagaggtagggaaacagccagtcagtggagccgtcagagcacacacaacacttgattaagtttactgtcttatatgggcacaatttgtgacactctaaagcaattacaatggtaacatcaaagatcattggtcacaaatcaccatgacagatatgtaataatgaaaaagtttacaatatttcaagaattgccaaaatgtgacactgaatgctcatgctgtaggaaaaatgatgcttatagacttgctcacagcaagattgccacaaaccttcagtttgtttaaaaaaaaaa

SEQ ID NO: 227471 - DNA, 299 bp, Homo sapiens
gatggagatggggtcttactctgctgcgcaggccgaagagcggtgaccggatcacagctcactgcagcttcaacctcctgggctcaagggatcctcccacctcagcctgcagagtagctgggaccacagccgcgcgccaccacaccgcgccaatttttgtgttcttggtagagaccgggttttgccttgttgtctaggttgggctccaactgcagggctaaagcgatccaagagcatcagcctcccaaagtgctgggattacaggcttgagccaccatgcccgccttatttcttaattt

SEQ ID NO: 227472 - DNA, 359 bp, Homo sapiens
taaaaaaaaaaaaaaagtttaggcatttatagcactgtgttgcgcagggtttatcttcctaaaatacaaatccaaacttatcacttgcttaaataatcctttagtagtatccatgggttttaggatgaaatccaaattctttttatttttgagatggtgtctcgctctgtcacccaggctggtgtgcagtggcatgatctcggctcgctgcaagctctgcctcccaggttcacgccattctccggcctcagctactcaggaggctgaggaaggagaaatgcttgaacccaggaggtggaggttgtggtgagccaggctctcgccagtgcactctagcctgggagtctagtgcgaaacta

SEQ ID NO: 227473 - DNA, 1404 bp, Homo sapiens
ctacttctaaaatttttttcatagatgggattttcctatgttgcccaggtggtctccaacacacaggctcaagccaaactcctgcctcatactcctaaagtgctgggattacagacacaaggcatgacacccaaccgaggttctccttgtagagtaaggcctgttaagtggatttatcagtctccctagttcatgccaccgaaacaaagaaacaaatttaccgtgggcctaatctgttttaaactttttcctcaatacgtagcaatggattatcaactgctcgatgcaggattttgtcactttatttcttttgtgaaaggattacatatagtgagaaagttgtcttatttgtctagctagatatacattattggcctgtgtgatatgctgtggaaaacaatcttaaacactctggataagatgagaataaatgactccactgaaatagaagtctatgccttttaaagtgaattagtacaaaaacatttgctgtggatatgatcttaaaggattgttttaaccaagtttgtttctatttcattacagagctggagctagtggaagtgagatagcacttgtgctgttggggaaaacaaaggatatgtttaatccgaattagtggattactttctagtgtatttcatagtgttagagtctaaagggtatgtgatagtagtcaggagatcaggattatgaaactggggctgccacttgtgtgaccttgtgtgtgatacttgaatgctgtaggccttcatttcaaaagcgagggggttggaatagaaacctctcagaccctaaatgtgtaagactccaattctgtggctaggcctggtaaggtaaagagtagcagaatatatcaagaactggaagggattagagagacctattatctaaattgctgtccctcctttgccccttgccttcccttttttttttttttggtgaatttcatatgtaaatttaaaaaatgcagattagttataatcacactctgtttattataaatttggtcacatctaagtgccatggtggtagttactccttccatctctacttctgcatgggaaacattttgctcctttaactttgaaaatatgagggtgtaaatatacaatactataagaatggtgcttctgccaggtgcagtggctcatcctgtaatcctagctactcgggaggctgagacaggaggatctcttgaggccaggagtccgagaccagcttgggcaacataacgagaccatgcctctaaaaaaataaaaataaaaaaattagccggccatggtgatgcacacctgtcatgccagttacttggggggctaaggtgggaggattagtgagctgtgattctgccactgcattccagcctgggtgacagagtgagaccctctctcttaaaaaaaa

SEQ ID NO: 227474 - DNA, 393 bp, Homo sapiens
cagcttccttcctgcaagtaagctggatggagaagctgcaggtaagctggatggagtgaagtctggttgttacttctaatattaacatgctaatcttcctgaaaacaggaagcaacaaccagacttcacttgtatctttcattaggagtgtttaatacatcacaaaaacaaagatgcagatcggaagatttatgaatttgatttgagaagccagtttggcaactttcatggccttgttcagaacaaccacaccactgtgccttaatgaccaccactgccactcaaacccgtagaaagtacaggtgttttatccttaatacatgagtgttatgttgcaagttagtttgtttaatggctgtaaataaagttatttcggctcagtaaactgtcaga

SEQ ID NO: 227475 - DNA, 449 bp, Homo sapiens
gagcctcctgtgagccgaggctgagagggccgcctattaccctgtttccaaacaactcccctttctgcgccagcgccgctgcctctcccgtctgtttgcccctcgccgcctcctccctctgttggggctgccgctgatgatgaaatttggcttgcaacaacctcttcctccccttcctgcaggcctgggagaggattaagccgctggagtctgaaatcggaaagatcccagcttctgctccccagcacctcccctcgccccctccccctccccgcccatgcaaaactagaaaattaatctccccttctgcctgtgatatggcgggctgcattacaagctgggcgtcgagataaagcggggagccgcgggacggcggcccagcgccggggccccgggtggggccggccagggagataagggcctcccagccccatgaattattcaccggc

SEQ ID NO: 227476 - DNA, 415 bp, Homo sapiens
ctggccccattcttgattgaagtgtcactctctcaatgaagctgccttcagcttccctatttgactgaggcagggctaggaccagggtgaatgtacctgggagtgaggtcctttcttaaggcataaaacttaagagaggcagggtgaggtggctcacgcctgtaatctcagcactttgggaggccaaggagggcagattgcttgatcccagaagttcaagaccagcctgggtaacatggtgaaaccccaactctacaaaaaacaaacaaacaaaaattagccaggtgtggtggcgtgtgcctgttgtcccagccactcaggaggctgaggtgggaggattgctttagcccgggaggctgaggctgcagtgagccaaaatcacaccattgcactccagcgtgggtgacagagtgag

SEQ ID NO: 227477 - DNA, 210 bp, Homo sapiens
gtagcattgttgaggatcagtgatgactggcttgagcaggggtctcccacccgcctgagagcccgtggagcacaggaactagatcttgtgccctgtgtccccagggcctggcacttagtaggggatcagtaagtgagtgattaatagggagagtggggtggggtttgtgtgaagcaaagaactggtaaagctattctctctgaagaggcc

SEQ ID NO: 227478 - DNA, 541 bp, Homo sapiens
caaaaataaagttgcttttaggattattctccatacatttttcttgttcaatgttcctactacacatggagtaaactcccataagaaagtgctagtgtaattaatgtagttgtcttgcatatgttttctttatatatagatgcaagttgcccatagaaataggtaagatagaaatatagatatataggtacagatatagattttccccctcaacagaccacattcctgaatggttgtaggtgattgggcagggcctggtgacagttttgcaacaggatatagggataaagaacaagcatgcagggaactggagaccctcctttcacccaatagtatctgaaaaattaaaaagagtattggccagatgcaatggctgacacctgtaatcccagcacttttagaggcaaagatgggaggatcgcttgagttcaaatgtttgagaccagtctgggcaacatggcaagacctatgtctacaaaaaattacaaaaattagccaggcagggtggcttgaggttgcaattccatataaaaaaaaaaaa

SEQ ID NO: 227479 - DNA, 206 bp, Homo sapiens
tcaggagagggctgcggctcaggagcacctcaaaaaggaagccgtgatccggatcaggaaccaccaagaggtcaggatgaggcgtggcaagatcttgacaagtgcaggggcccagaagttgggctggagtgagttgagaagtgatgggtgtgaggaagtggaaacagcctgtgtagacatcttctcaagattgcatggctgtggag

SEQ ID NO: 227480 - DNA, 398 bp, Homo sapiens
tctctggcttccttttttttttttctggaaaaacataggtctcataagttcattttttatattcccacacttgaaagagccataagtacaaataaatgtttctttaggtgcaaagatatatgcttactggcactcagcatcactgttggaagcagtatggagtggtggcagctatggcaaacaggagcactcagacgctgcatcaagggagcagctaccactgctcagtttagctggttgttttgcctgcaagtatgggcccagtatggccagatctcctagtttttcaataaaagctagaaatctgactcttctttgtgaaatatcccaattttgaggtgttgacaataaataaataaaaataaacaaaaatatattagaaacttgaccaagtgaaa

SEQ ID NO: 227481 - DNA, 496 bp, Homo sapiens
ctcagctgcttcctagtttctaataagtcaaataaaattcatttccccaaatggtgtcagccaagcagatggggtaaaatgaaagaatacagtaagaaaaaattttcttactgtattttctaccttttattttaaccttttgaaaatacgacttttagccatttccaattgttatcagattattaatctgcctagaaaaaatttttacccaaagaaaaaggtatttatcatattttctacagaatgtttgattaaaattttggccaagcgtagtagttcatgcctgtaatcccaacattttgggaggccaaggtgggtggatcacctgaggtcaggagttcaagaccagcctgaccaatacagtgaaactccatctctactaaaaatacaaaaattagctgggagtggtcaacagagcccgggaggttgagattgcagtgagcagtgatcgtgccagtgcactctggcctggatggcagagtgaaacactgcctca

SEQ ID NO: 227482 - DNA, 395 bp, Homo sapiens
gggctacttcaacaaaactttgctgcccttcctgctcctcttgtcttcttttctcctgataccttttgatgctctgcacatgttatttgcatagcaaaggcactaagctttccaggaagagagggcaccacttccacccccaataagtcttttttcccgtcttttctttcttttcctttccttttttggggggtggggagggagagaaagggggtttgcaaaggcagcatctcagagtgatagcctagatgtattgaaggcatctcttattctgccaaatcggaaagtcagttctctaaagcccgggttagccagaccatagggttttattctggctgcagaataactggctggtgtggctttgcaaaggggggcaaaaaataaaaaaataaaaa

SEQ ID NO: 227483 - DNA, 926 bp, Homo sapiens
aggcaggggtattgcttacagccaagagttcgagaccagcctgggcaacatagcaagaccccagtctctgctaaaaatgcaaaaaaaaaaattagccacggtggtagtacatgcctgtggtaccagctactcaggaggctgaggcagaaggatcacttgagtccaggaggttgaggctgcagtgagccctgtttgcaccactgcactccagcctgggcaacagtgaggccctgtctcaaaaaagaaaagaaaaaaagtagatttgggtaagcaaacaggtgtagagagagcatgctaatgggcagtgccatggaggcgggaaatgcagttcgtacctggcagtagtaaagtgactgggtcagactaactcagggtttctcaagtactattcacgttgacagctggagaattctttgttgggcgtgggagggactgtcctgtgcactgaagggtgtttagcagtatcccttgttttccccactagacgccagtagcacccaccacaggcgcggcaatccaaatgcctccagacattgccaaatgtcccctggcagggagggaatcacccctgcttgagtatcactggtctagcttgaggggaaggtgagaagggtaaattcagagccaacttggatcagccatcagatctgcacttaacactgttaaagggttctgtgagtacgggctgacatgtaaccaaagtgaaaagcttcccccatccccttcagagagatgaaaatagcatagagtctggagtttagagcgacttgggtttgctttttttttaatatataaaatcttttaggccatgcacagtggctcacacctgtaatcctagcattttgggaggccaaggcaggaggatcacttgaggccaggagttcaagaccagcctgggcagcaaagtaagaccctgtctgtaacaa

SEQ ID NO: 227484 - DNA, 486 bp, Homo sapiens
ggtgcacagtcagcagcgggacgcggagactcggctgttctctcgcgcttcttgagcgggtgtttggccaattgtaaatttccatgtcgccacccgactccctggggtttcccagggctcagaatccaaatttggtttaggtacgtgggtgccgaatgcaaaacaaaacaagcaaaacaaaaaccagcaagtgaaagacgacctaggacccccctgggggccaccctggagacggtcgtcaggcctcggaaagagctccttcctaaatgatttggagtatgacttcaaggaagtctgcttttctgctactctgacagctcagaaagaaccccctcggatccctgtggtttcgtagtagcttgttatatgtgattaaattggaggccccttcctcagatggaactgggttactcgctctcggggtgcccctcgtcccagggttgctctgccctgaggagcgccaggctgtaagtgaccagccagcca

SEQ ID NO: 227485 - DNA, 339 bp, Homo sapiens
agcttcaggatgggggctggtcaaacatgacgccattatttgagggttagaaatttcagctcttgtccccaacctatggggaggaaagaggcagtggagattgaattcaatcaccaatggccaatgagttaatccatcaagccaacgtaatgaaaccttcgtaaaatctgaatgagagcttctgtgttggtgaacacatccatgtgccgggagggaggcatacctcaactccaaagaggcagaggctcttgtgctcaggacatttttggacctcatcttatgtacctcttcatctggctgttcattcccatcctttataataaaatatagttccaagta

SEQ ID NO: 227486 - DNA, 817 bp, Homo sapiens
gaataggctgagcctaggaaagctatgggagctgagctgcctgaggccttaggggtccaacccccacccagtgtgcccaggatgcagaatatggagtgaaaggaaattattctccaactttaagatttaatattgttctccctgttgggttttggacttgtttcagatgagttatccctcttttcttgcctatttccccattttagaatgggaatgtctcttctataccttcgcacattgtattttggaagcagatagcttattttgatttcacaggctcgtggttgcagaacatttgccttcaggatgaagtcacacccatatttgatttagataagtattacctagataactcgattaactagatttagataagtattaactaacagtattaagagttaatactggagtgacttttgagcctactaggatggaatgaatatattttgcattgtatgaaggatgtgaatttggcagagaggggagggtaggtgcagaatgctatggtttgaatgcctccaccaaaactcatgttgacatttaattgtgaatgtgacagttttaagaagtgggatctttaacaggtaattaggtatctctttaggcactttcattagacagggccctcatgaatggattaatgcagttatggagggagtgagtttgttattgcatgagtgggctccttattaaagggtgattttggctcagtttcctctctgtctcatgtgcttgctttcacttctacccttctgccacaggatgacccttagcagatgtcagtgccatgcacttgtacttcccagcctccagaact

SEQ ID NO: 227487 - DNA, 660 bp, Homo sapiens
tgtatttgctttccatattacttatggagatgtaccatcagggtaacttcctggaacttatacctggcatgtctaaaacagggcatcattttcccaaaactttttcactttcttttgccaatattgaatggcaccattatctgtcctattacttatgcagaaataaaggtatcatcatttcttctcataactagtttgtcagcaaatgcaaattatgtattagcctttcatttttttctatcttcattttcttatagatcttcttagttggtttattatactagcctcctaactagtctcatttctttcctaatactccctactgctactagatgtgtctttcataaagccaaaggtgtgttcatttcacccagaccttcctttgcccagacgttccatttcctggcctttgcctacttctctagcctaatctctaaccacttctaaccataccaaactacttgtagatttcccagacgtattctgtcctcttttgcactggaatgccttttttttaccttctacatttctttctttcttttttgtcttttttttaccctttttgtggagaatggggtcacgcttgagtctccaaggttgagtttgccgtgatcctgccactgcacttcaacctgcgcaacagaaagagaacctgtctct

SEQ ID NO: 227488 - DNA, 949 bp, Homo sapiens
atctgacttttttcttgtttttgtggacagagagagatctccataattttgagatactctatgttaaactattttttaagttctctttttacatcacgtctgaaatgcacgagagtggcggtttctgtttcactggttttcttgttcattttttctgcacatttcatcctgttttcattaccatagttttgaaatatagtttgaaattataaagtatgatgtccttctgctttgttcttttttcttaagattgctttggctattcaaagtttattgtagtttcatgtatgttttagggttgtgtttttcattactgtgaaaaaagaacactggaattttgacagggagtttattgaatctagagatcactttggataatatggcagtttcacaatacttattctttcagtagaaataaaatatttttaaatttatttgtgtcttctaatttttttcattgatatatctttcacttaaaagatttacaagctccttgtttaaatttgttctaaaattaattatttcattgctattgtaaataagattttttttctctcttttatcagaccgtttgttttaagtgtatggaaccataacttatacttgtatgttaattttatatttttagtttaaacaagttttaatgtactgtttatgtttttttttatatataagattacatggtctaccaacggcaacgttttacttttggtcttcaatttcaatgactttaaatttttcttttgactatttcttcatccacatactttcagtgctatgttaaaatagaagcattgacaataagaaacaattgttttgcaatggggtctgtaaatttaaaggagcaaacacctcttcaagattttataaactggtttcagagagcaaaaataaatttttgtttggccccccaatgtgatagaatgccctctgggtttgtggtgaagaa

SEQ ID NO: 227489 - DNA, 716 bp, Homo sapiens
cattgtttcccacagttcctctgtgtaggctgatggtcctacggaggtaaatagttagattaatctgatctttggtatcactgtatcccaacagggaccaggaagatcatcatcatctatgtggcagactaaaaggctgttaaatatttgtatatagagagaattaagtatcatactaaaatacaaactttgtgattaatgagtgaccctctgatagctactttacaggagcatcctaaacatttctcagcattcatctcatcacactttcgttcattctatgtaactgcagccaatcttatattccacagtcctttacaacaactctttgttttgagctttattatagtggaggtagacttttatgagtattttgtcaagagcgagccagggaacttccatattatcctttcaagagaattggcttccaaagtgacttttcaagagaaccagaagggtcatcccatgccttagtagtagagctaaactatcccagaatagaggctacttcaaacctaccctaaacacgtttaaaaagaagccatgaaaggatcaaacaaatctgattttccagtaacttaactgtcttctaacgaagccattctttaagggaacatggcaaagttcagatacttaactcaatgtccaccagccaataaaaaattactagacatgccaagaagcaggaaaatgtgacccataacctagagtaaaaa

SEQ ID NO: 227490 - DNA, 457 bp, Homo sapiens
cataagaggtcacgaattctaaaaactaataatacttaaataaattacttaaaattacttaagtattaaataatacctaaatatatttacaataataatagtagtagtagaagtaatgccatttccttattaagtttcccattttaaaaaataccttaaaaactctgaaatttttcttctgaaataaataagaggatagatagaattattctcatttaccagacattaatttttaaattgcccgaaaaatgccttttctacaacttttttttcataactgctttgataagaagaatcacaatctgtttggaagtttgctttgctcaatgtcataagttggtttacaattcaatcgaatgccctggtttgtcacaggagctcaccaataagcaaaacagccaagccttttgaagactaattagaaaaagtacaataaaattaattcacacagcacatg

SEQ ID NO: 227491 - DNA, 429 bp, Homo sapiens
cttttcttcttttctcttctcttctctttttttttctctctctctttcattcacattatagcttgagtcagaacttcattcctttttaaggctgaaggaccacattttgcttgtttgttcatgtgatcgatgatgatggacacttaggttgtttccactttttagctatcgtaaacactgttgctaatggaatatgggtgtacaaatatttcttcaagatcttgctttcaattcttttgggtatatacccagaagtggaactgctgcatcatatggaatccattcccagggaaattctcaccacatagcacatgaacacaggtgccaggatgcagctgcaccttcctttgtggagcaaaaacttggaaatatccttaaaagtgattaagtaaatcagagtatgaactgtgctctggagtgcaagaccgc

SEQ ID NO: 227492 - DNA, 422 bp, Homo sapiens
ctaagactatttgctttttaaagttaatatgtgatgattacagatttatttttccattaattttcagctaggaatacagaagatatatttcgtcccacataatctgctaactctgtaggagattggtagggaaatatgcatgctacttactgtggcatttctgaaagaaccagctttcattattttcctaaccagtcttcgcctatcagctaccactttggctatatatatatatgtacaactgacttcttttacatttaattgtactcatgggagtctattagtgactctaactttaataagaaatttctaatccacagtagttgtttttttctgttttgtttgcttcgttaatcatattcagtatatataagctaattaaataaataaaatttctatacagtagttctaaagcttaaaaa

SEQ ID NO: 227493 - DNA, 382 bp, Homo sapiens
aaacagtatggcaatctcagggcagcattctttcttagatatggaaaacagaagctacaaggtctcttaaagcctggcttagaagtccccaacctcacttccaccacattctgttggtcaacgaatttattagaccagctcaggtccaagggctagcgaaacagactttgtgcattgatgagaggtgtggcaaactcacattgtaagagcgtgtggaaaggaagcaattgtggtggccatctttgcaaacaatttccatgagtaagaggcataatatttcaaagatccaattaagtatttgaaaaaaaaaatgacaagttagtcacggagaaagcattcaacaaatagcttcttgaccattttgactaatgtacataatgcg

SEQ ID NO: 227494 - DNA, 203 bp, Homo sapiens
gactctgactaccattctatgagaatctaccaaatgattccaaggaagtatttcaacatagaggaaaaggttccctttgctttctcatcttaaactctaaaaaaaaaaatttttgagacagtctcactctgtcgcccaggctggagtggtatgatctcgactcattggaacctccacctctggtgttcaagcaattctcctgc

SEQ ID NO: 227495 - DNA, 877 bp, Homo sapiens
agctatatatttatgcaacatagattgaaagcttacatgccaggcacatagtatcattgagctaactatactgagtcatctgtttatctatctttttctcctggaaggcaggggctacattcttttaatctttgtatttctaagaccaagaagaatgtctaatacataatagacattcaatgtttgtggaattaacatagatatgaggtaacattgctgtcccttgcagtctaccaaaaaagctggttttatgctgatgcatttgctgatgaatgcatcagtgacactacatttacatccatgcatttatatatgtatgcattctgcatttgtataatgctttaatgtttttggaaggcactatctcacattttgtattacgttgtcttcctaatatctacttgagcctgtgtgcccactgaagagatgaagaataaaagcctaagctctcatcaaaagttggtggaagagtcctttctagaacttgaatcgcctgacttttccaccactcactcttcctcggcagtatggtaatttcccatttagcaaaaaatatactgtgtgggaagcatcacatcgtctggtgtttttgaagctccagtaaaatgagtcactgcgccatcataggaaaaaccttgaaatctttcccttcaggactaagagtaaagcctcattatgtaacttcaaactctcccgagggatggttagtaagtcccagatgataggatcaaaacaggtaaaattatatcgatgatgctgatggaacaaaagcatgcaaggtaggcttctcaaggtctgatgtttaggccactaggatcacaccttcatccagtgtcaaatacagtcagtcatttatctgtctcattttttaggcaaa

SEQ ID NO: 227496 - DNA, 332 bp, Homo sapiens
aattcaaaaactcacagaccaatgccagggtcaaccagatctacatgtgattttaatgggttatttttaggacatcataaggaattcggaatccttgaaagtggaatgcgtgatgtccatcagtgacttcagggtttgtggagcaaacgctatggtagcaccgggaagaacagtgggtgagaggtgaccccaaagttcaggaatattgcttctgaccccacttcctcagctagcacgtctggtgtgtcacagcagagtccagcaaaggtaaccaacaacaaagggaaaactagacacagttgcctggaataaatacgaaaggtaagaacaaa

SEQ ID NO: 227497 - DNA, 370 bp, Homo sapiens
tcaccttcccatccttgctggcttttgcacgtgagtgggcgagaacgtgcagcccttgtagttgggaggcaagaggggagagaggagagaaaaggtgggaggaggaagggcagaaaaggagtgggtaaaggacataagttggatcatgggatccaggagtcacaaaagaaaggagaaacatgctcccagctttgcagagagcactaaaggaaatcaaaataagacttcccctcattgcagggcagcctgctagggtgatgggaatgtataatagtttgacctgggcagtggtgacacaggtgtacacatatgtgacaattcactgagctgtcaattcagatttctatattttactaattttaaaaatatc

SEQ ID NO: 227498 - DNA, 377 bp, Homo sapiens
atttagccatttcttttcttttcttttcttttttgagatggagtcttgctgtcacccaggctggagtgcagtggtgccatctcaactctctgcagcctctgcctcgtgggttcaagcaattctcctgcctcagcctcccgagtagctgggattacagatgcctgccaccacgcccagctaatttttgtaattttagtagagatggggttttaacatgttggccaggctggtcttgaactcctgacctctggtaatccacccaccttggcctcccaaagtgctgggattacaggcgtgagccaccacacccggcctatttagccatttgtatattgatggacagattgtttctagcttttgctattacaaacagtgct

SEQ ID NO: 227499 - DNA, 688 bp, Homo sapiens
tacttaacctctctgttcttcaatgtcctcgtctgtacaatgaggataataatagcacctatcagatagggctgtcgtgttgttgtgctataaagcacttcctgccagacaggaagtctctgtaattattagctgttgtgatttttcactggtgttatcattcctgggacccagtctaagttagtagccaagctaagtgccagcccaagattctgactccagtgcagcctttgtgatggtctttgtgtccctggcaaatgagcggtcactggctgggtggccaccacattcacagacaggtcaggtttcaggctgtggggaggagcagattcttacttggaaattaaggcctttgccttcccctatggatagaactggtgaataggttttattcccttagtgagctcaaagaaataagagtatagtcccagacttccactcttctggttttagaaaaaaaaaaacccaaaccctcagtgtctcctaattagcttgaggccatcaccccatgagaagcagggggattcaggacagtttaactctttactgccttactaaggagatcttgatctaggccagtgccctccaaacttctgtctttcatgtagctcatttgtgatttgtgtctacccccatgccaccttcattattattttcgtagggttttcttttcattagcttatctgtt

SEQ ID NO: 227500 - DNA, 405 bp, Homo sapiens
tgatatattgccttatgagtttaaatgaatataccttattattttaaactgctgcatagtatattaacatgaatatggatatatagatatactatatagtgtactgtatagtatctagcttatccatatgaatatattttaattcatttaacaacttcctgtctttagatttcctacctttccgaccaataagtagttatggactactgaatatttgattaaaaaaaacaacttgtaaccaatattaatcattcagaatggtgactaatatgtcaattgaaataacataatattaaagcaaataatccctgcccccaggttataaaatggaacattactagtttttagaaattttctttatgtttctttctgacataattccctcttcccttctgtcgtcttctc

SEQ ID NO: 227501 - DNA, 713 bp, Homo sapiens
actcagttctgaccaaggagctgagatgtgatggctggagactcaacaccattctggacgccaaaaagagctggccttggctggaaggttctggctaggaggagagggctaaagcatgcgaaggcacaacaatgatggaactgagcgaagaagatactctatcccacttcagtgaaaacatcatgaggcttgaagcatggaagttgcctcacccccgtgtttcctgccaggtggaacaaagtgctgagagaatcaaaccagcaagcaaagagaagaggagcaagagatggaaagtgacctctagcatgcacatccctaagccccagctgattatatcagccggcaaactcctcttgtgacctaggctagtatgagtggaatccctgtcacttgtgaccaaagcagtcctgacccagaaacgcagggactggctgagggcagcccaacattggtggctgagggtttagaccatcacactccagaaagtcagagtcacggaaaatctttgcccaggaaggcaacaggtatataaaaagatacttttagagagatctggctgcagtgagagcaatgggctggatggggccagggctggaggcacaggtcagagtcttttgaaatgtgctgacaacgcccagatctccatctccagcccttagggtcggtgcctggtagggatatttactggaatccgcattaaagctcagatgtca

SEQ ID NO: 227502 - DNA, 1368 bp, Homo sapiens
tattttactctatccctgcctgtaagaaaggcttcctagttcccacaggattttaaattgtgcaaatcggcaggaaagactctatccccaggcctaggaactgagggtggaaagaggctgcagaggccatggccatccattgtcatgaccaaacagttgccagcatctggctgccagtgggggatggatgcactggtccctgccctcaaggaaggcacagtctccttggaagatgacacacaaagaacagtttaacacattccaagctctagaaacatactgcttgtcctgccatctgctccctgtccctcccagcttggcagccggggcaagttaccccacctctttgtcctttggttttccctgtggaaaaatgagaaaagtcactgtggccaggagtgtcctggaaacagcttcatggagatgggaggaggacagatgtctggagaatcagggttggaccgtgaggataaaacttaaggacagggataggaagagtatttgggacatttgagctaagggacatttccttttgtcttttgaagccaaaaagagctggccttggctggaaggttctggctaggaggagagggctaaagcatgcgaaggcacaacaatggtatgttatgtattttatatacatccagcaaccccgccactccccaggaaagccacatcttcaccccaagcatgcgttctgaccccaccttcctgaccgtggccagctggcccaggaagggtgcctgtaccaagttggtccaatcagagttcttcctgggatttttctagatggaactgagcgaagaagatactctatcccacttcagtgaaaacatcatgaggcttgaagcatggaagttgcctcacccccgtgtttcctgccaggtggaacaaagtgctgagagaatcaaaccagcaagcaaagagaagaggagcaagagatggaaagtgacctctagcatgcacatccctaagccccagctgattatatcagccggcaaactcctcttgtgacctaggctagtatgagtggaatccctgtcacttgtgaccaaagcagtcctgacccagaaacgcagggactggctgagggcagcccaacattggtggctgagggtttagaccatcacactccagaaagtcagagtcacggaaaatctttgcccaggaaggcaacaggtatataaaaagatacttttagagagatctggctgcagtgagagcaatgggctggatggggccagggctggaggcacaggtcagagtcttttgaaatgtgctgacaacgcccagatctccatctccagcccttagggtcggtgcctggtagggatatttactggaatccgcattaaagctcagatgtca

SEQ ID NO: 227503 - DNA, 420 bp, Homo sapiens
gttttattgtggcttatctgattgtgatctggcatttttgccttctgagttggcgaggttgtgcaaagctgactctttcttcaggagtgctggaagtggttgaggattctatgtctaggaagctccagctataattcctgtgatacagttctccagctccaatttagccttccagtttcctttatcttgcaggttcactttgcccagggtgagatttttctttagtctttaaggtagttctataacattttaaccagaactgcccatgctttattgaggatatttcatagacacaatttcattaattccactggggtctcagcatcctgtctttccaactccttccataaaatgcagtagaccctccaaatcatcagatttcacatctgaggatttagccagccaaggataaaaagtatt

SEQ ID NO: 227504 - DNA, 849 bp, Homo sapiens
ccccaacaaactggggcattcccagttaaactgtttgttcctcagggttttcaaggacaacaacccctacagaaaataccaccacttcagggagtcagccaattacaacaatccaacagctgtcccgcgccacagcaggcagcaccgcagtagatttatgttccacccaaatggtctttttactccctggaaagcccccacaaaagattcctagaggggtatatggcccgctgccagaagggagggtaggcctttgagggagatcaagtctaaatttgaagggagtccaaattcatactggggtaatttattcagattataaagggggaattcagttagtgatcagctccactgttccccggagtgccaatccaggtgatagaattgctcaattactgcttttgccttatgttaaaattggggaaaacaaaaaggaaagaacaggagggtttggaagtaccaaccctgcaggaaaagctgcttattgggctaatcaggtctcagaggatagacccgtgtgtacagtcactattcagggaaagagtttgaaggattagtggatacccaggctgatgtttctgtcatcggcataggtactgcctcagaagtgtatcaaagtgccatgattttacattgtccaggatctgataatcaagaaagtacggttcagcctgtgatcacttcattccaatcaatttatggggccgagacttgttacaacaatggcatgcagagattactatcccagcctccctatacagccccaggaataaaaaaatcatgactaaaatgggatagctccctaaaaagggactaggaaagaagtcccaattgaggctgaaaaaaatc

SEQ ID NO: 227505 - DNA, 693 bp, Homo sapiens
atgcgtgcccaccccagcgtgtgggtgagcccagggctgtgcccagcccagctcttagagaaccactctgaggcctccctagacagagtcgcaggagccgtcctagaggggtgggggtggtgatgggatgagaagctctctgtgggcctctgatcccctcctttaataaaaggagctagaaggccccctcctcagcaccccaccccccagcctcagcacccaaagcatccattattccacccgatgccccctctagttctgcggggtgagtgcgctgagcacatcttacagagggcaaactgaggctggggaggagaaggggggttgcccaagggcagagctggtgaggtcagaagcagaattgcaagccggggcggtgggcccccaaacctgtgttctctcaggccgcccacccccatctgccgggctggggtgtggaccccgaagcgtgccccgggccccctccaccccagcacccaagggcctcccggacccaaagccacctggcggcgctcgagggggcgcgcgtgggagcgcgcacggtggcccgcgcctccggccaagatgttccctctccgcgtgattgacaggctcgagtgccgagaaacaaaattgtttatgcgctaatgaataaggccctgattgcaagatcctgtttggaaaattatagtgcggcggcggcggcggcggccg

SEQ ID NO: 227506 - DNA, 444 bp, Homo sapiens
gaaagggccccacgtggttcgaccggcaaacgcggggcggattttctggtccaccatgtttgcattgtgcggtgaaaaataggagtgtttctgggccgcgaagatgaaagcgtccactggggccgatttcggctctcgggctgggtgtccgcctccttcccctggcccagagttgctggccgcccgccagcgcgcttcgtcccaatgtgccgcgcgggatccgggtttcttgggtgtattcatgtccaccacgttaccgttctctctgcaaatccttcctctttttctcctctggccttcgcgttttcatctctcccgccgtcagtgcctcggagactgattagcctgtggaggccgacgttgggttttttttatagttttgcgttgttgaaaattgcgcttccaagtgacacctaataaataagtacattttggttttgctgt

SEQ ID NO: 227507 - DNA, 428 bp, Homo sapiens
aatggcaaagagaaaaatatggtgcacaaataagagcacccctggaccaagcaatggctctgccaccaactcaatgcaaaatctggtaacagtcactgtgttagtcttttcttgccgtgcaataaaaaatacctggctggggccgggcacagtggctcacacctgtaatcgcagcactttgggaggccatgggggtggaccacctgaggttaggagtttgagaccagcctgatcaacatggtgaaaccccgtccctactaaaaacacaaaaattagccgggtgtggtagcacgtgcctgtaatcctagctactcgggaggctgaggcaggagaattgcttgaaccccagtggcacaggttgcagtgagccaaggtcatgtctttgcattccagcctggacaacagagcaagactctgtctaaaaaaat

SEQ ID NO: 227508 - DNA, 307 bp, Homo sapiens
cctgcctctcctcctttcaaatgagggtggtcggggttccagggtggcaggaggggagtggggccagatgaccgtggatggaattggtgggtgctaggactgacgcctgggttccatggcggaggagagggtttgtccccatggagctgtgtggacttttctgcatatgtacttgaggtcttcaaagaaagaagggcagatctgagaaatggagaagtggctggtattagtgagatgttgaaaaactgccacagaagccctcacagtgcctggagtgttaagacagaagagaaaacctggcaccata

SEQ ID NO: 227509 - DNA, 473 bp, Homo sapiens
gtctctgggtgtgtcattcacatttctgtgggttagatttaggctgcaagtctagccacttgctcatatgtgctggacaaaacttacaggaggcctttgttttggattaggccccagcagaccaaaccaaaatggagtcactcatgctaaggttacatatcaccaagctgaaaataagttgtttatctgaccttctgagaaatcaggagagagagagagaatggccaaatccccaaacagaccagtcccagccagcataaggaagtcccctctgctttaacattttttttttacaaggaaagtcgctttgaaatgaccaatttgctttttgttttgtttctgctttcctcagcctttctttgtctataaaccaatctcctctgctcagctcagcagaacaattattctattttatggaatgaagtgttgcctgattctaaaattgcaaataaagccaattaaaatatttaaaa

SEQ ID NO: 227510 - DNA, 430 bp, Homo sapiens
tgattttattatttttttattttttagaagtgatttgtgagtttaatactatgttttagccctgaacaataggaaatatagtaaaacctcattcattgatttcttttttaaatctcatgtttgagtagtcttgccatagtgtcatctataaactttgagggttttgtttctccttttgtttttacatttgggggacacatgattaaccttaatttgagctctgccgtatgttctgttttgtagttttaggaagcagaattattttcctatttgattctgtagtttgagaaatgactctggaatttactcattcagagaacacatacataattgacattaaagttatttgctttgtcaatttattaaggaataccagctcttttgaatttgttttgcatcacagctattataagacagatacatgatataa

SEQ ID NO: 227511 - DNA, 323 bp, Homo sapiens
atcagtggttctcagctagtggctattttgttctccagggggcatttggcaatgtccgagacatatttgattgtcctgactgggtacgcactgctagtacctagtgggtagaggccatggatgccatcagccattctatgatgaacagtataggcccttacaacaaagaattatccacccccaaatgccaatgttgagaagccgtgatctaacttaacccttatctttcttaggtggaggttgattatctatctatctctttctctccagccagccaggcagccatcatctgtctacctacagatgaggaacatgagcttgtg

SEQ ID NO: 227512 - DNA, 644 bp, Homo sapiens
gagtgcagtgacttaaacctgtaatcccagcactttgggaggccaaggtgggtagatcacttgagcccaggagttcaagactagcctgggcaacatggtgaaaaccctgtcctataaaaaatgtgaaaattagccaggtgtggtagtgcacgcctgtagtcccagctcctcaggaggctgaggtgggaggatcacctgagcccaggaaggtcaaggatgcagtaagtcatgattgcaccacggcactccagcctgggccacagagtgagaccttgtctttaaaacaaacgaacaaaaaagattgttttacttcttaaatctggattaaaactagatgcattttttttcattgttttcccctcattaccctagctagaacctccagtacaatgttgaagtggcaagaatggactttcatgtcttgttgtaaagcataaggattttgattctcatttctgacaagttttaaactttggtgacatttcaaattcctttctccatgatcctatttgagtttatctaatatagaaagtgaactttttgagggcactttctgttgctaatttttctatatggctttgaaatgaatagattttagtttcaaattaagtcttatcaataattgttaatggtcgggtgcagtg

SEQ ID NO: 227513 - DNA, 442 bp, Homo sapiens
gcagtgagctgagatcatgccactgcattccagcctgagtgagactcaaaaaaaaaaaagatgaataaaatgccccagaagacacatgactcgcccaggcctctcaagttggcggtgacaacactagactggagccaggtctcctgactgtgtcttccaccctcaccgcaccacagctgagatcaggtttcccgctcagagctccctttcagatcagagttcccattgagattctataagccgaggaggaccacgagcgagccagaccctgcccgacagctccctcctttcagacctacctgtggatgctgttggctctggaagggttcattatctcagggactcagggtcatgcagtcattaggataatattaaacttttaaatttttttttttggtcattttataacttcataataaaatattagaaagtatacgttagc

SEQ ID NO: 227514 - DNA, 281 bp, Homo sapiens
agcaatcaaatggtagtataattactatttttaaaatattatcccataattataatttttgttaagattagagttttgttattgttgttgttgttgtgttattgttgttgtttttgagatggagtctggctctgtctctcaggctggagtgcagtggcgcaatctcggctcactgcaacgtccacttcccaggttcaagcgattggagatttttaaacttatttttgttttttacttttcatctagattatttacctattctgatatttttgaagttgctg

SEQ ID NO: 227515 - DNA, 444 bp, Homo sapiens
tttcacataacacaggagatgataaatttagaccccctcaatctcatcgtcatactgattatactgtaagcagtgattggggtgcacacattgcatgttttgaaggtatggatgtggcaattctaatgtatcaacattgtttctgaaaagctaaggttttgttattgaactactattagaagtcgaatgtgatcctcttccaatgtctggcattgccttcctgtggaattaacattctgtgtgatttagagtacgtgtcccgactttctcaatgctcataaataccttgtctgtaggaaactttctttaagggaaaagcagctttagcctgtctccagtacatggccctgacttgcttatacatgtaatctattatgaaggaaaaagagccatcctcacaaatctacaagattaaaactcctagcacaaacacagcttgaatca

SEQ ID NO: 227516 - DNA, 357 bp, Homo sapiens
ctcccgctctgagtcaccagagtctgatgagggagatcacagcgaggcctttaccaagccccctaaggcacccaaataaaatctacagatcactgtgccttcagagccgaggccagagtgggtagaaccgcagcttttataaaggcagaaaaggagatggacgtgagaggggagggcgtgaggaaagccagctgggggcccctcctctgccagccttcggggtcctttctgaagcagagggtctgagaaacactccagtccctccacaaaagtggaagaatacctgtctggccggggaaaggggttgccctgcagagaaacgcctggaaaaggggggaaggatggtttggggttccg

SEQ ID NO: 227517 - DNA, 515 bp, Homo sapiens
cactcagtactagctaaaggagaagggttcttgaccttgagaattggttaccgaaataccaggggtttggtctgggtcccgctgctcgctgcacagaaagtcaatgactgagacaacaattattgccaaggaagaaggctttaatagggtgcttcagccaaggagatgggagatcagtttcaaatctatctccctgactgtccaaaattagagatttatatagtacagaagaaatgtaacaatgtataatgaaacaggaactaaggagggggtaaggaagcaatcatgatgaatgaggggtctggcatctcattgtctggatgggtgatctagtgagtttcaattctttgatttttttttttttttttgagagtcataagggtccttttctgagaaaggaactcagataaaacaattatttttgggccttgttacattttaaggggagtttgctaagaactatcctaactctcaagctttaagaccagaagggccaatttctatatttatccaaa

SEQ ID NO: 227518 - DNA, 475 bp, Homo sapiens
attgccctatttttgtggttatgttgaggtatcaagtttctgcagcattcacgaagcccagaaatctctaaataatgccaccctcagttcattggtgatatctcaaaaatggctagagagaattattgtcttttatacatactgatccaaaagaaagctgtaatttctctaggacaccatccacaagtgtgctataaagcacaacttcaccagggttcctagaaacactgacgccctcagctcttgggggcctgggtagggtttcaggcacctagggacctcagaatggtctcttatcctacgagcatcttgatagggcttcaaatccccaggcaagtatcaccattatccgttatagccatggcatgcaaaagacgagaggcagaatggaacagataaagggagatggataaacaggttgagtatccctaatccaaaaatctgaaatccaatatgctccaaaatccaaaaaaaa

SEQ ID NO: 227519 - DNA, 283 bp, Homo sapiens
cagttagccccagctgggaataattttttttcccctcatcacattattcaaggacttactgtatatagtaattaggattggctatttagatttttaaaatttaagtccctgtcagttttactgtttccaacatgagttgtgttgccagtgtttagataatcagaagtatatattgaatataaatactatatatgtatgtattttgggggtggggaggtggggacagtgtctggctcttgcactccagcctgggcgacagtaagactctgtctccaaaaaaaaa

SEQ ID NO: 227520 - DNA, 974 bp, Homo sapiens
ggtggggcctgagaatctgtttatttaacgaatagccaaggtgattctctctagggtttcgggggaaaatcctggatggcgatctctagggtccagatggagagtctaaggctccccctgatagagactctgagatggagactctatgactgctaagcatggcatattcagagctgggccagtgcagtgggtaggattctaccccatcactgacagtccctccctgggacattccttgtgctctagcaacactgttcactaaatatggagactcctgccaaaaagtggaatctggggaaactcctgtgtactgagattgcaggcagaggttggaagacagcatcctggtcacagcaggactttggtgacagacaagctgaggtgggtggtagaggtggcaggaggggcatataggaagaggacagaagggtctccgtgcattaggatgatttctcctatctgtccattttcaacaagatatatcacaaatcccccatccactcctaagacagagcccacagcttcaagggcattgatcaccatctatcccatctctctcttagagcacggttccctttgcagcctccctgccagggtgtcggctactcacagcttctaggcacagggagctcatgccttttggcttagccagcttgttccattttctcctagtttcacctccagtccatgggacaaatggcgccctgtttgtacaggtgtgtcccaggaaagctgagtgcaaagcagatttgtgcgctgtgcctgaagaaagcttctatttcctcacctttaaggtgcagagaattgtacttgttgttgaattgcttttgttttgagaataaaactgaaaaatcagatgggaacgtgctgtagaaagccacctgccacacttccttagagcagggctggcctgacgacagtgtgcccagctgtggggggttcagggtatactatcccgggtgcagacgcccagc

SEQ ID NO: 227521 - DNA, 436 bp, Homo sapiens
agggcgtggagatgtctaggcactcgttttaaagattggtttacctcccaaatccaaaacagagttttcatgtctcttatttaaactacctgtgggttttcaggggcttttttccgcgtcctctctagcgcggactgagctctttctctccgaagagcggtagcttggccggcccacgttccgctccgctctgcgctctcccctccccggctctctcctggaaggttatttgtagcctctttggcgtgttgggacagcggccctactggggtaggaatgtagctgttcttcccaccacatgggccccttaaagggacagctttgctttttggggggtttcccccttcgggttgcaaggaaaggggatggaactttcctctcagccccctggaggaagttttgaaaaagatcaagggaaatggcaaggcactgggaa

SEQ ID NO: 227522 - DNA, 204 bp, Homo sapiens
ggtggctgggcgacggcggagggaacggcgcagagcggggcgccccgccgggagcgctgcctgcgtggcgcccgaggcgggggcgcggggggccgcgcatagcacgtgctcgtctgggagccggccgggccgaggcgggcgcgcgtgtgcgcgtggggcgtggggtgtgtgcccgcgccgtgccccccgcgtgtgctgccgggc

SEQ ID NO: 227523 - DNA, 476 bp, Homo sapiens
  misc_feature (39)..(39): n is a, c, g, or t
tagtaatttatttattagaattgttactactaataatanaatgaatcaccaagcttcctgctccagagttccaatttaggctgcaatgcctcaggaagatatggaagctgcaagagacacggggaagagagatgttatccatcaccgctgtagtctgctagaagagtagctgtgtttatgagagtccatcaggacctccgctgactctaaaagtaactttccactgttgaagttattcttcattatcattgataacgcacccacgtatccacactgtgaaaggaggcttttactgctgaagtctccagtaatcccactgagaagatcatctctccaacctgaaaggcttaaggacctggccaccttccccccagctcccctatccccctccaggtggccttttctcagacccctacccctaatgttgcccagccatctcctcataacttggaatcacccacagagaaaaaaagaaa

SEQ ID NO: 227524 - DNA, 624 bp, Homo sapiens
tcagaagtccttaatttaatagatgggattcttctatctgcttagggcagtgtttttataccttggctacacactggaatgctctgaggagatttaagaaacacagatgcctggatctcaacctagagcttctgattaaattgtcttgggcattgaaggagagctgcaaatggctcccaggtgagaaggctgagaactgctgacctggaggttgaaatggatggcttctaataaacctttgggcattgctaagagcagaagaatgctcaatccttttaacagtgataaacaaacatctctggggaatggagaacttgtttggtgctatgcagtatacaaaatgttctgttggatcagtttggattacatttgattgctggtgaagagacctgaaataacgtagatttaagtaagacagtggtgtcctttctctcacataaaagaagtccacagtagggtgttcaggatcttatggagtctcacagtgccaacatcatcccaggctcctttttcctttctaatctgccatccttggcatgtggctcttgtcctcaagatttttttcatagttgccattgtaactccagccattacatctgtgagcatcacatcttcggacaagca

SEQ ID NO: 227525 - DNA, 619 bp, Homo sapiens
tgtatgtggcagcacatatcaatattttaatcctgttaggtgacaaatcctattaaattggatggatagctcccattagtttattcatttatcagttgatacatatttgagtgtttccactttatggacaattatggataaagttgctatgaatattcacattcatgtgttgtgtggacataggtttttttcttctgggtagacagctagaagtgatagtgctaggtcatatggtaaatatatctcaacattttaagatactgccaaactggtttccaacgtgactacatgtcccatcaacaatgcgtgagtattttagtttttccacgtcattatttcacttcccccaggtgttgctgtccttttttattatagcattctagtgggtaagaagtggtgtctcactgtagttttgatttgcatgtccctgctgactgatgatgctgaccatcttttcatgtattttattgtctattcctacacctttttgatgaaatggttattcaaatattttgcctattttaaaattgggttatttatctttttgttgcgtagttgtaagtgtatttcatattctggatatgagtcctgtattaaatatatgatttgaatttttttt

SEQ ID NO: 227526 - DNA, 641 bp, Homo sapiens
gacgatccccttttagaaggttgtggcaggcttgtagaggttgtggggttcaagcttgagctttgtttaccaggataaatactcagatatctcagaaaatgggctaggctatagagctccctgggggcgtggtcctgttgtctgtatccaaggcaggtgaaaggggcaaagctgagtgggactgggctaggcaagtccatgcttaggctccccaatggcacgcacaagcaccagcccagacaggagttagatagcaattctaacaccactggggcaatgctccaggaaggagtgaaggaacctctgctgtgccaaagagcatgcatgaagaaaggggcagctttgaattcaaaccctagcatgtggcagtgggtcccacattgcttccacactctcaacctggtggagctctctcctgcaacctaccattggcagcaagctaaaacagccagacgagacacaaacagtttgccttcagatcattaaattgtcccaggctgccgaactccctgattggaacaaaactgaggctcccaggccacatccatgctggtctagtcctgccaagggaagagctcccaatttctgcacctgcagctcatgcccatgccacactcacctctcagttctgtccatgaagt

SEQ ID NO: 227527 - DNA, 448 bp, Homo sapiens
agtattagttattgctcatagtggcaataggtgggggagggaacatcaattttcaatatctagtagcaataccattgaaatctttatgttcctatgatgttccaagcctttttgcactagcgattccaataataagcactcaaaaaattatacactcatttttttggccaggcgtggtggctcacacctgtaatctcaacactttgggaggccaaggtggacagatccttgagctcaggagtgtgagaccagcctggccaacatggtgaaaccctgtctctactgaaaatacaaaaattagctagcgtggtggcatgcatctgtagtcgcagctactcaggatgctgaggcaggagaatcacttgaacttgggaggtggaggttgcagtgagccaagattgtgccactgcactccagtctggatgacagagtgagactccgtctcaag

SEQ ID NO: 227528 - DNA, 381 bp, Homo sapiens
atattaggaataagcttaaaaacaattcctggtggtcacacaggcccgggaatagtttatctttccaccagtaaagtggtaagactttttaatacaacgggaattgaataaagtcctcagaagtgtatggccctagtagcgggactaaattagtcttagattagaggctgctcttagtctaccctaacaaggtttgaaaacaaggcttgaaaggatcccactgattctgagtaattttactttgccatagaaaaatccaacattatttaaaggaatgcaataaaatctgacagccaagaatgtaaagtcaaaatgcctgccatccaacaagcacatactaagcatgccatgaagcaggaaaatatgatccgtgaccagaag

SEQ ID NO: 227529 - DNA, 994 bp, Homo sapiens
ccaagttctgctcccttctagaaacaacatagacaaagaaagcaaaaggaaagaaatgctgacagagacccacaaaggccgctgtgatttggtaaagcaccaagcctgccagcacgtcctatggaaagtgagggcagacacaaccacagttggcagggagaacagccaagccgcagcacagctaatgacagtcaccactctggagaaatgcttcaaagggcagctgcagaggtggcagccagctcactgaggaaaacggtcttgatcaggctggagtgcagtgacataatcacagctcactgcatcctcagactcctgggctcaagcaatcctcccatctcagtcttccaagtaattaggactagaagtgtgtattagtctgttctcaagctgctgatgaagacataccctagactgggcaatttgcaaaagaaagaggtttaatggactcacagttccacgtgactgcggatgcctcaccatggcagcagacgagaggagaatgagagccaagtgaaaggggtttccccttataaaaccaccagatctcaggagtcttattcactaccacgacaacagtatgggggaaactgccacccccatgattcaattatctcccaccgggtccctcccacaatatgagggaattatgggagctacaatttatgagatttatgagatttgggtggggacacagccaaaccatatcagtgtgccaccacactcagctaatttttttattatttttagaaacatggtctcactatgttgcccaggctggtctgcactccagggttccagtgatcctcccatcttggcctcccaaagcactaggattacaggcatgagccatcacacccagccaagaaaacattatcttctagatatgcacactgaagtatttgatataaaatgtatgatatttgggattgcttcataatattttagcaaaaataaaataaatgaaatacagcaagctgctgagcattgataa

SEQ ID NO: 227530 - DNA, 360 bp, Homo sapiens
agtgcccgccctctgtgccctggtgctttctcctttgtccccctgctggactaggctcagctcttccacctgagccccaagaggtcagcccaagcccctgctttcctcactcacataatgttgtttgtagtgagctggtcctgagactcctgggaacttgttaaaatcgaagcctcaccccacccagccactgagtcagcatcttggggctggagactctgtgtatgtttgaaaaagggtgagagagaaagacatgcatccaagtggggaagctgggacaataaataaacaagaattccttaatatgattaaatatatgcaatcacttatttaagtgtgatgctatcatggttatgtggc

SEQ ID NO: 227531 - DNA, 515 bp, Homo sapiens
caggttcactccattctcctgcctcagccttctgagtagctgggactacaggcgcccgccaccacgcctggctaattttttctgttttttagtagagatggggtttcaccgtgttagccaggatggtctcgatctcctaaccttgtgatccgcctgcctcggccttccaaagtgctgggattacaggtgtgagccaccgcgcctggcctcatcaggctagttctaataactttaagagggaagttctctggtagatttgatctaaatgtttgcaatttttattaaggtagagaagatccttggattcttctctgttggctttagaaatgtggaaaattattcccgaattgccttggacaaccaaccaagtttacctattacattctccatatgttttggaagaaaatatttaaaccagggtgtccagtcttttggcttccctgggccacactggaagaagaattttcttgggccccacataaaatacactaatgatagctgatgagccaaaaaaa

SEQ ID NO: 227532 - DNA, 385 bp, Homo sapiens
gaaagaggggtcacctgctcaacaactccaacccaaatggaagggactttttcagtggtgttggccacgccttctgtagtcaaagtaccaggattagaagttggatacgtctttctagggtcaagcctgcaatacctgaagccccagacctgtaacttgaagcttccgtcagccactatacctgtgaacctgtggaagacctgaagtacctgttttaaagacagtcaaaagataagtgaatgcctaccaactctccttggtgtctatgctgcatagttactgtaggtttgataatagtagcagtttttatatttttataatttattgccttcttccaaatggatggaatcatttcctttgtaataattaagcaaaatgttttact

SEQ ID NO: 227533 - DNA, 926 bp, Homo sapiens
tgcagggagagagaactggatgctgccttctcaataggagaagccaagaaacgcagatgccgatgcttaatcaactccgtctctccctctagtgactcggggatagctgccctgatgccaaggcgattgtcttctggaagcagccacgccgtgtgaggttcctcatcactgccctgcatctccctgcgagctctcggggataattgcaaaatcacgtttgattccaggggagcagaaagcagcaggagccgtgaattctccaactcttaactggtcctcgactggagccacttttccctgcccacccatccctgtggcggattcattacagttatccaaagccggttttaactttgctccccctggctcagaagtctgtcagtgggtcctgagcggcttcaccattcaagtttattcctatcagcctggaatacaatgctctatctggcaaaaaaaaaaaaaaaaacaaaaaaaaaaatttggcggggggccggggcccgagaaaaggtttttaaacaccatttggtgtgggggcgggggccccattgtatcgccacctgtgcaaaagggggtccaagggaaacctgggtcctaacatatgcgttgtgcttctccccaccaaaaaaaaacgcgggcggaaccgcgggcggtttgggaacaaaacccgatagggtgtccggaggcctccacgggttctccaccagcgggtgccagcggctccgtaataaggcgcccggcggcggtgaggagaaactgacagaccgcaccaacgacgaagaacagaccagcaaagacgaagctcacgacaagagacacgaccacaagacgacgacaaaacaagaacgaacataaacaacaatagcaacagagacaagaaaccacaacgacacacaacaagcaactctctgtatggagacaaaataatg

SEQ ID NO: 227534 - DNA, 405 bp, Homo sapiens
atcataaatttgtatatacctaataagatctacagtcataggtggaaattttaacactactctgtaacttatagaaaacctagacaaaaaatcagttagaatatagaagatctgtaaaaatacttcagccaccttgacctaactgacatttgtagaatatcatgggcaactaaaatagagtgtacattctattcaagtacacatgatatgcataccgagataaataatatatgggtcctaaaacatgtctcactacatttcaaaagtttgaaatcctaaagagtatactctgtaactacagtagaatttaaagtagaaaccaatagcaataagatattcaggaaaaatctgaatatttggaagttaaacagcacagttatccctagtcgatctatgaatttaatg

SEQ ID NO: 227535 - DNA, 446 bp, Homo sapiens
agatattgccgtgtttgaagaacacatatgctctctctgctgataatgagagctttataatttattacattttaccctttgctttgaatgccaaaaatcatagaggcaagtctggtgttcaagcacagcaataacatctttctggctaatttgtgggctatctcagtggtgtccacaaaaattacatagccccaatcttctgtttttaggcccaacttacaaatcttactgtatatgtcctctttgtagagaaaaactttaagatattatttgtaaagagttaaataatttaaaagtaaaaacaacaaagtgttccatagatagggtgccgtctagaacctgacagcactaagagaaacttggcctgtatttcacaaatttgctgggggctgggagaagtgtgacctctgcctacaggtgtaagccacagactttgaatagcatac

SEQ ID NO: 227536 - DNA, 499 bp, Homo sapiens
catgctggtctcgaactcctgacctcagatgatctgcccgcctcggcctcccaaagtgctgggattacaggcatgagccatggcgctcagtgagttatttgttcttatgttcgtttttaattgtccgtctccccaactcctctttactagaataaagttccatgaggacagggattttgttttgttttgttttttgttctctcacatttcaagcacctagaacagtgtctggcacttagtaggttctcaaaaatttttttttatggagtgcataaatgaagaaagattatcacacacataagacacccctgttcacaccagcagtatcttgggtggttttaggaatttgtggatataaatgaagtctgttttgtttggggcactctgttgtagggtgggagtgagtgttaaatacccttttgttagttataaccgtaatagaataaacttgtcattttgcagaagctaagaatacaagttactaaaaagcaaatgacta

SEQ ID NO: 227537 - DNA, 739 bp, Homo sapiens
atctagcttaaacataatttatttcacaaaataaagagttgggggcaggcaactcaaagctacgcaaagcatcaaggaagctacccaagataccagtttcttctaatttcctgcttcattttcttaggatatgggacttccttgtggacataaaatggctgctgcagctccaggccacacatgcaccttccaggtagaaagaactcactaggaaaggcaagaagaaaactgttctcccttaacaagaacctccccagtttcagctttctttgtggggtagtggagaggcagcattcagagaacccagaatcagactctgcttagagaaggttggcttctggggacatcttttgatcatgtctgctcaatgtcaccatcttaaggcaggaggaagcaacagaaaacagggaagcaggtgtcccaggaggagcccaatgccatggaaagatgggaaaagaggtggtggatgagatcctggattcttataaactttatctactccacttgcacagatgatggaggatttgaggagtgtcagtgaatgctctgtgtggactgaacttggagcagactggggctggaactctccagggagggcaactttgaccgagacatcttagggtttgccaagtcctcagcagatgttttttgatgtgccttgagatcctcaaatgagaagggcagtgggattcttccctctccagccaggaccacatctgtgcttttctgtaattgtgta

SEQ ID NO: 227538 - DNA, 460 bp, Homo sapiens
agtcacagcttattttgtatgcaaagtgaaggctctagactgagacagtaactcctctgggcctctccactgtgtctttggactcctgtgatggataccactttaagttgctcccttcaccccccaggagaatccaagactcatcttctcaatcagaaagactttctttagaatgtttataccagggccctgtatattggaccagattcctcccagcctttgaggaatgaagacagtattgtcagctgctgttagggcatgtgttgtggattttctctccagggtgggtactggacttgtaactaaatacacagaatgttgaggctgatggcttgccttcatctacctggacagtgaatcctttccttattatcctgtatttgcatatttgatttataccaaatatgtgttgcattcttttagttttatagtccagcaaagtaatttttaaaaggcagac

SEQ ID NO: 227539 - DNA, 210 bp, Homo sapiens
agggagtccaggtgtcaggaggaaggggctgaggtcttcagggctggtggctcagggtatatgagtagcctgacacaggcacccatgtccccagaccttctctggccatatggagtcagagtgacctccagtcccctggaagattgccaagagcaaggcagctcctcagcccctgaggagttagcagcagattatccagagagggtctca

SEQ ID NO: 227540 - DNA, 417 bp, Homo sapiens
gcatgagacaaacaaacaaaatccttaagagtgtttttcttgggttacaaagttatgttaaataaaaataaaaatggagggaaaacctttgcttctgagccaatggcccacaccagctcaagaaaacttataaagaccgattctggaaatgtcagaaatgaagcttgagctttatttccttgtaagcatgactcagcacatgcagacaatcatctattacctacgtaacctgctctgatcatcctaaaaggaaagatactgtaaaataaccaatgagaatcaagatgtatgaacttctttttttccgttttttaaaccttaactataacctttaggagatgagcttcttgccattttctattttggagtctctgttctggaatagtgtgttctcaataaaatattcatgtcaagtaa

SEQ ID NO: 227541 - DNA, 493 bp, Homo sapiens
acatcttgcaaaactgtagtataatttcataaacaggatattgacattgatacagtcaatatagagaacttttctataaccacaagtatccttcatgttacccttttctagtcacgtgcctcctgcttccacccccttctcagttcctgacaaccagtaatctactctccaattgtataattttgtcatgtcaagaatgttatataagtggaatcatacagaatgtagccttctgggattgcctatttatagtcagaataagtctctagagattcatccagcttgttgtgtatcaatggtttgtttctttttattactgaggagtattcatggtatgaatgtacttcagtttgtttaaccattcacctgttgagagacatctgggttgttttcagtttggcctattacaattacagctgctataaacatttgtatactggtttttgtgtgaacattgtcttcatttttttggaataaatgtccaggagcatgg

SEQ ID NO: 227542 - DNA, 178 bp, Homo sapiens
tacagctttggattgcagatttttgaaatggttctgggctaagatgcagatgttaacttctggtcttttaaaaaatgaatttaaaatagaatagaatatcttggtgctgttccatttctcataaattgaaaggatctgatgtcttccagttcagaagaaaaaaaaatcgcacaggcca

SEQ ID NO: 227543 - DNA, 581 bp, Homo sapiens
gcaatgacacgatctcggctcactgcaacctccacctcccgggttcaagtgattctcctgcctcagcctcttgagtagctgggattacaggcacgtgccaccatgcccagctaatttttgtatttttagcagagacggggtttcaccatgttggtcagactggtctcaaactcctgacctcgtgacctgcctgcctcggcctcccaaagtgttaggattacaggcatgagccaccacgcccagccttcatagtcacttttcatactgccattttccctcttgggataaaaatgttctcagaaaaaaatggaccacgtaaattaggttgacagcttctttctttgagtcaataatgatagcttcctagtcaatcactcctttctccttaaaacattaccttggaaatattaattctgacagtcatagcaatgacatctttcctgagtcagctgctgctctttgttaattatcgctcattaattggtaaggtgagcaaccacaaaggctgccagcagtagcctaggatggcagttagataatcaagattgtttactcaatgtatgtgtgtttgaatccccttt

SEQ ID NO: 227544 - DNA, 491 bp, Homo sapiens
tcccattttcacttacagttttgaatacatttatacatttccttcttcaagcgtcatttaaattaaaagtgtttctattttctccagatggagtttcaatgctcataaacatttatattaggagagaatatagtacatattatctaacttaagttgaaaaagaatgaaactgtaaaatatatttaccaaaataattaagatttatttatcttcggtaggcctcaattagtttacctttaaaaagcattcattgatacaaattttaaaaatccatgtaacagacatcaatcaaatgtgatttttctccagtttattattttctgccaggggaaataaaatgcaataatcacattttaaatatacatctttttaaatgattctgttgttatacatatgattgttattcatatttttactgttattgaatgcccctgtactgacctttccaatttgatagtgcagtaagaaataaacttttttttaatattgag

SEQ ID NO: 227545 - DNA, 682 bp, Homo sapiens
aaataaaaaagcagctgtctcatttagacccatgggtcttgcaggagctgaacaaaaatatgctcggaagttggcatgtgtgaaaccagtggcttccatattaagtctggtgtcctgtctcttggtgctttttaaagcattgggggtaacctaaaagcttttttctcttccaaagctttattaacccttcaaccattttcatggctttgtactcttaactttttagagggctctacaccagcctttacagaatcccagttgtggagaaggaggtgggaagggtcggaggaagagagtaatacagaaatatacctggccagttcaacaaaaaaagtatatacctatccatgattaccagcattccggttgtttaaaatttcatgtgctccttgagattaaattgttcacaataaggtccaaaagtcttttccaagtggtactggggctaatatattttctttttaaggcttttacactggtagaaactgtttccttaagaatgctgtgagttgtgtattttctttgtcaacatttttctctgttgtgatatgtagtcctgggttttctcttcttttagagagtgaaggatgacgggtggtattctctccccttaatatatccctgaggcagatcagtccttatctctcttttgcttcttttgctgaagcaacactggatttct

SEQ ID NO: 227546 - DNA, 242 bp, Homo sapiens
cagggtgtggatgtgttcacagtgcactaaagcctcctttggcccctcgattccttgactgccctagatatgtgagtggaaaagccccttgtcttgtccttctctgggtagactttagtccatacacatactttctgaagctatttcgtctgttaaccacatcttagagtctgttctgttgtatctgttcattcagttgctccattaaatttttttttccaaaaaatgagaataccaaagaa

SEQ ID NO: 227547 - DNA, 293 bp, Homo sapiens
tctaaatcagctgcttattgacatctcccacttgtaactccttcttggtaggtcctataaaacctgctctctggccaggcatggtggcacacacccttatatcccagcactctgggaggttgaggcgggtagatcacttgagcccaggagtttgagaccagcctgggcaacatagcagctgaatatagaaagcaaaatttcaagtgagaagtctgagctaaatttgtgagtcattagcaggcacatgttttaaaagcataatactgagtaagatgcatcaagagaatgaatgt

SEQ ID NO: 227548 - DNA, 380 bp, Homo sapiens
agtttcatgaagttgtcaatgtttgtaagaatatagaatgcatggaggatccaaattagtgtaaataattcatttactgttagagaatcaagtagatagatatggttgtatatatttttttcgcatgccatccatttacaaactgggattgacaagaatctattagaaaatatgactgcactgtgttctcactcgtaagtgggagttgaacaatgagaacacatggacacagggaggggaatatcacacaccagggcctgtcgaggggcagtggggtaggggagggatagcattaggagaaatacctaatgtagatgacaggttgatgagtgcagcaaatcaccatggggcgtgtatacctatgtaacaaacctgcatgt

SEQ ID NO: 227549 - DNA, 371 bp, Homo sapiens
tatatatctgagtttcaggatctgagaaaagactatctctagacccatttcccttattttgggaacagaagtgcatcttagacattatttaggatgaaggtactcagcttttttcctgtcccaacactcctaaatatatgatttactgtggcactgagatagcagttcttaattaggagaagggagagttataagtttttggaaaaagccctccaactattaagatatatataccccctaccccagtgaagaacaatctgctaagttgtaaagatgagagaacctaggcccagacacctaaaatgccaggtctcgggtttccacaactggtgaccaggactagaatcccaggtttttacttccccattgag

SEQ ID NO: 227550 - DNA, 583 bp, Homo sapiens
aaatcctattgtcctctaacattctgctcaatttgcagctactggactacaaatgaaatactgactctaaactcagttttatccctagctgtctacataacacaactatgtcctcatctgttaaataggaggaagtttcatagtatctgtatcattttacagatactatgaacatatgcagttgtaaacttcttagagctcctacaattcagatgaattaaacagatgaagatcaggatgagaaatttttaaaatgtctatctgtgaagccaatcctttgctatcttccctcccactccctttactgacatgtgagtaaatgcttcccatttaattggattttaaggtcataaaacaggtaagtcaaccctaccacaagaattttttacaaatcagatgatgacctgaaaatactcttgttctgctaaatctgaacattacaaaatggctaaaaatgacattttaaagataggggtctgagcctactctcacaagcagtcacattaagatgtaaatttactatttggaggattcacagtgcaccagtgaaaaaatatcacgaaagaaaaattcttatgtctaa

SEQ ID NO: 227551 - DNA, 476 bp, Homo sapiens
ggtcaaggttactaaaaataaggcaaatctgagaaactaccagattactagtgtcccagaagaggctaagaggacgtgaggaccaagcaccacgtggtgcctgagccgcgtcctggaacagaaaaaggacatcattggaaaacccggtaaaacctaagtagcctgcaggttagttaacagcaacggaccaatgttcattccttagttttgacaaatgcaccacagttaacatcaggcaaacgggatgaggagtgtatgggaactctctgtattatttctgccactttcctaaaagtaatcccaaagtgctcccaaatactatatcattaatatgaatataaagtaattcactttagagatctgaaaatgttctccataaaattgacaagaaaaaattgtaaactccctaaacatctttcagtttcctttttgtcctccttccccgttttttctttataaatatggatgttttaatc

SEQ ID NO: 227552 - DNA, 572 bp, Homo sapiens
tgaataatattccatgctatgtgcaccatgggtcgtttatctaatcatcctccgatggacactcggttgcttccaccttttggccattgggaatagtgctgctacgagcatgagtgtacaattatctgtgtgagttcctgctttcaattcttttgggtatatgcccaaaagtggaattgttggctcctatggaaattgtgtttttactttcttgaggaagcatcatactgtttttcatggtcgctgtaccactgtacactctcaccagcagtgtacaagtgttgtgacttctccacatcttcgccaacacttggactagtgaagttcagcatattttcatgtgcctattgcccatttgtatatcttctttggagaattgtctattcatgttgttcactcatttttgaatgagattgtttgtttttctgttgttaagtcatagttctttatgtattctggatattaattctttatcaggtatataattggcaaatatttcctcccattctgtgcattttcttttaactctcttaatagtgtcccttgatatataaaaaaggtttttaaatttt

SEQ ID NO: 227553 - DNA, 199 bp, Homo sapiens
gccagagctgctagactctaaagctttgaattttccagctggtcaggactgtctccagccaccagggcaagactttgcagctcagacatggtggcctgaaatggtgggaagttgaccagagagaggaggctggggagtcccagcacctacttcgttcctgagtggaagactgctggtctggctttgaaaccttgcttca

SEQ ID NO: 227554 - DNA, 339 bp, Homo sapiens
cacacatcatcaggcccagctaattttttttttttttatttttagtagacacagggtttcaccatgttgacaagactggtctcgaactcctgacctcaggcaatccacccgctttggcctcccaaagtgctgggattacaggcgtgagccaccatgcgtggccaacttcttgaagttggatttatacattatataaacgatctatacagataattctaaaaaccaatatagaaataaaaagttaaagaaaataatatgcatcggaatatgtgctcatatctgactgttaagaagatgtgatgaaatagacacatgcacctatacaaaaaaaaaacatga

SEQ ID NO: 227555 - DNA, 492 bp, Homo sapiens
cagtagaagacagagcaaagcatgatttctcttttctctggcctgatttaattctaaggtcagacgttcagcttgatcataacctgtttataattatgactcagaccatttttccactcttggatcattggccattaatgatgaggggtctcaaacaacatgtctcagtgacacagtaaagcagaaattggctgaaagcaaagctgtttttatttctagcttcagtcagcacataatgcttaaaacctaaagaggaaagtaaaagcgtgttacaatctctcaaactttatcaagacagggcttagaacctgacatcctccgctatggtcattccattttgaaatgtagaaaatccaacttgtggatggtttgtctgtaaatgagctgaatgtgtgtgcgtgttcattatcaagcacgatatgctcacaaatgcacagtactttaagccttgtgcaagaaagatgctttcagtaaacatatttaaaaggttta

SEQ ID NO: 227556 - DNA, 609 bp, Homo sapiens
tactgcacttatacggcaacacaaaatattggtgattctgctgattcccagacctgtttgctggtctttgaatcactgccgtagatgcacatgatccctgagagggacagaaaggctatcccatcattcaggggcataggcgaggcactcttactatttgcagcacccaaggtgtctgagaccatggccttgatggggaagacagggactctttgaggagccttggattgagaaaaacaaggagcagtgacatgctgcgatcccttcactctgacttacacgagacccaggactctccatagccatggcaactagcccaaaatgacaaggctgattaattccacaagtgcattattcacgtgtcaccaaatattgactcttatcaacctccttcccccagccatctgtcctcgtgtgtcaaatcaaaataaatcaacaaacaaaaagtggcaggcagatgccaccccagggatgctgcaattgcacagtccccagggctagtctgagttctaagtggctctttcatttccccatctcccttcttccccagatgactgggagtgtgcacacatgcgtgtgtgcgtgcacgcacacacacacacacacagg

SEQ ID NO: 227557 - DNA, 718 bp, Homo sapiens
gcaagtctaaagctcttctattttgaacgactactgctgctagggagttaagttgatcttgcaaggtgaccagggagtcagagacccgttccatgtcaccatttagttcttgagatagtttgtagtagaactgaatagaggttgtgataccgccagtgccagtacctactccacctagcactcctgctccgataacaaaaggaagaatgggtacccttttgttgcggggcttaggtacgacatgattgtataaatcttgttcagtgtagatggtcatagggggcgctaagaatgagaggaagcatatagattctgaagagccattcaaacaacgataggctgaggtaccacagacaaaaaatattcctgagggtaggcagactattcgtgtgggaagagttacccacctgatgtgctgggagttggttgcacacacacacaaaaatatatttagtcagtcttttcaagagtgtcacaaaagtgatttgtgtttttagtttaagtttttgcagtgccttagttgcataagtgcaagagcccaaactatatacacatttccaaataatcatggaattgagctgtaaacaggtaatttataatgttcaaccttaaacatctcattataaataacccacatgtgcataacttacatttacagaaccagaaacttttttttttctcacaatccatggccttacatttaagagaagtagaaatg

SEQ ID NO: 227558 - DNA, 621 bp, Homo sapiens
cgcggtggctcacgcctgtaatcccagcactttgggaggctgaggacagcagatcacctgaggtcaggagttcaagaccagcctagccaacatggtgaaaccccatctctactaaaaatacaaaaattagccgggcgtggtggtgggcgcctgtaatcccagctacctgagaggctgaggtaggagaatcgcttgaacctgggaggtggagtgagccgagatcgtgccattgcactccagcccaggcaacgagagtgaaactctgtttcaaaataaataagtaaataaatgccattgcactccagcccaggcaacaagagcaaaaccctgtttctaaataaataaaataaaataaaaatgaggtgattgcaggctgaaggtcttggtcactactgagttctagttctctcaagacaaatattcatatggtcaaaacagaattataatctaacgagtcattcttatagagtgggattcggggagggaaaacagatagctagtaatttaaatgatcttaatgtaatttggggagaggatgatcagatgacatttagacttggatatagtttctgcttcaaacccacgctgtgtgtgtctgtttgcatactctctaaagaagga

SEQ ID NO: 227559 - DNA, 371 bp, Homo sapiens
attcctgagtcacttcacttagaataatagtctccaatctcatccaggtcactgcaaatgctgttaattcattctcaaggatgaatttgtattcaaatctggaatcttccttgggctgagaggggactggttcctgttgtcgggatgtctgtgttgctaggatagctgagggatcagtgcttggataccattcaggtctttttcctgcctgtgggtacgtggaggcacacattcctgggaacagctgtgagtgcctaattccttcggcctcttgtgctgtgggagcatgtggtaggacaatgtggtgtttcattagtttgcatgagtggaactgactgactcgtcacaagtgttttaactgacagtggcca

SEQ ID NO: 227560 - DNA, 373 bp, Homo sapiens
ctcttagaacttcatatttaaatctcatatttggtcatagacagtttactactgaagtattccaggtccatacaattctgaacttgcaggagtgtttatctttaagtgacatgtaactatgtagtaacatttaatggtatctacttggtttttttgaggtgttttagatttgaatcgattttgaagtattcaatctagaaactgttctttaaaaactaaatgtttattacttagatttcatctcattttatctcatttacatatatccttaataaattcttctaatttttcaattcacaaaaatactttataaaaattcacaaaagtattttatatcatttgtcagatgaataaataagtatatgttacattt

SEQ ID NO: 227561 - DNA, 480 bp, Homo sapiens
atgatttaatgtataatgttaatgtatttgcctttatgccagagcagtcataaaatataatttttaatatttttatgggggaagaggttcatgaaagcaaaagtggaaagggctcacaaaagtcatgagtggtcccaattcccacctaaactccaggggttctattgctgaaatgaaaaacagaacaacaaatagtggggacaattaatagtttccattccaagctctacctgtggatgttcataaccataaatgtacttcttcatccattacaacacactccctagatcgtcaaaaagagacaactctaatcctacccaatgactgcatatagcttaacgttcaaggactctaggtcttgatgtgactcctctatgaacagggacccacaaattaataaacaaaacaggcacctcctcccatactcaacatgtaaaggcagagtaggaatgggaaagactagggaaataagaagatcag

SEQ ID NO: 227562 - DNA, 402 bp, Homo sapiens
tttttgcccccacttcacaggatggcagctctactgatgtctcccagttttctctcatagacccagacctgcaagaactcgagggaaaggaagatcttgaaagcctctcattcactgggtgcttccagctccaagtgtgtggtaatggtttcagagggatttggagagaaacagaatagtcgaacttacctcatcaaacgactccagtttttattgtccccccataaagatagtctaaacctgctcccctgcttgtgaactcagagtcctgttgggggactcagaaggttgtacatatatatgtgtgaatagttttcaaatgtttcacacatgtatgtataaataattttaaatgtttgtgtatattgtcatgattaataaaaagcccattcatttaaaagc

SEQ ID NO: 227563 - DNA, 194 bp, Homo sapiens
gagacagagtctcgctctgtcaccaggctggagtgcagtggcgtgatcttggctcactgcaaataggctagttttctattccaaaaatacctttttttgtttgtttgcttctaattaaaaattataatacttatagacaaactcaagcactgtaaaaatatacacaaatgtaaaagtcttcaggaatcctcagc

SEQ ID NO: 227564 - DNA, 574 bp, Homo sapiens
gttcctagagtcctccaaatgtctttacattcactgccccctgggctgctcacaacctcagtggaagaggcaggaggaggattttcacatccatttcacaaaggccaacacggaggctcaacgaggcattgttgctggcccacatcatatgcccagtcaacagaacaacagcgttactaaccaggctccaaatcctacgtcccttccgtggggctgtggctcacggggaggtcatgaatcaggaccagggagggaggacagggcataaagcccagctctgctcactactgcactctgattttccccaagagccccaactcaggacagagaaaggtgacagccccctttccgctcatctctccacctgctgtccctcactcccactcagtaagcaccactccagggagagaaccccttgccccagacccagccagccgccatctaaggagccccagtggagcccccacgggctgggcacacgcctcatgttctgcagagaggccaccagacactcacatgccccaggatttacaggccctgacatcctggggcatgtgagtgtctggcggccgca

SEQ ID NO: 227565 - DNA, 398 bp, Homo sapiens
ggccagaatctcctgctctgcccccaactagggaaccggtcgaaggagagtgggacgactgcaacctgctgcagctaagtatgcaaggatcgcgccgaccggcttccgagtcgagatcccactaagtcccaccgcagtcaccacagccagccctgcccaggggctcccacgtgagaaggctgtaacagacagacagcagccacgatgaaacacgctgaaaagagccagcagaaaaaaacgaggagagactggtatgacggagtggaattccggttgtggatgacagaatggaaattttacgcaagatgaaagagttaagacaaattactctaaaaatatctgacttagttgtttctaaaccctggggcacccttaggaaaaaataaaaataaaaaaac

SEQ ID NO: 227566 - DNA, 303 bp, Homo sapiens
ggccagaatctcctgctctgcccccaactagggaaccggtcgaaggagagtgggacgactgcaacctgctgcagctaagtatgcaaggatcgcgccgaccggcttccgagtcgagatcccactaagtcccaccgcagtcaccacagccagccctgcccaggggctcccacgtgagaaggctgtaacagacagacagcagccacgatgaaacacgctgaaaagagccagcagaaaaaaacgaggagagactggtatgacggagtggaattcccgggtttttttttttttttttttttttttttt

SEQ ID NO: 227567 - DNA, 245 bp, Homo sapiens
agcgtgcccgggtagtcctgttggcagcctgcccctatgcagcttttggcaatacagaacagcttcttggggctcccacgtgagaaggctgtaacagacagacagcagccacgatgaaacacgctgaaaagagccagcagaaaaaaacgaggagagactggtatgacggagtggaattccggttgtggatgacagaatggaaattttacgcaagatgaaagaacgcacgtctttcaaccgcagtt

SEQ ID NO: 227568 - DNA, 399 bp, Homo sapiens
atgtagatagttttctaaaatgaaaaagaaatgggctggtcacaggaggtggggacttgggatggatggttttagcagcatctgaatggagtaggcagctcttgtattcctaatgtactttcacacactgtagctttaaaacagaagcaagttgctgtgttgttgccaaccagatagcaaagtggataatattcttggttaacaccagggcaaggtactttttatacttggcagtttagttcttttataaaatccagtttgaaaggtgtatcagcaaattatcttgaaaaagctatcaaataattgccttatgaatgtaatcagaacctctttcaattataaatctttaagtaaaacatggaaacaataatggaaaaaataaagaactcttcagacaga

SEQ ID NO: 227569 - DNA, 355 bp, Homo sapiens
gtgtataacaggaattggcctttagttacaagtagaaactatggacaaaatggtagatgaaaaataatggcggccgggtgcagtggctcacacctgtaatcccagcactttgggaggccgaggcaggcagattacctgaggtcaggagtttgagaccagtctggccaacatggtgaaaccccatctctactaaaaatacaaaaattagccaggcctggtggcggatgcctgtaatcccagctacttgggaggctgaggcaggagaatcacttgaacccaggaggtagaggttgcagtgaaccgagattgcaccattgcactccagcctgggcaacaaaagcaaaattccatctca

SEQ ID NO: 227570 - DNA, 421 bp, Homo sapiens
cctgattacacaaaatgggactttttaactcccagtcttggatcaaattttgaggctacaaaaaagcagggggtggcaaagagaatatgtgccatgtttatatattccagatatggtgattaaatgatccataccacgggctgggcaccgtggctcacgcctgtaatcccagcacttagggaggctgaagcaggtggatcacctgaggtcagaagttcgagaccagcctgaccaacatggagaaatcccatctctactaaaaatacaaaattagccgggcatggtggtgcatgcctgtaatcccagctactcaggaggctgaggcaggagaattgcttgaacccaggaggtggaggttgcggtgagtcaagattgtgccattgcactccagcctgggcaacaagagcaaaactcggtctca

SEQ ID NO: 227571 - DNA, 187 bp, Homo sapiens
ggaggatatattgaggcatatgctacgcccttttcctgttatggcctgaaatagttttcgggatccttttggccaatgattaggggcagggaggagatgtccattcagtcagtttggggcttagaattatatttttggtttatacctgacatgtgaataaatgttcaataaatgttgattgtcacta

SEQ ID NO: 227572 - DNA, 610 bp, Homo sapiens
aggcatggtggcaggcgcctgtaatcccagctacttgggaggctgaggcaggagaatcgcttgaatccgggaggcggaggttgcagtgagctgagacgacaccattgtactccagcctgggcaacgaggctccatctcaaaaaaaaaaaaaagaaagaaagaaaaagaaaaaaccagatcatttatttgtagaattttcccagaatctggattttgttgattactttcatgaaatgtaggttaatgtgttcttctataatccatgtttcctgtaaactgggaattggatccagagacttaaccagtttcaagaacctcctccagcacctttttttaacaagactatatcctaggtagtggggtattcttcctcaagagagacataattctgtttttgaaattattgcagcagttgatgcaaaatgcctagatccatgattcactaggggttgcagcatcattatggtatatttgtatgatttcttttttattcatttgctggaatttttctataaagagaacgtttattttctctactgtttggttagccagtgatacagttagtgtaggacaaacaaggtacatgcttaatattttttctttatttgcc

SEQ ID NO: 227573 - DNA, 649 bp, Homo sapiens
gagatattaagaaattacttgacagtttttggaacataatgactatttgtagtttaaaaaggaaagatatttaaaaattgagatttattatttgtgagtccaattggtttttagaaaggtttactttaccactcaccaaacaaacaaaaacccttagttgtttacatgtaaagacagaaaaattaaggtgacctttctttcttctgctgccaaatagtaaaactcagtatgactataatacatttaataggcagctcctctatttagctcaagctagtctctcataccaaaaaccaaatttttaaaaactgaatatttgaaattatacaaacaaaatatgctaagaaaattcttaacaatgaccaaatgcaaacttcatgtcataggaaggttaagtaccagaggcaattccttttaataggatgacaatcataagaaggaacagttacaattctgaatatgaaagagctgtttctttagtaataaaccaaatacaaagttccgggttcatctgttctggctggcaaatcttgcataaaaaagccatactttagctaaacaaaagcttttaggctggcccagaaagagggaatgaacaatttgaaaaacatcttttactgcctgagaaaatttaaaaagtgtctgaaag

SEQ ID NO: 227574 - DNA, 528 bp, Homo sapiens
cttaacacaaccaaatctgatttgagaattattttgaggcttgcagctctgtttgtggcataaatatatacatacatacatacgcaggtatatatgtatgcaaaaatgcttattgactgtggaaatgacagtttaagtcactctgtatttcttttttccatgagtctaatattgaattacgatgattcaaaggctctcagagtgttgtgctaacatcgtaaatggctaaacatccaaaaaagaaaacaattaaaacacaacgcacacacaattttcttaaagttgtggaaaattaggtaggcacagttgattgttttgagctggtagaaaaacctgggcagctagcagaggtctggacaaccacggaaagcccacagcaaggaccacaccgtgagcagccaccagagatttgggatggtagacttaccaagagtgtccactggcgggggggcacacggtgagaaagtgcaggatacacaattgacacaaaaaggaaaataataaagtcaaactggtattcaagcagca

SEQ ID NO: 227575 - DNA, 502 bp, Homo sapiens
actgcatcccaaattaatggtgctgaaaagaatgtattatagaccagtgtctcaggctaaatgtggatgatacagtcatcactgtgcccagacatctggtacataaacacttggatattttggagcaggatgagcaaacacaatggcaaagctctgaaaggcaaccagccaactgagcagagaggttagcagagctgaccagcacatggaaacaaattttgcttgcccattgacaggacatgacttgattgcataatgttgaatttttttccttttttttctccttcctgtcagatgggtaatgtgctgacatcataacaaggttggagggaggcacatctcacatgtgagtgtgaaaacccaatcaccacatgtatgaaccacaaaaggatctcaatatacctttaaataagaatctcaacttttaaaatattttgaaaacactgagccttgtatcaatattgaaaagtcaactttgaaataaagggttgtttaaaataaa

SEQ ID NO: 227576 - DNA, 149 bp, Homo sapiens
ggtggggggttggcttggtttggtttttgcttcattttttaattttagggatttttaaaaagccagcattccttaatcttctgattgttgtgtgactgttgtataatattgagaaatacattcctgtcatccacaactaacaaccatta

SEQ ID NO: 227577 - DNA, 1264 bp, Homo sapiens
  misc_feature (848)..(848): n is a, c, g, or t
cgattcggagtgggcacagtcaataattacattgtatattttaaaataactaaaagagtgtaattggattgtttgtaacacaaagcataaattcttgagtggatgagtatctcatgttccatgatgcgattattacacattatatgcctgtatcaaaacatctcatgtgccatataaatacatacacctactatgtactcagaaaaattaaaaataaaaaaaatttaaaaagctactctacctaataaatgcattcagaaaagttacaaagtacaagtttgacatgcaaaataggttgtatccctatacaatcacaatgaataatttgtaaatttaagattatataagaaaattattaaaattaataaaataattccttttacaatagcatcaaaaagaatgaaatatatagtaatacatttaacaaaagaaatgaaagacttacactctgaaaattagaaagggaaaacaaaattgttgaaaaaattaaagaagacctaaatataaatgctcgtggggatggatactctattttccatgatgtgattattatacattgcatacctctatcaaaacacatcatgtactccatatatatatacacctactaaatacccataaaaattaaaaattataaaaataaagaatacctaaaatatagaaatacttcttgcattcatagattggaaaatgtaagtcattgaaatgtcaatgctacccaaaacaatctacagattcaatgtgatgtttattaaaattccaactgttttgcagaaatggataagctaaccctcaagttcatatggaattgaaagtggccttacatagcctgaataatcatgaaaaanaacaaagttggaagattcatatttcccaatttcaaaacttactaaaaaggtccaattatctaaagagtgtgttactggtatagaaataaatatatagaccactgaattagaatttatatttgagatataaacccttaacatatatagataaactaattttgacatgggttccaagggtattcaatagtaaaaagataatcttttcaataaatggtactaagaaaactggacttccatattaaaaaatgatgtcagatcaccatctgaaaacatacaaaaattaattaaaagaaatcaatcacctaaatatataatctaaaacataaaactcttagaagatcacatagaggtaaaatttcatgaccttggatttggcaatgtatttttcgatatgacaccaaaaggtgacaaaaggc

SEQ ID NO: 227578 - DNA, 507 bp, Homo sapiens
ttggctcaggcttgtaaattgctctcactggtttttagaaatgccctggttcttttcaccccactgttctcagcctacgcaaatcacttccatacgacaaggatctgtcgggatatagagagctcaataaaagctagatctttgatgccgatggcagctgcagactccagctccttcccattatcgtgatagactgtctgttgctgtgttcattttggttccaaatccacatcatgttattctgaactcgcaggccagaagccgcaacacagaataaatcctcaagtactgacgtgctaaagtaaacagtctccttgtttcaggcattagaggttctctactgagcatgctatggctgtgaatattttgtattgctttaaggatttaatagtttctgggtgcttctggttttaaaaatcacaaggacagccaaagcctagtagaccccaatatctggactccatagatgttcaagaaatacatttttgagtaaatgtttagttatca

SEQ ID NO: 227579 - DNA, 369 bp, Homo sapiens
tctgaataatacctaactgcagaatgttcctggcattaagtgaaaatagaccaaatattagcattctcaaagcccttatcttatatgcacacatgtactgctcttgttctagctgtggtttagtactgcttgacatcagtagcatattcagttcccatttttaggcaaaaaggaacaaatcgcccttccttgttcaaggaagatcaaggcagatcaagtaaccaaagatcagctatctgttgcaaactttggaaccactgtcaggcttatagtctgcttctatgtacaaagaacaaaaaacactgggaggatacatttaaaaaatcagactatcagaggtagttggaaatttagtttgccctcagatga

SEQ ID NO: 227580 - DNA, 495 bp, Homo sapiens
cggctgcctcctcaggtagaagtgtaagtttggaagctgacacagctcgggaggccgaatcaggaggacttggtgactgattggctggggagggtgaggcgggaggaggagtcacacagatggctctgaggtctggagccgggggacagccggtgccacctctgatagactctgcgagaggagccactgccagcttcgggccgccccatccgtcggggatccggcctagggctagggaggggtggctgggcctgtgcaaacttctactccccacccctatgtcctcgtcttaaaaaaaaaatcggcctggattttgagcaggtcgttatcaggggtgagggtccatcctgggggtcccctccaggcggccgtcttcgagggagacccccaggggcagcctggcaccgcgcgggctcggcctggtcagggccgtggcccgccaggcccaagtccccagcctgccatcacccaggagtggggtggcgaggtggtttt

SEQ ID NO: 227581 - DNA, 432 bp, Homo sapiens
gtgtaagggagacatcacacacacaagctacctgtgggtcccaaaggaagggaaacgtttgcttgaagtaaacaagtacttttatcaggaatctctagtggaaagagaccacctgacagtttcctgtgaacaagccaaagtacccttcagaggactggttctagatggaggtagattcccaggactgacaaacacatgccttttctaacagagcaagggaaatgaacggcagctgttagtttcaggagtcatttagctccaaacagcagtgtacagtgttattggaaggttcttttaaatgtacctccttctccctcaaaacacagcacacacatgcacggacacaaacacgcaggcctgtttgaagtgtcttttcaaaccattactctgacagctcacttggaaagtattaaaagtataaggctttcatca

SEQ ID NO: 227582 - DNA, 496 bp, Homo sapiens
taaagtctcaccgctcacccaattctctgctcacaaacagactgacggggcccatttgcattctgaagtgcagctcccctgagtcccctgtccctccaggcaggtattattagtccccttgttttgttgggtgactctgaatgggagcctgtttacgggctgggttcctaatagaaggcttcggttccctcctaataatctatcccctggtgggttttatttccaaagtacagcagtacagaacctgccctcttgggagtttattgggcttttttcttccccacaatattttctcccacgttttcatgcgagggaagagtttcctgctcgtggaactgattgttgaccaagccacctgcgttggtcttttgtgtcctggcaagagggggttcacggaaagtggggggcaccctcctccccgcctcggctccatagagcatctcaagaacacggaaaacctggatccggttggcatcaataaaaggagtctgggtca

SEQ ID NO: 227583 - DNA, 471 bp, Homo sapiens
tcagatttctgattttttcagatttttgaatatttgcattacaccaggctggctgagcatcccatttttgaaaatctaaaatctgaaatacgccaataagcatttcctttgggcattatatcagtgcataaaacgttttaaattttggagcatttcagatttgggatttttagatttgaaatgctcaacttgtaacaccagtgtgacagaggtagacccttcatgcagcttctgtgagagatgtatatttttgccataattatttacctaactcagattattggttaccacaaaatatatgctcatcagaaaaatactggtccaaatttgcttttcaagcatgtttatttaattgtagtataatgaagacaaatcttcagagctagttggcattatcattaatttatttggacttttgtggaaaacagaggaaacttgaaacctaaatggccttttggatgccaaaggaaa

SEQ ID NO: 227584 - DNA, 474 bp, Homo sapiens
aattcttacatattagtcaactgactttggacaggctatttaacatctctaaatctaagtaaactcatctgggggtggggtggggagagagaaagagtaaaagtttaaatgagatactagattttaatactgactgctctcattgtgttagaagttattactgttgagtttgtgaaccgagatttaaaagtatgacattgaatgggatatggttacatatccgacatgtgtagatagatgcacaggatggtttgtgttgaagacagctgtctccatgacaaccacattgccctctacttagcaggtcccctgacaaatcacctaaggcagcgttttactcatagctcaatgattcctggctgttgcagatgctttaataaggaggaagagagatttttctcctttttaatataagaatagcttttattaattttaattacacatataatacattaacacattctttttactaaa

SEQ ID NO: 227585 - DNA, 439 bp, Homo sapiens
agagaaagtgtatactttcctccttgcatctttagacatcataatgctgttggaaactggcctttaccctcagtgaggcctgatgaagaaaaattgtttctaccacctgtgcacacataggcaaggcagaaagtacagggagtgccactgtaaattggaagtgtttttggtgacagttgagcatcagctctgaccttactggcctcccctggagccttgttgaaggaacactggtgcaaatccttgagggaacaggggcagacttctcaagtgaagcaagcagaagtgcccgctggccctgaaagggtaggctgctctgctcctcggaaaggaaagtccagtgggacctcgctgctctgctcccaggtacctgtggctccactcggcttggagggcatctgaagggggatgtggggttattgtgtctgctctctgtgtt

SEQ ID NO: 227586 - DNA, 459 bp, Homo sapiens
ttgacttttgacaagaatgtcaaaagaatttaatgggggaaggaataaggaatagtctcttcaacaaatggtgctaaaacaactggatatccacatgaaaaagtatgaatttggagctctacttcacaccatatacaaaatgaactcaaactggatcaaagacataaacgtaagagctaaaactatgaaaccattagaagaaagcatagacatacatcttcataatctcggaattgaaaatggtttcttaagtatgatgccaaaagctcaagttaaaaaaatgtgtatatatatatatatatatatatatgtatataaattggacttcatcaaaataaaatacttttgtgcctcaaaaggcactatcaagaaaacagaaagaaaatctacataatgggaaaattatttgctaattatgtatctgacataaggagcttcaatatgtaaaaatctcttaga

SEQ ID NO: 227587 - DNA, 665 bp, Homo sapiens
ttcacccagaatgtaatacacatgtgaactaaatgttttctgttgctgacgttttgtaggcttctgaaatttaatgagacttttacaaggtttaccttttttcctaaagtttaatttttaaactgacttaaatgttttttgaccctttggttatatttaagaagttgacttctctaatttccttgtcatgtttatttttaaatatctttctctttaaaagttgggatactataataaatattcagcaagtattttgcatttaaatataaaatcttgttatttggattttaatactttatattaaatgcctttaagatttattaaaattttagattaactgaactctgcttttttgtcactggattaataagcaggcttgtatctgacataatagcttaataaggcagtgacaatttaaatttgtcatgagtataaattgaaaaatcataatttagaaatcggagattgaatatttcatggcatttatatttagtgttttatataatgattaatgaaaagaaggaaaacttaaattttttttcaaagatggataggttcaggccagatgcagtggcttactcctctaatcccagcactttggggaccaaggcaggaggattgcttgaggccgtagactaggcaacatagtgagatcctgtctctac

SEQ ID NO: 227588 - DNA, 616 bp, Homo sapiens
ggccactgcactccggcctgggcaacagagcgagatccgtctcaaaaaaaaaaaaaaaaaaaaaaaaaaaaaaaaaattcatttaagaccacggcatcttggcagctttcttacaaacccatccttctgaaatgttgcttcaaattcatcctctgctccccagtcccactattccacacatactgttactgtttctttatcctactttctcaattttggaacatagtggcagttactgcattgaatacctgtggttggcctgtgttctgtctgtctctgtgttctggtaatagtgatcccagagataaaatggacagttgtaatgcacagttaattcagaaactagaccttacttgctgtgtgaaataccaactaaattctcagtgaactcagctgagctttatctccttttgtttccccaatttataatttcagttcaggcccagaaagatggaatcccagctaagaaatacaagttacaccctgtactagcagcccatgtgtgcatgttctttaagtgctcttgcagctatgtcatttatattgatttccctgtattattataagcaaagcaaatttgaggaaaaaaacccataataccacacctcattttttt

SEQ ID NO: 227589 - DNA, 439 bp, Homo sapiens
gtgccccctgcctgccccagtacgagcgggccctggacgtggcggcagagcccaagcacgagcggcagcaccgagcccagatacgcaagaacatcacggagactctggtgtccctgagggtccacactgtggatgacatccagcagatcgctgctgcgctggcccagtgcatggggcccagcagggagctcgtatgccgctcgtgcctgaagcagacgctgcacaagctggaggccatgatgctcatcctgcaggcagagaccaccgcgggcaccgtgacgcccaccgccatcggagacagcatcctcaacatcacaggagacctcatccacctggccagctcggacgtgcgggcaccacagccctcagagctgggagccgagtcaccatctcggatggtggcgtcccaggcctacaacctgacctctgccctcatgcg

SEQ ID NO: 227590 - DNA, 759 bp, Homo sapiens
ttcttttacagctttaaaattgtgaactgatttaacacatctgtgttggtattctttccatggcttgacatggctgggtactaaaattgtaattcataaagcatatgaaactttgacctataatggctgacattcaaaaagtaatctcagatgacattcagagtaatctctgttaagggtgagactattcactagaatttcaaaaacaatataattgttacctaaaaaattacctattgtcactttacttccggtaaatatctttcattaaaatttcagttactgccacttgacaattggcaaatatttgatatgtcacactatctaaaacatggctaggactcaatatatttttattttaggtatgtataagagttaattgccaatggaaaaaaaggttgcttgcacttagctagaatttttttaagactttgttagcagattcctccaaaggtatcaaagaattgtcatgtttccagttattaaaattctactctcactttcaaaattccgataggaccattaaaactgatttgaagagcatctgctaatccattttcacctataccgatccttctgaggaactcctctgtattggtctggataaagagcaaatatcagtaaggattaaaaattggcaaaggttgttcatggtggtttacgcctgtgatcccaacactttgagaggtcaaggccagaggattgcttgagcccaggagtttgaaatcagcttgggcaaaatagtgagaccctgtctac

SEQ ID NO: 227591 - DNA, 889 bp, Homo sapiens
tgccgtggcatgctggtgggcatagcttatggggaggtgcttctgccctgttctacctagtcctcaatttggccccatgtccgagtcccttctcctacctcactgccataccatcgtgggtttcctctccagagaatgctgtgaggaaccagtgagtgattccacctcaattttatgtggttttggggaagcggagcgagagaagagcaagtaaaaccaagaatctcttgccatacacacgttacaggcaggacaattgtggctgttgttgttacttctgtatttactcaatttttaaaattaagctcttggcctaaagatccaacatgtaacttcaggggagtccttcattaattaatactactttaaaccttagcacacatcgtctgggaatgacaaataagcatttctttttttttaaatttaattttattattattatactttaagttttagggtacatgtgcacaacgtgcaggtttgttacatatgtatacatgtgccatgttggtgtgcatttctaaatgacttttaagcaaagatctagatgattgaggtactcagagatcaaaggtggagggaaggaaactgagattcaggaacacttggggactagttcaagagccaggatatggccaagcattggaatttcgtccactctcttaacgctgcatctccaaggacctcaagcccagaaactcttctttaaaaggcaagcagcaatgctcatgtttcaaaacataaaatacagttggggaaaaattagttgggatattagtcaaaaaatagctcaatctttttaaaactttatattagaaggtaatcccctaaatatggctgatggcttcaactcttcaaaatgtaagtcaaaaacacaattaacacagtc

SEQ ID NO: 227592 - DNA, 492 bp, Homo sapiens
actctttcctggaatgttccaccctctgctgtgctgtggcctacactgaagcaggagacacagaagcgtggtctattctactttaactgagatctctcattggacacaggtctgcagtggcgcccatgattggcttcgagtggctgcttgctcagatctcaaggagcctcatctatttcacatgagataaaccagatgaggtgtcctccctgattcacagccctatgcggctgtgatcttcccattactctggctgtggctgctgagtcttctcccagaggtccagggggcagcagaagaaagttgctgataccggcaagcagggcctccctcctggtcccctgcccagcccgcgcagtccactttccaggcttccacggcctgactccagccttgccagccatccagagatgcccacatttgcataaagtaattgccctttaaaagcgtcttttaaagagaacactctgcatctgaggattataacaacag

SEQ ID NO: 227593 - DNA, 233 bp, Homo sapiens
tagctcatcccctgcaaagaacacttttcagtggcaggtgtttccaaagtaatttttagggcattgttaaaattggttgcttttaaaaacatacagaaaattttaatgtgttctataaaacagcacctattgcaaatatttaaatgttacataattttaccatttgtgtttaggattattagaatcacagtagttcatagttctacagatgcagttaaaatctgtcaagtata

SEQ ID NO: 227594 - DNA, 452 bp, Homo sapiens
tagatgtcttttgaagtcatagaatggaggaggttggctaacagattgttgtcatgtgagagaggtgacaagtttgatgccaatgtttttggcctaaccaactggaagaatagaattgcatccaatgagaaagggaaggccatgggtaaggcagatcagagcaaaaggttaataaattagttgtagacttgtttagtttgagacatctacttgatctccaaatggcgatatcaagttagcagttagataagtcggagaatggaaaataaatcttggctagaggtgattgagaattagtagtgggtaggtagtatttaaacccatgagacaggatgagattacaaatgtagtgaaagtagagaagaggttcaaagactttttcctggggcaccaaaagataagaagatgaagataaactgaacagtcctatatttattaaaggcattttcata

SEQ ID NO: 227595 - DNA, 553 bp, Homo sapiens
agaaattttctccccatttcaatgactgtaactgagccaaggagtgtgtcatcatctcaacggtgatgggaatgtcctggaggagtttctttgtttcaagtggttttattatctgaagagaaataaagcaagtctctggctgctgctgtctatcaaaaatgtcaggatacgttcctgagaggagtgaaacagctgattttaactttcagcgtctccccaggagaacccccacccccgcagtactgctgaggcgtgatggttatcaggacaaggccaagaggtaactggtaactgccatttaaggatagtgccattgacaaagggtaggtgcgtgcatgtgtcactatatataaaaaacaggtaggtagatgaccgatcaaagaagcccgagcaagccttaaagaacagactcccaggctatctttacctcttgaatgattttctgctgccaccagctgagggaatataagcaatatgttttctaaagaccattattcacttctagcgtgtcctgatcagaacaaaaacctatacaatccgttgtgagaagtgt

SEQ ID NO: 227596 - DNA, 661 bp, Homo sapiens
gggagtaataggcagaagaatggcctttctacatgtccatatccctatatggcaaaaaggacctgtggatgtgatgaagttatggatcatgagatgaggagattattctggattacccaggttggcccaatgtcatcacaagagtacttaaaagcaaaagagggaggcaggagagtctgaggcaagacgcatgacagctagggtcagaatgatgtggttgctgcctggaagggggccaggggccaagggatgcaggcatcctttcaaagctggagaaggtaagaaagtgttctctctcccctagagagagtgtgtgttctcttaggctactagaggtgtgctaatttattccagcaatcatagaaaacttatatagaaggtctcacagagaagataacatttgaacaaagattccaaggaggtgagggcaccagctatgcagatatctggggaagagcactcgaagaagaaaaggcaggcaaacagcagggtgcgtagcccatgtgcatgaagtagagaatactgggagtcagaaggctaacaggagacaggtcagagagagggactggggtgggtcaactcacactcagcctcactggctattgttagaactttgagttattctgagacactgagtataggagagtctatgaatatttat

SEQ ID NO: 227597 - DNA, 500 bp, Homo sapiens
tgctcttcttttctaatgttaaaacatttgtgctttcctgagatgaatgctgtgctctcatgaaagattgcagagtcaaaaagtagcctctggagttaagactttctggttttagagcctcctatggccacttactaattatgggtcttaggagagttactgaaccttcataatgggtaccaatcctagatcctgtcaaaagggatccttctcttggcgatgactttggaagatcctttgcatgacaataaaaaaaaaagtattattagatctaatttattagataacacttgggtgtctctaagtgttatggtggtaaacgttcaacaggctctcaaaaatgcatatatgtatatgtttatatagatacatatacactcaaatgtgtatatatgtatatatacacactaatatgtttatcataaattttattgatataaaggttgtgtaacacaagttacaaataataataaaatattcaatattatttattgtaaatt

SEQ ID NO: 227598 - DNA, 368 bp, Homo sapiens
attttaaatgattattactcagtatagtaaatagcagctatttgtggaatattttggagttgaggagcttgatatgttagattttcttaaaattgagcaaaattttttccatagcttggttctcaggggttatagatgcaagaagttcctggaaagagctctaaaccagaaaataacagtctgctggtcaaactcaaaactgtcttggttgatatatgagctggctgtctttactgttacctcctgtcatgatcattttgctaattttctgctataactagaggggaatgtcactccctttctcatttttgctccactaccttcctttctccctggcctcctctctactttgttaccttaagttttca

SEQ ID NO: 227599 - DNA, 1617 bp, Homo sapiens
acagaattttgcttcaaggagattctgaagctcacttaatagggacttggtacaggggagccacacatcaacagaataattagttgatggttttgttaaagatatttccagtcttgagattacatgtgtctttggtcctggacttcatagagtttacaagttagttcatgagacaagacaaatgcatcacaaaaataaataatgcaaggaggccaagtgataatgagaggtgctgataagtgctaggaattcacatgacagattattcccatcacagttccagaggcttaagggagaagagaggaactgaaaatagactacctagaactgccctatccattggggtagccaccagttaaatacgtctcttgacatttgaaatgtggcttgtccaaactgagacatgcaatgagtccaaaatgtacaccagatttcaaagacttagaaaacaaatgtaaaatattgtaattcttatgtcgattacatgttgaaataatatataatggatcaaataaacactacttgttaaacacacttaacaaacaacacaaacaaacaaaaaacaacaacaaaaaaaaaaaacaaacaacaaaacaaacaacacaacaacacacacaagacagagagacagagagagagacacacaacgaacgacacacccagaagagaagcagaagagcgagcaacaagaagaaagaacaaggcgaaagaaagaaggagagagaagagagagagcgacaggaggcagaagcgaggcagcaagacagagaggaggaagcaggcttctatgaacgaggcaggcagagcgacgagggagagagagaaagaaaacagaaaaaagaaagagagagggagagaaaagggaagaaaaagagaagcagaaaacggaaaaaaaaagaaaaaaaaaaaaagaaaaaaaagcaaaagaaaaagagaaaaaaaaagaaaaaaaagaaaaaaaaaaaaaacacaaaaaaaggagaagagagaacaaagaaaagaaaagaaaaaaaaaaagaaaaaaaagcgagaaaaagaaaaaacaaagaaaagagaaagcaaggaaaaaagaagacaagagagaaaagaaaaacacaaaacgaaaacaaaggcagccaaagaaaaaaagaaaatagaaagaaaagaaaaacaaaaaaaaacaaaagagaggaaagagaagaaaagaaagagaagagggaaggagaagaagaacagaagaagaggagcacacagcgggacaacagactagcaacgaggaggaaggggggagagggaagaaacagaaaacaaacgagcacacagcgaagacacacgccaagacgaacaaggggagacgacagcacacaggacagacagaagacagaagagagcgagaaaaaaacaaggagagggagaaaaaaagaaagagaaagaaagaaaaggagacacaagaagacagggagagaaaggagagaacagagaaaagaacagaggagaagaaaaaagagacaagaaaaaaaagagaaacgggaaaagaaggaagaaaaaggaacaagagaaaggagaaaggaacgagaaaaagagaaagagaaagagagacaagaggaagaaacggatgcatctcgtcgaaagagaaaa

SEQ ID NO: 227600 - DNA, 535 bp, Homo sapiens
gacattttggttttcattctttggtgattatgaatacagttgctgtgaacataacattataggcttttgtggacctaagttttcatttttctagggtaaataactgtgagttggattgctgggtcatatgaaaaatgtacatttaacttatttataaagaagttgccaaactgttttctagaatggctatacagtactattttgcgttcacactagcaatgtatgagtttcagtttttcctcatcttctctagcatctcatcctctttagcatttcaagttaaatattggcagtatttaacttgtaatgttgaaaattttaggtttacagaagttacagatagaatctccatatatgcttccctcagtatatcctaatgttcacatcttgccataaccgtgatatgtcatcaacactaagaaactgggccagtcatggtggctcacacctgttatcccagtaactctggaggccgtggtggggaggattgcttgaggccaggcgtttgagaccaacctggttctcagaagttagg

SEQ ID NO: 227601 - DNA, 293 bp, Homo sapiens
acaccaccatgccgggccaatttaaaaaacatttttgtagagactggatcttgccatgttgcccaggctagtctcaaactcctggcttcaagcaatcctcctgcctcagtcttccacagcactagaattaggcatgagccactgtgcccagcccaatattgtattttaaataaatgcagttttgattttcttttggacatgatagttacttaggaagctttttttttttaaatttccaaattttctaccttctacttttattaatgtttttcagttttattgtttggtagtca

SEQ ID NO: 227602 - DNA, 658 bp, Homo sapiens
cctcagaggaaatgctgtcattctccaccagaagtctactcttccatctgctctgttgatgccattctctccagcctagtcagaaacaccatcacctaattcagtggtccccaacctttttggcaccagggaccagttttgtggaagacaatttttccgtggaccaggggggttgggggagatagtttcagaggcattagattctcatacggagtgcacaacctggatccctcacatgcacaattcacaataggattcgcgatcctatgagaattgaatgctgccattgatctgacagaaggcagaattcaggcagtaatgctcgcttgtcccctgctcacctcctgcagtatggcctggttctggtccatggcccaggggttggggacccttgacctaaatcatcactctttatagaatgttacatctctcttttcccaggggcatctttccctttgccttcaaaactgcacaccttcatctgaataatgattaaactctgctgctcaccattaaaatgggctgattgctccaagcagtatctagaaagaaactgtttctagttcttcacccctaatcatttttctagatttttgcaaagaataatcattaaatatttcatatgtataaaaaaataaagaatagtttatatagtata

SEQ ID NO: 227603 - DNA, 542 bp, Homo sapiens
gccttgctctgttgcccaggcgggagtgcagtgatgtgatcataggtcactgcagccttgacctcctgggctcaagcaatcctcctgccttagcctcctgggtagctgggactacaggtgtgcaccactgcacctggctaatttattttatttagtttagttattgtagagacggggtctcactttgttgcccaggctgatcttggactcttggcttcaggggatcctcccacctcggcctcccaaagtgttgagatgacaggcatgagccaccacgcccacctctgtcttttctcttgggattaatgacttccacaatagctccaggaataatttttgttaaggtgatgcctggcttgacacttctggtaactcccgttgtttatctattgcttatctccagaacccatttgatgcttcctacttcaaagtgcactagcgcctgtcagcttgaaggcatcccctgagctgctggcaaacaaggcctttttacccacagattaacctcttatttgttttaataaatgataaaaagttggttt

SEQ ID NO: 227604 - DNA, 278 bp, Homo sapiens
agatcgtgccattgcactccagcctgggcagcaagagtaaatctctgtctcaccaaaaaaaaaaaaaaaaaaaaaaattgcttttgttcctctgtgtacccaactgtcttcctccactcctgtttgtccatccttgggccgaatctgtccatccatgcactctttttgctcctctatatggctatctgtgggtgcccctgactatctctgcccctcttctgcccctctctctgtctgtcctaggcagtccatctgtccatccctacaccctgcccctt

SEQ ID NO: 227605 - DNA, 418 bp, Homo sapiens
aaaagctacctatggggtactgtgctatctatctgagtagtagtagcagttatcccaaaccttagcaatacataatatacccatgtaacaaacctagacatgtggcctctgaacctataggaaaagttgaaattaaacaaaaataccaaaatatgtgctctttataaatgtgcagtcacagttaaaatgcatggctatctagaataattattgtttggtagtacactatgttgattcaatattttttggttaattttttttgttaaattttgttccaccattttatattttagtggcttatgttttacagtagcctatgtcacattaattaattgtgtttttagtttttatgtatcataattttatatgacaataattcaactctgtacacattaaaacaatgtttggacaaaagtca

SEQ ID NO: 227606 - DNA, 636 bp, Homo sapiens
agggagatagaggaggacctgggatacctggatttaagggagaacctggactttctattcgaggaccaaagggtgtccaaggccctcggggaccagtgggtgctccaggactcaaaggtgatggctatcctggtgtgcctggacctcgtggattaccaggaccccctgggccgatgggtttacgtggagtgggagacactggagcaaagactttgaacacttcccatggccttgaagatccttcatgccccgactgcagcttctgtcatttctccctggctgccgacattcagccaaaatggcctgccctacttcagctcattcctgcatcagggactcgccaggatggctgattattaaaagcttagctcaaatgtcacctccccgaccacccatacagaaagcattactaccccaacccctctgtatgttttccatgtagcgtgtatcactttctgagatcatcttcctcatttatttctctgcatattccatgagagtgaaggttttcctggagcaggcttcttgctttgttccctcctaacttcatgtcaccagaactaggtgtaccattcagtaggagctctacaacttgttgaatgaatggaaaatgaataaatgatcaatattacccta

SEQ ID NO: 227607 - DNA, 572 bp, Homo sapiens
agggagatagaggaggacctgggatacctggatttaagggagaacctggactttctattcgaggaccaaagggtgtccaaggccctcggggaccagtgggtgctccaggactcaaaggtgatggctatcctggtgtgcctggacctcgtggattaccaggaccccctgggccgatgggtttacgtggagtgggagacactggagcaaagggagagcctggggtcagaggccctccaggtccttctgggcctcggggcgtaggaacccaagggccaaagggtgatactgggcagaaaggcttgcctggccctcctggcccccctggctatggatcacagggaattaaagtaagtgaatagggttgtgctggagtcacctctgatttcaccagagtgattgggagaagaggttgtagataacgcaaaaatggctattatgaaatagatttattgtgagcctcgcagttaaatggcatccagtgtttagagacatcatctggaagtgtaaaaatggtatgagtacaatacttcagcaaatgctaaacattatataaattgcttggtgcaaaagtg

SEQ ID NO: 227608 - DNA, 432 bp, Homo sapiens
taagctccccctccttgagggggaaatgtccacatgtgttattttgtgccccctgttttaaattgtgccatctcccactcccatcttggttcccacttgcagatgtcatcctcagcacttagcatccatggacaggcagcatgtgtgtgggtttttcccctgtctctccccaccaggacatcaactccagcagggaggggggtgggatgggctggcggagagctcagaggaggtagggagaggcatttactgaagtctgtctttgccaactgtcagatgtgaagcactgtgggcaacctgtgaaatattaataattctgagcccctcctgaaaaattgggatgagaagatccgtcttttagggatattgtgagagattaatgagaatgcaaataaagtgctttgaaccaaccaggttctgatctttttaaaa

SEQ ID NO: 227609 - DNA, 467 bp, Homo sapiens
gcgcgtggtggcgcgtgcctgtagtcctagctactcaagaggctgacatgggaggattgattgagcccaagaggtcaagacggtagtgattcgtggtcacaccactgccctcaaccctgggtgacagggtgagaccctgtctctaaaaacaaaagcaaagtctactaaaaattcactggagctatgagaaatcttagcccatggaatccagtcttctccttttgtttctggggaagctgaggttcagagagatggggtagcttgctcatgttatatagggagcaaaggacagagcttggaccagagcgcagaggtcatgataccaaagccacggcacctttgccacaacgtgagcaagaaaggatagccttgttatttttaatccaaactgaagttatgctttgggcttccagaatctgggtcaaaaagagtagaagtcaggctcagattgacgcttttcaagagag

SEQ ID NO: 227610 - DNA, 756 bp, Homo sapiens
agaggtaaagggagggactgtaggaagtagaagcgctaatgccctttattaagtcaattaatcaggtctaaaattgaaacgtggttttaaatatataacttcttgcttattttcctccctaactacctgaggatcaaccaccatgataaatgacacagtaactatctggaccaggaagttcatgaccaatcgaccactccagaggaaacaaatggtcaccaatgtccttcaccccggaaaggcaacaaaatgtacaagaccacaataggtgtcatcttcatattaatagttggactcagaacccgtgttggtggtggttaaacaatgggctttggcatgctatctggttctttgaattatgcaaagaaaaatgaactcgaacatagacttgcaagacacagctggcatgagaagaaatgacctcaagaaaacagcaaaaggaatgcgagggcagaatgaagtcaagagactgcaaaggccaatgtcagtgctggcaaaaagcaaaaggagtaaagattttgcaatgactttatttgcagtgactgtacaaatttttcatgagatgatcaatcaactgtgaagacttttacatatatataaaacatcttaatatttttcatcatctttgatttcttagatgttctagaaactgatttttagtgaggaaaaactacatttacctgagttgaccagttccttctgtttcacttccatttctttttcttctgataaatttacacagcattcaatttgcta

SEQ ID NO: 227611 - DNA, 561 bp, Homo sapiens
gtgatgatttatttttgggctttaagttccatttcattgactatatgtctatttctatgccataccacattgtcttaattacctggggctctgtagtaatttttggaattgggaagtgttttccttcaatttcatttttcttgttcaatattatttgggttattctgggtttcttgaatttgtataaattttaagatcagcttgccaatttctgcaagaagtccactgggattcttgaagaggattgtgtttaatctgtacattaattggggaatattaccattttagcaatattaagccttccaatcatgagtgtggtgtctttctgtttatttaaatcttaactttcttccaacaatgttttgtagtttctatgaatacaagtcttgcagttcttttgttaacattattcctattttattctttttgatgccatattgtatacaggattgtttttttaatttcattttcagattgcttgttgctaatgtagagaaatacaattgatttttgtatatcgatattgtatcctacaactggctgaactcatttattagttat

SEQ ID NO: 227612 - DNA, 372 bp, Homo sapiens
cagggatgctaccaaacatcctaccatgtgcacaggacagcctgacaacaaagaattatccaccctgcaatgccaatattgctgaggttgggaagccctggtggagacagaagtggctgcttggtcagtgactatatttcccagcttcccttgcatctagctgcggccttgtgactggttttcaccaagggaccatgagcaggaatgctgtgcccacatccaggaggagggcttttaagaagtggatgtactaggccgggcgtggtggctcacacctgtaatccctgcactttgggaggccgaggcgggaggatcacaaggtcaggagatcgaggccatcctggctaacacggtgaaaccccgtctctgcta

SEQ ID NO: 227613 - DNA, 484 bp, Homo sapiens
caccctccctgtagttccaactgtgctcctccttgcccactcccgcaagaagctaggtgtgtccctctggggcaaagtccatgccagaagtttacaggagtgggtgtaaaagctagagatggaaaaatagagacagacatgtagcacatccagaggtcctgacaactgcctgtttgttggggaagcaaaccccactttcattttctttgggaaattccaatctcttatggaggaatcctgcctctatcctctataattctgccttgtcaagttcccattttaaaaatgaagctcactgtagcaatgacagggaaggagagacctttggaagaacttctgaaatggttatgggtaggttgggtgtctttaataggggctgtgagaggtaaggtgttgagaagaagcactgggggtagatggggagtctggaccctggccagggcccattgtaggagagagagggctttctgtacctggcggcagc

SEQ ID NO: 227614 - DNA, 287 bp, Homo sapiens
gtaagtaatttggctaccattcaacacttagcatccttgtagcatttccattaagcacagacatacacagatagtgtgagatcccatgtaacttagagggatattttgcttagtccattggaatattaagtgttatgtacggtattcaactgttattattcttggttttaaacttttattctgtgatctcagaaacagctagtacaggactgtacaaatgcatttgtatgcatcataacaaacatgtttatttgttcagactatttaaagtcctaagatttttctac

SEQ ID NO: 227615 - DNA, 529 bp, Homo sapiens
taatatcccagacaaggttttatacttcctggaacctatcagaaaaattattctagaaaatgtctggttctagtttgtccctttttctccaattatctcttctatgaccaggatagtgcctgagatgccctatttaatgcagcttctcctgatgctttggctgaagatggtgggaatccaagcactctggaaattcagacaattctagaatccctccagcttccttgatacctattcatgtcagaacagtgtgccaggtcccttatggagtcttttataaaaaataatagaggctttttttcctgccatcaaaaactttagctagatgccaggcatataactgaaaacatgattatttgctatgtctatatgcatattcatttgccatagataaagcagagatgccaagcacttaatgggaaaataattacaaaatgaatgaattgaacatttttatacctttattgtcaagtatctaataatctaaagatgttgatgtgtctcaattaaactctttgatgctaatgag

SEQ ID NO: 227616 - DNA, 301 bp, Homo sapiens
gcatgatctggtgatgaaattcaagccaaaaatcatcccgcagtcaaaattatcctgtgtatgctctggaagggattgccggggagtctgttccagaacttcatggatactaatgagtggatttgcacagtggatttacccagcaggcatggactgctcctgtttggcccttcagcttctcctggctacctgaaatgggaacccccaccatcccaaggggagcgggcagtctttcaggggatggagtcactgtctttaattctactcagtaattcagtcaataaacatttcttaagcacca

SEQ ID NO: 227617 - DNA, 453 bp, Homo sapiens
caaatctttattttatgacatgactcttcatctattagtccacaaacgatgatcctgctttgcaaacttagatcagctacataccttcagtaaatataaacacagaacattaaagaatcatttaaaataattgtcatcatatgtattcgtgactgctgtattcactgttgcagtctttgcactattaaagtaccagaggatttttcattcttacacatatcgcaattgctgtggttaaatgtagactttgaatgttactgtcacaagcactatcacaagaaactcatttccaattatagtatcgaataaaaatgttttaatgcttctctatgcaatgaaactgaaattgtactcatcctagtgccactggaagcacacgttacattttctttaactgggcttttttttttttttttaaataaattcgaatcaaagattgttaaaacagctgta

SEQ ID NO: 227618 - DNA, 493 bp, Homo sapiens
ttcagagttatgcagccattaccactacctaatttcagaaccttttcttctccccagaaagaaaccccatgcccattagcagtcactctgtatactcgtctcccccaccgttgatcctggcgacctctgatctaatttctgtctctgtagatttgcctatcctggacatttcatataaatagaatcatacaaaatgtggcattttgtaattgacttttctttgaagtgattataaagcaaatgcctgaagaggccaagcttaggatagtgtttgctgtacagctttgacaactgaattttttttaagttgaaaatattactgtgtctgtatatgtggcatattatccttagatgaccgttacttcaattattagaatttttttccctagtattcttgaactgtctcaatattcagtaggaaccctttggagacaaagagcagtaagaatttggaacacatattgacgaaatgaatgtcatttaatacagtagt

SEQ ID NO: 227619 - DNA, 492 bp, Homo sapiens
agatgaagtggaatcatatttaatagcaatactacggcccagaccttgttccatactcttcctatgcattagtacatttaatccttacaaactcacgtgagagagatataattattatcctcattttacagagaggttaagtggtgaaaccatggtttaaacccaggcagtctgactccaataattctcaattgtaaaactttggaacagttcagagtcaagttcataaaaattatgtcataaaactggggcattaagaaggctgactgttgaaaggaaagtaggtatgcacaaagcctttatttgtatttgactcaaatttgtgatgtgttgggtattggtaaggcatgattcgtcttctggctataccacagttcagtaaaaatttgcacataatacatttgtattttttatcatgtgattcaccattaaaaatattacaatgtaccccacactggatttttcaaaatgtgaataaatttagacaactta

SEQ ID NO: 227620 - DNA, 950 bp, Homo sapiens
aacaacggactccaggttcttcagttttgggactcagactggctctcctttctcctcagcttgcagacagcctgttgtgggaccttgtgattgttcccttgctgaaaatgcttcagtggctctccatggcccttaaagtcaagtacaaagtctacaagcggaaaagtgatctgcaaagcccttcaggatctgaccccaggtcacttgtctagtcaagggatggctattttttgttgttttgcttttcagttcctcaaatattcaaagctttcttttgcctctgagcatttgttcctactgttccttctgcttctgtatctcttcatcttggtccgattagcccttactcatatccttccagtttcagtctaaatgtcactcgttccagaaaccactactgacccccccaagtctatgtcatgcaccctttcttcttggcatctgacacttcttggcatctgacacttggcgaaacttccctgttttgcagcttttacccactttgccatagctgcctgtttacttgtgtgtattctttcaaatactctgatttttccagagggcaggcagtgactcttcttcaatattgtattctcaatgcccggtggacaatgttggtactagacagtgttttgaacaaatgaataaatgaaggagagaagaaatgaattctcagtgatatttctgtaagataagcaaccgctattatttatattacacatttcaaataatcttttcaaaaacaagtataactcatctatggtaatggaaatcaaaatagtggttacctttggaggtactgatgaggaaaaggcacaagggaattttcaggggagcagaaaattatccgcatcttactctgggtgttggtttcataggcatgtgcagacataaaagttcaatgagctgcgtacctacaatttgtaccctttgttgcatacgttaacata

SEQ ID NO: 227621 - DNA, 240 bp, Homo sapiens
tgaagcctccccagctatgcttcctgtacaacctgtggaacttcccttgctgaaaatgcttcagtggctctccatggcccttaaagtcaagtacaaagtctacaagcggaaaagtgatctgcaaagcccttcaggatctgaccccagaggaaatttgttttgcaacagaaaacataagaaattttccctgcttggaagatactcatacataccaggtatgctcatcatactttgtataaa

SEQ ID NO: 227622 - DNA, 500 bp, Homo sapiens
gtttttcaaactctttatttgtccatattgttattttctcttacatgtgctacttcaaaacaaataccaatctgctgatgacagtcccttgctgaaaatgcttcagtggctctccatggcccttaaagtcaagtacaaagtctacaagcggaaaagtgatctgcaaagcccttcaggatctgaccccaggtcacttgtctagtcaagggatggctattttttgttgttttgcttttcagttcctcaaatattcaaagctttcttttgcctctgagcatttgttcctactgttccttctgcttctgtatctcttcatcttggtccgattagcccttactcatatccttccagtttcagtctaaatgtcactcgttccagaaaccactactgacccccccaagtctatgtcatgcaccctttcttcttggcatctgacacttcttggcatctgacacttggcgaaacttccctgttttgcagcttttacccactttgccata

SEQ ID NO: 227623 - DNA, 350 bp, Homo sapiens
cattgctcaatttcagcagcaggaactatggtaaaaaataaattggactatttataatctttcagatttaatctctgctataagcagaaaatgtgttgttgtcgtctgtaacaaataacaagtatttaaatgaatctgtgttcctaaaacatatgctattctaagggagaatgcattttaatttcaatatttaatcgtctgccctttaaaaccaagtatctcaaatccaacagagctttaaaaaaaaaaaaggatacaaccaaatatctccaaatacctgatttcttcattcacttgtctcatggtaagttagttattttgccagtgagtttttaaaaataatctactgg

SEQ ID NO: 227624 - DNA, 389 bp, Homo sapiens
ggttttcattaatagagaggaatgttcatggtgcattatttgtttactggcaaatctatgatgaaaaaaggaaataccaagcaaaccaccatggacatatttctgaaaagagggacacctccttaagaagagtcccaggcaggtccttcatgggtatttcagaagagggcattgctatcataggagatgacagctctgtgcatgttactgcccgggaagaccttccagtgggacaagatgtgaaggtggaagatgatgatattgatgattctgacctgtgtatgcctaggctaatgtacttgtgtcttagtttttaacaaaaagttgaagtaaataatttaaaagaaaaatgcttataaaaataaaatatttttgtatagcattacagt

SEQ ID NO: 227625 - DNA, 275 bp, Homo sapiens
tttcctgaattttaaagatgaacagataatccaaaaaaatttaaacactatgtgaatcaaacagaatatatctgcaggttgaaaatgttcaatctctgtccctagacaaacataagaaagtgggccatttctccgatgcctgaaattctgccccaggcatcttctccccagctccctagggcttacacgatagccagaggggtggtttccagctgtgaaggtgaagacctagtaagatgaaatgatttgcccacaagccacccttttgcaatgtg

SEQ ID NO: 227626 - DNA, 446 bp, Homo sapiens
accagggagtttcctccatcatctttgaggtatattcataaatatacacaaaggcagaaaaggtcaggggcggtggcttatgcctgtaatcctaacactgggaggcctaggaggaatgatcgcttgagctcaggagttcaagcgatacagcctgggcaacacagtgagacccccatctctacattgtaagagaaaaaaggcagaaaagaatggaattagctacgtatctcaagctagcttgcaaggtgatcatggtctgcctcagggtgttatcctccccatttctaggttcttgagctttcaagcttagatgcatcactagaagatgaataatgagttgcaattcattcgcagcaataaagccaattaatttttctccttgaatttttttctgtataaattgaacgtttgtcttttgaaaataaaatgtatgctcatctgtatta

SEQ ID NO: 227627 - DNA, 921 bp, Homo sapiens
gtggtgactacgtgggtctggagctgactgccgtcctgacacgtcctagagctgcaagcaggttctgctgggacaggctgcttctgcaggaggtggcctcgacccgaggcactggagcctggggcgtgctggtactagatgaggctcaggagcggtcggtggcatcagattcactccaggggctactgcaagatgccaggctggaaaaacttccgggggacctcagagtggttgtggttactgacccagcccttgaacctaagctccgagctttctggggcaatcctcctattgtgcatatacccagagagcctggtgagagaccttcccccatctactgggacaccatcccacctgatcgggtggaagctgcctgccaagcagtgcttgaattgtgtcggaaggagcttccaggagatgtgctagtgttcctgcccagtgaggaggaaatttccctgtgctgtgaatccttgtccagggaggtagagtccttgcttctccaagggcttccaccacgagtactgccccttcacccagactgtggacgagccgttcaggctgtgtatgaggacatggatgcccgaaaggttgtggtcactcactggctggctgacttctccttctccctcccttccatccaacatgtcatcgactcaggactggagctccgaagtgtgagtgagagagagagatagcggtggggtagtaaagacagaaatggcccactctgatctgtcttggccttggttgggggacgggcaacaggtttacaatcctaggatccgagcagaattccaagtgtcgaggccaatgagcaagtgtcaggcagaggcaagacgattgcgagcaagagggttcccaccaggatcctgcctctgcctgtatcctaagtccttcttagaactagaagctccaccattg

SEQ ID NO: 227628 - DNA, 830 bp, Homo sapiens
gtggtgactacgtgggtctggagctgactgccgtcctgacacgtcctagagctgcaagcaggttctgctgggacaggctgcttctgcaggaggtggcctcgacccgaggcactggagcctggggcgtgctggtactagatgaggctcaggagcggtcggtggcatcagattcactccaggggctactgcaagatgccaggctggaaaaacttccgggggacctcagagtggttgtggttactgacccagcccttgaacctaagctccgagctttctggggcaatcctcctattgtgcatatacccagagagcctggtgagagaccttcccccatctactgggacaccatcccacctgatcgggtggaagctgcctgccaagcagtgcttgaattgtgtcggaaggagcttccaggagatgtgctagtgttcctgcccagtgaggaggaaatttccctgtgctgtgaatccttgtccagggaggtagagtccttgcttctccaagggcttccaccacgagtactgccccttcacccagactgtggacgagccgttcaggctgtgtatgaggacatggatgcccgaaaggttgtggtcactcactggctggctgacttctccttctccctcccttccatccaacatgtcatcgactcaggactggagctccgaagtgtttacaatcctaggatccgagcagaattccaagtgtcgaggccaatgagcaagtgtcaggcagaggcaagacgattgcgagcaagagggttcccaccaggatcctgcctctgcctgtatcctaagtccttcttagaactagaagctccaccattg

SEQ ID NO: 227629 - DNA, 774 bp, Homo sapiens
  misc_feature (756)..(756): n is a, c, g, or t
  misc_feature (774)..(774): n is a, c, g, or t
gtggtgactacgtgggtctggagctgactgccgtcctgacacgtcctagagctgcaagcaggttctgctgggacaggctgcttctgcaggaggtggcctcgacccgaggcactggagcctggggcgtgctggtactagatgaggctcaggagcggtcggtggcatcagattcactccaggggctactgcaagatgccaggctggaaaaacttccgggggacctcagagtggttgtggttactgacccagcccttgaacctaagctccgagctttctggggcaatcctcctattgtgcatatacccagagagcctggtgagagaccttcccccatctactgggacaccatcccacctgatcgggtggaagctgcctgccaagcagtgcttgaattgtgtcggaaggagcttccaggagatgtgctagtgttcctgcccagtgaggaggaaatttccctgtgctgtgaatccttgtccagggaggtagagtccttgcttctccaagggcttccaccacgagtactgccccttcacccagactgtggacgagccgttcaggctgtgtatgaggacatggatgcccgaaaggttgtggtcactcactggctggctgacttctccttctccctcccttccatccaacatgtcatcgactcaggactggagctccgaagtgtttacaatcctaggatccgagcagaattccaatgtcgagccaatgttggtggtacgactcgaatcgtaatctgtctgctanacccgggagtaaaaacan

SEQ ID NO: 227630 - DNA, 977 bp, Homo sapiens
gtggtgactacgtgggtctggagctgactgccgtcctgacacgtcctagagctgcaagcaggttctgctgggacaggctgcttctgcaggaggtggcctcgacccgaggcactggagcctggggcgtgctggtactagatgaggctcaggagcggtcggtggcatcagattcactccaggggctactgcaagatgccaggctggaaaaacttccgggggacctcagagtggttgtggttactgacccagcccttgaacctaagctccgagctttctggggcaatcctcctattgtgcatatacccagagagcctggtgagagaccttcccccatctactgggacaccatcccacctgatcgggtggaagctgcctgccaagcagtgcttgaattgtgtcggaaggagcttccaggagatgtgctagtgttcctgcccagtgaggaggtaaaaaacaaaacaaaacaaaaaaaacagcctgcaaaatgagcctgcaaaaggaggaaatttccctgtgctgtgaatccttgtccagggaggtagagtccttgcttctccaagggcttccaccacgagtactgccccttcacccagactgtggacgagccgttcaggctgtgtatgaggacatggatgcccgaaaggttgtggtcactcactggctggctgacttctccttctccctcccttccatccaacatgtcatcgactcaggactggagctccgaagtgtgagtgagagagagagatagcggtggggtagtaaagacagaaatggcccactctgatctgtcttggccttggttgggggacgggcaacaggtttacaatcctaggatccgagcagaattccaagtgtcgaggccaatgagcaagtgtcaggcagaggcaagacgattgcgagcaagagggttcccaccaggatcctgcctctgcctgtatcctaagtccttcttagaactagaagctccaccattg

SEQ ID NO: 227631 - DNA, 390 bp, Homo sapiens
ccttgattttcaatcttctcagattggttggggctacaaggaagtctgataaaaacatttaacatagcaagagtaatatcattgccataatagattaaacgtgacaatatcaacctagaaaaagacactagattgcaaggtataatgacagtctagcaaatatatgtaatagaggcaaataccccaatgggccataatctagtaagtgtctggatactagtgcagagggtaagttcccatacccatatttaacaagagtcctaaaaattcaagtatgccatggctgctgtcagcattgttaaagtttatttccctcttgctgttttagaacagcctattttatatccaattaattttcttatatgattattaaaaataaatatgtagtat

SEQ ID NO: 227632 - DNA, 383 bp, Homo sapiens
gttttcagtagctgaccagaaaataggtggtttagcactgagcaacaaaaatcagagagaaatgggttaagaagtgagggtgaaaacaagaataaggagttcctttgagattttggttttgtaaagtcagaaaatggggtatagtggtggatgtgggagaatctgtagggtagaaagaagagttttgtttttgaatgagagtgacatgaacattttaaaatattaatgggggatccatttgagtggaagagtttcaatgtattaaaagacatcacagatattcaattttttaccaaattggaggaaatgaggtacaaggcagcaatggcaatctgttttacagaagagaagagatatctgccctacttcacaagttgagaaag

SEQ ID NO: 227633 - DNA, 423 bp, Homo sapiens
ttataagcatatagagacatgattgatatttacatgttgatcatgtgtcctgtgaatttgctgaacttattatttccaggagattttaaaaaatagttttcttgggaaattctatgtagcaaattatatgcaaaccaggatagtttcattttttgctttctaatccaaatgtgtttctttttcttgccatattttgctggctagaatttctagtactatgttgaataaaagtggtgagagtggatcaccttaacttgctcctgatcttaggggaaacattcaggcattaagaaatgcatttcacttaaatataatgtcccctgtaggttttttgtaggtactcattcttgaacaagttaaggaagttcctctttactcctaacttgctgagagtatttgtcatgagtgggtgttggattttgt

SEQ ID NO: 227634 - DNA, 795 bp, Homo sapiens
ggctgaaaggaacactcctgtcggcctgaggtcaagtcagggctgttgctggcccagctgcagtctcccttgcagccagaacccacaaactgccttaacatgcctaccttcattccttccaagacatttacctgaaactccccaagaacacaacacaacagactagacacagggcagctgccagctatcaaacgcccttgctcgtgggaacagacatccgcagtggtgttcattgtggagagatgtacagaagagccctgatgcacctgcccatgggaggcccttgctagttaaggtgactgagctccaggaggtgagggcaatgcgctacgggtccaaatctttagcatgtagcacagtgctgagcacataattagaaaccccaacacctaggtaacaaacaagccccaagtgtacaaaagcctgcctgctccaaacccccgggcccacggggagggctgaatccaggaaccattaatagctgcggtctatggagagcctgctgtcttgtgccaggtgccctatcaactctgcagcacatgaccctctgaatcctttcccaggtcctatgaaggtgttactatcacattttgcagaggaagagaatggagattcaaaagattaaaagctggccccaggtcacccagcttctaagtggtagaacctggacttgaaggcagctgaccccaaagcagggcttccagtgtggggtgctgcactgtgcctgcaagggagagctactctccaccaggaagagggggcatggcattcccaactctcccagcgagctctctc

SEQ ID NO: 227635 - DNA, 624 bp, Homo sapiens
gataagatgccagatttctagatcaagcataaagctgtggagtgggacaataggacttaataattttaatacacttcccacgtgaactgtcaagtaataagctacatattcagacgtgactggcattgagtcatcctgccattagtcaaatgtatgagacttttcccaagtcccagcaacaccaaatttgagaaatcgtataaaagaaaaatgaaaaagtaaatacgtctaagaaatggggaaatcaataaaaaatgtactagcaccaggggcggtggctcacgcctgtaatcccagcactttgggaggccgaggcaggtggatcacctgaggtcaggagtttgagaccagcctatccaacatagtgaaacccttctctactaaaaatacaaaaattaggtcggtgtgagggtgcacgcctgtaatcccagctgaactcaagaggctggggcaagagaattgcttgaacccaggaggtggaggttgcagtgagttgaggtggaggtgcaccactgcactccagcctgggcgacagagtgagactccatctccaaaaccgtgttagcttttatcaggaaaggccattaaattttcttcaatattacctacatcaatttgacatca

SEQ ID NO: 227636 - DNA, 385 bp, Homo sapiens
gataagatgccagatttctagatcaagcataaagctgtggagtgggacaataggacttaataattttaatacacttcccacgtgaactgtcaagtaataagctacatattcagacgtgactggcattgagtcatcctgccattagtcaaatgtatgagacttttcccaagtcccagcaacaccaaatttgagaaatcgtataaaagaaaaatgaaaaagtaaatacgtctaagaaatgggattacaggcacctgccactgcaccctgccagtttttcttttcttttctttttttgagccagggtctcactctgtcacccaggctggagtgcagtggtgtgatctcggctcaacctcctgggctcaagagattctcccaggtcagc

SEQ ID NO: 227637 - DNA, 825 bp, Homo sapiens
gcaaaatagaattatggtcaattgcaattataataacttctatgcattaagtatcttctactacatattagctctttatatatgtcttatataatgtaattttaactaatatcttaagaagtctaggtagtatttatacccatttgcccaaatctggaaacggagtttccaaaaaattaaataaattccttaaaactgcccagctagagtccatttcacatctgtcaggctctactaagctgcttgtcagtctttgacttcctcattatcagagatagatatggtattgataatgtacaaattgtttatttggcccagaaatgtgtttgtgcttttaaatttgaactaattgtctttggcagtttgaaatgtacaatacttgatggaaaataataaaactccactccaattagaataactacctgatttcttgattatagcttctttaatgacggcccattttatattatacacggtttcatatttttcttatatttaacaaacacatatacaacactactgtgtgtaaggcactgttctaagtagttacaaacatgaattcatgtaatcctcaccagtatacttatgaggtaggcattattttatccccattttacaaataagataaatgaggcacagagaggttaagtaacttgctcaaaatcacacagctagaacatggcggagctgagatataaacccagtcagtttggctgcagagtgctcttaactgtatgtatttttcagatgtttcagaatttggtgaaagcaataattgttctaatcctattgctggatttaaaagtaggaaagggtaaatagaga

SEQ ID NO: 227638 - DNA, 224 bp, Homo sapiens
ttgatgctttcttcaattcgcttttgttaacattttactctgtgattaattcaataaatgctatgtctccaaaagtagttgacatataacccactttacatacattccaaaattgcgagtagtgagtttaatgttctactgacaaaagcatttattacacttaagaacttctgtattatgtccttcagtcactgacattagttttgttttttctctttgctctg

SEQ ID NO: 227639 - DNA, 296 bp, Homo sapiens
tgctttactgcagttagggagaactgattgtcatgttgtaccctaaatatcaactaaagtgtctatgacaaaattagtgcagttagatcagcattatcccactctgtatgtttgaatttctctctctgacctgcacagctacttcagaagcccttctgaatgaagctttatgtttgcaattcatataagtacaatacagctggctatagcttactgttttagctgaatgtgataaattattcacagaattaaagtttaactttgtgataacaagtatataaattatatataactga

SEQ ID NO: 227640 - DNA, 313 bp, Homo sapiens
ctgccacccgggccgcccatggcgcctctgccacccaggtcacatgtgcctcacactggcctggctcctgtacacatcacatgggcccctgtcatcaacagttattatgcatgtccctttttctaaagtaaggtattcataacagtttttccaaagttctttcctgccagatagaaattgtgcacagcacagcatcaagtaattcgttagatgcttgttaaatgaagtgggtaggtgaacaaagttaacgaatgccctgttatttttgtaggccacataattgtagtattttcaataaagatgtgacttaata

SEQ ID NO: 227641 - DNA, 282 bp, Homo sapiens
tgagtcttcaggtggtttctttttgtattcactctggggtgttaagtagaaatcggtgagagagatgctgaaatgtgcttatctcatcttggccagtaatagaagtctgccttgtatatattattgtatgtgtgtgtatatattaagttgtatatacacatattaaatatatatacatatattacattttatacacatacatttgtttcctcatgcaatttgtttcagcagaagtaaaaattaaagatataagtaaaagaatatttacagaagcattatttt

SEQ ID NO: 227642 - DNA, 311 bp, Homo sapiens
agtattgaggaactaagcactggggatcacctctctgtctgtatgcgtctggaaggttgcagtattgaggaactaagcactggggatcacctctctgaaaattactcttaaattaacattttatatggtaaatgtaaaaaataagagaccctaaaaagcttcagtttggtattgtgaaatatggattcaatatttgaccaaaaatcatgttgattttgttagacttattatgaaaaaaccaatttgggccaaaaaagggagaacccaagttttgatcctttgcccttaagggaaaattgggtttacatcca

SEQ ID NO: 227643 - DNA, 211 bp, Homo sapiens
aaagggcccaccaatcaccaggcttaaaagcactcagagagatctttggctttagctgctgagctaataagtaacagggagagtgctgggattgcatctggtttctcctcatggaggggttgttgatgagctctcttcactcatccaggaaaattcactaggcttgactatgctttatgacaaatgaataaacaaatctttcagtttatgc

SEQ ID NO: 227644 - DNA, 545 bp, Homo sapiens
aattaactagtatatgtgaactggtagggcttatttgcagataaggaattttagaggtttagccagaacatgtaagaactcagttgttttactatagaaggaatatatgcagtataataaaaatttgatttcaaaagtttattcaaatcaaaacaaaaatttggtgtatctgtgtttcatgaaatcattagttagaagacttagggcaatgacctttctaagtcgcattcactgatattatagaagaagtgattgagattgcaaaaaggatgtctttttgtattcttaaccactgtcaacttacagtgtcttaaaggaatctatagtgcactctggaaatttaaaatttttgttttaatgcagtagaaacttaaaagatttaatgatctccttccttgtatcaaggaccattttgaattggctcaattcacttaatcctggaaggttcccaaaactatattttcttaccaacattgtaagatattagatacagtgattattaaacctcatcaaaaaagaaaaatgttgctaacttattcaaggac

SEQ ID NO: 227645 - DNA, 507 bp, Homo sapiens
ccaacatgcataggttaaatgctgagaattttattttagggaaaagatgataaaaataatctgtacgtggggaatattttaacacacaatgattcttaagtataattaccattgcaatacaaaatctagctacgctggtaagaattccaaggtaaagaagcataaaggtttaaaaaggggtatatttagaaatggattttataacacaatctagaatgcttatttcttaatttactaaaatagtttttagtattgtgtttctgaagccagattacatctataatacattgatcatgttttccatatttttgtggtagtgcctatgctgaattagcttcaccagcagtagaatatttgtaatagatttaatttaagaatactttaaagttaaatgaacaaaataaatactaatattggatggctatagatgaaacagatttaacaggaaattaagagagcagcattaaaaagcaaccactctgaataaaataaccatttataaacaaa

SEQ ID NO: 227646 - DNA, 521 bp, Homo sapiens
ttagaccaatatgtaccaagaactcattgattcttacgggagtaggttattaccagacagacaagtgaaattcagtaggcagaatgataataaatgtcatttattaaatattaaaaagacaaataccttccctattttagaaataaggtaggcaaaggaactgaggagtggaagttgaaggccagctctgggtgctttgtgaacagagcccagttgacagtgggaagatctgtgctctatgctaaggacatgctctgtaatgacaatccactcggttgcactaagaatttaagagcatttatatgaatatatacaatttaaggaaagataaagagaaaaatttgctatcaactctgtgtagatttggaaaatggtgtcaaaggaacagtttcacctgcatttctttgtctagaaagttttattttattaaaaaatgtagtctacaaacgagcctcaatttttggcaataaactcaaaaatgctacacaaaccatcacagaattcggtttgtccttgcagga

SEQ ID NO: 227647 - DNA, 384 bp, Homo sapiens
cccctttcccctctcatctcttgatggtggccgctgtgggtcaaacccagcaggaagccagagggtttccatgtaccttggcctccaggggcacagatggggtgaagaaggttggagagggtggaggggcaagtggaagacccctagcactttccataacttcatatttctaaacaaatgctttgagtctttcctcaaggtaaggaaattctgccttcctgtcagcttcaggagggcccttatctctgtggttaccaatgtggctccagggccccctgcgaagtacactttaagaaggggtagtctgggaggccagggcgggcggatcacgaggtcaggagatcgagaccatcctggctaacacggtgaaaccccgtctctaat

SEQ ID NO: 227648 - DNA, 518 bp, Homo sapiens
tcccacagggctcatgatgtctgtcacactgctttctcaagagtttcattagaaaactaacagtcctgttaacatactaccttttcagccctcccactcccaccaccaagctaggtgaagaagctgcgaacagtagtcaccatattcaatagtattatagctgtgaaacggccagaaaacaaaaccaatgccaaagaaaacagagctgacggagggcgggagggagacgggttcctgatgacatggtttaaggacctgaatcctgctgtacctgaagccatgctatctcagaacatcctagtgacaacaaacttccttttttcataaaccagtttgtgttaggtttctgtcacttgcaactgaaagagacctaacggatgtgcagattgctgttttgcctttttttctttgttttctttctttctttttattgattgttaatttatttccctgctgaaatctatgtgtggaaaatttacaaaacaaccttaaagaaaaaataattccaccaccaagaa

SEQ ID NO: 227649 - DNA, 334 bp, Homo sapiens
attttcctgagctcattaagcatctttatgacaatagttttgaattccttgtcaggtaattaatatagccccttttctttagggttggtttctgaaaatttattttgtacctctgattggactatttttctctgattctttgtgctcctctaattttgtgctaatatccacacattaaaaacaacaacaacaacaacaaaattacctctccagtctctaaggactggcttcatacagagaaagagaccttcattaatcagcctggctagagatgctggaggcctctcaaaccttttctatggaagtgtcttctctggacttatgcagtcgacgc

SEQ ID NO: 227650 - DNA, 552 bp, Homo sapiens
tttcatttaggcttatgacaatcaaaaatgagagaatttaaattttttacaattaagctctggttttgagtagattgtgggttatcacaccgtgcatttttttaatgtacaccttactcaaacacaccctaaaatgcaggcttgcagtctgcgcattgtaaagcaggagcaccgcagatcaattgggggaaaaaatatttaaggttgtaaatttaattttgttctaggatattcattttcatttatggcacccgttgtgtttgagaacatggacccatttatggattagttgtcaacccccagtctgtcacactcaatgaacaattctaagttggagagaatccatatgaagggattagaatgtgctccagtggagcttacacatgactgtttcaactaaatattgcccagctgcctctcctgcagtattatatttttttttttgctacttagttaaattgctagtgtctctaatttcacacattgtcagagctttttttattttgtaaatatactgccacaataaatgtatgtgatgtttcatttattcaa

SEQ ID NO: 227651 - DNA, 475 bp, Homo sapiens
ttttgctttgtggggtggtctcatctgggaggggctgctgtgcacacggggagagcttgctgggcagtgactgcctccggctcatccacagccctggcgtctgtgaagcctgtgtgctttcccctcaggaaagctgtggtggccttgttggggtctctcagaatcccaccttccctagactctacccacttctttgatggctgtgacacatgctgtctgttggagagatggacgcccagttatggtccttccatgatttcagtagtggcttagggcaggaggaaggtggactgagaggtgggagttagtcgtctgtcccaaactcaagggagcactgcgattataaatggtgtttctcgacagagggccttgtccccagataaagaatacttagggtcacctggacaggagcagtgtgtgcacccacgggtgtgtctgtctctgtgtgagtgcatgcgtgtatactgtgcatgta

SEQ ID NO: 227652 - DNA, 365 bp, Homo sapiens
atgggggcttcttttattccccagagagttggtttaccagcaaagagctgcccccaacagtgtcttttctggctcccatggaccccggttgacactgcccctggaccgttagatcaatcatgctgggccatgtccacatgtctacatgtctacactgcccaacctaacatcgtctccacaccttcccatacttctgccttgacttccctaggtgccatctatactgagtctcccagagtctctacaccgacccctgatccctgatattatttacattgtatttattatttattatttattattatatttttatatattatatattatataaaatatataaattatatattatatattaacatata

SEQ ID NO: 227653 - DNA, 376 bp, Homo sapiens
acacaagaacttccaaacgcctgaactgtagcagccagacgtttctccagaacctcctcccccaggaacttgctacacatgccggaaatctggccactgggccaaggaacgcccgcagcccgggattcctcctaagccgcgtcccatctgtgtgggaccccactgaaaatcggactgttcaactcacctggcagccactcccagagctcctggaactctggcccaaggttctctgactgactccttcttggcttactggctgaagactgacgctgcctgatcgcctcagaagccccgcagaccatcatggacgccgagctttagcccgcctgcacccaggtgaaataaacagccttgttgctcacacaaagcctgt

SEQ ID NO: 227654 - DNA, 630 bp, Homo sapiens
gcctcagagcctttgccaggcctggagaactgcataggtgcaggactgccagtagttcttcctgctctttgatcattgaaatgttttcttttgtgaagtaatgatggtagaagatgatagggtttctgtttgtttctaattctagtctttacttggcattaagaaattgttagctgctagggttgattttgaaattgtgaagttggagagtccctcctggagctgtgggttggatggctgcagctctgtgactcagctgtgctgggtgcctccctttggggctcagttacctccttttaaggtgtccctagggtgagagagatgatcacgatagtcccttccacctgggcggcccaggctttcctcgcccatttagtgcctttcatgtagaatttccacctgttgtctgctgtgctgccactgcttgtcctccctccctgccacacagagctgtgttctctgcctgccactcacgcctacttctctgatcagggtttgtggaaccctccagcgtggtcaccattctggtacctgtggtaacacgctcagccttggtgtggcacattctaggtctaccgtttgtattcaccagcctgtgagcttgtgtacatgggacatgtatcttcgttt

SEQ ID NO: 227655 - DNA, 452 bp, Homo sapiens
ttaagcatcagaattctggagcagagaaccctagcacctgtccccatgaaaaactctggttctataaaatagttttcctaattttttaatgctcctaaatttcaagttagatatattgaatttacttctttgagagaatgttgaaaaagtgtttgataatttgggtttatgcagtcaataaataataaataatgtcatcattctatactgatgaataaactttgactaaatatttattgggaagcagagtagcattgtggctaagaccaaaggctatgaagttacactgcctgagcataaatcctggctccaccattcacactatgactttgggctgatgacctctccatctcagtttctctgtttgtaaaacaggaataaaaattgtataaaaatatagaaatatactcataggctgataggaataattaaataaaatatttaaaaatagt

SEQ ID NO: 227656 - DNA, 270 bp, Homo sapiens
tgaaattgtctgatttttcttctttagaacagccacctcaaactgtaaaccctaaacaaaaaggaagtcagctcattatctgagttattaactaagaggagatgaagttctctgtcaaactgggaaagaagccatctcaaggtaacaggctagttctaccaaatacttactcatcttacttgcagccatgatacaaataaatatttacggtttctccatagaatgtcacaaagataagtctcctgcacatattttgttttgtttttaatt

SEQ ID NO: 227657 - DNA, 603 bp, Homo sapiens
cagtatgagtgaagatgctaacactgaaaaacaagagcgggaggaatgtccacctcccagtttgcatgcacgtatccccaatcctggatgaaagatcagggccagaagaagcacgccacggtgacaacttcagggcccaacgaaatcctcctcttttcctttggccaagcaatcagaggcccgtctagctgctgttgagcccaggtggcgttaccattaacagttacatttttaaaaggtttgaaccaagcttagttgagctctgggaagtttagctctgacctcagcaaccccgggaaggaataagatctgcctgaataaaccagcggtctcaatcttttggtctcaagaccgctttccacttgtaaaattattgagagccccaagaacttttctttatgttggttacagctattaatattaaaacagaaatttaaaaattgctattttttaaaataataatgaataaaaataaaaatgtcaaatagcgcattttaattaaaaataactattttcaaaaaattagttaaaagaatggtgttactttaaaattttgcccatatctttaatgtcttgcttaatagaaggcatttggattttcat

SEQ ID NO: 227658 - DNA, 398 bp, Homo sapiens
acccacatgtaacaatttggatagtacaatttgaaaattcaattgtatttattattgtaataatgtaattatgtatataattattataaaacaatattactacataaaactattataataatttattgtcatagtaattatgttttaaaatctaattgagaataactcttataatgcattttgaaataggctttatctaaaataatgtaaatgctcagtttatctgtaggattgactaaatttgtaagcaatatctgtaactttttggtcttctacaatatgacagttggcaatgtagtgactgtgaaaatattgtgtcattaattttgacctcacacacaaatgttggctcattatctgtacaaattagttaataaagtcccaccaggtttaatcac

SEQ ID NO: 227659 - DNA, 573 bp, Homo sapiens
taataatggaataatctgttccttgttatatacaaagatgaggctatttgctatgataaatagtgcatataccttaaattatttttcttaaaatggaatatgtttaccctgattccattaatactaatttgctgaacatccctttgtaacgaagctacacttctcccatccctatggcagcacaccaaggttaatgtacctcagtagccacagatcaggaccaacctaagtggtccatatggaaattacctctatgactgtagcctcattagcattattctccttgacaaagctagccagctgtggacctcttatcattaatgccgctagatattgccatacaaattcttgccttatcaaagaaagtttacaattggtatttttactataatgtaacataaaacaatttgtaaagtaattttattcacaggtactcatgaaaaaaaatttcaaatatgaagtaacatgtttttctttagcagtaatacattcaaatcctatttctgttttctgttgtgtgatttaacttttaaaattaaaaaagcataggatttttagaatcccttcaattca

SEQ ID NO: 227660 - DNA, 674 bp, Homo sapiens
tacaatgcctggcagatagcatatgcttagaaaatactgtagaataaatgttgcagaaagttggtgctcagtacatgttttaaatcttgtatgtgtgattatatatatttggtctttgtaattcacggcataataactgatgaaatagtcactattacaattttttcatgtgttcagggaaggaggtcctttaatttgcttactaaggcttaatcttatggtgaagaggagaaataaaaattgtattgtataacaaattgaatacacttgaaaaattatcagccgtttgattagggaatgcatttttagttttcataacacatgaaaatctatatgctgtcaaggaaaggttattctaacatttaaggaattacacaaattctgttctttaacatgacagaataatagaaagagtcctctttgtaatgttagggcagctaagcgtgaccaacataactgagaagtttgttgccattattatcgttaaatctatcattatatctttgtgtaattaaatctttataaaagcaaatgagatgaggtatacttctaataattagtggtttagaataaatgaagaatttataaagtatattaatagtaagaggacacctgactaaaatctcaacagcaaagataactatgacctgaattaaagagaagaaaaaactaag

SEQ ID NO: 227661 - DNA, 486 bp, Homo sapiens
aggccatctggtttccattcccatgttttgagccaaatggcgttcttgcaaaccttaccagtcacctcttgactgctaaacacaaccatctgtactaggtccttgttatatgggttgagtcgtgtgctccaaaaagaaatgttgaagttctaacccgtagtacctcagaatgtgaccttatttgcagatgtagttagttaagatgaggtcatacttgagtatggtgggcccttaatccagtatgactgatgtccttataagagaacatgtaaagacgtggaaacacatggggagaagactcgtgtgaagggattggagttctgctggctgttacagccaaggaacacctggaatcaccagaagccaggaagaggcaatggaatctcctttcctagaggttttggagggaatgtggtcctgccaacaccttgatattggacttccagcttgcagaactctgagagaataaatttctgttgctttaag

SEQ ID NO: 227662 - DNA, 357 bp, Homo sapiens
atctatgagggagggaagccgtgattcaatctaggccatgatatatcagtttataaagcagagcagactaacagaccttgctattaaggaacgaagtggggttaggggttgtctgtgctgacagatggcacagccccgcagcacacttgctctccattttcttccctgtttggcaacaaatgctaagatgcttagcactgggcaaaagctatgctattaatcttgtcttttctcattgaggcttctcatctttccaaaagatgacatttctagaatcgtaagtgcaataaacttaaggtcatagagcacagctcttaaaaagacagtttcatgagctgtaaaaagtaatcatggttt

SEQ ID NO: 227663 - DNA, 692 bp, Homo sapiens
taaataaataatacttaggctttgccccagaacaagtgaatccaaacaactttgctggtggcggtgggggtcggggaaaggtgccctggcattagaacttttaagtttttagaatattctaatcataatagtttgagaatcactgcataagcaccaaaaaagcagggaatatatcttatgacccacatatagtgcttaatgcttaacaagcactcaataagtaggtgctgaattgattaattactacatgtcctggacagtatagccagggatagtcctagaccaacttgaaaagctaataacatttaactagttccatattcccaagagggtcatctctagtcattgttaagtactccctcaactttctctccttcccttatcccagatttgtgctatttcccaactgtccggtaattatcactaaatccatcacaagatgttaaccaccaagaattgtcttcacttccaagtctcattaaatttccccaaataggaatagaggttcaagaaggctctctagagacattggacacaggccctttcagaagaagaaccaaaattgtgactagataatcacacctcaaatagaacatcaaaagagaatactggcgtttgacagagaagtcacaggaaacgcctaagacacagaaggagtaggaagcaagcagtcaggcctgctgagatcacct

SEQ ID NO: 227664 - DNA, 261 bp, Homo sapiens
tagaaagttatttaagtggtactacactgcctttaatatgatcaagcttatgttcattgtaccctgctttataaagatatatttctctgatattttgtttcacttaatgatacacaattttattaattaatgttgatatcagttatgccaaactattgatacatatacaatttgcatactgtatacacttcatctgacttcattattctcatcaacatcaatatcagagatcatgctgaatacatggtatattctagggag

SEQ ID NO: 227665 - DNA, 461 bp, Homo sapiens
taggctacaaacctgtacaacatgttgctgtactgaattctgtaggcaattgtaacacaaatcattaggcaataggtattttctgactccattataattttaccagactacggctgtatatgtggcccattgctgaccaagaagtcattatgcgatacatgactgtacttctttatccattaatctgaatataacgacatcttttgaatcagtagtcacttacactatgacagggtacaagaattagtgggctcttctggccaggaacgggaggagaaattaagggcaaagtaccaactcctcacttccacagatcacagaggtggttaggggttgctagaaaacaatgaagcaagtttattctagattgtttacctggctctgcagcactgtggtgttgagcatgtcacctcttttgtattcatgacacccaaaagaagtaaaataaattccatcaaagt

SEQ ID NO: 227666 - DNA, 186 bp, Homo sapiens
acatgcagcagaagtccagccttgacctctgatatgtcactagatttattaaaaaaaaaaaaaaaagttttacagtggctcttttctaactttaataagcacataaaatccttggggctttggttaggatgaagattctcattcagtggatctgagatgggacctgagtataataactaggtgatg

SEQ ID NO: 227667 - DNA, 601 bp, Homo sapiens
gcagagacagggctgtgaagcttgggtactgctcacatttggataatgaagatatttttcattgtgttcattttaaatgtgaacattagaaaaaactctgagcatatagtcagaggaatagaagaacttgcttgatccttcacattagtggtatttagtgtttttatttaaaggcctcttagagtctgtccctctcttggcacaaaatttagccaaatattttctttcagaagatttacagatccttgaatccacttcagacttaaaagtgtatgaagatgatcataaagagttaatgatggctaacagctgtgatgaagccattagacatggcacctatagaaatgcacacgtttttttactactctacaacagtgggtaaggaacaatgcatgaggaaaagtagagaaaactgtgagggtaaatacgcatgacctcacgtcgtgttctttacataaactactgaatttcatcagtctgattacagtttagattttctaataccaacttatgttttcttttaaaatttttttatttttagcttagagactattctgttaattacttattttttagagacagggtctcgctctgttgccca

SEQ ID NO: 227668 - DNA, 1202 bp, Homo sapiens
ataggctatgaatcaggtttagcaggtcactttaatgagatccaagagaacttttatcccttccttgataccaggagttattgtcttatggcattatctcaattccccacaacatgatggaaggactcacggacactttgttagaaccaaagaaccaaggaaatccaagcagtgctgccatctctcactgctgaggggcttaacaatatgtacatgtggcaggggacgaggttattccacacagcctggaagctactaacattctggccagttccatgactgcctcaattctaaataattacatgtgtgctcagtcatgaagctgaattctccccttttcattcttggtagatactaccaaaagtctactgaaccttgtgttaaaattcttgcgattaacagatgcgcaaagaatcttactttggcagctgaataatacaaagctattcaatctcactgcctatgctataaatataagtttctagtgtaatgattattatatataacataattattcatcatatataaagcaacatacaggttttgggtagcatatgaataattaagcagcaagcagcttcccttctagatcaggaaaccaaacacaataaaacactaacaaatgaataccaagcaacactcaaacaaagaattgcatgctatacaagtaagaacatataaactcgtgtacacagtctcatgccttcctgtgcctccagcatccccttccttctcagctatcatttaccccacgttactctcagtgtttccttccctttctgccctactgctaagaagctcaaagctaaggtttctactcaatttcaataagaagtagcaattcagactttttgtcagttactgtacatttcctagcccctattacttgattattgctcctttataccattataatgtgtatgtgtgagaatatgtgtatcttttggttctaacctattattgaaaactgcttcaaatccttactggaaggagtctgggtttttgttttttaatgttgacaatactctctcattaattttaataattatctatctcaaaacctagattataaggacctagaaggatcttgcttgcttctaacaatcccccaaaagacttaacgctaggcacatggtaggcatccagctgatactggctgatacatattttcaaaagagattttaataaaaaaagaagaaggc

SEQ ID NO: 227669 - DNA, 341 bp, Homo sapiens
ctacaggcttgtgcaaccatgcctggctaatttttgtattttttgtagagacagggttttgccatgttggccaggctggtctcaaactcctgacctcaagtgatccacctgtctaggcctcccaaagtgctgggattacatgcgtgagccaccatgcccagcccacctgtgatattttgatacatgcatacaatgtgtagtgatcaaagcagggtaattaggatattaattatctcaagtgttataatttctttgtgttaggaaaattccacatcttgtgctatagctgttttcagttatatactggattattgaactatagtgaccctactgtgctgttg

SEQ ID NO: 227670 - DNA, 1563 bp, Homo sapiens
  misc_feature (1277)..(1277): n is a, c, g, or t
ggcagagggaaactggcagaaaaacacagggagctgtgtgtgcatataaggaatgcatgaaagaacacaaccctgactgaaacgtaggacactcagagagagaggcactgggtgctgctgctgaaaatgtggccgggtgccccagccaatcagacctcattagacctggtagaaagtaagtgatggaagcaaagctcttaaccaggagacatcgtggatgtgaagggtattgactttggaatcatacagatctttgattctggttggtcgaatcactagctatgtcaccttaagaaattaatttaacttcagtaaactttaagtgtctgatcttaaaatggggatcaaatgactgcccatctttcactcaggctcttgggtagattaaatgataaaatgctgtctagtgtgtatacctgccacatagtgggtacttagaaaattattaaaactccacacatttggataaaaagagagaaatatgggttctagtggattctggagtatcagttcaaataagtgcctgcaaggtagggcatcttgtagataactgccctatgccagcatacagaaaggggtctggacctaggatacagagtggcttcacaaaataacacattaaataagggctttgagtcagaatttctgcaaaggaactatgcaataaaccaagatagagaacacaggatatttgaacaagaagagaattaagttgcatttagatgcaatcaagtaaggccctaatctcttgaaatcatcagtcatgttacattggaatgtaattgctagttttaactgatggagattccttgcagcttaacataaatatctggatatatttgagagataagaagctgtgtttgcagttacagaattttgctctccttaggatgttgggcttcatgagatttcagagcagatagatcacctgcccagacaagggtggcaatccagtcagactccacctcagacaggaactgccatcacctgcatggagtatgggcagaaacactctgatctgaagaggcactgatggtttcctgacagtttggacaaggacaagccagtagccccagtgagtcaccaaatactgcaaaaagttttattaggcactgtctgaaaacttaaactaagcagagcaggcaggtctataaaatacaaaaggatattcatgattattgcaagaaagagcatgaagcagacacagacacaagtattctgggtcatttacagttagttctctaggactgagaagctgcatctctctactacaactntattaaaaggctgaaaatataaatggatttctgggtcttgcattcaccctagatctcttatcgagctattttaaaaatggaagctaacctccactgcagaaagagttcacacagttagaattaatacagtggcagaaagttctaatagtaacacctttagaaattaattgagtatgctgatttcctcatcattttgaaaactggaattaatactatcacgactatagggtgcagattttatggaaaaaaggttttattcctgggaaaagtaattcaattgcttatg

SEQ ID NO: 227671 - DNA, 501 bp, Homo sapiens
cagtgatgacatcaggtgaagatgaagaaaaataaaacaaggtgaaaaagaataagcaggagtagagtgagaagatatttagaaaccatggttagcaatgtccttctaaatgtgcctggtgtgtaataatacttcagaagataatgatttctttccccgtcacattctttagtcccaaaacacaagggcattttaatttatgaaatctcctgtggggaactaggagctccctgaccttcaggagttgtgattatattcccaagatatagctgaaaaattggcacttagtagatatttaataagtatttgttaaataaatgaatagatgaatacaagtcttcgaaaacagaatagtctgcacctaggctagtttacgaaaagactgagatgcttgaggacattctatgtccttttaaacttcatactttcagtgtctatcatgttgcttaccacatagcggtctccaaataagtgtttataaaactcaactgaatgaattcc

SEQ ID NO: 227672 - DNA, 432 bp, Homo sapiens
caggctgctgggatagtcaaggcagcagcctgcccttcagactcacagcaaccaactcagtgcctgccggggcaactggcagcagacgctcccaggaaccctgaggaggtgaggaccgtcagggcagagcactcaggaaactcacaaaacatggatttaggctcagactcgtgagaaaggagggacggcgaggtgtctgcgaatgtgagcagaggcgtggctatctcccggctgctgggagcagagggcaggaccaagcaggggctggggacctggaagggccggcggagcgcactgcaaggcccctgtactcccacaggccatgaggaggagggcgaactgacgatgagacaaacgtggtggccgcctgcaggacccccaaggaggcccctgcagtgtctgcaaaaggacagccagcgattcctgcaccaa

SEQ ID NO: 227673 - DNA, 432 bp, Homo sapiens
gaatccatttgtttggacatttattcaacaaatatttatcaatcaccaatgttccaggcactggggatacattagagaagacttctctcctggggctaaccttcctgtatagcgtgtaaggcgaggacagaaagcaagtagactaggcacagtggctcacgccggtaatccctgcacttcaagaggccgaggcagttagatttcttgagcccaggagttcgagaccagcctgggcaacatagtgaaaccccagctctaccaaaaatacaaaaaacaaaaaaaattagcggggcatagtggcacacacctacagtcccagctactcaggaggctgaggtaggagggtcacctgagcctggggagattgaggctgcagtgacctgtgattgagccacagcactccagcctgggtgacagagcaagactctgtca

SEQ ID NO: 227674 - DNA, 188 bp, Homo sapiens
taaacaggtgtgacaggtgggtggattttaaaatggtgtgacagttgtttccaaggctgggcgtgggtggatcaatagcagtgaccactagggggcaacttgcatgggaagccctaggtggtgaaaaataaatcgtaccaactagcatgatgtttatcatttcctgtcctggcagacacactccaaag

SEQ ID NO: 227675 - DNA, 421 bp, Homo sapiens
gaaggcgcctacgcctgggaatgcccagatgcccctcagagagttgaagatggcgtttctctgagtcaggtcaaagttaacacattaccttcgcttcaaagactgcttggcttcctttcggtggattagtcaagatgttttgctgactgagactaggaaatctataggagggcgggttagtttacattgttccttgtcattatcgctaaaacactccaaagccttccttaaaaatgcgcactgggctaaaaaggatagacaaggaacacatcctgggccggtaattacgcaaagcattatctcctcttacctccttgcagatttttttttctctttcagtacgtgtcctaagatttctgtgccacccttggagttcactcacctaaacctgaaactaataaagcttggttcttttctccga

SEQ ID NO: 227676 - DNA, 505 bp, Homo sapiens
tctcctgctgccacagtctctcatcctgctcccaaagcctctcctgttccagcagctcctccaccttgtccagcagcctctccctctccagcagcctctcctgctcctcttgccacctctcctgttctaacagcttcgccacctcttccagcagcctctcctaccctggcagcttttcctgttcacacagcctctcctcctattcacatagcctctcctcctgttcacatagcctctccttctgttcatgtagcctctcctcctgttcacgtagcctctcctcctgttcacgtagcctctccttctgtctcctgttcaggagactcaacatctgattgttttccacctcagcctggagctgtcttcccacactctccagctccttccttaggtggttggtctcatcttgtagctgctccacctcagagggccctgctgggggctctggggccaggggttcagctgagaaaggaagcagacaataagggcctctggactctcaaaa

SEQ ID NO: 227677 - DNA, 312 bp, Homo sapiens
tcagagtggggccagtggactcaggcaggccttgggtggtcaaccatcctggtttgcccacaagtgacaggtttctgggacacagaattttccatgctaaaaccaggacggtcccaggcaatctggacggccaccctagtggggctgatgctgaactctggttttcagttcaactactctctgtgtctcagtttcctcatctggaactcagagcttataacagtaccttgtgtatggttgctgggaggtgggggagagtgacattaaataatgtacttaaagtgcttagcatccggcacagcatgtcgataa

SEQ ID NO: 227678 - DNA, 191 bp, Homo sapiens
atcactttggtccaggcaataggtgtaaactataataagaatgagaaataaatgttatgaatagttgacaaaaaattaaaatatacctatactctggaggcagacatttattactttcgttgtgcatttggtttcagaacatatggcttcagcaaacacaacagcattgacaatgaagcctgagattggca

SEQ ID NO: 227679 - DNA, 455 bp, Homo sapiens
tccccagcccggcctcctggtcccccgggactccgggccagggtcagcagctcctggagactgaggtggggtctgtggagcttctgtggggagggacttggtgtccccagcaggactgggtatcccgagtcccgggctgcagctctgttgctggacagccttgagagaattgttcgagctttctgatttccccagcatcctccttagcaggctttagaacagggaaccaaaacccaggcacctctgggccagaaggtgaaaggatgagtaaggtggcctggtgctggctccggtgaactggagagaacaggctctcctcaggggacggtggcctctgagccagcaggcggcccggatcttcccatttagtaagagaagccagaagtctgagattgtatgtgaaaagtcctgatttttaaatgttggccaacgagtcaaattaaaaacaaataaac

SEQ ID NO: 227680 - DNA, 555 bp, Homo sapiens
caagaaacaaggttagaaagataaattaggatcagcacctcaaatgccatcctgtgaggcatttgaacttaatccgttcaaaatgtggggagtaagcacactgacatgtcaggatttgtttattaatactctgactttgatggcactatagaggatgagtagagagggaagaaggacacaggaagaggagcttattagctgatgtggctatagtgatggacagagaagagtccgggatattgcagcagaaaaaggaataaaacatagtaatccttgacttcaggagtgagagaaagggaggaattaaggatggctgagggaggcttataaggatgaattcagcctaagcaagtaaaaattccttttacaaaaatatacatgatgccacctaatctggattcacatgctatttcttcaagagctgcagaagaaaaaaaatcaattaaattttactctcccagcttcccaaccaaatggttcctaaatataagactcatctttcatgtttcacaaaacaaaatcatatgttaagaaataaaagtggaagaaattgct

SEQ ID NO: 227681 - DNA, 405 bp, Homo sapiens
ctattcataactaaggctttagacagagacttgacagattctccccacagcagcaccctatcctaaataaaacaagtgatggtttcccatatgttttacaaagcagcacacaagctgtctaattacaatatgtcttagtaggagaatttcaaacttaagacagagaaaatgcccccttttctagagtagagcaattccttagaatttctatgatctcatcatttactcaaagtaggcaaagacatatccctgcttcccagtaatatcccagggaagataaagcaaaggagtagaacctgatgtgttggaaacctattcataatgagtgggcaaggcaagagtagtggcatgtcaactcttgtgtgtcaatgtttcatgtgaatttattttgagttcggccaaact

SEQ ID NO: 227682 - DNA, 339 bp, Homo sapiens
aatgatattaaactacttcaaagacaagttaaaagtacaagtttccctccccctgctgagtttgctattagttttatgtctagggtgctataccctacaatattttgtttttactactgtttagttaataaaaagtcataggaggtcatcatacatgttaagctcaaatgaggtagacaggaataaatggtttcaaaagctgaggagtattacaatttttactttagaaatgattaatagacatgttcagcagctgaagataaatataggctcactaaaatccatcagttatatttgactcagccgggtgcagcggcacatgcctatagtcccagctac

SEQ ID NO: 227683 - DNA, 556 bp, Homo sapiens
cagaatcattaaaatctagttttctgtgcttaacttgcttccaccgattaactttccccaacttattatagtggtcctgaccttggtctattcataaaagaccatagcaaccactaaccggatgggttgctttttataggagcagcacagttttatctactagaggcattggcagatttggattacattgtaaataaatttatccaatgcaaacattcaccaatctgcattgcattgtaaatacattttcccaagtgattgttaagtgatggccttacaatcatgttggcataagaaaaacaaccagagagagattcagtagctttgtagtaagtgttgatgaaggaaatgggatttgtaaggtgacagtcagcttggattagatggatggaaggagagggccatttggtgagtcaaggaatcatcaaggaattgaatttgtgatagacattaagtgttggccatacctatgtaaatatctatgttagatgttaagtattcagctttttgcccgttccctgagctacacatagtcccaagaaggggtattatttat

SEQ ID NO: 227684 - DNA, 482 bp, Homo sapiens
atttctttataaatacagtttgtctgttcatagctataatagctgagtgactcccattagtatatctgtgtgttgatgcttgcaaagagaacatgtatggtattgttgcctattttactgtgtaaagtggcctataatgtgttcagtcatgtatttatatgtctctaaagtcttcttttaaaattgtaacaaatgtattttaaatatttttaaaactttattccacaattatatttttgaaattttggtctctcagaattgtgatttggggattttagaatttagggattttaggctggagctagtgaatcacacctataatctcagcactttgggaggccaaggcgggcagatcgcttgagcccgaaaggcagaggttgcagtgagtggagatcgtgccattgcactccagcctgcgcaacaagagtgaaactccatctcaaataaataaataaaataaagttttaaaaagtcaaaattaa

SEQ ID NO: 227685 - DNA, 415 bp, Homo sapiens
tgtaatcttcatttagttgcctataaaatagggatattaataatacctacctcctattattataaggattaaatgaggtaatgagtgtaaaatatatagaatattgtccacatatagtatgtgattaatatgtgcttgtgatggttcttttagttatttctctggtgcgctatataatcttattgattacatgacaagtggaattagaaatttctttcaaaatctactacacagatatataaatatgcttttaaaaatcaaaaaattagaaggagataaattttccaagggttaaagagtctagtggaaaaaacactggaatgggaattacacagactaaactctagtcccaattcttttgaccttgagcctgacatttaacttttttgatttcatggatattatataagaatat

SEQ ID NO: 227686 - DNA, 460 bp, Homo sapiens
actactggaaatgggagcttttagcattggagggcatcttaatggaaatgccctgtctggaaaactgtaagatggggtacaccccagttgcctggaatcctttaagtaatgactatctaaacagctctaggagatttaagccccaaaggccaaatgaagaactccccaaaaaacagtctggaagtcagaggagataatgtcctcaactacttggatggctttaccgatttttcaagagacatctatgtctccataaaagccaatgcagtgactaatcgctctcaagtgtctagagagttcctcactcactactgatgttactgctattatttaggattcgtgattcaccaaaccacagcctagagacttcagagggagcatgactctgccaatatcttgattctgaacttatagtcttcataactgtgagagattaaatgtctgtgttttaagccatatg

SEQ ID NO: 227687 - DNA, 496 bp, Homo sapiens
attgatttcaaagatagaagtattgagagctaagactcaaatctgacttatgctacagaatctccaaaaggctaataattggtggtaccaggtgaagtagggggaaatgctaaaaataagggaatgtggctgaaagtcagattaagacgcagtcagatccctatttccctttctcctactccagcaaatgaatagaggtttattctctggaaatggttgaaccagacaaccaggggattccaggcctcgctgaaagaaagggtaacgtactgaaaactgaggaattaaggaaacatgcatgcagaatgctgagaaccctgcctcttcaacccttttgctctaccactctgttcccagtatgcagcttgttattcagctagaagattgaaaaggttttttctaggcaatcagatcagcccaaaaggaaagatcttaagatatttcactagatatttcccaactaatgaactacccagcaagatcactcaatagtgaa

SEQ ID NO: 227688 - DNA, 387 bp, Homo sapiens
tgaaaattatatgggaaatcttcagtaaaattctgcatatgcaagaaatcaatacttgtcactatgtctgtgaagtttaaagctcaggattggcgtgaaaatggtaactcttcattcttgtccacctttaacacacttgcttaaaaatgtgtcagataggccaggtgcagtggatcacacctgtaatcccagcactttgctttgggaggccaaggcaggcagatcgcttgagcccaggagtttgagaccagcctggacaacatggaaaccccatctttacaaaaaaatacaaaaattaaccaggcatggtggcacgtgcctgtagtcccagctactcaggaggccaaaacgtgagaattgcttgagactgtctcagaaaaaaaaaaa

SEQ ID NO: 227689 - DNA, 158 bp, Homo sapiens
aaataaaaataaaaaaaataaaaaagaaaaagaaaaaagatactaatggtaattagtatgtggatagcatcatatctctgtaatcaaatgaggttgaggtaattctggcttttcatcaaagaacaagattttctacattctgtcattttgttgctacc

SEQ ID NO: 227690 - DNA, 404 bp, Homo sapiens
acccctggcagcggacagcccctcctaccctgtgccattgtctggctgggtgactgtgacttcgaatgtcacgattgacgtcaccctgacattcctgccattcccagagtggtccgggaattgggatggaggcaggcacacacttccagggcaacagcatgctcttaggggacagagcaaggaagcatttctgactgtggtcactctcacatccttggacctcagcatcccccagctcagttttggggcactgtataatacctccctggtgataattatgtcacagggtcaggaaattaaaggggtgggtgaatatgtcaccctcttcaaggagaaggccagagaaatgcttgtagacctcaagtgagcagtgatccatagaggcccttgagtccagcatgtgg

SEQ ID NO: 227691 - DNA, 466 bp, Homo sapiens
ttttttttggagagtctcacttcatcacccaggttggaatgcagtggtgcaatcttggctgtgcagctgaccttcctaacatggcaactggtattcaaacatacagacatccagggagctggcattgggacagaatgaaggcagcaagggccagggggcaggtgaggatgagcagtaaatgtccttcacaggtgctggggtgccttcccaggtagggcagcctccatgtgcggagaataaaggatacagacagaacccttctggaaggagatcggctgtgcccagctcccagtgtgacactgagctgctctctaaacttttctgagcctcttttctctttcatgaaacagggagttgggctagaaaatttctttccagctctaaaaatactgtctaaaaaagcagaagaggggcaggcttgaaggcctcgtcctctgggctgtgtgggtctgaggctctggggagc

SEQ ID NO: 227692 - DNA, 539 bp, Homo sapiens
cgcttgaacccagggggcagaggttgcagtgagccgagatcgcgccactgcactccagcctgggcgacaagagcaaaactccaactcaaaaaaaaaaaaaaaggcatttctttacactcttacactcttggctgtgcagctgaccttcctaacatggcaactggtattcaaacatacagacatccagggagctggcattgggacagaatgaaggcagcaagggccagggggcaggtgaggatgagcagtaaatgtccttcacaggtgctggggtgccttcccaggtagggcagcctccatgtgcggagaataaaggatacagacagaacccttctggaaggagatcggctgtgcccagctcccagtgtgacactgagctgctctctaaacttttctgagcctcttttctctttcatgaaacagggagttgggctagaaaatttctttccagctctaaaaatactgtctaaaaaagcagaagaggggcaggcttgaaggcctcgtcctctgggctgtgtgggtctgaggctctggggagc

SEQ ID NO: 227693 - DNA, 388 bp, Homo sapiens
agagaacaccaaacaggtttgacccaaataagactaccctaaggcacatgctaatcaaactcttaaaagtcaaggacaaagagaggaccctaaaagcagtaagagaaaagaagcaaataacatacaaaagaagctccaatttgtctgacaacagacttctgagtggaaaccactcaggtcatgggggaggaggacaacatgttcaaagtgctgaaaaaaaaacaaaccctgccacccaagaatatggcatccagcaaagctaccctttgaataggaaaaagagataaagtctttctcagataaacaaaagctgagagaattaccaccaccagacccatcttacaagaaatgctaagagaagttagttaatctgaaaaaaaaaaacacc

SEQ ID NO: 227694 - DNA, 203 bp, Homo sapiens
aatatatccggccggatatatttatatccggccggaccacttctgtccaatattcatgagcagtcacttcaatagctgtattgggcctacatcctctcttcctcccctacctaagagcacgtatcttcttaaggaaggtcctgtcttggtccaacccaatatggagccaaactttcccaaggaaacatctcaaggcaacttta

SEQ ID NO: 227695 - DNA, 1066 bp, Homo sapiens
gcaaattagttctttgacttgcaattattttgaatagaaaactaaaattcctctttcagaagtgaggatttatttaatttgaacaacagaaactattcggttctttaagaagagtgatgtgttgtgacacgcatggaggtggtgacagcagtagggctcaaacaaagccttgggtcttagagctaggccgaagttacccaaaactgaggagtctgtccagctgatcaaacagctactgtatatgctatcctttaaagcaatatagatgaaaagcatgaatttttatattaatgtgccccatctatttaaatataattactgttatttttctcgatttataatttcatttgtgagagacatgtactcaattttagaagtcaagcatgttaacctctaaataaaagtataactatttctgacaaagcttatgatccacagagaatgcagtttaatgtttgattactgattaaggaaacagaaggaatacacattaaaagcagctgaataagtatattaatcatctatgaaaaatttcctctttggaaataagatgaactaaaaaaaataatagaaatatcataaaactttttagtgaagtacagcgtgtcctactgcagatgtttatactctttaaaacacctctttgtcacttagaatgtgtgatttccaaatttagttttagtttttttctttgaaacgagggtggaatttaatgaatcaaaatttaatctgatatctttgatgttttctttgagaacaacccaagtataagcttccaaggagaaaaatgaatcaggcagttaaatgagttcagtttgatttttattaacaagtgttttattttttatgtatgcgtcacttgtcatttcaacaagtgggtgtcaaagcaccacatggaccttgtttgaaaatgatcaaattaaggaacttgaggtagaaagacaaaagaagtgaacataaaattaagctaatcaatggattttgtgcaaatggttcccaacttcatattaaattcttaattagctgttgtcatagaataataggatggtaataaaatcaactgctg

SEQ ID NO: 227696 - DNA, 287 bp, Homo sapiens
aattgtctaaccaggaatttgaaacaactatgattaatgtgtgaagggttctaatggagaaaatagacagcatgcaagaacagataggcagtgtaaacgggaaaattaaaactctaagaaagaaaaaaatgctgaagattaaaataaaaaaaaatcaacattagcagacatgaggaatgcccttaatgggcttatttgaagactagacagttagaaaaaaacttccaagcttggggatatctctacagaaacctccagaactaaagaccaaatataagattgaatga

SEQ ID NO: 227697 - DNA, 358 bp, Homo sapiens
ctgcaatctccatgttgcagccaatgaatgtgcaccccaccatactgccactgctgttgacatgtgcaaacgagggtggatcacactgccaccactctacggagtatggtggctggcaccacccataggagtgttgtgaccagcggtccaggaagaattcggcctctccagtgtggcaagttcctaacattcaggggccacatatcaaagcctggcccaatacgactccccagaattagagcatgcacttcaggagtccttagctgagtcttggccccctaaaatcctccagaaatgaagccaatcgactgtactcaccttatactacaaccaaacctccaaggacaccaaacaggat

SEQ ID NO: 227698 - DNA, 427 bp, Homo sapiens
tcaagcaattctcctgcctcagcctcctgagtagctgggattacaggcgcccgtcaccacgcctggtaatttttttgtatttttagtagagaaggggtttcaccatgttggccaggctggttgcaaactcctgacttcaaatgatccactcacctaggcctcccaaagtcttaggattacaggcatgagccaccgcgcccggccagaatctaccttttaatcaattggtcaataaacattatgccacaccaatacttggtgtgactgtcatgggctgaatcccaagctgcagagtttttttgagtgatcccacttcatatttgttctaaataattttccatatcttcataaagattccctcatcaactaccttgacaaaatatccattattatgtcagtaattctatcattagccttatcgtaattt

SEQ ID NO: 227699 - DNA, 390 bp, Homo sapiens
aaatgcactttatacaccttagctggccttgaaggttagttaagctccctgttttacaatcttaccaatttaacactgctatcctgtcctccctctggggtgacaggtggctaaaaccacatttagattttcctctgaggggaaatttctctctccttgacggtctcactgttctgtgtctcacagcctactaggaacctgcagggagctccccttgggagtgtctcttctctgcctacctgctttcatctactctggggtcagaatattctctttctttaagaattcattccctggtggaaatgtaagcatgctagaatttattctgggctcttacagcattgtttcagtttttgctttagacattattaaaagtgacttttaaaaaca

SEQ ID NO: 227700 - DNA, 927 bp, Homo sapiens
ctcctataaactgtatattgtgtatatatgtcacattttttttgtccattcaactcttaatagacacttaggttgattctgtatcttggctattgtgaatagtgctgttataaatgtgggagtacagacatttctttgacattctgttttcctttcttttgaatatgtatacccggtagtgtgattgttggatcatataatagttctatttttagttttttggggaacctctatactctttttcataatggctgtactaatttatattcttaccaacagtgtataagaattctccttctctgcatccttgcatccttattttgtctttttgataacagccgttctaactggcatgaaataatatcacattataatttgtttgcattttcctgatggttagtaatgttgagcattttttaatatacctgctggccttttatatgtcttcttttgagagatgtctattcagtttatttgcccatttttgatcagattatttgggtttttgctgttgagctctttatatattctggatattaatctcttactggataaataatttgcaaatattttctcccattctgcagattatctctttactcttttgttttcttttctgtgcagaaactttatttacttttttagtggctttttttttctttcagatctgggaatacatatacaggtttgttatttaggtaataacttgtgccatgggggtttgttgtacaaattatttcatcacctaggtactaagcctagtacccaatagttattttttttttactcatctcccttctcccaacctaccctagtagtcccctttgtacacctacctaatacagggcatgtatgccctgtattagccaggtgcacaaggaacaatggaattcggggagcaggggagaggaacattgtaatcagaag

SEQ ID NO: 227701 - DNA, 397 bp, Homo sapiens
gaacaggttttcaacgctgatgagaatggcttgttgaaacatggacagtagcaaaataacttagatagcattttggttgatgaaaattttgtgactggaggcttctaggaatctaaccttgtatttcccctaagaacaacacttcagagttctagtttataaaacataacctccaagaataacaagaatcaaccctatgtatttaattacgattttgttttctatgaaattgaattcctttgctacattgtatcagtgagtaatcttctttgtaactattagatatttccctgaacaatgcaattaattgtgtgcaactctttcttcttccacgtataaaaattttaaaatggacaattttagaactctctgtataaaaaattaaaataagtagact

SEQ ID NO: 227702 - DNA, 150 bp, Homo sapiens
tgatactttttctttttcatacttttctgcatttttctttctttttttattcgttttggttattttcttttttccctttctctctttccttccttccctcccttcctttccttccctcccttcccttcccttcccttcccttcccttccc

SEQ ID NO: 227703 - DNA, 481 bp, Homo sapiens
aatattaaatgtaattgactctacgaggtaaaactgagttttatgttcccctatttcctatttatgcaatagatttaaaaagtatttttacgactaattatacaattcaaaaattgcctgtgttgaaaagcatgaaagtacatgaaattgtactaccctggaaaccccaggaagtgtttagtttggaaagccagggccacctgctagtgggtgagtcatgggcacaggctcgcacctgccaccgcagacgccacacaggctgctgagcctttccaagcgaaatgccccacgtgcgccaacggccacctcggccgtcgccccacgcttggcccgcagccagaggaagcccagcaacttctgctctttcttaatttctagaaaagagtgaagagaggccttttcaaagttcgcaggatcgggcctttttgtgctccactttggaacaaatcggaagctagggccttccaggtgcgccaccgcc

SEQ ID NO: 227704 - DNA, 455 bp, Homo sapiens
tcttgcagacatgtcactctatcataattcatttcaacattaataatcctacccacacatcctcctcctgtggccggggagtcatctcgcttatcctgtaatgtgcctttaattgcccctgggcagaagtgaactataaacagtctgtcaaagctttaactgggatatcctgttaaagcactttaaataaatattgccatcttttgtagaaaacagaagaaataaaaagaaacaagaccatgtccacaggtggttttctgtcagaattagatgatcttcacattttcatttagaacatgaatagttttttcatcaagctgaacaaaaacggttcttattattatattcatacagcaacttcacccagtatctgctggcttcaaaagccttggcaaattatgtgttttacaatttgctgacctaataagaaacttgtataaactaaaaaaaaaaaa

SEQ ID NO: 227705 - DNA, 445 bp, Homo sapiens
atgagaaagctgtagtcacgtagcatccccagctgagggtgaggcagaggtgggcaggagagtgctggagcctggctggctcattgactgtccttctcctcatgccacatccaacgtggctggcaaacaagactgcctttcaatgaggagcagaagctgcaggttcgtaggtgtccaggtgcctgagtggccaacacgcccaagcaaagaaagtaagcttgtgcttttatggacactaggtaaacgccttcagtttaaattttttgctaaatattttagcttattttattgttatcttccaggtgtctaaatctccagtctgtctgttgtactggtaatttaactctgtaatggaatggtttgctgccaactatttatattaaataattttaaaatatttgtaatattattgactaacaaactattaagttattggcaaaaaaaa

SEQ ID NO: 227706 - DNA, 326 bp, Homo sapiens
atgttctgtgtgcttgctttggcttctccttttaaagaatcacctaataattctttaagtctctcgaattgccgatttgtccttctgtcagataaaatgcatgaagtaagctgatgattctgaataggaacagaatacgttcttggttgatttaaagtataatttagagtttttcattttgcttagagctaatatacagtgcgatgcctgaggtccattgtaaaatcttgctatgtaacctaatcattgttgacaggagaaatttgtctacaatcattttaatctgttgcataataaatatttagagagtctcttattcacttcca

SEQ ID NO: 227707 - DNA, 570 bp, Homo sapiens
cacgaggtcaggagattgagaccatcctggctaacacggtgaaaccctgtctctactaaaaatacaaaaaattagccgggcatggtgggcacctgtagtcccagctactcaggaggctgaggcaggagaatggtgtgaacccgggaggtggagcttgcaatgagcagagatcgcaccactgcactccagcctgggcgacagagcgacactctgtctcaaaaaaaaaaaaaaaaatggccgaataggaagagctccagtctgcagctcccagcaagaccaacacagaaggtgggtgatttctgcatttccaactaaggtacccagttcatctcattgggactaattaggcagtggttgcagcccacagagggtgagcagaagcagggtggggtatcacctcacctgggaggtgcaaggagctgggggacctccttcccccagccaagggaagccatgagggactgtgctatctggcccagataccatgattttcctatggtttttgcaatccgcagatcaggagattccgtcgtgtgcctacaccaccagggccttgggtttcaaacacaa

SEQ ID NO: 227708 - DNA, 500 bp, Homo sapiens
ccgactctatggactattcctttgaatgtattggtaatgtgaaggtcatgagagcagcacttgaggcgtgtcacaagggctggggcatcagcgtggtggctagagtagccgcttcaggtgaagaaactgccactcgtccattccagctggtaacaggtcacacatagaaaggcactgcctttggaggatggaagaatgtagaaagtgtcccaaagttggtgtctgaatatatgtccaaaaagataaaagttgatgaatttgtgactcacaatctgtcttttgaggaaatcaacaaagcctttgaactgatgcattctggaaagagcattcgaactgttgtaaagatttaattgaaaagagaaaaataaagtccatcctgtcgtgatgcgatgggagcagcttaacaggcagggagaagcgcctccaacctcacagcctcgtagagcttcacagctactccagagaatagtgttatgtgtgtaattcatgaatctctataa

SEQ ID NO: 227709 - DNA, 200 bp, Homo sapiens
ggtagagaggaggtctcactatgtttcccaggctggtctcaaactcctggcttcaagggctcctcctgccttggcctcccaaagtgctgggattaggggcatgagccactgtgcccagttgtcttttatttttgaataggaaaaggtgggagaggaggggagagataaattttttttttttttttacatattactttctc

SEQ ID NO: 227710 - DNA, 426 bp, Homo sapiens
gagctcgcctgcagtcaggatcctgaaaaggccacaggcttctccaccgcagggcttgctgcatgtgcctctccacaccaggcatgagggaacatggctggactgtgcagtgtttctcaaactgatctaaaaacagaacccttggccaggcgccgtggcccacacctgtaatcccagcactttgggaggccaaggcgggtggatcacctgaggtcaggagttcgagaccagcctggccaacatggcgaaaccctgtctgtactcaaaatacaaaatttagtcaggtgtggtggtgcacacctgtaatcccagctacccgggaagctgaggcaggaaatcgcttgaacccaggaggcagaggtggcagtgagccgaggtcacaacactgaactcctgcctgggtgacagagtgagactcggtcttga

SEQ ID NO: 227711 - DNA, 446 bp, Homo sapiens
agattaatctgctgaaatgagatgctaaggatttgcatacagatttgactatacaaaaatagatatggaattaataacagtctctatatgttttaatttctcctagactggagtacccttgcctgcagcagtattcctggctttgaaagtcatcaagctgatttgtctgctctgggttacgatgccacatgctgctatactgtcccctgcaatcaaagcacttgcaaagatagattccatgccttcctctatcgagtatattttatagattggcagttttgatctccctcccccaccccagggaggataatctgcatcttaacagctttctatagatacatctgtcattaaatatgccatctcatatcagcatccatttttaaaaccaagttttctctaactttgaagtgccacagtgaaagtaaagacttttcagccaaaattga

SEQ ID NO: 227712 - DNA, 427 bp, Homo sapiens
gtggtaggagttagacgagatgacacatatgaatcacttggacaccatgttcagcaagtgggacctcctgacagcataagaagttcagagctcaaagactttaacctgtccaaacttcagcactaagggagaccgattatgctgtatgaccttgggaaaatcacctcacttctgggcctcagtttccacgcatgtaaaatggggataaagaaacaacccagctcctgggattgatatgaagactgcatgagatgatacgcaggacacccgtggcacaatgcagggcttgcagtaagagctcaataaataccacctgctatttgtctataagtgtgtttagcaacatctttgaatggaatcatattgtgcattactttttgtaactttttttcactcatttagtgtgatcattaaatatccttcgaga

SEQ ID NO: 227713 - DNA, 115 bp, Homo sapiens
attcagggttgaaaagtaccagaggggaaaaacagcaaatttctttaggctgaagaaagaatcagtgaacttgaagataggtgaattgagattgttcattcttaggaaagaaatt

SEQ ID NO: 227714 - DNA, 456 bp, Homo sapiens
gtcatcatctccctctgctgatttctcttcccagcctgactcagctgccctgagagatcaggaccaaggccaaggacggccagctgggctcctccctccccagagacgccaacccaaccctgccctgaggaatgtgcttctccttggcactggctggtctccagacctaaattcaaccctctttttagcaggctgaatgccaagcccaatctcagcgcccccaggaaggacctaggactgaggctgtgagctctcaacttgtttttttggggcaacaggccagggcagctagccagtgattttaggaaagacgaggtgaacctgtgctcagaggattttttcctcccagtgtttagtaactgtttggctgtgactcactaggaaaagctcatatcacattatttatggcttacacacagcccaaaagaaagtttaattaaacagacgaataagata

SEQ ID NO: 227715 - DNA, 585 bp, Homo sapiens
gctacgcaaagacagcaggagccgtgcctcgaaaaggctgagatgtctgagaaataaagttgtacgcggatttacgcctgggcaggttgaaatgcgtgtgccatgacagatccggaagcttgtctactcgaaggtccacatccagcacctaccgggaaagcgagaagaaagcaaagggcatcactccctacccacgaaagactcacaacatccctggaaaagcaacgaggcgaacggctggtctgcgttcagagctggtgaggagcagggagaagaatccagagcgtccccgcctccctccctcaccgccctcccgcactgatgtgaacacgggagtaacaccgcgcgtggggaatccactggcacccagagcccggcccgcggcagcagaatcacccaagactgagatcctgtggcctgagtcggggccggggaaaccaagcctgcaggactccgggagcagccggtttctgcacacaggtaacatagaactgggggtaagcaaagccacgaggtcggcccgtggcctgtctgcccgtggcctgtctgcgcacagctattaaaagttcaataaacgtggtggca

SEQ ID NO: 227716 - DNA, 401 bp, Homo sapiens
gaaggtcggcggctccgggccagctcgcactggccggggtggggcgggggccgttcctgctgcggaagccccgaaagctttcgcccggcccctcgccgccgccgcgggggctggctggactaggcgggcaggctcgaggatgcggatgaacccaagcgtcctcgagtgcccggaggctctccgcctcagtttcccgcccagaggcaagggcgtgcgaggggatccagatatccaaggacctgaggtttcggcctcgaggtcttgggcgggggactgggcaggctgcgcggggtcccagcgaggggacagctcgggtgggcggccagggtgttgggggctgcgggcggcggacaaagcggcggcaccaccccgcggcgcgggccaatggaatgaatgggcta

SEQ ID NO: 227717 - DNA, 535 bp, Homo sapiens
aaatacaaaaattagctgggcgtggtggcacacacctgtaatcccagttacttgggaggctgaggcacaagaatcgcttgaacccgggaggcggaggttgcagttagccaagatcgccctgctgcactccagcctgggcaacagagggagactctgtctccaaaaacaaaaacaaaaactgttagtgaaggttccctgggacttttgatattttaaaaattgttcttatgactagtagataaattcattgccataatgaggctagctcccagataaacagtgtattttcttcttttttttttttttttttggtgagtggtccagagctttaagctacttttccagtagtttgccactttctccgaggtagtttggctgctctttcagtaatgctaattgtgtgtcaaattttgtctacaacagtaggcaacagatgaagataagttggttgaatgtctccagcactatgcatccctattttctatttattgtgtacactcactttcagtaatgtgtttcaaactggtatttttta

SEQ ID NO: 227718 - DNA, 540 bp, Homo sapiens
catctctacaaaaataaaataattttaaaaagtatccaggcatgatggcacacgcctgtgttcccagctactcaggaggctgaggtgggaggatctcctgggcccaggaggttgaggttgcagtgaggtatgattgtaccactgtactctagcctgggtgacagagcaagaccctgtctcgaaaaaaaatttacaacaacagaaaaataggttttgttttgttttgctctaatacagccaaattgttatttatcatgaaatttgtgatgggagggggatagggaaaaaaagaaatatgcaatatgccttctttcagtcttttttttctttcctgttatgcctctctacttgattctgcatcagtagtatgaccttattttaattttttttttttgttttggtgagacaagagtttcactcatgtcgcccaggctagagcgcaatggcacaatctcggctcactacaacctctgccttctgggttcaagcaattctcctgcccaagtagctgggattacaggcacccaccaccatgcccgg

SEQ ID NO: 227719 - DNA, 324 bp, Homo sapiens
tctttattttagctgctaaaggctattttttccttggcactgatgtaagaatcttttgttttccacttaataaggaggcttaatcctttaatatactcttacactactataagtaccactgtacttaacagtacagattgtcattgctcttgcaatgtgaggacattttgcaaaaaccgttggagacatatattcagtattatttgtgtacggatgtaggtacctgaattgattcactaggttatgttatgcagcaataaaatgattgaaaccccagaaagctctggtactgtgtttagcttattttaataggtcaaatatgct

SEQ ID NO: 227720 - DNA, 263 bp, Homo sapiens
ccctagcagcagataacataacacctcatggagatactaaggtggtttcttaagtcagataagaatgaacagatttaacttgcttttttggtatccatggacaccttagactgttagaaaactctcaggatttgttggaatttaaattgtaaacaaaactgttttaaagcatttattctgaacacctccaacaatggtatcttcaacagtgatcttcaaactggataccattcttatcttcttttccaaaaagcctcccaaag

SEQ ID NO: 227721 - DNA, 633 bp, Homo sapiens
tctggtgtgtttctccagaatatctgtcattcaacttccgagctccaatctttgttgtccctggccatccttctctggttcactgtttttcacacctttctcctctgccttctcgaggaatgtctcaggtgtgcaactacagccttgatcgatttcatttttgtcactggatttcagttccttgaaaattcttttatcattgctgtcagaatttcagcacactgtatcatttttggttttgtcttatattttattgagtattcaaagcagacatttccttaaaatttcctctctgtagggtgggcgctgtggctcacgcctgtaatcacaacactttgagaggtctaggtgggcagatcacaaggtcaggagtttgagaccagcctggccaacatggtgatccatctgcctctgcctcccaaagtgctgggattgcaggcatgagccaccatgcctggccacaaatctgaatgattttcagtttgaaaataaaatataaaaactgttcttggaattatttataaacagaactaacatcagaatcatctgaatcatcagaatagtctattctggaaaaatcagattcatcaaatgaatctttggccaacaactgttggagaatgatgttagtat

SEQ ID NO: 227722 - DNA, 420 bp, Homo sapiens
agcgcatccgactgtcacaatacaacagtgctcatgttcaagtcacccttatttcacttagtaacagccccacagcacaagagtagtgacgctggcatattgttataattgttctatttcactatttgttattcttgttaatctctttgtgtttaaacttcatcacagatatgtatgtataggaaaagaaaagacatcggatacatggggtttggtactatttgcagttttaggcatctactgggcatgatccactgatcaatggtcttggaacgtgtctgccatggataaggggagtctactgtattgattctgattaatgcctgagaatgggatgttatttcattcacacggaagcctttttcctttcttccattctttcttcctttttaaaaaaatctccttcagaaaaaaaagcaa

SEQ ID NO: 227723 - DNA, 3408 bp, Homo sapiens
  misc_feature (1592)..(1592): n is a, c, g, or t
  misc_feature (1674)..(1674): n is a, c, g, or t
  misc_feature (1715)..(1715): n is a, c, g, or t
  misc_feature (2201)..(2201): n is a, c, g, or t
  misc_feature (2326)..(2326): n is a, c, g, or t
ttaatctagatggctacgattctctctctctgcctcttcaggctcatcattggtcaagctcttctgcttttgcagagcagtaccagttgttaaacctggagcttcaggctaggaaaagctgtggcaatctttgggctcagccatttcacccacaggtgtcctggaagcgtgggggccactcagcccgtgtgtctccaggatgatggtggtggagccactgctttggtggagtcactgcttctctccctccccctgggactgtggtcaaccactgggccccaccacctcccgcctggtgattcagaagcaccaaccaactgtaccccaagtgagagtgcagctcagctaagtccatcctggctgtcagtgggcacgtgatgctcacgtgctcccccaacactgcaacttaaagaggctgatgttgcagattttggggaaataaaaggtgtcattgggttggcagcatggagtgttggttaagcactctggagccaaaggccctgggttgaaatgctgcctgtcactttctagctagatcacattggatatattacattacttcagcggtccccagtctttctggcaccagggactggttttatagaagacaatttttccatagactggggttggggtggcagtggggggatggttttgggatgaaactgttttacctcagatcgtcaggcattagattctcataaggagcgtgaaacctagatccctcccacgcacagttcacaataggattttgcgcgcctatgagaatcaaatgccgctgctgatctgacagaaggcggagctcaggtggtcacgctctcacacttcctgctgtgcggcccattcctaacaggccacatactggtacctggccacagcctggggggttggggaccctgtattacttaattcctttgagtctctgatatttaaaaggtgaaatggaaccagtcactgtgttaaccttcctgagcaattcagggatagaaggcatacgtgcttgtgtggtgtgcagcaaagtgctggcactcagcagatgctcaatgaatgttcattcgctggtggcaaaatagtggggtgggtgctgtgtgtcccttgccacctggatggataacacgcatctcaacctccacgagtgcaaaataccttttgtatggatcttgaccctggcagggtcctctgtctccctgtttttggtcaatggcatcccctctgcccaggccccagtcccacatggcttctttgttcctcttcctctctcccccatatccatttgtttagcaggtcgcactggttctaccctggtggtcttgctcaagtagagccccaggtgggactcccaccgttgccaccctaatccacagcttcttcacctcccacctcgtttcacctaaaacacagacagacacagacacatccacccaaacccctcacctggagtgtcaagcccccagccctcatctcatgccctctggcttcattccctccctctgcttgagctcctctggccttgctgttctagagtgtcatgctttcctggctcagggtgttcactcttttggtttcctccatttggaatatcttgtctccanatcctgtcgtgaccagctccatctggttttgcagcagagagatggagtaatggagtaagatcacactgacccccctgagccntttggaatggcttcaggccacctggccctccctctcttctnccaccactttagggcctgtgagagaaattggagggaatgcttaggcacgtgtggcttggtcctaatcctcacgtttcatttgccccccaattctaagaccaagaattttgacttgatcggaattgagttgggagagttggtgtatcacacagacttccaagtatgattttagtaaaggggaagttttctcttcggggcagctacatcttggctttgggttgttggtgctgctgagttctgagttggagtgaattttttgtgagctaaatatggtcttgtgaccaactctcctttcatccaaggcgaggagggtttatgccagtgagcaggccacggattcagttctatttggaaagctagttcacgatcctcacatatgaagtcacagttggcctctggttcagaatagctcctctgacaacaaccttccttcctggatttcagaaagatgtggaatagttcctgaaggctggatggctcccttgncacatctagcctcatgctcaaaatttctttcttcagtagagctaaaaatggagctttttgcttgacagatgtgaggcccagtgaagtggattgacctggccaaggtcatgtggttgatcagcacngatgctgggttctccatctccattctttcagctgggctcggcttcacagtcacctgccttccttgggctttggtctatagcatgtccatctactgtgagagctcagctgtctgaaggaacagggcccagcccatctgggacccccacgggcctccgttagggcatggggagctggaagcacaacatggggtgaggaagaaaagggagagagaaagaggaaggaaggagagcaccagaaggggagagatgggagaaagatgctagaagagaagggctgtgggggtagaggcaggagtggggacacagacggaggtctggggagatcggggctcgaatgtgcccttgaatggcaaacactttggcaggagtctagctggtgaagatggaagatagtaactgcctgctctcttagcattttggactaagttcttctactctcttatcttcttaatttcacagcaaacaatggactattgactaagctttcagagctgtgggtgttctcagagggaggccagccagaacaccagcatctccggcttttcttccaactcccaagttggagctccatctatcagaaatatgaaaccctggaatcttcctcctcctcacttctctgccttaaggtgcgggcagctggggaagagaacattgtgcccagggagagtatattgtgtgagtgtgtgcacttattcatgagtgtgtgcatgtgtatgagtgtgcacaaatgagcgtatacatgcgtgtatgagtacatgtgtgcatgcctgggagtgtgtgtgctggcagtggtggtgtggtagagggtgacaaggtgcatctatacctggccagtgatgtcagcacttcccttgtgcccacctttcctagggaggggctgcactgaattgaaacagtgccagctgggaaatgagaaggcttatcaacaagtctttccttggaggggcaagaaagagctcgagggccgggcgtggtggccacgcctgtcatcctagcactttgggaggccgaagctggccaatcgtttgagctcaggagttcgagaccagcctgggaaacatagtgagacctcgtctctaaat

SEQ ID NO: 227724 - DNA, 389 bp, Homo sapiens
tactactactaaattcgcggccgcgtcgacaggattttgcgcgcctatgagaatcaaatgccgctgctgatctgacagaaggcggagctcaggtggtcacgctctcacacttcctgctgtgcggcccattcctaacaggccacatactggtacctggccacagcctggggggttggggaccctgtattacttaattcctttgagtctctgatatttaaaaggtgaaatggaaccagtcactgtgttaaccttcctgagcaattcagggatagaaggcatacgtgcttgtgtggtgtgcagcaaagtgctggcactcagcagatgctcaatgaatgttcattcgctggtggcaaaatagtggggtggtcgacgcggccgcgaatttagta

SEQ ID NO: 227725 - DNA, 1081 bp, Homo sapiens
  misc_feature (1007)..(1007): n is a, c, g, or t
cgctgtagagctccgatgatggctgttggccgaatggatgaatggcttcattaacttcactgcaacacgcaggagtccttgatctccccccttgaaaggctggagcacagtggcatgatctcggctaactgcaacctctgcctgcctcccaggttcaagcaattctcctgcctcagcctcccaagtagctgggattacagcaaacaatggactattgactaagctttcagagctgtgggtgttctcagagggaggccagccagaacaccagcatctccggcttttcttccaactcccaagttggagctccatctatcagaaatatgaaaccctggaatcttcctcctcctcacttctctgccttaagggctctgcctgccacaattcatgagctggccagaggtctttggattcctcccagtcattgctgagatgagtgaggattgtttcagaaaatcaggcctcctcctggggaatgtgcctcagcttctggtcattcaagaatgaggttggaagagatcattctcctgtttgcaaatgagaaacaagtataggtgtgaagagacctgtccacagccattcaacaaatgaaaagtccaatcgaagatgggacctgatttcttacaccccaggtatctgctcatcatcttgggtaagaccacagggaccaccaagacacccagaagagacacttgattgtttcctggatgttccagttttggggcccatagatatatgccatttactttacatgctttctaagacagatgcattggaatgaagaaaactgaaaagcatgtaaataatgaaatgtagtaaaataattctaaaagggaaagtgacaaaaatgataaaaacatggctgatgagaactgtggaagatacgtaaggaattgagatgaatatgggatatatggcatgagttctcagaatctggttcatggtggttgagggaggtgagcagacatttgggacctggatgtacaaatggaagatccagagcacanaacatacacatttattgccacctttttaagatgtatcttgtgctttgacaaaatcagatgtgatttgaaagttg

SEQ ID NO: 227726 - DNA, 386 bp, Homo sapiens
cgctgtagagctccgatgatggctgttggccgaatggatgaatggcttcattaacttcactgcaacacgcaggagtccttgatctccccccttgaaaggctggagcacagtggcatgatctcggctaactgcaacctctgcctgcctcccaggttcaagcaattctcctgcctcagcctcccaagtagctgggattacagggctctgcctgccacaattcatgagctggccagaggtctttggattcctcccagtcattgctgagatgagtgaggattgtttcagaaaatcaggcctcctcctggggaatgtgcctcagcttctgcgctaagcctggctgaagaggcgaagacccttctctccagcctgtgctcaggaacagacgg

SEQ ID NO: 227727 - DNA, 475 bp, Homo sapiens
aactgagaggcacatggggctgggacgcatagtgccccggccctggaggtggctgtgaaacagaaacaggagccgagcaagatccagaagcacttggcctccctcatttaccctcctcacccttgcgcggcaggcggtatcagccctgcctggtggaggcggagctcagggttctgcagggagttctggctccctcacagcaaagcccgctcgcccagggccttcctgctttccttcagttgtggaactctgggatatgcacatttaatagctgaaataggcaaagtggggtgtggtggcgtgcatctgtaatcccagcaactcgggaggctgaggcgggaggattgcttgaggctgggaggtcaaggctacagtgagctatgatcgtgccactgcgctccagcctgggcaacagagtgagaccctgtctgttaaaaaaaaaattaaaaattaaaacaggccaaagcagagcctc

SEQ ID NO: 227728 - DNA, 487 bp, Homo sapiens
gaaaagactatcttattttatgaatttaaataattgtgaaattatccacttaagggaattaataaattataatgtaatcttaaattttagttggcttacataaagacttaaaatacatcaatttaaataaaaactcatttgtctaaaaaaaaatcaaaaattttccttgtgctttaaatgtgctacctctttaagttctaattaagagaaaaaaagtttaactgtgagtttcattagtggtcttagttaacagcttaaagtattttgtaaaaaaaatacttcacaatttttaaataacttaaaaatattaatacctcttttattaggtttttttaataaggaaaatatataatacatctaatcaagattttttttggacaaattggcttaataatttcattttaaaaatggcttctttattcttatactgtaaaaataatattagcagaatattatagtatacacaagtttagggttcatattctaa

SEQ ID NO: 227729 - DNA, 141 bp, Homo sapiens
gggtaaggcgctgaggatgactgcacagcagcaaagagggctaatatgctccactatggtgagtctgggagagttggtgagaaaactgacaaagcactaatttcaacttttttcaaatttgaaaatcacttttttccatgt

SEQ ID NO: 227730 - DNA, 357 bp, Homo sapiens
tgtgctacaaaataaaaaataaatcaaatataaatacggcgatccatcggaggacaagccactctctcagaagcgctggtgcccgccgcggccacgcgccctgcagcgccaggcgactcgttggcctgcggtgacacccatcacttctgtggttctgagccgggtccaggcaggaggctgggtgagcggggttcgcggggaaccttccctcttcccaggagggcagccccgggctttcaccagaaagggctttgtccgcctggaagtagaggaaagtgtcagaagtgcccggggaggttggaaggaatttccagataattttcaggggtgggggcgggaaccggagaagaggacatc

SEQ ID NO: 227731 - DNA, 621 bp, Homo sapiens
gatttctgctttttcaatttccttttggtttatttttttctttttttctagtttattaaagtggaagcttacataaacaatttgagaccgtctttcttttcccatgtgagcatttaatgctataaatttcccttgaaacactgcttttttagctgcatcccacagattttatgttacatattcatttttgttcagctcaaaatactttcttactccccttaaaattttctctttgactcacagattatttatacatgtgtgacttaatttccgagtacttagggaagtttccagttatttttctgttagtaatttttactttaattccattatggtcagaaaacatactttatgtgagttcaatctttttattgaggtatgctttaagacacaggatatagtctaccttgaggaattttccatatgtggaaggaaagtgtactttgctattgttgagaatcctataaatgtccattagattcaggtcaagtgatgtctggaagactggaggaaaaaatgataaactcacagccagttgtatcatatcatacatctaattgtagtcttattctgcaatacactgcgatttactttttagggtcgtcaaatagctgctacatg

SEQ ID NO: 227732 - DNA, 516 bp, Homo sapiens
gattagagtccaagtaatttggctccagcactcctgcactacttaatacatttgtgtgttgtgttagtaaataaatactgtacaaatggcaagataggccagacgctggtgtttcaataaagcaaactcatcttaaccatgaaagtgactcagcttgagatttaattaatattgtttctatgtgtgaggatctttctttttatggcctttggcagtaaaatgatctaagcgtttttatagaatgtataaaatgtggctttttttgtgtgttaaatactttatgaccttgagtttactgatcctgacgaagctcctcttttcctctttttgcccactaaagatccattttatttatgcacacagttaaagccattgtagtgtagtggaaacagcacatattggatttgtgtgttcttacattttaattccagcattatccattactagctgtgtgactggacaaattatacatctttagaacttcccttttctaacctgtaaaatgagggaaattaa

SEQ ID NO: 227733 - DNA, 371 bp, Homo sapiens
ttaacatagatgtaaatggaagtcttataattctatgagattattatagctaaatttactgttacactgccgttctctgagttattaccctgagattggtgttttactctctgtatttacccagtttgtgttgaatgagcaaacatcaagattattggcttaatgccaaggttcaacaaacaattgttcccctgtttgtgggcttatttatttatttctggttgttctctgcaagaatctgtcaaaccaactctcttaaagggatacctaaaatatgcctggactctgtattttggggcaacaccattcattcattactggtgttactgcaagtgttggcaaatgaattgcaaaaatcttgattatgcaaa

SEQ ID NO: 227734 - DNA, 613 bp, Homo sapiens
cttaggtgggaaaacaactagcaactaaaaaaaaaaatggagtttactaccaactaaaaaaaatggaggtttcaaggttgacctagaatttgaaaactgctttaaagacaggtaagaaagacacaggtagatgtgcaatggaagtagaaattgggtttcaagccccaaacaggctgaggggtgggaaaatagacatattcaggtacatcaatcgttccagtttggcataagaatgagataaatgaagatggattctaggagttaaggatgaaatatgtagggaggtactatgatgtaatggagagaacaaagatttcaagttaagactttggtttaaatcccagctgtgcctcttattagctgtgtgatcaaaggtaaattagttaatctctctgaccctccatttcctcatttgtatgataacaataatgtccaattattccacaaatattttatggcaagccaagtattaactaagaactatgttaaatgatgaagatataaaaaaaccatttattcattcattcatcaaatgaatgccttactgtttactaagttacaccctgagttaggccctggaaatactgataagggggaaaaaagcatgaaaccg

SEQ ID NO: 227735 - DNA, 278 bp, Homo sapiens
cggggccagttgtaattatctctccctccctgtagatcactccagtgacaggcccttgtttttgtcgccactgcaagatagctctattatggtggttttacttgaggtcctaaggcttctgtgactcatatgaaggagcaaattaaagccatgtcctcttgatgttgcttagagggccatagatctgtttacagggtcagtgggaaaagcacaaatagccataacctaagtcctggattccttgaaacatatatgtgaattatgttgagtcctagaac

SEQ ID NO: 227736 - DNA, 355 bp, Homo sapiens
atcaccaagtcaggagatcgagaccattctggctaacacggtgaaaccccatctctactgaaaatacaaaaattagccgggcgtggtggcgggcgcctgtagttccagctactcgggaggctgaggcaggagaatagcgtgaactagggaggcggagcttgcagtgagccgagatcgcgccactgcactccagcctgggcaagagtgcgagactccatctcaaaaaataaataaataaataaataaataaagttatatgtgtgaaaaataatgtgatcacttttgtatccaagccttttcgtgggatgacgtgtttgtagaatgctgataataaatggaaatgcaggagtttttg

SEQ ID NO: 227737 - DNA, 435 bp, Homo sapiens
agtgaaaggcactttttacgtggtggcagcaagagaaaatgaggaggtgcaaaagcggaaacccctgataaaaccatcagatcttgtgagacttattcactaccatgagaacagtatgagggaaattgcccccttgattcaaattatctcccaccgtgttcctcccatagaatgtggtaattatgggagtacaattcaagatgagatttgggtggagacacagaggcaaaccgtatcaaggaccctctccgagaacctgacgatgctgacatcctgatcttggacttccagcctccagaaataaatgagaaataaataggtgttatgtgtgccacccagtctgtgatattctgtcgtagtagctcaaactgacagagacaggcactgtggtgtactcttcttgagttcaaataaatttaaaagtattttatgaga

SEQ ID NO: 227738 - DNA, 441 bp, Homo sapiens
acctctggtgctgaagcagccaagagacccaagcctgccttgctgccacttaggatatgacagcacagccagtggcctctactggatcctggtacccctcagaagacacccagacactgggagtgctgccacctcgtggtgcaagagttctgagggacggcaattctgaagacattgaatggtgggtgctgggcctcatggctgttccccagcccctctcattggctctgctccaggtggagaagggggatgatgtctctgtcagttctgctgttttagcctagcaggaaaagaagcagagcccagaagcagggcctggtacccagcctgcctaacaagggagaatttgtaggctttgtggacagaaagatctgggactccatgtcacccactaacttgctgagacattagtaaaatcagttttcttttctgaaaaaaaat

SEQ ID NO: 227739 - DNA, 457 bp, Homo sapiens
ttttttaatttttcttttttatttttatgcggacatttaaatactaacaatacacatttaactttaactgtgtgttaaataagaacacacagatctgccaaacctttttacctgttgtgtggtgatggaagaggccctctcctggtggacattgaggttgcctccaatttgtctctattacaaacgttatcttattgatgcctctagggacactgttgctagtatttttccagagtagatactaaaatgcagaattgttaggttgaagatcatgtgtattttctgttttcctacaaacaagctgtatcagtttttacacctacctgcagcatatatggagcctatttccctatactctcaccaatactggatatgataggtcatcttcatttgtgttatcctagtgagtgaaaaattacatcttactattttttttcatggagatgaccaaggtgga

SEQ ID NO: 227740 - DNA, 525 bp, Homo sapiens
cagaagcagtaggaaattaatacactggttatacacaaccaaacagtggggtggtgaggcaatgagggcaagtgacaaggaaagcgattacacagaaaaacagccagcttaactaactagtcaattttatccaaacgaaaactcaagtatttctgtagaatgacccagtctaagatgagactgcaagtacaaattgcatcaaagcactgggccactgaaattctgtttgttcttgtaggccctacagaatcctcagtcctccttcatctggggctcaaccaataccaacaatagcatcagcaagaactcttctcaggtggaaggagataagggaaatgaagggtgatgttcccagaatcttattcctaagagtgcaacccttcccacccctccttaggagctgcatgatgttctatgaagaacaggtatttggagcacatgaaggtgaggaggtggctcccctgctaggttaaaacagacctatgatgcttccatgtggacagtcagctgtagggctgcccttcc

SEQ ID NO: 227741 - DNA, 512 bp, Homo sapiens
accacaatccttgttcttatccttatttgtagtgactagtatgaatagggctgcctcataaattagtaaatcctaactatttgataggaatgtgtcagtacttgcagtgggggctttttgtcaaatacagagttatcaggtgttttgaaatggtctactaattttaatagaactttccattatatcctagggcagatagaaatccttcattggtttcaattgagcattcctatcacacttggacaacttttggattctgtagaatacctagacaacagacagtggttttttttttctgtttttgtttttaaaaaataaaatcagtactgcttaaacagagggaaaagggtgaatatgaggttgaaaaacctgttaaaacacatcagtcttgagtaaaatataggaggagtttgttcttagatatcaaaatatatttggtagccaatcatatttaaattaaactgattggtcatcagcatactgattattttatataagaaattgaacttatg

SEQ ID NO: 227742 - DNA, 364 bp, Homo sapiens
cattttctagttcataatttctgccgaagtttcttctcaatagatatcattagtatatgccttgttgttcaagcgaaatacacctaggagtcatctgatccctcactgaaccgcactttaaaacacaaacatacataatcaccccaacaattgaaggattacttagggtcacttccaaaatgtatcccgaatttatatgggtcttttcattttcacaggtgatgcattagtcaggccaccatcatctagtagcaagatggctagaatagtcttttcatctaatgtctaaatttcaactcctttttcaggccaaatgatctgtgactccaggctgcatcatacctcactttccttcactggctca

SEQ ID NO: 227743 - DNA, 443 bp, Homo sapiens
aggagaaggctgaataaggtagataccaggatcagtcacattgagaaactgggaggaggtgaactggaaactgctgagggtgactgaaccccacttttgatatcagaaagtccaatttatatttaaaagggatgctgaggcaacaaaaaaattgtaagaattcactataatatacttgggtatatataggcataggtccttagtagattctgtttagcactatctaaaccagattcaaatatcagcatttaaattaaatatctagcatggaaaaaatactattccttgaaaattttgatagaaacagcaagagaatgcaatagtattttcttaagcctcctcctttgtgtcttgagtttattgttacagactgcagagtgctatgtatttaatggttataattgtttgataaatatataaaggaataaaggaatgaactttaa

SEQ ID NO: 227744 - DNA, 284 bp, Homo sapiens
tatcctggtgtttataaaatatgtagaattaaatatgtgacaatagaacaaagaacatcatgtggtaaatggaattatactttaattttgacattaaaccaagaatggtataacaatttcagagagacagtgattaagttaaagaggtacattataatctctagtcaataatttttttttttttttaagacagagtctcactctgtcacccaggctggagtgcggtagcatgatctcggctcactacagtctctgcctcccaggctcaagcgattctcatgcct

SEQ ID NO: 227745 - DNA, 516 bp, Homo sapiens
cacgacctttattacagttatgagctatattagagaagaggtgctaatcaacagtctcttttagcttacagctgcccattctgatctttctgtgtagccctggatgatccagtttctttttggaccagccctggggtatgaattgggggatggagggtgggattgcccacctgttctttgttacactggcataaatgtcctacttgtgacagcactagaagccagtggttgtctggatcctattcataatcaaattcaaataagatgatttatcttctgaataaaaatacttgttttatatatgatcacaacagtgattcctagccttagtttgcaaatacctaggatgcctcaaataatttcaggttataatctctaaattttcctttttaaaaaagtggggatagaggacaaaaataatcagccatatgttaataattattgaaactgggtgatgatacatggggattcattatattactattctattataaatgtttgaaattttctttatta

SEQ ID NO: 227746 - DNA, 447 bp, Homo sapiens
atctctctgactgattctcctgcctccctcttacaaaaactctagtgactacactgggccacctggataacccaggatcctcttcccatctcaacatcaatttaaacacatctgcagaatttctttgccaggtaggggaacatattcacagatcccagggattagcacatgggcactgtcagagtcatgcaagccacaccccaaattcagcctccctgcaacctgcgccccgttccgtgcctgacaccaccatctagtcagtagcccaagccacaaaccctccttcctctccccactgtcactcttccctcaattaaaactgggcgctaggccaggtgcagtggctctcatctgtaatccctgcactttgggaggctgaggtgggaggattacttgaacccaggagtttgaggccagcctcgccaacatagggaaacctcatctcta

SEQ ID NO: 227747 - DNA, 355 bp, Homo sapiens
acacacacacacagtctcatttaatcctcataatattatgaggtagtgctattattaatatccattttctggatgaggaaactgaggccccaaccagtgaaataacttgctttgagtcccatattaagtagtactacccaggcaacctggccccagagcttacttacacgtgtagtaactacactgttcttcccatttatgaggtgattaaactatggaggcaggcatggcatacctgcagaacaggactagaatctcataggtttttgaacttattaggcagacctaaggttttttacacttcctgaggctatagaacagaactaatctcttagccttaatgtcactataacgt

SEQ ID NO: 227748 - DNA, 489 bp, Homo sapiens
tgttcaggacctgtgctcagggctgtgttctcattttgaggttggattttgtacactcacattttcatttatctctctagtgctcaagatattcacaaactttttcactgtcagggatgcataaaagaacaatactttattagagctatattctaagccaactgggtcgtcgtaccttagattcaaagttagattatggctcaaaatgaatccttagcgtatttctggtgttcaaaaagaataggttgaagccgagacgggtggatcacttgaggccaggagttcgagaccaacctggccaacatggcaaaaccccgtctctactaaaaacacaaaaaattagccaggcatggtggcgtgcgcctgtaaatccagctacctgagagcctgaggcagaagaatcgcttgaacctgggaggtggaggctgcagtgagccgagatcatgccattgcactctgacctgggtgacagagttggactatgtctca

SEQ ID NO: 227749 - DNA, 671 bp, Homo sapiens
ggcttgtggaagtcttgaagcagctgggcaaggtggtgcctggaagcctgagatcctgccggctggaccaaatgcgttgtccacaactacagccgctgatgagtgtctggctgctcacctgtcccctaggggccccgctgagcccccaggctgcatcccctggcccgccacggagaggactccaccccaccctcatttcccaggggaggagccgggcctctgggacttgcggaggggcctgcaagtgaggaccgtggctaccagggacctggcggctgcagatgctttgtgggaggcctgtgtgcagcccttcgtcctgcccggagctgggacctactaagcagtggagttcagcagggctgggtggagctgcatctccctcctggggtgcccacccacccctctgtgctctcacgctcacaaggggcctggaggtcccagttgctagggggccctctattcctgggtcccagatgatggaaacgcaatgttaaaaatgttcaccagaccaacctgtactggctgcaattctcaataaagcagttgagggacacacccagaacagtgggcgcttctgccagtgccgccgtgccacttagcctctggccatgaccccacaggaacaggagcggggctatagggagcccctagggttatacaggaccctccgc

SEQ ID NO: 227750 - DNA, 463 bp, Homo sapiens
cagctcataggtgaccaggtcccttttcacaaaactactgaagacagatccaagcatctcaactcacctactactgagttcaccagcaagatctgaaaggccttattgattaatggcttcccatgatataataggcttgtggtatttgattctcttcctatgatggttatagatccgttaatatctcaccattctatacccatgagacctcgtcttgaagggtcaatattatcttttgataacaattttggaccacagaaaagtataagaattaactgaaagtagacttcaatgaagaaaaaggggcaaaaaggaagcctaacaaatatcaatggatgattcctattacttagttaacaaaatgttttctattatgatgcatcagaaagtatgactaatatgttgctttctcggtggattttatgatacatactttttcttgcaagcaattttgcagcaagtt

SEQ ID NO: 227751 - DNA, 96 bp, Homo sapiens
ctctgtctctctctctctttctttcccctccctcccttccttcctctctttctttttctttcttcctctccgcctctcttctctcccttcgccttt

SEQ ID NO: 227752 - DNA, 465 bp, Homo sapiens
gtgctgggattacagacgttagccactgtacccagcctagttcaagttttaagcattaagaattgactctttggaggaatagggatcttttaaggatctctacagtcagtgactctaaatgtagtgtttggaccagtaagtagcattagcatcacccaagaagtcattagaaatgcaaattcttggccaggcgcggtgcctcatgcctgtaatcccagcactttgggaggctgaggtgggtagatcacgaggtcacgagttcgagaccagcttgaccaacatggtgaaaccctgtctctactaaaaatacaaaaattagccggccgtggtgaagggcatctgtagtcccagctactcaggaggatgaggcaggagaatcacttgaatccaggaggcggaggttgctgtgagccaagatcgcaccactgcactgcagcctgggcaacagaatgagactccatctca

SEQ ID NO: 227753 - DNA, 344 bp, Homo sapiens
gcagtaaataggaggttaagagggctgtgaataagagctctagtgacaggcagggcataaacgaatatatttacaaacttttagaattatcttatataaatactataactttaatacaaaattttcaaatttcacttacaaaatctctgtggttacttctgagaaaggtgtgtgttttttttttttttttttggactaagtaccaaaatgaccacatttttgtgaaagtgggccaaagtaaagttttaattattatagtacaccaattgcatgttttgaaacaatcatgtatgaattagtaaacttttttctttgttttataaaaccgttttttttctttccta

SEQ ID NO: 227754 - DNA, 553 bp, Homo sapiens
cactaggtctcaaaaaaaaaaaaaaaagaaaaaagaaaagaaataaatatatgttatagtgccagttgatgttaagtgttgtgcagaaaaataaattagacaagcatcaagattgacaggtgctgctattttaggtaaggagaaggccgttcgaggaggtaacatttaagcagatacatgcatgaagagggggaccatgaaactgatcttcattgatcagtaaatcatatcctggtgaagtccctgaactctaggaataaagaaagattcatacaagcagactgaaaaagtttattttggggtggaaaaaccaactggctccagacctacctcttcaggaacagtcaaagccagaaaacaatagaacagtgtttgcagagttctaagggaaataaaatataagccaggaattgtgagccagccaagatgttcttaaattataaaggcagctgacatcttcgagccccacacatttaggcaatgcaacctttcggcgctttccttttaaaaattgctcaataacagaatctagccaatatagagatgaagcaaa

SEQ ID NO: 227755 - DNA, 668 bp, Homo sapiens
tacgcatcgtcttgtgcccggctcttccattttgtacctcacccgtttttcccacatttcttttcccgtgcttagtgtccataatatggattccaagtatcagaatctggtgattagaatgtctaagattcttccctagaattttgtggttatttttttactgctacgttgtttgactagtctccctcccctgcaataggtcagtgactttccttctatctaaacttctgaaaattttccagagacttcaactgtgagacagtttgggtccttttagcaagaatatatacttacagcagagccttttgattaaggtttgaaaaactactctaatttctctctataaatatatttatattctgcatatatacccagacacacaggaaacttcaggtgaactgctttgaggatcaggttttgttttaaaagcctttgtgtgctggtgggcaggagagaaaagaactgcagttttgccatttgtttcattgatccttgttttaagcctacagcatccagtattccccgtccgtcccccctactaccttttctcagtctcatccccgcctaggttctgagatttgccgggaatgggaaccatgaggggtgcaggcccgaattgtgttattttcttaataagttcttttttttttattaaagaaaataaaaaa

SEQ ID NO: 227756 - DNA, 615 bp, Homo sapiens
aaggaatacacgaatgaactatcaaagcagctccagttctggactccaatcactgacgttggtaataatttggttgctaaaatctcctcttatgttctatagctcaaaaatgctatgcccagatgctttaaaatgatgccagttgattcactcaccggccatgagcatctgagcagttagttcccaatgacccaacatgccttgagttattgttcatttgatttaacttacagaaggtgaacttactttattttcctgccagaattctggctggatcacagttggtggtggtcctcagggaataaatctcaggcgatggcgctcagtcattttagggttgcctgttcagtataacttccatgtggctgtcttagtgaacacaggccttgaagctgatgatggcattttgtagacaggctacagtgacctacagttcatagaacagtagctggattatctacaagataacaacattctcacttgtgggtaaaatgtgtcattgtttctgggaactgaactttgaaaaataaataaaaatccctaccttgattcccaaagctttgacatttaactgggatgttagagtagatgaattcaatttacatgagttggggt

SEQ ID NO: 227757 - DNA, 446 bp, Homo sapiens
ataactagaatatatattaagaaaaataatcccaggaaataaaaaatatgctagtaataattacacataacagatttacaaaattatattaccatataacagtaatacataattctaaataaaaataatcatgctcacagataaaaccaaaaactttaagagcttaatttattgaaagcaaatgatttaaatatcatgagggaaataaaaggagacaagaattagtggaacactctactgtgctcctgctgtttgggaagatgtactatacagagttaattcaacaataaacaaagtccctgagggatggcctatacgagttgacaagttgatttaaaaattaattgagggaattaaacagaaatgtaaatattccaataaccatcgaattatacattttaaatggatgaatcatatatgtgaattatatctcaataaaacgatta

SEQ ID NO: 227758 - DNA, 175 bp, Homo sapiens
gccgtttccatctctctcggtttctcttctgcatgattctcccaacctctccccacatgggctatctatcacctatcaccgtgcaagcacttcctcagaggaatgcttttgttttggaaacaggtttggaggcaaagggataagggaagtaagatgaatgatatttaacagaaaa

SEQ ID NO: 227759 - DNA, 543 bp, Homo sapiens
gtcatgagacttaaattatggagctggtctgttgctttgtgaaactgggtgattgccagaaacctttatttaagaactactactcataagactaataaattcccaaatgatttaatgcacagtaatttgtcaggattcactggcatttttttttttttttctggcataatgaagacatctggaaacccaagctacaacttaggagtaccagtagaattgtccagcaagggacttcagaatctgttgctagcctctaagactgattataatgtttcactgattttatagccaatccatatttcactggactcttaacttgtataattctattctttcaacatttataaatacataataacattggactttacatagcactttagaatctttcccatgttactttatttgctctgacaacaattcagtggctcatgcagaagggtcattattagccctattttattgatagggaaataaaagttcagacaattagacatattaacatgtttaagttttgcatcctaagaaataaaaacgaaaata

SEQ ID NO: 227760 - DNA, 418 bp, Homo sapiens
ataggtttattgcccaagagaagtgaatgcacatactgtctctgtacgtaaatgttcacagaaaaaaaagagttactagcaaagaactggggtccagagctgaggggttccagcctggcagcaggagtgtggcatctcagcaggcaggtactatatatactgccatggggtccctggctctatttctgatagcccccaaaccacaaacaatctctatgtctgtcttttgcataaacaaattgtggtagtttgttaaaatagtacagtccaaagcaatactaacagctgatgtgtgcaaacaaatgaagaaactgtgagatatacagtaaggaatggtctgtgcccttctaacataggaacaaagacctgtactcacctatttagaattcaaatcaggttcgtgattgcgctcttaaaa

SEQ ID NO: 227761 - DNA, 526 bp, Homo sapiens
atctacatgtgttgagtgaagaattcctttccgaattgtcatggctctgagttgaggtcagagttaactaggtttatctaagcctgtaaggtcttcccagttcctaggtgtgacatggaggacaaggaccctacgctctgtctccccagcactgcatagccttgccaaaagagacagagaaggttgtaattaatgtggcgctattatccttagcaagctaggagaggatcaaaggagcaggaacctgcagccctcctgatttcgtcagcagagttggtaggggaatggaagggaaagagctttgcttgtgttaattaataacaacctctgcagctctcccccgggaaaggtggcgaccaaagcaatctcaagcttgggggcattgcaggcaattcttggggctattctcttttagcaccttgttgcctttgtcttctactgtgtagaaataaatgatgtgctctggacagcaattttgctgcaattttctcaaccgccaagcccctggggactcctgatcttcctg

SEQ ID NO: 227762 - DNA, 698 bp, Homo sapiens
gtaattggattcctagaataagtattctagaaagaattttctagaaagaaaattggtttgattcactctctgaaacaaaatgcctttgcatttgtatgtatctatattggtgaaaacctttcaacatgtagattgcttggagagtacaatcagccttccatatctgtgggttccacatctgtggattcaagccactgcagactgaaaatatttgggtagctggggttggtggctcacgcctgtgatcccaacactttgggaggctgaggcaggaggattgcttgagcccaggagttttcgaccagcgtgggcaacagtgagagcctgtgtctacaaaaaagggaaaaagttagctggatgtggtggcccacacctgcagtcccagctattagggaggcagaggtgggaggcttacttgagcccagaaattcaaggctgcagtgagccatgattatgccattgcacaccagcctgggtgacagaacaggaccctttctcgaatggcaagaaattaaacaagaaaactcgagttattattttttttttttaaattcgtaatctgatttgggctgtgctttagagcaccaacatttcatacacatgatcttcattctgatagccacttaaggtaacggttaccttcattttagaggcgaagttaaggttccgagtgactggatattttcagtacacttacc

SEQ ID NO: 227763 - DNA, 616 bp, Homo sapiens
attaaattctggcactttcatggatgaactgagtaacctttggcaaagcaccataacatggcgatatcatagggtttttgggtagattaatgtaaacttgtaaatggttatagcagtgtctggcaagtaaacactcaataaatgttagtgatatgatgatagctgtgaatatcatgatggtgatgatggagtagagatgatgataatatctcctgttctagattgtgaactccataaaaacagaatctttgactttctcatctttgaatttaactcttaacacagtaccttgcctggagtaggtacttaataaatgtctcttaattaaattgaatgaatgaattgcatcttgtagacttcatagatgaactgacatttaaaatggtgtgatgattaatcttatgtttcaatttggctagattatggtgctaagttatttgatcaaacacaagtctagatgttattctaaaaagtatttgatagttgtgattaatatttacaatcacttgactttaaataaaggagataactttgagattactttggcaatttgagtgggcctgatctaataaattgaagacctgaagaggaaaatctgaggtttactgatgaacaa

SEQ ID NO: 227764 - DNA, 332 bp, Homo sapiens
catccatccatccatccatccatccctgttgagctccaactatgtgtcaggcacttctggggggttgagggtattgtgatcagtaagacaaactctctgcctttatagtgtttacattctaggagaaaaatattcatcttagagagattataaaaaacaaatcttccgaaatagtatctgttacgtccaaaatagaggaatgtataaataaatgttaatatgatggactaacacgcagccattacaaaaatcctgttttgaaggctattaaatgtcatggtgaattgattccaatataaaaccaaatgaaataaaagcagttcacaaaacca

SEQ ID NO: 227765 - DNA, 521 bp, Homo sapiens
atagaaagatgaataagacattcttaagagttgatgggtggagagttatataaataaagaattatttcgaaagatgtttatagagtgagaatgacatttaataggagcattttactcatcaagtatagaggttatgctgagtgtacccaggtgagagctgatcatttaacctggaaccaaagtttaaaggtcataataaattaattgaggaaatgtttttaagtgaaatatacatttttaaatatgaccgagtccttttataattatcaacagttttggttttcattaaacattaagtgcctctttcttaattcttcaccggctttccctgccacctgctacgcattacggttcccccaactaccaacctttagtgtcctataaaatgaaactcttcttaattttagcatgaataaaacataataagcaggatgaatcagccaccagaagctcacataatatattccaggaacaaattaaagtgacatttgtttaataaactccttttatatccatgaact

SEQ ID NO: 227766 - DNA, 344 bp, Homo sapiens
ttctggagttaatcacgaggcttcctaaactcttaactttgtagtcatagaaaatgctcagtatttcaactcttttacattaaagaaagaaagaaaattgacagcaatcctctcccttcttccaccatgctcccaagaaaacaaaaagttagcattgatgttcttaagtgacatcatcctctgggaccaccattatctatctgtcctttgtttactttgtcttatacttagaatgccttcatttgccatcagctttccttcaaaccttcactttccactgaggaattccaagacaattcaagttaaaacacaaatttcaccatccatgaaatggtaacttaaga

SEQ ID NO: 227767 - DNA, 458 bp, Homo sapiens
tctcataattttggtggattcgggattccatatagggtatatctgactttaaaaattcatgcacttaatcatgaagctataatatcaagaatggtaaaatgttaaagcactttgacctagcaatttaacttttctatactgcgggagtaatcagaaattttggtaaatttgaacatacaaaatattacatacaaattaaaatgtttaaagtattctaactgatcatggttaaataaactatgtacattcatataatattttggaattattgaaatgatatttatagaacgtttttaataatatgaagagtgttcagattataatgataaattggaagaaatccaggatataaaattaaatggttattttgttgcaaatgttttcaaaattgagcagagaaaaaaggatggaagaaaatacatcaaaatgttaatgaataataaaaatattcgaatggt

SEQ ID NO: 227768 - DNA, 320 bp, Homo sapiens
gagacagagtcttgctctgtcacccaggctggagtgcagtggcgtgatcaccgctcactgcagccccgacctcctgggctcaagtgactcccacctcagcctcccaagtagctagtattaaaggcatgagccaccacacctggccaaacctccccttttatcccccaagtagagaaaactgagagttggaggtaaatcatgcatctgatcaccctaacaggtcacaatgcagaggacaagggtgggaagcctattattactggtggcattacagtgtcaccctggcaccagtaataattatgatattataataccatagc

SEQ ID NO: 227769 - DNA, 1908 bp, Homo sapiens
  misc_feature (27)..(27): n is a, c, g, or t
  misc_feature (41)..(41): n is a, c, g, or t
  misc_feature (69)..(69): n is a, c, g, or t
  misc_feature (835)..(835): n is a, c, g, or t
  misc_feature (989)..(989): n is a, c, g, or t
agaaactatgtagtgaaattacatagngatttttcattctngcagtaaaaatttcctgggatttttttntttttaatgggtgggaaactactggaaatagtggatgccagagtcttaaacagaaggaatgaaataataaagatcagagcagaaataaatgaaatagaggccaggaatacaacagaaaagttcaacaaaacagagttggtttttgaaaaggtaaacaaaattgacagacctttagttggactaaccaagagaaaaaaaagtcaaaatacatgaaggagacattacaactgataccatagaaataataagatcataaaagactactctgagtaaatatatgccaaaaaattgaacaaactagaagaaatggataaattcctaaaacatacaacctatcaggaccacatcatgaaggaacagaaagtctgaacagacctataatgagtgaggagattgaatcactaagtcaaaacctcccaacaaatagaagcccaagagcagacagcttcacgggcaaattcctctgaacatctaaagacgaattaccaccaacccttctcaaacttccaaaaaactgagcaggagagaacacttcccagattcattttatgaggccagcattacccttaaccaaagccagataaggacattgtaagaaaataaagttacaggccaatatccttgatgaacagttgcaaaaatcctcaacaaaatactagcaaactgaattgaatagcacattaaaaggagcgtacaccatgatcaagtgagatttttcctctgaatgtaaaaatggttcaacatatgcaaatcattaactgagctncaccaaattaacagaatgaaaaataaaaaccataagatcatcttaaaagatgcaaaaaaggcatttgacaaaatgtaacatcctttcacaatgaaaattctcaacaagtaaggtatagaacagtatgccacaacataataaaggctatgtgtgncaggcccacagctgacatcatacttaatggtgaaaagctgaaagcttttcctctgaggtcaggaagaagacccttgctacttccattaaatatggtaagttctagccagaacagttaggccaagaaaaagaaataaaggcagccaggagtggtggctcatggctctgattcccagcactttgggaggctgaggtgggcggatcacttgaggtcaagagttggagaccagcctggccaacatgaaaccctgtctctactaaaaaatacaaaaattcaccaggcatggtgatgcatgcctgtaatcccagcttgctcgggaggctgaggcaggagaatcacttgagcccaagaggtggaggtcgcagtgagctgagattgcaccattgcactccagcctgggcaacagggcaagactgtctcaaaaaaaaaaaaaaaagtaaaagacacctaaatcataaaggaagaaataaaattatctttatttgcagtggcataatcttgtatgtagaaaaacccaagacttcatcaagaaatctgttcacttagtcaagttctgggatacaaaaatcaacatacaaaaatcagttttctgtctatacactaacaacaaactattcaaaaaagagattaagaggtcaggtatggtggttaacacctgtaatcccagaactttgggaggccgaagcgggcggatcacctgaggtcaggagtttgagaccagcctggccaacatggtgaaaccctgtctctacaaaaaatacaaaaaaaacaactgggtgtggtggtgcaggctgtaatcccagctacttggaaagctgaggcaggagaattgcttgagcctgggagagacggaggctgcagtgagccgagatcacatcactgcactccagcctgggtgacaagagcgaaactccatctc

SEQ ID NO: 227770 - DNA, 587 bp, Homo sapiens
agttgagctctgagctctggaagatcacagaattgtattcctttctgttactgcagagaagctgacaaaggggctggtgatacctgcctgagattgctagttagttcttaaatgttttccgatggagggaagcacagttctcccatggagggaaggacaatgagataaatctagattttgaagaagcagccctgagcatgcatggaattccccccttagctctgccacactgaatctgttagataagctgttcagaactcttactgtttcaacattcaagattcactgcattgctggaccctctgtgaaactgaagccttctctacttgtttttatctcaagtgaacctggagaagcaacaataatggaccttctcccctagtcaaatagcctgtggacctcccctcatagtcagtctccaaaaacatgtatctggaattaatttattacaaagagaagtttagtgtttcttcttttttacatgcgctcaatactgactactggccagacacagcaccatcctcttacaaacatcatttcatttacttttcacaaaaacaaacaaaagtatgaagtaggtagtgtta

SEQ ID NO: 227771 - DNA, 553 bp, Homo sapiens
aatttttcttaatatctaaaaatgtaaaagccgttcttagtttgcaggccccataaaagcaggcagtggccagcatggacctgtgggttgtagagtgctgatccttgatctagataaagtaggcaaaacattccatgcaggagaaaccacatacaccacacaggcacacttaggaatgccaagcagatgttaagggttaatatttttaaaggcaaaatcatgactcttatacaaatataaagcaaatatataccaaagattctattcaatttgttcattaatgagagaaacaagagaatgttatgaccagttcaaaggagaagtttttaaaaaacacacatgtataggccatcagaaatgctgaaatcaattggctggtatctgtatctatcaatatctatatggcaataatgaactgcatctctacaggacacgactggcatttccatggacaagagtcgtttgtactactatcagtattctaagagtacagagttgtaaagtagctcaaacacagaaataaacaggaaagatatactacataagataccaa

SEQ ID NO: 227772 - DNA, 392 bp, Homo sapiens
gagaataattcagcgttgatggcaaaatctcaatgatgaagtttatcactaaaagaaaacaacctatgctgtgaaagcagagatgctctagaatctacaggtcttttcctatgggaaaataagagaaaaaaagactgtcatcagaatcattttacagcattgagactatgttgatttcaaggtcatgtttgttgcagcttcaaaagatgctggcaaggaacgaggtactctagaaacctggctgttgcattattaaatattttgtgtatagtttcggacattcttaacccgtttggtgctgtggacctctttggcagcctggtgaagcctatgtacttttctcagaattatgtttttacatgcataaaataaagtatgcaggtttacaaatc

SEQ ID NO: 227773 - DNA, 408 bp, Homo sapiens
ctcggtctttcaaagtgctgggatgacaggcgtgagccaccatgcctggcctacaatactatttttcataactgcattgtgttctaccctgtggccttactgtgatttaaacattcctttaaatatgttataatcagctgtttctagtttttcattatcataaagtatactacagtgaatatccttgtatatcaatatttggcgttatctattatagattcctagatatggtattactgtgtcacagggtatgaacacttgtaaggtttttgatctgcattagcagattgctttccggaaagattatatcagtttgtactcatactgtatgttatttttgtttgctactttacaagtttaaaaatagaaatatataaagtaggaaataaaaaatttaaactctcatta

SEQ ID NO: 227774 - DNA, 317 bp, Homo sapiens
atcatgtccctctaaatgcaagtggatgattgtgccaataagccaggagagaaggaaacatcttcagtggtccagtggcacattcaaaattgtacaatgacatgacattaactcaaaaatgaagtttgaggttctgggcctttgatggactgcatctattaaaaacaaaaagtggtgtctcatgcctgtaatcccagcactttgagaggccaaggcaggaggatcaattgaggccaggagttcaaccagcctggacaatgaactgaacacaaaaaatgcgaatttttatatttttttgtgagatcccatctctacca

SEQ ID NO: 227775 - DNA, 1267 bp, Homo sapiens
ctcagtaatataggttcaattttggaatgaaagttgggagatgaatataattttacctgcagaaatgagctgcctgtctagcacaggggtcatcaagttttaatgtaaaagttgaaatagtaaatccagctttcaggccattctgtctctgttatgatgacttgactctggcattgctgcccacaagtagccagggaaaatacatgaacaagtgggtgtaaaacttatattagctactatcggcagggggctggatttggcctctgcctgtggtctgcccagctctggtctagcctacctcttctgagaacacattctgtaattaggattacataagacaagacttcactctactgacaacagtatttatagttctctaaagaatcgaatgaagtctgattttctgagtcacaatggaaatattaaggtgggtggttgtgaaagaaatcccaacattagaaaatacaggcattctaaagattaatgtctgggcaaaagaacacactgtgtttttctactaaaaaacacaaaatgagaaacgagcatgatggggaagtggccactacccggaccctcttgcctatgccccacatttaccgtttgcctgggtttagagacactgcccttttccaagagccagaggccccaaatggaaactttacccttcctttttgctatctatgaatcaacagaaagattcctcctgtgactctttgactcctgaggaggacaatgcagcgctccaggctgttttctccagcacgttcatggtgggtggatgagattccctctccatcccagcacagtggtgggcttgttcaggcttggcaccatcgaccaacagccccaacccgcctggacaataggaacattcaacaatctgtaagttggaggctcaactcatttgtcttttacataactacattctttttttccataaggagaatacttagctaggacttaaatctttctataagcatattgttagctagttggcatcagaaagtctaaatttatgccctctaacaaccaattcaactgaaaacatatttgtcaagcaattacataactggagaaaagagctgatgttctttttgcatagttccatctaattttgaatgacacctcttcttgtccctgctgatctctgggcccatcccttcagaaagcccctgtgctcctgtttctaatcgtgaatgcggtcgaagtgcaacttcgacggacgcattcatttgtaataatcttcttcatagtaatacccatcata

SEQ ID NO: 227776 - DNA, 1227 bp, Homo sapiens
ctcagtaatataggttcaattttggaatgaaagttgggagatgaatataattttacctgcagaaatgagctgcctgtctagcacaggggtcatcaagttttaatgtaaaagttgaaatagtaaatccagctttcaggccattctgtctctgttatgatgacttgactctggcattgctgcccacaagtagccagggaaaatacatgaacaagtgggtgtaaaacttatattagctactatcggcagggggctggatttggcctctgcctgtggtctgcccagctctggtctagcctacctcttctgagaacacattctgtaattaggattacataagacaagacttcactctactgacaacagtatttatagttctctaaagaatcgaatgaagtctgattttctgagtcacaatggaaatattaaggtgggtggttgtgaaagaaatcccaacattagaaaatacaggcattctaaagattaatgtctgggcaaaagaacacactgtgtttttctactaaaaaacacaaaatgagaaacgagcatgatggggaagtggccactacccggaccctcttgcctatgccccacatttaccgtttgcctgggtttagagacactgcccttttccaagagccagaggccccaaatggaaactttacccttcctttttgctatctatgaatcaacagaaagattcctcctgtgactctttgactcctgaggaggacaatgcagcgctccaggctgttttctccagcacgttcatggtgggtggatgagattccctctccatcccagcacagtggtgggcttgttcaggcttggcaccatcgaccaacagccccaacccgcctggacaataggaacattcaacaatctgtaagttggaggctcaactcatttgtcttttacataactacattctttttttccataaggagaatacttagctaggacttaaatctttctataagcatattgttagctagttggcatcagaaagtctaaatttatgccctctaacaaccaattcaactgaaaacatatttgtcaagcaattacataactggagaaaagagctgatgttctttttgcatagttccatctaattttgaatgacacctcttcttgtccctgctgatctctgggcccatcccttcagaaagcccctgtgctcctgtttctaatcgtgaatgcattccagcacaaacataaccaagagcc

SEQ ID NO: 227777 - DNA, 438 bp, Homo sapiens
agtaaatatccatagtctttgctgtctgtcactaaaggtcagaacagataccaagatgtaggaggctgatagcaccagtgcagtttggagctgaaatctgccctatagtacccccagatgagagcaaagtcctctttaaaagctcgctaagaccaggcacagtgactcacgcctgtaatcccagcactttgggaggccgaggtgggtaggttgctcgagcccaggagttcgagaccagcctgggcaacgtggcaagatcctgtctctacaaaagatacaaaaattagccaggcgtggagacgtgtgcctgtagttcaacctacttgggaggctaaggtgggaggatcacttgagcccaggaggttgaggctgcagggagctgtgattgggccattgcattccagccggggcaacagagtgagaccctgtctcaaaaaa

SEQ ID NO: 227778 - DNA, 406 bp, Homo sapiens
gaagtggtttcgaagtaataagtagaaacaaaaagtaacctaacctcttcaagataagcagcagaaccagcaagagtgctgctgtgctgtgtgaggaaaatcaattatacagaaggcaattaaacctgtcacttcaaaactgtcaaatacaaacgaatggtttgtccttaaaatgaaaatagtgaatcattccacgtggaaaagaattgcttcatatcatttgaagaacttcaaaataaaatatctctagtgaggccctacacacatattaagctagcagaaataggctggaatgataaaatttcatgttggtcaagctgtgggaaaaccagcatgcctcacacccctggtggggttgtatattggctctgtgtgtctggaaagtaatactgtaatatgcaaccag

SEQ ID NO: 227779 - DNA, 725 bp, Homo sapiens
  misc_feature (330)..(330): n is a, c, g, or t
cggatcccaatgtagtgtcaataagttttttacgagacctcattcaaacaggggtaccaatgatcatggagaagactttgaattccggaagcactgattggacaggtgatgaaccagcttggacaaccgcttgtcaaccaactgctgcacacctgctgcttttggcctccccccctataaccctacccgatgtggctgaaatgctctgggagatcatccggttgaccagaccgactttttgtcgatggttagaaaattccttaaaggtttgcccaaggaaacaaccgtgggagccgtcaccagtgacaccaccaacaacttacgaacttnccacaagccaagtcactagtgctgaggaatgtaaacaagtttgctgggccttgcgagacttcaccaggttgtttcgatagctcacactcctgcactgtgcctgtcacccaggaatgtcttttttaattagaagacaggaagaaaacaaaaaccagactgtgtcccacaatcagaaacctccgttgtggcagaggggccttcaccgccaccagggtgtcccgccagacagggagagactccagccttctgaggccatcctgaggagttcctgtttgggggtgtgagggaaaatcagcgcggattttaaaaagatggctgtggcctgcccggcgtggtgggaggggagctggtttcctggtgaactttctaaaaggaaaaataattttaagtaaaga

SEQ ID NO: 227780 - DNA, 693 bp, Homo sapiens
  misc_feature (109)..(109): n is a, c, g, or t
  misc_feature (118)..(118): n is a, c, g, or t
  misc_feature (177)..(177): n is a, c, g, or t
  misc_feature (184)..(184): n is a, c, g, or t
  misc_feature (195)..(195): n is a, c, g, or t
  misc_feature (298)..(298): n is a, c, g, or t
catatctacccttggaacaccgggattgcaaattgaagtgtcatgaggtttctacgaggcctcaattcaatccggggtaagccattgtccatgaagaagcctttgaatncggaaaganctgattggccaggtaatgaccaacttggacacaagcttgcaagcaagttgctgcacacntgctgcntttgcctcccnccctataccttatgtcgatggttagaaaattccttaaaggtttgcccaaggaaacaaccgtgggagccgtcaccagtgacaccaccaacaacttacgaacttnccacaagccaagtcactagtgctgaggaatgtaaacaagtttgctgggccttgcgagacttcaccaggttgtttcgatagctcacactcctgcactgtgcctgtcacccaggaatgtcttttttaattagaagacaggaagaaaacaaaaaccagactgtgtcccacaatcagaaacctccgttgtggcagaggggccttcaccgccaccagggtgtcccgccagacagggagagactccagccttctgaggccatcctgaggagttcctgtttgggggtgtgagggaaaatcagcgcggattttaaaaagatggctgtggcctgcccggcgtggtgggaggggagctggtttcctggtgaactttctaaaaggaaaaataattttaagtaaaga

SEQ ID NO: 227781 - DNA, 557 bp, Homo sapiens
ctgtcaagctgtacacttaaaatttgtgcaccttactgtgtatgagttacgccttttaaaagaggaatggattactagcagtaaacaggagatgcccacatcctccacgaatatgtcagctccaatttaggctgacagacaggctatgtccatggcctaccaccaatggtatggctaaaattccatgtagatttggagtaaggggggaaaaatggagttcagctcctggctgaaataattacaaactgggttttcatcaaactcaatgccggctggggcattagaacgtagactgagctgctggacaattcttcattgtgtagtattgcctggcattcccagcccctgctcagaaatgtctgactgcttcccaatcaccttaagccaggaacaagggacggagcaacattcttcatccccgcctctcagaagcctccccgtgtcctctgcagtcattaccctcccctactgaaggtaacctctactctgattttgataaccatacgttatttttgcttgtttttgatcttcataaacatggaatctctcaggtatac

SEQ ID NO: 227782 - DNA, 725 bp, Homo sapiens
gaagacatttattttgagacaaatatgagtgaccaatggcccaaggtacagtctcaagaggtcctaagaacatgtacctatgatggtcgggctacagcttgggtttatacaatttagggagacataagacaccaatcaagacatgtaagatgaacattggttctgtgggaaaggcaggacaattccaagcggggatgttccaagtcataggtgaactcaaggatcttctaatgggcaactggctgaaagttattgtctaaagacctataatcaatagaaaggaatgtctgggatgactaaggcaggggtccccaacccttggggcacagacagataccagtccatggcctgttaggaactgggccgttactgcaggaggtgagctgcaggagcaaagcttcacctgtatctacagccactccccattgctctaattactgcctgagctccgcctcctgtcagatcagccatagcattagattcttacaggagcacaaaccctattgtggacagtgcatgcgagggatctaggttgtgcactctttatgagaatctaatacctgatgatctgtcgctgtctcccataattccccaatggaaccctctaattacaggaaaacaaactcagggctcccactaattctatgttatgatgagttgtacaattatttcatgatatattacaatgtaataataatagaaataaagtacacaataaatgtaat

SEQ ID NO: 227783 - DNA, 532 bp, Homo sapiens
ttatggcaatagaaacagctaagtcctttgagttctcactgtattcccataacaggtataagtgcttaacacacacgcgatcatctaatccttgcaagaactttgtccagtaggaaatgttacattatttctgatgagaaaactaagggaggtagagagatgttaagggacttgtatacaataagcaagaaattcaatcccagacacccacgaataactgatgtgatactatgaagaaaacaaaagatcacaagatggggtgtgcgatagagggaagctatttttataaggaggttgtcatcatctctctggagttacacgtgcgtttaagccaaaatgggtaggagacatgtacacatttaggaagagatatattttctgtgcaaaggccctgtggctggataagaccagtttagaaattcttatctattggagcctaaattcagtgatctctctgctttataaatgtaaaatcactaactgtggggcctctagcaaataaaacccaaagccttggtgacaggaggacagc

SEQ ID NO: 227784 - DNA, 514 bp, Homo sapiens
ggtggaggcctcccggggccgggcctgcctgggatggctgcacttgggtccccagctggagcagggcaacggggtccaggagccagttcccctcagaaggggaacgtacagacatgcagaccctaacagacccactcattttagattcacctctccatggggtgaggaacagagagatcgtatcacctgccaacgtagcccagggaaagaaaagctgagtctgcaaacagggccagcagaaggtgcaaactgctgcccctgttctgttactccctccacccagagccccagtgacaaaaagaaagagaagctgggcttaactataccagaattcacggcagggcgatgtcagccatgtttcctgagcctatcaaccaccgccaccagcatcaccaacaatatctaccagtttttacagattttagtgaagaaatcctacagtaaaagattttgaaaaatgactttccccaatgtatctcttgaataaatacggacattgatatgccttattatt

SEQ ID NO: 227785 - DNA, 234 bp, Homo sapiens
agttgggtctgtaatttaagaaatgctaagataacatgttcttaagttagaatatgatttataatgatcaatttctagaagtctaaaaaagatctcttagaactgaaagtaggcattaaaactttctgagtgttcataaatacaatatatcatttattcctaacactgttaaatttaagatgatgtgattcaataaagttatttgtgttaaaatcaatgattttaacatgaatt

SEQ ID NO: 227786 - DNA, 426 bp, Homo sapiens
cattaactgtggctaattatttctttatagcttagagtggaggcacatctgagttgctttggcactcacagttacaggaagggagggagggcagcttaaatacaatatagaacccgtggggagacgaagggaggagcaatttattgcaggttcggcatccccaatccagaatctgaaacgttttgagaactgacatgctcaaaggaaatgttcactggagcattttggatttcagattttcagattagggatgctgaactattaaggataatgcaaatattccaaaatccgaaaaaataaaaaatccaaaacacttctggtcccagcattttggataagggacattcaacctgtaatctcagcctagcttctgaagcataaaagcatagcagcagacaaacatgcaaataaacttatgtccaaccc

SEQ ID NO: 227787 - DNA, 428 bp, Homo sapiens
ttagttgtgtaaaggtttaaaaacatgatcacgtgatcaagacttttttcccccacttaaaaagagaggaagatgtaggataggaagaactttggggctgtgtgtggtggctcatgcctgtaatcccaacactttgggaggccgagatgggaggatcacttgagctcaggagtttgagaccagcccaggcaatatagtgagacccccatctctatctttaaaaaaaaaaaaagaactttggatggctggtgattgcatttccaatggattatgtcttaagtattatacaagttttatgagattaagaggaatgtgagatagcatgagtgaaatcatggaaaaatctacaaaatctatactgactattagaaaaacaactgcaatcacatgttgtaattgcaaatttgaaaacactactatcctgtgtg

SEQ ID NO: 227788 - DNA, 371 bp, Homo sapiens
ttagttgtgtaaaggtttaaaaacatgatcacgtgatcaagacttttttcccccacttaaaaagagaggaagatgtaggataggaagaactttggggctgtgtgtggtggctcatgcctgtaatcccaacactttgggaggccgagatgggaggatcacttgagctcaggagtttgagaccagcccaggcaatatagtgagacccccatctctatctttaaaatattatacaagttttatgagattaagaggaatgtgagatagcatgagtgaaatcatggaaaaatctacaaaatctatactgactattagaaaaacaactgcaatcacatgttgtaattgcaaatttgaaaacactactatcctgtgtg

SEQ ID NO: 227789 - DNA, 288 bp, Homo sapiens
tctcaaaaaaaaaaaaaaaaaaaaatcttaggacccagtcacagagccacaccctgctgcagaagaggctgccaaaggcagtccttattctgggtgatcaagtgcccaggaaaacatcaggagtttgctcctgaggaagagaaaggagagtggatgccagggccagctccaatctgagacacacgtggcctgcctggaccacatggtcagcttcaggactctgcccacctccctgatgcatccccgacccctttcgcaccctcactcagttccagccacatggccgtc

SEQ ID NO: 227790 - DNA, 306 bp, Homo sapiens
attctcctgcctcagtctcccgagtagctgggattacaggcatgcgccaccacgcccggctaattttgtatttttagtagagatgaggtttcaccatgttgatcaggctggtcttgaactcctgacctcaggtgatctgcctgcctcggcttcccaaagtgctgggattataggcgtgagccaccgtgcctggccagctacacttatctttatgaaaagttcttctctttcactattcttgtcattgtaggcttctagttctttcacctcttttttccttctcttaactcccttctgtcatcctcc

SEQ ID NO: 227791 - DNA, 542 bp, Homo sapiens
ttttatatcaactttaacatttacttacgactttgttaaattggtaaaattctttttcctttatctgttttgtaatcaaagaaagactattagactgaaaagtgaatatcagttttcctaatagttactttttcctaaaaagtcttttcatttaacatttaagagagaaatctaatgttatatgacttatcttttgtacataattatgacagaaagttacaggaagtatttttaaaaactaatgtgttgagtctcaataacataagttttaaaaataatttaacagccttagttaccctaagtctgcttttcaacaataaccaaaaaaaaatcttccatgcagtgtgcccttgctcccatttcatatgcatgattgattttaaaggctgctttgcagaagaactccagaatccagctgctaagacttatattacattgttttcaaacataagaaaaaactcactgatccttaacatacctctgaaaaaactatacttctccatctaaccaatggagaaactaagggataagaaataaagtac

SEQ ID NO: 227792 - DNA, 690 bp, Homo sapiens
aaaattcatcatgataaaaggctggacgcggtggctcatgcctgtaatcctagcactttgggaggctgagacaggtatatcaccggagctcaggagtttgagaccagcctggccaacgtggtgaaaccccgtctctactaaaaatacaaaaattagctgggcgtggtagtgggcacctctaatcccagctactcgggaggctgaggcaggattgcttgaacctaggaggcggaagttacagtgagccaagactgcaccattgcactccagcctgggcaacaaaaccaaaactccgtctcaaaagaaaaaaaaatcataatgaaaatgaagtgaaattgcctaaatgagtccaacttgaatattagaaataaagttgaacttttatataattgtgaatagcttaacatatttaaattatttgcaaatagattgtgtttattgaagaatcatattggctagatgcccattttcatttactaaaatgaatcaggaaaatgcaagatgatattttaaaacttttgctaatgtatcaccagtataactttccttttaaaattaaggtgatagtaacaaaggaagttaggactttgatcattttaaatcagttaaatcactgaaacgtgggaaattgttttacaaaacttttattgattacactttaaggtattaaaaagtactataaagctatca

SEQ ID NO: 227793 - DNA, 716 bp, Homo sapiens
caggctccttgatgacttgtttattgactaacaacatggacaaggtaaaaccaagagacaggtactacttatgaataacacgatgtctgcaaatctctggacagctttccctgtctggtcccagcttcctccatagtcactgccttgccccagtgatggaacacaggtgtcactgccagcaatggaagtcctattcttattgaatccagtctctctctatccctgccaagaagacttagcattaccatttgctgaaatcctggtagttcatagatttttggacctaatcaagcttcatgttcgaaaagtcttaattattgccaccactgcagagctctctacttgttgcctccagaccaagtagaaaacattacttccattgttgttttgacttttgctgcacatccatttcaatttccacaaagagcgcccatggcacagggagtctagatgaagactacctttagcctgtgtgggcacaccactcggacactttgaattctggtatgaagtccacatctccagccaagactcctccttcccttataacactacccctttctggggtcctcattgtccttttctatcatctggtcttgatttgggctactgtagtatatcacatgtttgattcctttgaaccacaaagggaatgagttgggttctcaatcccatacctcctaaaatgctcctagaataaaaacaagtaaattcga

SEQ ID NO: 227794 - DNA, 395 bp, Homo sapiens
agaattgttctatcgtggattttgcatttctaatgagcaactcagtagattgtcaaccacaatctaagagcatcactccaaagccactccctaaaagtgtggggattttaaatgagtatgtctagagaggctaatgtttccaacttagtagtaaagtttatggcattcctgggaggactttttttaattttaatttaatttaatttatttttttatttttatttttttgagacccagtctcgttctatcaccaggatggagtgcagtggtgcaatctcggctcactgcaacctctgcctcccaggttcaagtgattcttctgcctcagcctcctgagtagctgggattacaggcacacgccaccatgcccagctaatttttgtatttttagtaga

SEQ ID NO: 227795 - DNA, 216 bp, Homo sapiens
aaaacattgtgtcccaagaacttcatttaaaaagctgggtagtggtgcccagaaagttgccattttaaacatgtgtatacacctctcagaagagctcgttaagaagaggaacaatgtgtgatcaaaaaagtggtcagtgtgaaggtgcttgctgggtgtacgacaggccaggtaagagaacctccaaagtcttaaggaggaaaattccaacacagt

SEQ ID NO: 227796 - DNA, 244 bp, Homo sapiens
atccaacccagccctttacaggtaccctgtagtttcctggtttccaaacttcaactcaatgattattaaaataatgtttctagggtacataaagcacttgtacctaaacctggcataattttttttaactattccctttatgagagaagcacttagctaaatctaatttttttttttttttctgagcttcctcagttcttccattcccaggataagctcaatgcttaggcatcggtttccacta

SEQ ID NO: 227797 - DNA, 413 bp, Homo sapiens
tagtaggttgtttactacagtcaggtgaattaatatattcatcttcttgtatagtttaccttttttaaaatggtaacatctgaatctactctgttggcaaatttccagcatataaaacaatattatgaactatagtcatcatgctgtactttagatctctagacttattcatcctatatgcctgtaactttgtatccccccattctgcccccttccccactcccatgccctagtcaccaccgttttctgttccttcattttgactttagattctacatatatgtaagatcatgtagtatttgtctttgtgtgtctggcttattttatgtagcataatgtctagatttacccatgttgttgcaaatgacaggatctcttttttaaggctgaacaatgttccaacatatatactg

SEQ ID NO: 227798 - DNA, 461 bp, Homo sapiens
ccaaaaagttgggagccattcaatcgtccatggacaggtgaatggataaacaaaatgtgttatatgtattagatagaatattattcagtcttaaaaaggaaagaacgtttgatacatcctgtaatacaggtgaaccttgaagacattatcctaagtgaaacctgccagtcacaaaagaacaaatattgttggattcctcttacatgaggttcctagagtagtccaattcgtagagacagaaagtggaatggtggttgccagaagacgggagaaaaggagaatgggaagttagtgcttaatgggtgcagaatttcagtttagggtgatgaaaatcttctggagaggaatggtggtgatggttgtatgacaaagtaaatgtacttaatgtgaaagaactgtatacttaaaaatgattaaaatggtaaattttgttacgtataaaacagtttttaaaaatagag

SEQ ID NO: 227799 - DNA, 318 bp, Homo sapiens
ttgtgtgtgatcttttctgtcttccccaacttgtaaactttttaatttaaaaaaaaaaagaagatctttttccctctctttcccttcacctggttcaacctgcctcctggttgttttttgctgtttggtaaagaataattcatgaaaagtaaaaaagtttttaaattgcttctaccatggatgagcagaacaatagcagaaactcctattaggttggtgcaattacttttgcaccactctaatacaaatttaaataaattaaaggaatttaactaggcttctcttcatttcctatgtcaggaaactattttcaacatt

SEQ ID NO: 227800 - DNA, 445 bp, Homo sapiens
agcagcctaagtaaaagataatttctagaagtggttgattggcttcagtgtgaaatgccattcggaagtcatggacaaggaaaaggacactggaccaggtaactcaggaaccattagtaaactcagagcagtttctgtagaatggagactaaagtaaaaaattaaagggttcagaagtagatagaggaaatggcattagcaggcaaagaatatgtactgacgtggtggtgatgcagagagagatgagagaagggaaaaagtggagaagagggagaaagggcaaggtggaaagggcagacaaagaaggagaaataggccgggcctggtggctcatgccttgtagtccctacacacacacaacacacacagagaaaaattagataggtatggtggtgtgcacctgtggtcctagctacttgggaagctgaggcgaacggattacaag

SEQ ID NO: 227801 - DNA, 276 bp, Homo sapiens
tcgtctcgaggatcccctgttgaggtgtggcaggcaaagaatatgtactgacgtggtggtgatgcagagagagatgagagaagggaaaaagtggagaagagggagaaagggcaaggtggaaagggcagacaaagaaggagaaataggccgggcctggtggctcatgccttgtagtccctacacacacacaacacacacagagaaaaattagataggtatggtggtgtgcacctgtggtcctagctacttgggaagctgaggcgaacggattacaag

SEQ ID NO: 227802 - DNA, 226 bp, Homo sapiens
gatcatgtcatttatacccgtattgtttctagttgaaacacctctgtaaagtcaactaacctccctctcccacctggtacccaataaacgtgaaagaggagaacatgatttccactcttcagatagatttgctttgtaacttctagctccagggataaccaaggaatgatacagaagatatctcgactttaacagaactttacccctctgaggtcccagggaaggt

SEQ ID NO: 227803 - DNA, 508 bp, Homo sapiens
agaaaaaaaccaacaacttcttagcataaaggcagcataaataaagttaaagaaggtgaggtcactgagagacaaatatttgtaacagactgaacagatacaaaattagaattcagaatatatgagtaatttctaaggataaacagaaaagcaaaaaacagaaaatatttttaaagtatattctcaaacagttcatgaaagatgagatggagtttcgccctgtcgccaggctagagtgcagtggcacaatctcagctcactgcaacctccacctaccgggttcaagcaattctactgcctcagcctcccgagaagctgggactacaggtgctccaaggtgcttgagtttggaaacatgagacaaaaccagaaacagagaccctgggagagtctgtggtctccatttttccgctgagcaaaccacaggcttgtgttctgcctatctcccacttcgcacatgtacagcattgtagaatatttacatggataaggattctatgatatagta

SEQ ID NO: 227804 - DNA, 149 bp, Homo sapiens
tctcgcttctctcctccccactcagcctcaggttggcacctgctcaggtctcttctcacaccctcaccccaacctgatgacactcagcctagcatcagaactccccactgggcttctctttgccaaaatctttcccacacaggggtccc

SEQ ID NO: 227805 - DNA, 442 bp, Homo sapiens
agactagtaaaaacagataattcttcaccactagactgactgtacaagaaatgtgtaagggagtcctatatctggaagtgaaagaatatctaccatcataaaactgttccaaaatacaagtttattgaaaaataaaagtatgctcaactgtttataatcacagacaaatggaagtaactatcacaaagtcgttaaatgggccaggagcggtggctcgcacctgtaatcccagcactttgggaggctgaggcaggagaatcacttgaacccgggaggctgagggtacagtgagccgagatcatgccactgcactctagcctcggtgaccgaaggagactctgtctcaaagaaaagaaaagaaaaaaacaaaaaactggtgaatatgtgtaagaggcaagttgaggtcaaaatacggaaacagaacctaggtgtgcaaaccggg

SEQ ID NO: 227806 - DNA, 580 bp, Homo sapiens
atcaagtgtattagactgaatcatatgcagttgttgattttgacagtttttgatgtacaaaactagcagtttctcatagctcaacctagtagctttcttctgaatgatagggaacctctgccataatgagatgattttttccttcaaggaaaaggaaccacttagccacataagtactgataagaaacatgctcagcataattcctctgtagcatgacctcctgagtgctcaaattgtattataccaggaaatttggcttattgtgaagttcaatggttttgaatttatggcattttaaatcttaattatctgagctgctatcatttaccactgatgctttagtctcacatgtggaggacaagcaatgtttagtgacctcttcactgcatcccatagcacattcaatgtctgggaaatgttctttgtttgacaacttctgtactaaaagtgttgctgcagtagctttgtgcccctgtcagtcttggtagccccttaagatttggaaagtaaatgaactgaaatcttgttttcaatggccatattaaaattctttttttttttcctgtttcttctaaacca

SEQ ID NO: 227807 - DNA, 444 bp, Homo sapiens
agtaatggttcaagaacattcttcagatccatggttcatggtttctctaggagtggaatttgggatcagggagtatacctgtcttcaggtttacaagataatgtcaaactgctttccaaagtggtttataagatttcctatggctccaccatgcttgccagcacttggtattgtcagctttatcaatctgatgatttcaaaatggaatctaattctggtgataactggcattttcctaattactaatgaggctaaatacaggagtgactcaaacaatttaacaactagacatagctagtacagtaggactccgactaatccaggtattctttaacttctggtgtgagaaggtatgtaatctaagaacctcatgtagccagggtggcacttgggggtctcaatgtaatgacttaccaagcagtgcataatacttaaaaaaaaaaa

SEQ ID NO: 227808 - DNA, 467 bp, Homo sapiens
tcaacttaatcacttctgtaaacactagatcttcaaatgtggtcatagtctgagctactggggattagactttaacatatgaatttttggcgggacacaattcagcccataacatagaacatgagaaaagtagaagaatccaggatgacaccaggatttttgacctggtggagtcatcgtttgctgagatgggaggactctggcagaatatcagttcagtttgaatatgttaaatttgggatgccccatagatatccaactgcagatgttgagtaagtagccaaaagctcatatctggggtttggccgagaggttggagctggagatacaaatctgggggtcattggcatagagatgctattaaaagctaggagactgggcaagatggtgacgggagtgagtggcggtatgaaagaggattaagaaccgaggcccagagcactcctacattaacaggtcaaaagaag

SEQ ID NO: 227809 - DNA, 450 bp, Homo sapiens
gtctcaaaaaaaaaaaaaaaaaaaagtgaaagcttactagacataatgattaataataataatgattaataataaacattttggggatttagctgattttattaacaccatttaaatatcagtctaggtgtagtgatagtataacatactggttaaaagcatgggcgctacctttacatttatggtcaattgatttttgacaaggttggcaagatacatcaatagggaaagattagtcttttcaacaaatggtgctgagacagcaggttatccacatgcaaaagaagaaagtggatgcctgcctcatagaacacatgcaaattaacttaaaatggatcatagtcctaaagtaagaactaaaactataagactcttacaaaaaaaataaaatccttgtgactttggaataggcaatagtttcttagatatgacaccaaaagtataagcaaa

SEQ ID NO: 227810 - DNA, 331 bp, Homo sapiens
gcatggtggcacatgcctgtgatcccagctactctggaggctgaggcaggaggatcacttgagccctggagactgaggctacagtaagctgtgttcatgctactgcactttagcctgggcgacagagtgaaaccctgtctcaaaaaaaaaaaaaaaaaaaagaaatgagatgattctgaatgcatgaacgcagtgtatgactttaccatgagcagcatgcctgacttgactccccagagcagctttctgcactggggacttccttaatggaagctggtcaaataattatatttactatcaatttgacttaattgtaagatttcccttcctg

SEQ ID NO: 227811 - DNA, 501 bp, Homo sapiens
ttagaatactaaatcaggctgggagtgctcagaagaattcagagcttctgaatttcagactggtccacacttgactcatctggctatttaaagtgaatgtagcttcagaattagggaacttgatatcgtgaaccccctgcaaatccgcagcagagcagagatgcctagattcttaatccaactctgtcatttactgacaatgtaaatgacagggtttggctgtgtccccacccaaatctcatcttgaattcccatatgttgtgaaaggaacctggttggaggtaattgagtcatgggggcaggtctttcccatgctattcttgtgatagtgagtaaggctcacgagatctgatggttactgtaagggggagttttcctgcacaagctctcttctcttgtctgccaccatatgagatgtgcctttaaccttcttccatgattgtgaggcctccccagccacgaggaactgtaagtccaataaactcctttcttttgtaaatt

SEQ ID NO: 227812 - DNA, 373 bp, Homo sapiens
ttcagagttcattcgatacataatttttgagggtctcctgtgtgcagggcactaggacattggaaatatagcagtaaaccaaaaatacagacattctgattttatgaagcttatatcctattgagacaaactaaataaataaataggaggtatcagtaacttacaaaattagtgtgatttgtttgagaagccagctttcttcctaaaacgtaccactttttgagaaacgggggtcatgtgaggaacatgtaggaggttgggtagattcagatgagatatgtagtgaacaggctttgggtggcatgaggccaccaaaggcccagaaagagacactgagaggagtgacagaaatatggaggagagaagctctcaa

SEQ ID NO: 227813 - DNA, 519 bp, Homo sapiens
ctttcaggttcatatttagtcacatcttataatgaaacaaaccgtctctagaacgtatgcatttgagcactccagtactcgagtatccaaggaaggtgaaccagcccaggagtcctgtaaacagccatccttccaaattaaccgaaaccgttaacgtcagagcttgatggaacaatcacccatcattttaaacaaaatcatcaggctgagtttgaccaagagcccggatttaccacctctgaattaggacataggaccctccgagggattttacaagccattctgaggaacattttgggtcttgtgctcaaggaaatggcttcttcaaggattccacaagataagttataccctcagttctttgctttacatggacaagagctttgacctccaaaactgggtgaaatgagacatttgcttttatttgtttttattttaagcagctcttcatatgtataatttccttttgccccattgagaagagtacattataatttccagagaattcaaactttcttt

SEQ ID NO: 227814 - DNA, 635 bp, Homo sapiens
aaaaacaagtaaatacatggggcttgcaattatttagggaaagaagcagggcgggagtaatacacattcatatatatgcttttgtgcatgtataaaatatgtatgtaagactacataagaaagtcataatagtggttgccttgggagacaggtctgatgtggaagacaaagtctcatctttttgtactatttttagtgggatacatgcagcactgcattaggatgtttcaataacagaccacatagtacagtggtcccataagactatcaagccgttatttttactgtgactgtcctatgtttaggcatgtttagatacacgcatacttactattgtgttacagttgcctacagtattcagtacagtaacatgctgtgtacaggtttgtagcctaggagcaatgggctataccatatagcctaggtgtgtagtaggctatgccatctaggtttgttgagtatactctgtgacatacatgacatgacaacaaaattgccttacagctcatttctcagaacatgtccctgtcatgtgacacatggctgttttttgatggaaataactgggaaaaaaaaatcgactcttgttcctaagggtacataaatgttgaatgcattataactcatgcttatgc

SEQ ID NO: 227815 - DNA, 434 bp, Homo sapiens
tcactcaacctttggcctggggaataattagaaaaatgaatgtttcattcccttgagaaggctttttctttgtccactggaacccaatactggcgctgtggctgtgttttagagagtgtctagtggcgctaacttgctaaatccatgaggtttatcactgttatgcacagtgcccaccaagtgttggcaacaagcaactcgtaaatgcattttggcaattactatgaaattttcagtgtcatatgggtcttccacctcctaaaagcttttgtcctgatgaaagcttttattttaactgtagtttttccctaatagggctctatttcaaactttaacagttgtaattatttgtatcaacgtgcaatcccacacttaaacaaattggagcccactccagaacaaaattaaaatggcttcaaagaatgacagaaaaa

SEQ ID NO: 227816 - DNA, 362 bp, Homo sapiens
cggccagaggcagataaacatggtagcctatcttcacagtttgtacttttcctagatgtcagatggggagtggattagcaatggcctcagtccctagacactgtgcaataccctgatagtcagtcttgtatcccgccccgaggctccactcccttgacaatggatctgaaagctttcttgtactcagaatcatcagatggaaaggcccacccttgtagtccctgaccaccatgttatgtagatggctgctcccagtagtaagaaatccatgaatgggaagatggttcccaggaacattcacccagcaacaaaaaaattaaacacaaattggggcttgaatttttgtggcaatcaatgactga

SEQ ID NO: 227817 - DNA, 414 bp, Homo sapiens
cgaattattccaggagtaactcaataggaaacataaaatgttaaagctggtaggttcttaaacagaaatctgtctagtttcttcatttataggtgaaaaactgaggcaaggtattggtagaagaaatgagctggattccctttatcttgactcttagatttttttcaataatacttagttcttagtttttcttaagtgttttttaattaaaatttttttcgatatcatagtattcagtcatataaccacctttgtacttatttatgtgttactcatctctaggatggtaatttccattctttttgtttttaaagatgaggcaggagaatcacttgaatctgggatggaggttgcagtgagccgagatcacgccactgcactccagcctgggcaacaagagcgaaactccacctc

SEQ ID NO: 227818 - DNA, 455 bp, Homo sapiens
aaacctcatgtcgaattgtaaacctcagtgttggaggcagaacctggtgggaggtgactcaatcatggggacagatttcccaattgctgttctcatgatagtgagttctcatgacatctggttgtttaaaagtgtgtagcacctcctctttgctctcttcctcctgttcctgtcttgcaagttgtgcctccatctcttcaccttccactatgaccataagtttcctaaggtttctgaagccatgcttcctgtacagcctgcagaactgagagtcaatgaaacctcttttctttataaattaccagtctcaggtagttcttaatagcaatgtgagagcagactaataaaacagccaactgatttttgacaaaagtgccagcaacttacattggagaaaggacaacctcttccttaaatgatgctgggaaaactggatattcataatgcagaaaaat

SEQ ID NO: 227819 - DNA, 553 bp, Homo sapiens
gccccacctggtcttggtttgatcagcagttaaaattctgtgactcgggcttccttcccgactgcccaccttcatgatgtgtaaggaacatacattttgagggtacctcacccactgttcatttgcatggtcaaagtgaaaatgagtggaagttctccaaaaatgatggccaacatcctggcacctccaggtgtgagaaatagctttgcttggtgaatgggataatgtttgtcaggatgcagtttagacagtcccaagttggaggcaggccttgagggcagaagattctgtgaaccttgggggacagcttttgggtactcacagatataaaccctgtgcagaaaaaaagaagtgattgttttcaggatgcttataaatcgagtgaagcaaaagaagaggattctgtgtctgccatgagatgaacgccctgctcttcacgaaggtgtgcctctaataaagagagccaaagccagctgggtctcaccagattcctatactttctcaaggatgttgggggaggttaatcctttatcgaaactaaagactggtttat

SEQ ID NO: 227820 - DNA, 398 bp, Homo sapiens
acacacatacccaccaacatacacacttgccaacataaacgcacacacacatacacacaaacacacccatgtggtcctactaattcaattatttattttttaaagaaattaaaaaagactgggcgtggtggctctcgcctgtcatcccagcactttgggaggtcgaggcggtggttcacctgaggtcgggagtttgagaccagcttgaccaacatgaagaaaccccgtctctactaaaaatacaaaattagccgggcatgatggcgcatgcctgtaatcccagctactcgggaggctgaggcaggagaatcgcttgaacctgggaggtggaagttgtggtgagccgagatcgtgccactgcactccagcctgggcaacaagagcgaaactccgtctca

SEQ ID NO: 227821 - DNA, 435 bp, Homo sapiens
taaataacttgcactatctcaatcatgagtgttacacagttctacccaagaggcattctcctatcagaccaacatccagacctactctataaaccactgccctacctggctttccttcagtattttcacttccctgtgcctttctttatatttcttattgggcatgttttttcaaggcataggcaataactgcatccctcacttactataactatgtcatcgtgaaggtcacttaataatcctcagtctttgagcattggttttccaattgcatttatggactctaccagaaacttttaaaaggctcaaatcgatagttttctgattatggtccctctgaggggattctttttaggcttctctccgagatcttgcctgctttcctcttgtacatttctgtgagttttggtcattttgttggatttgttagtaact

SEQ ID NO: 227822 - DNA, 274 bp, Homo sapiens
cttaaaacactatcttttcttggttttgtttttttccttttttttgagacagtgtctcactgtgttacccaggctggagtgcgggaactgcaggtgtgtgcctggctaatttttgtgtttttttaagagacagggtctcactatattgtccaggctagtcttcaactcctaggttcagtccttccaccttggcctcccaaagtcctgggatttgctactgataagtacagttttttttaaccctagtttttatcagtagcaaaacataatagtt

SEQ ID NO: 227823 - DNA, 441 bp, Homo sapiens
cagaaaaaaaatgtggaaagaatgaataacatatctgtctttttaaaaaactgtcagctatttttcagagtggctctattattttacttttccactagcaacttatgagtgattgtattttttacatcctgaatagcttttgctattgtcacaatttttaaaagtcattttgataggtgtgtagaaatatctcactatggttttatttgacatgtccatgatgattaataatattgaacatgtttcatggattatttgacatctgaatatttttcttgttaaaacgtccattgatgtcttttgtccattacctaattggatcatttgcatttttaaaaaaatttgctgttgtgttttgtgtcatctctatttatttttgtcggttttgatagatgtttatcaattgattgattttttcaataaaccagctttttgtttcac

SEQ ID NO: 227824 - DNA, 579 bp, Homo sapiens
cgcatcattatcaactgattacctattagaaatgcaaataattgattcccacctactgaagccgaaacgctaggaatggcatcggatgattctgatgtaaagtaagggtgtccgccctgaaagcaggtgtgacttatctccgttttccaaagagcaaactgtgacctggagaagttaaataacttgcccaagatcacagccaattaatagcaggacctgcttccagcccagttcttctggacctcaaagtactctgggaatcagggtcttttgggttgattttacctaaacagcgtcccagtgcttctcctgagcgctgctttctgaatattaccctaaattgctctccaggccctgggatcctcacggacacgctctatccctccaggtttagactcaagtgatatggagcttaagctctccctgacacttcccattgcagcccagtgtctctagagggacagctcccacagtaatgcagctgcaatgagtaagatataaaagctcataggctttcatacaggaattccactttaggaagtaaaagcaccatgtcaaggttaatagaaaaattttaaa

SEQ ID NO: 227825 - DNA, 406 bp, Homo sapiens
acttccttacagagtgggctgcagcaattttcgagatgaacagtgagagaaaaggggtgttctacctaggcatgtctacagtgaggggtcaggttatggagtttttatgaaggtttaaggaatttggcacagggtcagggttagttgttttggacaacaatctgaatagctttatctgttcctgggaatgttcaaggccctagcttgggttcaaaccagctgggaaagaccttctgttggccagatgacagagcagtcaagaccctctgatttttggtcagaacacagaaaaatgtgaaggaaactgggggaccctacatactcatagtcaacagtactggattgttcacttcgaaatttgttaacagggtagatctcatgttaaatgttcctaacaccatttttt

SEQ ID NO: 227826 - DNA, 499 bp, Homo sapiens
atcctttatccaatccaataagaatcaaagaatcctttgattctttctggatttactgaaggaaaaaagagtggcagagataaaccttggccagtcatgctaatgtcacttaatttgacatttgatacctgagatcttgtgactctgtaatagtaagtaatatgcttcttctgatctcggctcaattccccaatgaatgaaaatgctgtcagtatttatatccttctgctgaagtacatacagatttttaggcatcagaccttgatttaagagtcttttaagctctattttacaggagaagacctggtaggagtaaaaataagtacatgaaagccagaatgcctggttgaaaatttctcctctcaatttaggtcctgttacttaatctctataaaatggagataatgacacttaattccgtgaatcttaaataaatatatgtaaaatgtctgaccttcaacaagctttaggctattaaatgattttcactcctaaaatc

SEQ ID NO: 227827 - DNA, 522 bp, Homo sapiens
cttcaggacagtgggctcccttctggcccaaggcaggtccagaattactgtccaggagccaaggctttgaatcagggacctcaagagcccgcttgatgttctaccccactatggctgcgcctgtacctaaggtgcaaaagtcccctttacttttccctctacttttctccagcataaggagtctctccccatagccaccatggctggaaatgtgctgagtctcatttgaagccagctagtctcagagtctcacagaaggcccactgcatacctaggtatcgctggtatcgctggctatttggagcttaagagctcttcaatcctctgacatcttgattgcagcctttgagagaccctgggccagaggatccagctattgccatgcttaaatttccaacccaaatgtaactgtgagataaatgttgttttaagccactaatttttttaattactgtattaattttaacagataatacaataagagttttaaaataaaaattttgatattacaataaaaaaaat

SEQ ID NO: 227828 - DNA, 547 bp, Homo sapiens
tggctctccggagactctgtcccgcgcgctcacctgctgggtgggccctctagaagagtcaacacctttacttatttttgacccatagtccccatcctgcatgcccgattctttacaaatgttaggcggaaggtgggtggaaactgagaattcagcaaaaccctattttgtgagaaaatacttccttgctttggaaaactgaaaagaatatttcaccaccaccaaaggctggtgatggagcaatgagagaggaaggcaagtggtactcttaggtttccaaatttgcctccatcatgcccagctgagaatcccgatagaagggctgtgatttgcagggtagtccctccgacattccaactgtccaagctgcggctagccacctcctctgctctcctcgaatgtgttatttgcattgctgcgcgtgctccgagctgcagcaggggtcctgcggctggagtggatgaaaggccccttccagcccccaccgccgccctgcgtctcggtctcgctcggaattggcctaagttcagccacagggcgcggccgc

SEQ ID NO: 227829 - DNA, 370 bp, Homo sapiens
caccaggtaggaatagaactgtgtatgttttgttctctgttgtagttagccctaatctcgaactgagtttgccacctggcttgtgcttgataaacacttttactgaatgactcaatgaatgaagactggtatgaggatgccctcatgcctcctcacttctacgctccactcactgtatttctccaaagattcagaaccttggtaaaaacaaggctcagaaaatataccctaggtcaacttctcaagacctccaaaaggaacagggaggtctacctgaattttagaagcttgtacaactggggcactatacaagcttttcagaaaggtcttatacccacatcttcagtactcaataatatgttacctgctg

SEQ ID NO: 227830 - DNA, 264 bp, Homo sapiens
atacattttatgagttcaaatatttttcagaagaaatcagtaaaagcattgaaaactattccagcaaataggaagcactttaaaccaaggttatggatgaaaatgtgtgtgtatcaaccccagtttacttctgggttgcacagaatagagaaatcttgatttaatccagctaagaattttcaaatagtatccattttgttttgttttaaacagctcttcttgcaatggtagaggctcttcaattaaacagagatggtaacaggc

SEQ ID NO: 227831 - DNA, 441 bp, Homo sapiens
tctgtggggtgcatggcctgtgtgaagactgctcagtcaggtacctttagctcttaggttctccacagatagagttagtgtttccatttcttgtttttctttagtgttttgtagtgaattctgagagaatgggggcagaagtatcttttcctctgtcctcttatattcatcttggtatctctaacagctagctttgaattattttaggtcattaactgtatattaatttaatatgtacagtgaaactaaaaaagaggaaatagtcatcttaatctctgatatacacacataagatttttttttgagacagggtcttgctatgttgcctaggctggagtggagtggtgtgatcatggctcactgcaggctcaacatcctgggctcaagcagtcctcctgcctcagccgtcgacgcggccgcgaatttagtagtagtaggcgg

SEQ ID NO: 227832 - DNA, 549 bp, Homo sapiens
gggccagacagcccctcacagagccaattgtattccttccagctcagccgcaggagtttctgaggatgaggaaatgggccacacgcaagcaaggggtgggagctggcaagatttccgtgccctccccccaagctatctgctggacccaagctctaggaagaaaagctttgtgaaaagacttctggcttcactaagacacattaaagaattaattataaagtaaagctgaaggagaaaattaattttagaaacacaagaggttacaattttttttttcctggagatgggggaggaaacacagttattttcgttttcatcctgggggcaagctgggagctgtccagtcgataacctggccatcagaacaaggtttgtaattaaaaggtcagtgacctggaaagccagggccccactcccagagcttctcagtaatgacggagctattaaattaagactgttatgaaatcaatgctaaaaaagctttcatggtaacgagattccattcaaggacatgcaaactacctcatgaaatagacgtaaatgataaaa

SEQ ID NO: 227833 - DNA, 484 bp, Homo sapiens
cctcagcctccccaaagtgataggattacaggtgccagtcaccacacctggcccatgatggattttcagatgacctcttttacttctaatctctccaaagagagatattcttgtttttaaggtcaatattgtcataatagtcatgatgtcctcacctgaatgttgtaggtgtcagaaagttgtttcaatagtaatatgccaccaggcagaccacctaatctttaaatccagttgtagcactcaatttattttctgtttggggcactagtgcactgagccaagtcaacttgtccacttttctaatatttcttacagctaaggaggaactgttggtcctttgatatcctagaatgctttctacttgtggaaatgctttttaccctaatacactgattatattgtctaaatgtctaaacagggattctctggttagaagtgaaatgagagagtgacccattttcagatttttagagattggctcccg

SEQ ID NO: 227834 - DNA, 421 bp, Homo sapiens
tctttgctgcctctgccctgaatttcctattgtttggtggacatctctgcttgatgtcctgctggtttttaaaactcactttccagctacaagaaggctgtggctggccgggcgcggtggctcacgctggtaatcccagcactttgggaggctgaggcgggcggatcacgaggtcaggagttcgagaccacggtgaaaccccgtctctactaaaaaatacaaaaaatcagccgggcgtggtggcgggtgcctgtagtcccagctactcagagaggctgaggcaggagaatggcgtgaacccgggaggcggagcttgcagtgagccgagatcgagccactgcactccagcctgggtgacagagcgagactcctctcaaaaaaagtcgacgcggccgcgaatttagtagtagtagtagtaggc

SEQ ID NO: 227835 - DNA, 461 bp, Homo sapiens
acagagccaaactctgtctctaaaaataacaataaaagaaaaataaattgtttattttctttcctttgcccttctttctgttctcttcaataccggcaggggagtgttacagaaaatattggtgttaaccctggggagggagttcttgtagctttaacccagatccagactcctctttctgcccacatccagaccactgagcttgaaatagagaagggcccacccagtgcctctagccctgtgctgtccagtgtggatgcccctggccatctatggctttggagcactggagtgtggttgggccaaattcagatgggctgtaagtgtaagaacacactggtttcaaagacttaatattttttaaaaagaatgtaaaatatcacatcatttttctattgattacatgttgaaataatattttttatatattgggctaaataaaatgtactatcaacattact

SEQ ID NO: 227836 - DNA, 584 bp, Homo sapiens
cccgagtagctgggactacaggtgcccaccacgcctggggaattttttgtattttttgtagagctgggttctcaccctgttgcccaggttggtaattggaaggttttaaacagtctctgtatgtgagagtgagcacatctagccatccagtgaggataggagtctccatgcaaccgaatgtgatttaatgttgttcctctctaggactcatctctaaactccactcacaggtcagaaaacttttccaagaccatgtctccacattttgagtttgaaaaaatgagatcagggtcttacagatgttttgggattgtagaagataaagggagtaatatgggtttggaagaccctgttattcatgacaatgcagaagggactagagcaatgcttatgtttttgtgtctgtgaaaagggggcctactggaagggaataaagtcaacagatgcataagagaccaagatcttcaggcacatggaagcttgtatttatccactgtctacaattcccagtgtaagcagagaccagtgtacaggctaagaagtactgaaactttctttgacttaggaaattgagctgcatcttg

SEQ ID NO: 227837 - DNA, 501 bp, Homo sapiens
ccccaaaagagattaggttaaccccaaagtagactctggctacctttacttggaaagtttatgtttggtgatctaccttcacttcatcactctatctcgccatcagaggaaacggggccttctggacaagaagagaatagttacagaaaacaagaaggctacgtgttcaagctttgaattcaacttaaccccattacacctggtccctcggatcccagaggacatgctttgcacattattcagaagttacagagttcaaatataaacgtagatgactcttttgatgcccttgaggttggcttttatgcatcaaaaaaggttattcagaggttacttagctttaaaaattaatatttaatttactaaagttacaacttaaaaacttcgcttaccgccaggcatggtggctcatgcctgtaattccagtactttgggaggccaaggcgggcggatcacaaggtcaggagttcgagaccagcttggccaacatggtgaaacccc

SEQ ID NO: 227838 - DNA, 517 bp, Homo sapiens
gggagcaagaaaaagggaaaacaagaaaggaagggcctccttcactggctgcctttgtcctgacacctcctttatttgagttactaacatggggttccagaaggtatttttccataaaaaaacattgaaatcattagctgaactggatagtctactccattatgtcttggataggttctgaccttcacacatggccccggagaataagaaactgaagaaagcagtttttatggcaaaaaaaagaaatgtaacgaggaaggacatatctggcttggtgagccaaggttttgcatgagagacagctttggcagaaaatatgtttggctgcatttttttaaaacccaaatgaaatagctttattttactaagtcccttgggtaaaatgtgtatgtttttacaatatatattacctacactattaagtagaaaaatgtcagtagcaaattggcacagcttcttagactcctaatatgtatgcctagtgttccattattggaatgctaagcttgtgggagtt

SEQ ID NO: 227839 - DNA, 763 bp, Homo sapiens
tgcccagtctggtctcaatttcctgggctcaaccaatcctcctaactcggcctcccaaagtgctgagattacaggcatgagccaccgcgcccggcctctttaatgactgatttttgtgtagactccagcttgggtgacagagcaagaccctgtctcacatacacaagaagagagaaatgattaccagtgtttgctattacaaataatgttctagtaagtaagtacacttatacatatttgtatttttttaatataaaaatttgaaagggaatgtggagtcttaggaagatccatatttaaaattgttattttatgatgctctccaggcagactatagaaaattatgtaggttaagaatgtttctaggatattcaaaatttagtcctcttttaagagtaggtaatgaggatggccacccattgcaacatgggttgaaaaaatagagtcatccaaaaccatctcatggaattctgattgagttgttgatgggtttatgacttatatttacaccattagaatataacaccttaagggtaggtgggcactgtcttattcccagcatttttcctggtttagaatactgccgggcacataacccacacctaataataagtatttgacttttttttttgagacagagtgttggccaggcgcggtggctcaagcctctaatcccagcactttgggaggccaaggcaggcgaggtcgggagtgcgagaccagcctgaccaacatggagaaaccctgtctctactaaaaatac

SEQ ID NO: 227840 - DNA, 513 bp, Homo sapiens
actattttgtgacaggtcaacactagaggttatagaacaagattcaacaaaataataaaatgaactagatacaatttcagtggccttgtgaggcttttcagaataaaggttaaccaccaaatcccatttatactcattaccttcatcatcttctgttaagacaagcccacaatctgctttcttcccttcttcactgccctaaagttattgctagtactaaattttctatttcttttctcctctcattgttatgactttaaggtacagaaaggggttgatctacctctttcaacaccctagaaaattataataacaggcttcaacaacctatgataccaagcagaagaaagaatacctggacttgaagacaggtcttttgaaataaaacaggcagataaaaatttaaaaagaaaaaataaaggaaaaacaaaataaatgaagaaagctacgaaaattgtgggacaccattaaacatatatttgtattatggacattctagaagagaagagaagg

SEQ ID NO: 227841 - DNA, 317 bp, Homo sapiens
aagctcgccatcatagctaagtgtgtcactgggaaatgtactaactatagcaactgaacacttctctaagaaaatatacatgtttttacagctttcagctcctttttaagtgcatatttgtgggttccaaaatgtttccatatgtcttcaaggcctgattttggttatgagcctcttgtctattttcatgtactgaggggaaaagatgcaactatttaagagttaaaataggaatatgtaagttgacataaaatccaaaaagagattcatttataactagaaaattttgttttagttatttagttttaattacactt

SEQ ID NO: 227842 - DNA, 891 bp, Homo sapiens
accccttgccgctccatgcagtctcccttggcaggtgtggaatccaggccattagtgtgagctgaacacagcctgccaggtcgagtgagcagaatgagctcagtgggctgaagcaaaaatttgggcaaaggcacgactggccacagaggtttccagccagaaaagcaacaccccaaagatcccataataataggagtgcaaaacctgttgtaaactgtgcatgccagggatctaggttgtgtgttccttatgagaatctagctaatgcctggtgatctgaggtggaacagttttatcccaaaaccatccccagccccatccctgtccatggaaaaactgtcttccacaaaacctgttcctgatgccaaaaaggttgggcactgctattctataccgctgtaggatgactatagttaacaataatatatagtttcaaaaagctagaaggaagacattgaatgttcccaacacaaagaaatgatacatgtttgagatgatggatatgctgattatcttgatctgatcactatacatgatatgtattgtaacatcactaggtaccccatgaatatgtacaattatgtgtcaagataaataagtaataaaataaaaagctttatcttattccccaaaaaaagacagcttgaggaaaggaaaaaggaagattactagcagagttgtaggctattgtctatggtactttactgcatgaagaaggtacagaggctgaatggaagaggggttgtaaaactggagtatgggctttcctttcacatggagctttgtttaacagaagtctagaaagtagatataagaatcattatcatggttagtttatgtcaaaactatacatactgtcttattatacttaattaaatgggtaatcatttg

SEQ ID NO: 227843 - DNA, 323 bp, Homo sapiens
ctcatttgcaggtggtgaccctacacccaggcaggactgtaaatccacgctgtttgcctgtgactgatttgggatttggatttctgatctggctgagtgatgtgtaaaaacctcaagtagtcaacagctccctattggctatgcatctgaggggctcaagagcattgtttattccagcaagtgtctggaatacattatactggatgaattggctcctgctactcccgttttggagaatatgaagaattttatactgtgctaaaataaatgtactttgtgcaaataactttcctaaataaaaaattttgaatatgactctatct

SEQ ID NO: 227844 - DNA, 505 bp, Homo sapiens
tgaaatgtggagagaaagtaatttgaccacttgcttgccctttgctgttccccatcatcaaccactgtcttcaacagcggagggtcccagatgctgcagggagggggagaactgcagggagttcaaataaaacattcacatttcacttcacacacactgtcccttagactttctcttcctatttaagcacatacatccaaccacactcaatcaaatccctgactgctccatgtgagagttctgcttccagcatgacgtggtctgaaagttcatctgaagacagctgctcactcccgggggctaacaccgccccttgcatgctgatgtccttgtagtcattggtctgatgccacaataaataattcctaaggctgatgctctatttctgccctgagactctcccctttttctccaagctgtgccccattccttgtcttagtccaggttccctacactccccaggccaatgcttttgaataaatcttgacgtcattgaatgaaaaag

SEQ ID NO: 227845 - DNA, 566 bp, Homo sapiens
atgttggccaggctggtcttgaactcctgacttcagatgatctgcctgcctcggcctcccaaagtgttgggattacaggcataagccaccatgcccggccccatttttcttcatagcacttatcattacctgacattatatattcactttcttattatctgcctctttagatgagctccttgaggacagggagttggttttgttccctgctgtatccccagcctcaagaatagcacttgctcagcagagtagcgctcagtgagtatctgctgagtgaattctgagctttgttgaggttcatttaaacatttagagcactagttcacattcctgcagtttgtgggtgaagggctactaagtatttgacagtttttccggaacctgtttctgatcaactctgctctaaagagcagagtttctgctcaacagtttctgatcaacagttgctctaaagaaaactttccacttttggaattgtatttgaagcagcaaacaagggctgctgggggactgtatgtcttgttcattttccccactcccaaaacactgatgatagaaacctgcac

SEQ ID NO: 227846 - DNA, 482 bp, Homo sapiens
aaggaaagcaaagctgaggagaaaatccattgatccctggaggaccctcacgtggcattggtactttggatcacaagactgccccacgggcagaccccccaactctgagccagaccccatgtcttgtatagattacgagtacacagaaggtgcatttactgaggctgtgcttctgttttgggtttacaaatgtcatcaaaatggaagacccagctgaagttaatttgttggatgcctttttctctcaattcactggaaaaaaaaaatgtttaactttttagcttccaagttttaatttctaaaacaggtttcttgtggtattttgcaacgattttatcatcaagcctggtgataaattgtttttaaagggtaatgatgtattaatgtacctttgaatttacgattctcagtaggaaactaacccaagacctaaatgttttcttttctagagaataaaaaagttaagtacatgtttccttctg

SEQ ID NO: 227847 - DNA, 263 bp, Homo sapiens
aaaaatttgctaggtgttgtggtgcacagtcctacccactagggaggctgaggcgagagaatcagtttgagccccggagttcaaggatgcagtcagctgtgatcacgccactgcactccagtctaggtgagatagtgagatagggggagcaagaattctgtgttcttaatcactgtactataatgagatagtacatttgctttttttttttgagacggagtctcgctctgtcgcccaggctggagtgcagtggtggatctcgg

SEQ ID NO: 227848 - DNA, 438 bp, Homo sapiens
aagacgtgcctccttcctttttgccttctgccatcattgtaagtttcctgaggcctcctccaatcatgtttcctgtacagcctatgaaatcatgagtcaattaaacctcttttctttataaattaccaagtctcaggtagttctttgtgctagaacaaactaatacagtccctcagcttctttggtgcctaaggtccaccatagcatgtgtatttcaaattgcaatttactgctatttcctgaatacactccactctttattttagagagtcagtatctctgttgtttaagttgacataatctaatgtcagaagcaagatgcaaaggctccaagccttctttgttacttacagttacagcactgttatccaaacagtaacaaagaaagcctttggaaggctttcaagtatctggcgatacttgaaattgtgtatgata

SEQ ID NO: 227849 - DNA, 336 bp, Homo sapiens
agaggtgctgatattaggtaagtttcttcagttgagcatctattgtccattttttattaaaagtaggccttggctgggcgtggtggctcatgcctgtaatcccagcactttgggaggccaaggcgggtggatcacaaggtctggagttcaagaccagcctggtcaacatggcgaaaccccatctctactaaaaatacaaaaattagccaggcgtggtggcaagcgcctataaccccagctacttgggaggctgagggagagaactgcttgaacctgggagatggaggttgcagtgagtcgatatcacaccgctgtactccagcctgggtgacagaa

SEQ ID NO: 227850 - DNA, 453 bp, Homo sapiens
aattttccattttaaaggacaagcacagtggctcttgcttgtatcccaaaactttaggaggccgaggcaggaggattgcttgagccaggagctcaagagatcagccttggtaacatagtgcatctctttttaaaaaaacagaaataggctgggcatggtggcacacacctgtaatcccagctactagggaggcagaggcacgagaatcacttgaacctgggaggtggaggttgcagtcagctcagatcatgccactgcactccagcctgggtgacagtgagactccatctcaaaaaaaaaaaaaaaaaaaaatagaatcaggaaacagatggactacagggtcctgttttcagagggtatgtcttgttcactcaggcagttcttaggacatagttggtcctatataaattttccttgagttgaaatgatgagtacctttgaacatggacagca

SEQ ID NO: 227851 - DNA, 553 bp, Homo sapiens
gccaaacctgcagctaaaaatagatatcctgttgttagagtgaaaaacatttgcttagagcataattcattagcatcttttgcttaaataagatgcttggaagttaacctttgattcagatatttttaagagaagtagaatatggtttctctgataacataacagtcctataatttgcatttataagatttggaattggaatttagaaactgaaaggtggatttttgctgtataatgatagaattcaaaattgacgaaccttttctttcataactggagatcacctcattataaccaataaatattctttatcctgctacagtacaatataaacctcttaaacactgttatatatttgtttatagaataatattagatattaaagggacattttaacatgcaaaatactaagaattaactggattgttattttcctgttactgaaatagatctgttttaaataatctgctgttttaaatttgaacgaatattacaaaaacaacttaacattccttaggatttctatggatatcaaactgaatatacctggttg

SEQ ID NO: 227852 - DNA, 489 bp, Homo sapiens
ttagatgtagtttgtgatttcataggccccaaatacatatctaattattttacccaaatttatattgcttctatttttattgtggtcataagtacagttatgaatagtctgttcaatacctttgcctatttatctgagtttatatgttttctgtcaattctcaatctaaaattttaagaaagatttggggacttggagtccttcccctggctgggaattgctcctcacatggccagtggcagaatgttatctttatcagatatcaggctaccgtcaaagaatggcccactgctagacatttcagaaattaacacagaagatcttctgacttcacctactgttggcgtctgtgtttcacagttttcttgcaacctacactaaaagagtgtgtcccaaatcctcaaatatcacagcacaccatccaaataaaacatgtattaggaatgagaaaaatatgcttatatctattattacctagtcatactttaa

SEQ ID NO: 227853 - DNA, 539 bp, Homo sapiens
ctggagacatttttccctgccctaaaaatggaacacataggaacagaaaaccaaacaccgtatgttctcactcataagtgggagttgaacattgagaacacatggacacagagaggggaacaacacacaccaggacctgttatggggtaaggggtgaggggagggaacttagaaaatgggtcaataggtgcagcaaaccaccatggcacatgtatgcatacctatgtaatacacttgaacgttctgcacatgtatcccatttttgtttgttttgagaaattttttttttaatgggacacaagagaaggacagttcattttcagtctcccagtgttgtcaacccctgtaatacctgaagctataacagccaacttggaatcatgaaagaaaccagcctcagtggaaaagccaacctgctgaggatggcagagcagaaagatgggagacacctgggcccccaggtaatgaggtcactgaagacatgctctatctctagattgttgttatatatgataataaatgcttaaataactttggat

SEQ ID NO: 227854 - DNA, 455 bp, Homo sapiens
  misc_feature (75)..(75): n is a, c, g, or t
agctttaggcaggcaggtgttggggagaaacttacagtggcccagaattaagagtcctggctcttcagggcagcntgagtctcttatggggccatgggaccaaaggggataacactggccttgctcctttgagcccgagggtaggtgagcggacaggagccagcctgcagctgggccttgggtcctgtcctcccctctggatctcagagctctgggagggagtatgttgagatgttcacagtggggaggactaaaggccctactcttgggcccagaagcatagctgccttcacaggaacatgcggagggctgttacaagtagcagggagatgggcttttaaaaaagtgtgtgtatataatttgagtgataattatgggccaagcagtgcttcccttatttgttccccaaggagtcccatgagctagaatggttatccccatgttgtagttgacaa

SEQ ID NO: 227855 - DNA, 490 bp, Homo sapiens
gttgcaacatttttcatacaaggacagtacacacattatagcaatttgatgagcacagcttgctacattccaaggaaatttgctttaacatttcttgaggagaaataatgttctgaggaattcttatttctggcaccacttggtcattcctaattatttacagaaaaaagcagaagttgcaactgcatgctacatgtctcaagctacatagccacattcctcccagggctcagggaaatttagagttcgaacagctttaagtgaattatttaatttcacaacatatacacagtgaaatgattatcgcagttaaacaaaataacatatacctggccttcaacagtagcttttttttgggtgataatagctactttagcaagatttcagtatacaatacaatattgttaactttagtcctcatgctgtatgttagatcttttagatttactcattgtacctaacctaactgcaaatgtgtactctttggccc

SEQ ID NO: 227856 - DNA, 461 bp, Homo sapiens
cagtcgtggtatccttgagggcaggcattggttttttttttaaatttattacaatatttagcttattcctagtagagagcagtcaatggatacattttccaaattgaattgacttcatgtaagtgaattttttaataaacagcaaatttacacggtgaatattaccttttcagaatctgtttattatattaatattgatttctcaacattatacctctattaaaaactctttgttaatgaagggttttgacactaaaaaataaactaatatatagcataacactgaagtttaagaaaattattgtatgaaacattcagtaaaagcaagcacttactaccctgtcagtccaaaatgtaatattgtgcaatagcctttaaattgtattgttataaaaatgttgcttaactgggcccttaggaattaataacggttctaaaaataaactaaatggattattttc

SEQ ID NO: 227857 - DNA, 387 bp, Homo sapiens
tttggtgtgtcacacctattgtcttcatgcctcagccagaaataagaagagtcctcttcaaaactttgttaggctaggtcagaaagttagatgagggatgaatactgcttcagtccgttttgtgctgctgtaacaaaatccctgagactgggtcatttataaaaaacagaaacttacttctcacagttctgggggctgggaagtcctggatcagggcagcagctgggctgatgacggctgctccctgcttccaagatggcaccttgaatgctgcatcctccaagaaggaggaatgctgtgtcctcacatggcagaaggcagaagggcaagggggcaaaaggggaccaactcccttagtcaagtctctgtggaagggcacctaatcca

SEQ ID NO: 227858 - DNA, 270 bp, Homo sapiens
gtgatttgaagggaagatggaaagtggccctttacctccagccaaaaatgtctgtcctatacatcagcagaggctccaaaatccctgtggattttgaagcttttgagtccccaggatgactaattattatgcagtttcctcagaaagggaatcagaagataaggcctaatggctgggcacagtggctcatgcctgtaatcccagcactttgggaggccgaggcaggaggattgtttgtgctcagaaatttgagaccaccctgggtaatat

SEQ ID NO: 227859 - DNA, 167 bp, Homo sapiens
gttctggcatacttctcccttgtcttaaacttctaccgtcctttaaacctaacgaaaccattgatcctattaccttatactctgatccttttgatacgtgctttgtcttctgtgttcaactcaaaacacacaattgtaatactcatttcattgcattcatgttaact

SEQ ID NO: 227860 - DNA, 890 bp, Homo sapiens
ttcatctggagaagagaataccttgcaaaataatgaatgacattgatgaatcgttcatggcatgtgtaaacttaaggtattttcactttcaaatcagaatttgttgagtatgttactattctatataaatatgattttcaaacatttgtttattaagcatatattgtgttctaacaaaacatatatgttcgtcaggattttgcaatgcaaatctttttagaaaaagttatattgttcataacatgtaagataaacataccctgtgagactgaccagaatagatatgagaagtcttctatgagtaacaaagtgagtgttttcctgtaaactgagacccatcacaatgcaaaatacattgcaaagactggtaagtatatgagaagaaagaagcctaaaattagaggagctgcaatgcacactgaaatcctgatggttatatacttaaaatttcttgctgcttggagtttcttgacttacaaagtttatatttggattcagtaattggccttgggacatttgaaaacaaagctgttgatttgaaaattaacagtgtgaaactggacaatgcatgcagaatgttgcaagaccaagtgaatgactactaaattagccatcacttcaatttcaaaccatattcagtagaaaattgatttatataatatgtaaaacaaagacatttataagaacacaatttcctatgcttggaacttttggaagagaagataattattcttcaatctacttaatattccattaaaactaattactatgcatgaccattgtgtaatgattctagtcattcctcagaactccaatctgagtgctcaaaatttgtccctgaatcagtttcatatagttacctgaataaaagaaatcagaagttaaagttt

SEQ ID NO: 227861 - DNA, 279 bp, Homo sapiens
ttttcttttccaaagctgtctctattcattgtcttattttattttataaaggagacaaacacaaataaatgaagtaagtggcttactcaaattatcaagtaccttagtttttatgctaattagattctagttctatgtttttctgccccgttttcactacccaggtctaattatttattaaatataattgatatttattggatagcaccttcaggatatgcttgcctagcctcattactgcacataaatacactttccacatgctgactttgctttgta

SEQ ID NO: 227862 - DNA, 2723 bp, Homo sapiens
  misc_feature (475)..(475): n is a, c, g, or t
  misc_feature (483)..(483): n is a, c, g, or t
  misc_feature (611)..(611): n is a, c, g, or t
aaaataaagaatagtctccatatgcaggttgcagaccaagtaaatgcagcagcaatggcatgcagaatttgagtgttctcaaaccaggccacatgatagggatgtattatttgtgactgtgttccactactcaaggaaattgatcagctcttccaaaaggacacccatgatcatattctgctcttttctgcaggacagcaaccacttagtttttaatgacaggctcaatattataattgtagaaacatctagaaaagtgaaattgtatgcgtttgtcttttcttttcagttctgtgcctatttcatactgtagataatattgacagttcttagattaggataaatcaaagaacccatgccagccaaggagtaccacataagcacttttgctgatgggtgaagccgaccatccatctcagcaggagagagtaaccttttcaacctaaaccacagtcagggaagctacagtccacancttcccanagaaatgtggttagagggcatctctctttctggttgggtagctcagtctaccaaactgcacaggcatttaatatttagagatgacttccagaagaggaagtttgtcttcagacatgaaaacaataagncctctgagatacaataaatacatacatacatgaattgtttatcttaaagcagtgattttcaaaaatcgctttaagaaacctcagttatatataaagagttgttactttatagcagaggagtcctttggccagtaattttggtaaatatgttgcaaactcaagcaggtttctaatactctaggacttatcaaatcttctgttatatttaagctttgtgaatcttagagagagagatagagtgcaacatttgtcaaaattatttaaccataaaatcaatgtattcatttcaacaatctcatgaaaccaacttttctgtgaaatatgctttggagaatatgttaagatttaattctttcttatagaatacaatatggatctatatgatgctaatttggtcatatacatgtaaaaggaatgacattttgttaattaaaattttttggtaaaaataattaaagtgatatttgatcagatttttatataggactagtgttttcccttcgtgtgtgtgtatatatatgtgtgtgtgtgtgtatatatatatacacactcacacaatattgtgtatatatacaatattgcagctactggttattgcagcatatttgctctgtgaaatcatcacttttactatttcacattctgagcacatactcttcttgttctttttttctttgtcttccaattcattatttgtgttctctgatttcattaagagttcttatttttgatctagttatctccctctctatcagggcaccctctatttctatctgtattaaccctctgaaaacaggaatacacagaggccactccaaacatggacatttgcaatgcctagaacattgtgccagtggatatgtgaatgaattattccctgtcccccacctgcacattattccgttttcttgctcattgccactgtatcagaagggcctttctttactcctaaccatattagcaccatcttgtcacatgtctttccctacctcttatgatctagatcattaattctggagttttaattttaaggtatactatatgggaaaaggaggcacctcaggagttcatgagaaatagcatgaaaagcttgggatgcttattccatggaacttaagacatttgctgaggttccagagtattatcaaaaaatttaagaagaaaaatcagatttttaatacaaagagcacatcatagatgtggtttgtagtttgtagacaaaaaataaaaaaataaataaagaacaattaaaaggcaacactgaattttaggatataaattataagtacttgaaaaaaaaagcaatgttgttttattttgtccagtgcaatttacataattgattggctacccagggtccattttccttttgcattattctaccccacccatccactccatgtgctgtggagaaggtagaccacatccccagctgggaagagagggcagagttgatttaaattaatccatattttgtatcccattgggcaggccttgattaaatagtggcaaaaataaaattacttttaattcttgctgggaatcctagatctaaagggctctgcctctaggcatatatgagacccagaattgttgtaaccattagataacacactaaaaaaaattatcatgcacagttaaaaaatcacagacaaatacagcaaaatcatgactgaaccatgacgtttcacaactctacttataacttaagccactttgtactgagcattggttacttccagcagaaaccatcctaaatgataatacaaatatattggaatcatctaatacaaatatatatagaatcatctaactgattcataatcacttctaaaccattgtttatatctccttttagaagatcttgtctgtttttgcccgaagtggacagatcacaaggtcaggagtttaagaacgtcctgggcaacatgatgaaaccctttctccactaaaaccacaaaaattagctgggtgtggtggcacgtgcctgtaaacccagctacttgggaggctgaggcacgagaatcgcttgaactcaggaggtggaggttgcagtgagccgagatcgcgccactgcactccagcctggagacagagcaagcctctgtctcg

SEQ ID NO: 227863 - DNA, 541 bp, Homo sapiens
  misc_feature (505)..(506): n is a, c, g, or t
  misc_feature (517)..(517): n is a, c, g, or t
  misc_feature (529)..(529): n is a, c, g, or t
  misc_feature (531)..(531): n is a, c, g, or t
gatgccccgggctgcaggaattcggcacgaggagagaactagtctcgagttcttatttttgatctagttatctccctctctatcagggcaccctctatttctatctgtattaaccctctgaaaacaggaatacacagaggccactccaaacatggacatttgcaatgcctagaacattgtgccagtggatatgtgaatttgccactgtatcagaagggcctttctttactcctaaccatattagcaccatcttgtcacatgtctttccctacctcttatgatctagatcattaattctggagttttaattttaaggtatactatatgggaaaaggaggcacctcaggagttcatgagaaatagcatgaaaagcttgggatgcttattccatggaacttaagacatttgctgaggttccagagtattatcaaaaaatttaagaagaaaaatcagatttttaatacaaagagcacatcatagatgtggtttgtagtttgtagacacnncacaaccgttntcacctccccananaaggccccat

SEQ ID NO: 227864 - DNA, 530 bp, Homo sapiens
tgtgatccagggtctgaactacgtctgagtggggtctgggcggctgtgatcatggggttcaaattgcgtctgagtggggtgctaccttctaaggccgcaggtgagactcacgtgccctggaacattccttgaggcagccagaccaggagggcgggggctgttgcctgacgtgccctcggtggcatagactgagtttattttcattctcctcctgaccacgttggccaccgagaaactcttcatttcctaaatcagatgtggacttgctcatctcaggacccacgggctgccctttagggaccaaaacacatgtgtcagccaagaacgagcaactgcaaataaaatcctgttttcttcttatattgttgagaatcggggccttgatttggttcccagattttaaaaacaagtcagagctgccacgattcagataaaatccaaactgtctcttacacctctaattatcagcttgccttctgggtaaaatggtgctattcaattattggtttttgttcacttgtcaaccacca

SEQ ID NO: 227865 - DNA, 541 bp, Homo sapiens
agcttgccgggagcaggcactggcagaggctgcaccagatggctctggctgtccccgctcctcattaaagcagccgcccgagggctgctgcccacctgaaatgcagaggtagctcacccagccctgctgagggtactgtgcccagccaagctgctgtccttagatacttggcctgctcagctgtgccctggaggcccctaactgaggtctgaaagccagaggccagtgagggcaggactggatacagcctcctctctgcatggatgggatgttgactgaaacccagagaagaccagagacaccgtagctctccctcgactcacacagcaaatgtcttgagacccggaaacagcagcgccatgccaaacccacccctggaacactgacctgtctgcatcttccagcaccccaaacctgggtgaggtgtgtgggggcagaagaggggtctccgtgatgtaactatgccctttgtaatagatgtatatgattttttaaaactcaagcagtgtaaaagaaagcagataagtgatcttcccgcgaa

SEQ ID NO: 227866 - DNA, 485 bp, Homo sapiens
aaggggtgtgtgagagataccaaggaggaaactcacaagacagggacaccaggaagcagctgatctttgctcagatgtcactttctcagtaaggacttctctaactttccgatttgaaaatgaaatccacagcctcagtaccatcagtgatgctatactgttagtttactttttaaaaatttgaaaatgaaaaggtgacatttaagcaaagacaaaattttaagaatttaaaaatgtgtttattattgtctctcccattggaatgcgagttctaccaggaactgcttgttcattcctgaatctccagcctggagaacagggccagcacatagtagattctaggtaaatgtttctaaaataagatgaataaatgagtcagtggagagtgggcgaaggaatgagtgagaaagcacatctgtcaagacgtcttgctcccctcggggagctgggtcctactcactgcatttctttccctcttgccacag

SEQ ID NO: 227867 - DNA, 333 bp, Homo sapiens
caggcccgcttcctcaggactctaaactctagcatttatttttttgttaaacagctttagtgaaatataactcacaccggatgcggggctcacgcctgtaatcccagcacgttgggaggccgaggcaggcggatcacctgaggttgggagttcaagaccagcctgtctctactaaaaatacaaaattagccgggcatgctggtgcatgcctgtaattccagtgactcgggaggctgaggcaggagactcgcttgaaccagggagacagaggttgtggtgagctgagattgtgccattgcactccagcctgggcaacaagaatgaaactgcctc

SEQ ID NO: 227868 - DNA, 337 bp, Homo sapiens
tttacagggtgggtgaactaacggaactaaatcgtttgtggagaaagtccggcccgggcctagcactgcaaacgcttagcagcagctcatgtcacaccattgccagggtccaggatcaagctgggggtgggcaccgctggggcgaggaggctggcccagagctggctgtggcatcagggtggataccaccataacccctgacacaatggcagccggtctcatgcattgggatggcacctcttctttttttttgagacagagtttcactctgtcgcccaggctggagttcagtggcatgatctcagcccactgcaacctctacctccctggttcaagc

SEQ ID NO: 227869 - DNA, 292 bp, Homo sapiens
ctggtgtccaaactgtcacaaagacaaccactgccatattaagcttctaatactaagaaaagtgtcaggtatacggtagtagatcctgatgaaactcttcagaaactgtttctgcactttacctcatctggcagctcttggtgtgcgctgaggtaatatattaaatttgtggtgtaattagtttagaaattattcccctagggaacaaagatggtcaagagacaaagcttgatctaaagttgacagcctgggagacaggccgaatttggaggtgttaccgtagcatatgtgg

SEQ ID NO: 227870 - DNA, 172 bp, Homo sapiens
ttacatcagtctcatgaggaaaatgtcttatagatttggaaatcagatctcagagaggtttttcatctgcccaatgtcagtttaaggtcgatctaagactcaaacccaggcttgtacattttacattccaatgctctttccatactaaactctgctttttcgttgtcataca

SEQ ID NO: 227871 - DNA, 345 bp, Homo sapiens
caacacgactcctggcctaatggactgataaggtaaacaagaagaaagacacaggcctgtacacataatagaaattgggtgtgtaccagcctgggcaacatggcaaggctctgtctctgcaaaaaataaattagccagaggtagtggctcacacctgcagtcccagccactcaggtggctaaggtgggaggatcacttgagcctgggaggttgaggctgcagtgagccatgattgcagcactacactccagcctccagacagagcaagatcctgtcaaagaaaagaaagaaaaaagaaaagaaaaggaaggaagggagggaaagaaaggaaagaaagagaaagag

SEQ ID NO: 227872 - DNA, 477 bp, Homo sapiens
ccttgagaaagaagagcaggctaaacccaaagttcgtggagggaaggaaataataaccagaccagagataaacatgatagaggacagaaaagctatggaaaaaaattattgaaaaccaaactaggttcttcgaaaagattttaaaaaactctgacaaacctttaactagattgactaagaaaaaagactcaaattattaaatcataaatgaaagagtagacattactactgactttatagaaattaaaaaggattgtatgagaaaaccatgaataactgcataccaacaaattggataggctagaagaaatggaaaaatttctagaaatacagaaaccagaaaaactgacccaagaagtagaaattctgagttccagctactcatgagcctgaggcaggaggattgcttgagcccaggaggctgaagctatattcactgcactccagctagggcaatatagcaagaccccatctctt

SEQ ID NO: 227873 - DNA, 1881 bp, Homo sapiens
caggtgtgagccaccatacctggccaatttttgtgttaattcatctgaattcttgaactccaagtttgtgtaagatgcaagcccagcatttccattcattacttaacagacaaaaaactttttaatcatgtcactcttctggagagaggacatttttcctactccaccctgtaacattcagtctcctgccagagtttcctctcattggccaaacccaggcagaggccaaatagaacagaagcttagaaaaaacagcctgcaggattggcttttttgcagcccagagcagaacagggaaaaggtgagaaatggacctgggcacaaacaggcctaggaccaacacaatattctatcccctaacaaatattccctgactgcaggtagccaacacgctgtgctcagcttgctattacagaaatgtgttagacacagtccctggtctgcagtcagagccactgacaccgtaactacacagattaacaacagcaccagttagacgatgtgtaatgttaaaagacagatacaaaccagtaccatggaaacactgcatgtgttcagcggtcacagcttgctaagggctactctattgacaatgcaggtatagagagtggcaaaggggtgtatcctatccataaaacccgaattcctcagttcatcaggacttttctcaggacaaaaaagatgttaccctccctcctctcaaaaaagaggattcagtggtcaaatacgtgttgggaaccctgagctcatcaaatttttctgtagcacagagtttctcactgcctaataggctaatgtgcactggggccctgcgagtgagatatacagcctgcagcattgtctggattcatctgaccgcacaggacaggagcatcaggagcctattttggcatttgctggactggggggagcagagagccaggcagcaggcaagaggcagaagacagaaggaaacaccaagaagaggagaggctcaagggctgagagaggcagactcaagtctccaaaaaagcctcccatccaaggcgcctgtgctgtgggccggcaggggagggtgcaagctcagaagaggtcactgaacttggcaatgccaaggtcatcgataccttcccgagagcagtgtcgggcagtggggcagaaaccagaatcccgagtggagatgtgacagggaaagctagcgagagttggccatgggtgtaaacccctctagtgacatttgccaatgagaccaaaggcaggcggtgctgaggagggggcagggttggagaagtgtgcttgttggttggtttcaaacagtgggataggagggacacttagcaatgtttacgggctaagaaggaaatggcgaagagtgaacatagaagcgtgaaggaaagggaggggccctggaggagaggctgactacagacagtggctttagaaagaaacaggacccctccttccctaactcaggaaggacacacagggacaaatggacagacagaaggggaggaagagaggcctcgtgtctttattttttccctgacatcagaggtaagagcatctggaagtgagggtaggagctgggttggaaacttaaacagagggtaaaaatttaagagcaggccaggcgtggtggctcacgcctgtaatcccagcacttcgggaggccgagatgggcagagcacttgaggccagtagttggagaccagcctggccaacatggcgaaaccccgtctctactaaagatacaaaaattagctgggtgtggtgggcacctgtagttccagctactcggagactgaggcaggagaatcgcttgaacccgggaggcggaggttgtagtgagccgagatcgcgccgctgcactccagcctgggccacacagtgagactccgtctc

SEQ ID NO: 227874 - DNA, 500 bp, Homo sapiens
tccaagaggacacactcagccacccacctcatgggactgctatgagaatgactgaaataattaattgtgaagagctttgtgcccctgggagtaagaacactatgacacaactggagaaactggttattttaccaaggcttaggctggaatggtgtgctttcctttaaagaatcaaacttgacttatggagccaataaaagcctcttgggaaaactggcctcatacatgtctacacagtccctgtatagggttcctgacctgtgatatattataaaacaagaaatttagttccaatgtatccaagctgtcccttcggaaggtgatcagaagagagaaatgagtttggaaaagaaaaggaatagctgaacaagagcaagtgatttcagaaatctaaaccctgagaaaacatgggtaacagagaagaacttctgctgtgatatctacttctgcagggagtagagaaacagaagtagaaggtaaatctgaggtaagccagaact

SEQ ID NO: 227875 - DNA, 328 bp, Homo sapiens
tttccatttctggtagtgacattgggcaaagttgccttaaagagctgttagagttctaattcttatataattaggtgttttagaattgtgacttgatcagggccccaagattatccgggatgatgtcatttctaagatgtaatctgatacgaaaatgaatttaaagagtaattttaaattaaataaatttaaagataaaaggaatgatttgaggctagtacacctaggactaggacctttggtcttctgattaatattatgaggcatggtatagtagatggagctttggctctagcataaacacaggctcaaattccagtcccatcac

SEQ ID NO: 227876 - DNA, 606 bp, Homo sapiens
atataaacatttgcacagaccgataacaggccaaaatatatgaagcaaaaactgaaggaagaaatagttctacagtaatagttggaaacttcattaccctactctcaataatggatagaagaaccagacagaaggtaagtaaggaaacagaggacttaataaacaaactagatctaacagacatacacagaacactctatcctacaacaagagcatatacattcttctcaagtgcacagaagacattttccaggatagagtgtatattaggtaacaaattaagtttccatagatttttaaagatatcatacagagtatcttttctgactacaactggataatgttagatatcagaaatagaactaaaactggactattcacaaatttatggaaattaaaaaacatactgttaaccagtagatcaaagaagaaatcacaagggaaattagaaaatacttagaggtcagctgggtgcagtggctcatacctgtaatcccagcagtttgggaggccaaagtaggaggattgctggaggccaggagttcaggacctgcctgggcaacatggtgaagccccatctctattaaaaactttaaaaaagaaaaa

SEQ ID NO: 227877 - DNA, 341 bp, Homo sapiens
cagggtttcatcatattggtcaggctggtgtcgaacacctgacctgaggcaatccacccgccttggtctcccaaagttctagaacttttaataaatagaattttacagtatgaactctttgtataaacctttcattcaacataatatttttgagaggcatccattttgttgtgtgcagtggtattttgttccttttatcacttttgagtaaggttttattgtagaaatgtgccacggtttgtttacccattttcttgttgagtggacactttcctgttgagcaatctctttcaatatcttgcctagatgaataaagctactatgtgcattcacatgcaagt

SEQ ID NO: 227878 - DNA, 453 bp, Homo sapiens
ctgtttcaacctcagccctggggtgagtggggaaagagcattgcatggctccattgctaaaggaagctcagatcaactctattctttatcagcctgagattcagcctctcaccgttatttttctctcctgggacttaaaggaagggggccagcaacctgggattactgttttttacctccacagggttgctgaccttgcctaaaagactaatgtaccttggaacaagcattttctgtttctttagtcccagtacctgcttcgaggacagacccccagcctcccaagaggatgctgctgctgagtagttgcactgaagccagtttctatcattctgttcctggattcaatgcatgatttctctcatggggcctccaaccaagttcctttctccttagtgccatgagtaatcaaaacccaacatgattgttttctgttaagaatatacaccaagt

SEQ ID NO: 227879 - DNA, 466 bp, Homo sapiens
cttctacttaacacattttaggaaatgcccatctgagaacctaaagattgtttccaccacatatttccatcaaaagtctcaaagctgctagtctgttttcctagatttagatggagtcatctcaaaacagcctcacatttataatatatatggtattttttggtctcaggctttatggttttaaacatcatttgcctcgcggtcaggtcacttagagcagtattttccttctctgcattatctgtccattagtgggcagagaaatcaacttggtggttacaacctaaatgtttttaaaaactgaaataaaactatcatcatagtaaggatatgtattacttcacaaaagtgtatgtgcaatgttgtttgtgtccatatacaatcacactgtgtgtgtgtgtgtgtgtggtcacaacataaaatacttattcctatgagttgcaataaaaaacaagtgaaagccact

SEQ ID NO: 227880 - DNA, 528 bp, Homo sapiens
catgtgtggctgctgagtacttgcaatatagcaagtgcagctgagagatgaattttacattttgtttaatttttattttattttattttattttttgagacagagtcttgctctgtatcccaggctagagtgcagtggtgcagtctctggtcactgcaacctccacctcctgggttcaaacgattctcctgccttagcctcccgaatagctgggattacaggtgtgcaccaccacaccaggctaatattttgtattttagtagaaagggggtttcaccatgcaccatgttacccaggctggtctcgaactcctgagctcaggcagtcctcccaccttagcctcccaaagtgatgggattacaggcatgagccaccgcgcccagcctaaattttgttcaattttgatcaatttgaatttcaatacttacaagtagctggtggctgcctattggacagggagctctaggcaagatctgccattaagttatgtaatcttcagcaagtcgcttcacagcagagtcctcccct

SEQ ID NO: 227881 - DNA, 483 bp, Homo sapiens
agtccatttatgcaaacgaaggattgaaattgctgagctctgattggcctgcacaactgagctctgattggccaatgccactgagccctgattggttgatagagcctagctctgactgtctggttctggtgtactctggcaaagcctcaatgttgaaaaatatttgtccaggtatattacatgggctcagggagaaaaaggcatatttaagcctctgtattcaaacactaatctgtaagctttgggaaaagtataagaacaagccagacatgaattatgaagccaggggatgtgctttgagatcctactaccatagggaaattcttgcaaaggctgaaggacagaggcttgtatatcagtgcaaggatatgccctcaaacagattggtcatagataatgacaaacgccagacttgtaatgaaggtttagcagcagcttctgatgcaagtcattaaaaccagtgtcaccgtctgcagagagtgt

SEQ ID NO: 227882 - DNA, 428 bp, Homo sapiens
cttggtgtcccacagtgctgggattataggcataagccactgcacccagcctccttatatttttatatatgtcatgaaggatagattagataatacgagttttttatcagaaaaatgagattgttttgattatatttaaacctctttcctcattcacacaatctggactttttttttttttttttttttgagatggagttttgctcttgtcgtccaggctggagtgcaatggtgtgatctcagcccactgcaacctctgcctcccaggttcaagcgattcttctgcctcagtctcccaagtagctgggattacaggcacgcaccactatgcccggctaattttgtatttttagtagagatagggtttcaccaatttgaggccagcagagacaacatagtgacatagtgagatcccatttctacaaaaa

SEQ ID NO: 227883 - DNA, 370 bp, Homo sapiens
ggtgtcgggttgccagatttggcaaaagaaaagtaagttttacacgggaatactcacactaaaagattagcccttgttgatctgaaatccatatttaactgggcggcctgtagtatttactgtggaaacactatccctaggggcaaatgtttcgcaaggcaaattttgattgccgaagagaccagaaatcctggttttgtgtcatttcttggagcacaagtgagcagttggagatgctgaatctgcaggcgccacagaaaggtgtttggaaggcagagaatgactctttccttattaaaatccactgcaatctatatttccttagatactgtacagctaccttcacaaattaaaagtttctgtatactta

SEQ ID NO: 227884 - DNA, 554 bp, Homo sapiens
gaaggactgaacgtttataccgccccctcacaaatccttatgttgaatctctaatcccaacatgatggtatttggaggtggagtctttgggaggtgattaagttatgagagtggatacttcctgaatgggattagtgtccttataagaagagctcagagatgtagttagttccctttccaccatgtgagaaaacagcaggaagacagccatctgtaaatcaggaactggatcctcaccaagaacctgaccctactagcaccctgatgttggacttccaacctccagagctgtgagaaataaatgtctattgtttaagctactcactttatggtattttgttctaacagcctaaaatgactaagacattccccttagtctgagagatattccttttggaacagaaaacaagagagacagtatagtgtggtggaaagagtgttgactttgcacaagagagacctgggttcgaatctcaacttttctatttaacttttagctacataggtgaatttaacctctttagcttttgtttctccatcagaaaaaaaaaaaa

SEQ ID NO: 227885 - DNA, 486 bp, Homo sapiens
atttagacattcctttcctccattgccaaatacttaatttgagccaaattatttatccttccagtatggtgctaaatttatctaactatacttttaattttatgagggcaggggctcaaactcatatttattagtgtcttttatgacatgtaatatagtgagctgtatgggaaaaaattttgttaaagcttatattattaaggaaacaataaactaaataacttagcagaaggttgttaaatttccttctgtatttgttttatttatttattttaaaagcctctagtgggataaagcttcttttgagtatgttaagaataaagggattttgaacaaatggtcagaataatggtatgttaggcatctgtggctgaaaaataatatttctaagatatcatatgtcccaatgattctttattccttatatctgttgttcttaaatgtgtttctgcaataaaactgtttaagtattagagactggaataa

SEQ ID NO: 227886 - DNA, 535 bp, Homo sapiens
acattttaaaaatatagtcctggaacactatcatcatgaaactcttctagcttttggaagagattctaaactatttagagaacaaagaagcaacatcatagttgcttgacaggagaggcattactttaggactaaactgataagagagaaaatgcaatttaacagataaaatgacatacattggtaacaatgcctgactctgagtgtaacaaatactttgaaataatatcttcaaaaattgaaacaataaccagaaaacatcattttataaactgctgtgaaacaaaagcttcttatattctcctcttgcttccaaagagaaatagccataaatgtttcttaaaatagtgggaggtaggttatactggactgatgccgaatgtcagaaaatttacgcacccagctaatgaaagaaaacataaaacagcaagtcagcaagaaaatgtgactctaactttcaagaagtggaaaagcaaaacatcatgttgactgaacatgttatacttgaaaagcattaaaccatcattcacacaaa

SEQ ID NO: 227887 - DNA, 603 bp, Homo sapiens
ggggattgtttctggaatgcagtagataggtgtcaggtatgttactatttctataatgtacaagacagttccacacaatgaagagttgtcccttgtcacatacagcttttgaatgtccctgtagatattaatgttgatgaaaaacctgttataaattacttcagtgtttgtcatgttttaaatgattttttttttagtatagggtgtttcttctgttttttctttctttcatgactgacatttttgaagagtacaacctagttactttgcagatttccctcaaattgaatttatctggtgttttatcatgatttgattcagatttgatttttatgtaggaaagccacagaagtgatgtgcttttcatgcttgtcaggaggcacattatgttgatttgtctcaatacttgtaatgttaactcataccacttagttaaggtggtatctgctggtttgtgtgttttacatattaattaataagttaataaatattagggagagattctttgagactgtaaatatctctagtttaggatctagtgtttatacttgcctgaataatttattaataaaatagctttaatttggttattgaaaaaaattc

SEQ ID NO: 227888 - DNA, 450 bp, Homo sapiens
cttttttggttgtaagttttctagatctttctaatcatttttttaatctcactgccagaggaatgaactctgggcctagaagctaaatagtcaattctcattaaagcctctccggctacctctggtatattcttaaatcagatttgctgaaaactactggcccagagccaataacaactgtgaggcccaaagtaatcattggcttaaaattaaaaatcctcactggctctacatggaaaataataaaagttggttttgcttgacagttaccattatagttcatgtgactaatggttaaagagatttttagacccaaagtatatttctgtggactggacatcaaagaaacataggtaccatctacccaaaacatacccttttgtggctttatcataatactcaaaggttacaacggattgaaaattgtgtgagaatatgtgtcaaaatgga

SEQ ID NO: 227889 - DNA, 1241 bp, Homo sapiens
cgggctcctgagtctagccatctgccggtctcggcctcccaaagtggtgggattacaggcataagccatcatgcccagcctatacctttactttcatcattcccctgtggtttaaagctaggcccttctagcactatcttttgtctaactctttaaggaacattctggacttaattttttcttcccatctgtccttcaatatgacactggatagggggcttctgggcaattaaaatttatcagtataaatcatggttacatatttagttgttttagaatgttgtaattacataaacctgcagttttaaagttgaatatagctttatactttgataaacttcattttttgttttataaaatgagtttatacgggttgtcaacttactagcaaaatcttacaattgaagagactttaaaggacaagtactcccacatctcacccaagaacaaatgttccttccacacagtgtcttcctttagcagttagaacccactctcatgaaatagcatatttttctgtcagaacagttttacccagtgttacctttgttatatgtatggggactcactgactatcttgagatccagtcatcatgtggtattgtgagatccactatattctcaagtactagaaacctgatatattaattgatatgaagcctgaaaaaaagaatgactgtagcaattggattggtgatgagggaaactggcaaaagtgtggaagttaatagctgctgccattcacttacagctcctgggtgggtgatccaaagagttgttgaagctgagcaggttctggctgggcctaggtatggaagagagggagtcggttttagttggctttttttcatcattgtttttgtttggtgtttactacatgactttcactgtgctagggatacaaaaatgaataagaagagtatcttaaaaaggcagaattgttttttcctactggaattttgagcagtcttagtatttcctcagtgtgtttgttccaaaccagaagcattattgcttccttttatataggtagtatttaacttaaatattaaaccaggtaattaaaatcattgatctgtataagtcaaaaaggcttaggaaaatgtaaattattttctctctgtgatccaattcttgtgcttttttttcctttaatactttattctggaaggattttaataagtaatgaaagtactgttaatctttttttttgttttggatatggagcctgggctctgttg

SEQ ID NO: 227890 - DNA, 1042 bp, Homo sapiens
cgggctcctgagtctagccatctgccggtctcggcctcccaaagtggtgggattacaggcataagccatcatgcccagcctatacctttactttcatcattcccctgtggtttaaagctaggcccttctagcactatcttttgtctaactctttaaggaacattctggacttaattttttcttcccatctgtccttcaatatgacactggatagggggcttctgggcaattaaaatttatcagtataaatcatggttacatatttagttgttttagaatgttgtaattacataaacctgcagttttaaagttgaatatagctttatactttgataaacttcattttttgttttataaaatgagtttatacgggttgtcaacttactagcaaaatcttacaattgaagagactttaaaggacaagtactcccacatctcacccaagaacaaatgttccttccacacagtgtcttcctttagcagttagaacccactctcatgaaatagcatatttttctgtcagaacagttttacccagtgttacctttgttatatgtatggggactcactgactatcttgagatccagtcatcatgtggtattgtgagatccactatattctcaagtactagaaacctgatatattaattgatatgaagcctgaaaaaaagaatgactgtagcaattggattggtgatgagggaaactggcaaaagtgtggaagttaatagctgctgccattcacttacagctcctgggtgggtgatccaaagagttgttgaagctgagcaggttctggctgggcctaggtatggaagagagggagtcggttttagttggctttttttcatcattgtttttgtttggtgtttactacatgactttcactgtgccccacctgtgaggaactgggagatcctctgaacagaatagccaccaaagcctcccatctgctagagacattgctttgtaaacatcccaatatgaaaggagttgtgtgtagtgaagtagaaaggctgctcttccgctcaaatatcagctc

SEQ ID NO: 227891 - DNA, 927 bp, Homo sapiens
ggaaatgcaagacacatctcttctatccccagaccccagagactcaggctcagcatggtgagaaggctcatgagaggcaccagggaactgaggccctctaggagagaacagagtccagcctcatgcagagcacgcactgcttgggcagcttggctggcagaatcacctgtgcaattcatgcatatgcacacgtgttctctgcacaggtgtgtgcaacaaaatgtatgcgtgaaccacctgaaccaccctcagatctgcatcctcattaccctggtccagggcccgggccaaaggaggcttaagtaaatatttgttaaactgagctgtttattcatgatggccatgtctgagtttcagatccttcaacgagcagagtgtaccctgcacttctgttgtatttggcacagaaactagtgcagtgctgagcacaaagaaaatttttgctcattgaatcattgaatgaatacctgttagtagataaaccagctttgtggaggttaaataaaccagcattgtggagggctacacagccagtgagtcactggggcagattaatgtggaatttggccagtggaagatctatttcaacccctcatcaacttggagactttgaacctctatccaaatcataaaacagtcccttcactttaatgcttcagattcgtgagttaagacatatatgtgagcatgttggaaataacctaaagattcaccagtagacgagttgaataaagtatgacacagctgtacaaaatccagtatccagtatagatgatgttatagaagaataatgaaatgagccaggtgcagtggctcaaacacctgtaatcccagcactttgggaggctgaagtgggtggatcacttgaggccgggagttcgagaccggcctggccagcatgccgaaaccctgtctctactaaaaata

SEQ ID NO: 227892 - DNA, 374 bp, Homo sapiens
gcttattgttaagaagagtgtgtggcccaaccaggaaacagacattctaaaggcatagggtccacccaggagcatggtggacccagatccctgaaagatgggaggtgctcaggcacacttcctgggctagttgaggagtctggatatttatttatttatttatttatttatttattgagacagagtctcattctgtcacccaggctggagtgcagtggtgcaatctcagctcactgcaacctccacctcccggattgggttcaagtgattctcctacctcagcctcctgagtagctgggattacaggtgcccaccaccatgcctggctaattttcgtgtgtgtatgtattttgttgttgttgttgttgttgttg

SEQ ID NO: 227893 - DNA, 273 bp, Homo sapiens
ggagctaggaaaaaacggtgaaatactgatggccttgtccgagtaatttacaagtagaaatgagagggtcatggtcacttgcagtgtttatgaaaaacaaaaataccaaagatagtgggacaagtatacaactaactaaccctctcaccaactactatatatagttagatttgcggagctttctgggagggaaccctgtgggactgcaatggaaaggtcacggagaggaggtgagtgttaagcagagttttctcaggggttatgtaacaaaac

SEQ ID NO: 227894 - DNA, 238 bp, Homo sapiens
tcaattgattgttcagaaattggttacaatgctagaaaacacaatttaatttaaaagttaatcaaaggtctgtatatagaaattgctaccataaaaatagaggaagaaggtgtcttcaaatctaggaatctttatttacatttttagaggtatatatgtctatctggagaattcagtagcattcatcatacttatattgcttgacattagctattagcacttggaaaccattccccac

SEQ ID NO: 227895 - DNA, 265 bp, Homo sapiens
cctcaagaggaggcagtcacagagggaagtagaggccaggcagcctgcgaatgatcaatgtggtacagggctcctgtcccctctatggccacctctcaagttgttctttcctaggttctttattaaatgtgatagatttatccaaaacagttatgaattcagatcctaccaatctgatattacaagagctcacataggggaaggaatggagtttaacagtaatgttgacaaagaaaaataaagtttttaataaaaggtatcaaca

SEQ ID NO: 227896 - DNA, 712 bp, Homo sapiens
  misc_feature (645)..(645): n is a, c, g, or t
tcttgtgaaatttcatagatctcgtcgcttactgggagtctgctatattgttgttaaggtctctttgttagtggtggtagaaattggagtattccctctcatttgtggttggtggctggatatctgttccttggaaatgtttgatgctactctgaaagatcgagaactgagctttcagtcggctccaggtactaccatgtttctgcattggctagtgggaatggtatatgtcttctactttgcctccttcattctactactgagagaggtacttcgacctggtgtcctgtggtttctaaggaatttgaatgatccagatttcaatccagtacaggaaatgatccatttgccaatatataggcatctccgaagatttattttgtcagtgattgtctttggctccattgtcctcctgatgctttggcttcctatacgtataattaagagtgtgctgcctaatcttcttccatacaatgtcatgctctacagtgatgctccagtgagtgaactgtccctcgagctgcttctgcttcaggttgtcttgccaagcattactcgaacagggacacacgaggcagtggctgaaggggctggtgcgagcgttgactgtgaccgccggatacttgctggatcttcattcctaanttattgggagaccaggaagaaaatgaaaacagtgcaaatcaacaagttaacaattatcagcaagctc

SEQ ID NO: 227897 - DNA, 470 bp, Homo sapiens
cttatctgttaccacttacaaagcttaaagaaaaacatcttcaaaacagctagagaagaatggcacactacatacagtagaataacaacagggatatatccatgcagtggaatagtgctcaacaaaacaggaacaaactattgattcgtgcaacagcatagattaatctcaatagcattatgctaagagaaatcatacaaaagcatacactttagattccatttatataaaattctagaaaatgtaaaataatctggagtgacagcagatcaatggttgtctgtggatgggaatggagggaaaatggattataaaactgaatgagaaaattttgggggttgatataaatatttgttatcctgaccatggtgatagtttctgaggtgtgtacatatgtgaaaattgatcaaattgtacactttatgtagctaattgtactttaattataacaataaagttattaaaatggg

SEQ ID NO: 227898 - DNA, 401 bp, Homo sapiens
catttctttcccctaatcccaggtacctcatgtgtatttgaagtctgaactcgacgccttcctcgcctttccttcaccagggtaagtgacccatgctacataaagatttcctaacaagtgctgccttccactgtcagatcacagttcataaccacagccggcaaagctgtgcgagccgcagcctctggaggcccgggaactgctctcagcccgtctggtttgtctttcagtgaagtgaaggctgggtcagctccaccacctcgacctggggaatgtgtttttgggaaaaccaagtaagagcgggagggagtggtacagcagcactcagccctctgggatttagttcaggtgcgtttgagctgaaaggattttgtttttcacctgtctgcatgttcttaaaa

SEQ ID NO: 227899 - DNA, 329 bp, Homo sapiens
tatgccatcccattatcagacctataaggactggtggaaagattagaaagtactaaggccagatgaatacccaattgatgtttgtctgtaataacatgtttcgctcatcaaaatgtccacactcaagacgacagttccacaaggtatcctcttacaatatttacaaactatttccacaacatccgttctcattgttttttataaagtgaaagaaaggcatcagaggctactctttttttctgaatcaaagaaatggttttacaggttcattaactactttctaaattatttggtaggggtattattatttccattcaatttctttactt

SEQ ID NO: 227900 - DNA, 621 bp, Homo sapiens
agagaagtagtgtattcagaaaacttactatctcttttcggctgggtgtggtgcctcacacctgtaatcccagcactttgggaggcctaggtgggcggatcacttgaggtcaggagttcaaggccagcctggccaacaggatgaaactttgtctctactaaaaatacaaaaattaggtggatgtggtggctgcacctgttgtcccagctactcaggaagctgaggtggggagactcacttgaacctgggaggcagaggttgcagtaggccaagattgcgccactgtactccagcctgggtgaaggagcaagactctgtctcaaaaaaaaaaaaactctcttttctgggttacctagtcagtaattccatgtaacttaaatagtcacctgccttattaacatagtatacagatctttcaaggatctaagttgacttcttggctccatattacattgttctgtatataaaatgactgagataatattagacaactggttcagggtggtgacttactttagtaattgttttagaagttgttttggaatacagttttatcctgttgtctgtgcacaatttgtagtgtaagcatgcactggcagtcctttcataccaacacatttg

SEQ ID NO: 227901 - DNA, 541 bp, Homo sapiens
gtctgatgcttttgttcacatgacatgttttctgagcacagctcatgcccaaagtaggaggatgtggtcaccctactgtgctggaaacaggacaagttttctgactgtggtcattgcatccgaaagagaatgctcagtacagcaccatctacaggcgtatttgtgagaacgtgtgactttcaaagataatcgctgaaagttcacttccttttcattttatttttttgtgggggagggatgtgtcgggttaaaaggtccatttcaaggccgggcgcggtggctcacgcctgtaatcccagcactttgggaggccgaggcgggcggatcacgaggtcaggagatcgagaccatcctggctaacacggtgaaacccggtctctactaaaaatacaaaaaaattagctgggcctggtggcgggggcctgtagtcccagctactcaggaggctgaggcaggagaatggcgtgaacccgggaggcggagcttgcagtgagccgagacagcgccactgcactccagcctgggcgacagcgagaccccg

SEQ ID NO: 227902 - DNA, 600 bp, Homo sapiens
tcacttttgcttcgtgtattttgaagctctgctgttaggcacataagcatttagatttttacgtcatattgattggtccgttagacaatgtgatataaacttctttatccctggctgcgttaagatctaccttaatattaatatagccaattcagctttcttttgattaatgttagcatgtaatatatatttctatcattttattttaatctatttggtttttcttatacttacagtatatttcttataaatagcatataattgggtcttgatcttttaatgcagtctgctcatttctgtcttttaactgggattttatagtgtttacatatattatttattatttatctgattggataaataaaaacaggatggaaaatagacaatcctaaccgtatcaataattacattcaatgtaattcaatgcagttagcattgaatgcaattatttaatgtaattgaataattattgccctttcctcttgtcctgtcttcttttgcattgagttatttttttgttttcatttaatctcatttgttgtcttattagctattactctttgctttgttattttagtggttgctttaggaattatagta

SEQ ID NO: 227903 - DNA, 402 bp, Homo sapiens
catagattgtggtgataatgtcacaaacatatacttatgtcaagttacatgcattaaatatgtacagctttttatatgtcaatcagacctcaaaaaagtgctttaaaaaatagttctgggtgttacctcaaaagaaaaataaaacctctactggaagtaagcaaacaacccaataaaaaatgagcagaacctgtcagcagacactttaccaaagacagtaagaggatgacaaataagcacatgaaaagaagttaaacttcattagtcagtagtgatttttttttgtttgtttgttttgagacagagtctcactctgtcgcccaggctggagtgcagtgagctgagatcgtgccattgcactccagcctgggcaacaagaacgaaactccatctcgacaaata

SEQ ID NO: 227904 - DNA, 325 bp, Homo sapiens
gatccagatgcatttttttcctctgttgttctcataccagcttcttaatttcacctccctaatgttccacagcataaatacatctttgttcagagtttctccaagttatctgtgagaaaataaactatacaaagggtccctgggtatgttttaggatacatagattatgggggtgggagagttaccttgtgtgtgcaaatgagactgtatgtgaaacgaagataaggtttggagggaaatagatgattcaaagatacctaagaggtttattaagacctttaaaaatgattttacagtgcctgtaaagaggactgatatttaaact

SEQ ID NO: 227905 - DNA, 580 bp, Homo sapiens
atttggcaccagttttattgagctagtttgttggccatgcctagctgagaaatagagaagtggagggagatggggggatgggagagcttttcctcatggcacactctgctccaggagtctgtatacaggagtgtggagaaaaggaagtgttaccttgcaggaagttgcccccaaagcaagggcaggaggtgggggtgggggacttggcctctgatggaattctggaattctgatgagagaggtgctagcctgacctgaacaggagatgctgacaggcagtgctgggcatgttgcacagagatggctggttacacagccccgtggcaggatcccagagtgccgagaccagctgggtcgtggagaccctaacccagtggcgctagaggaattaaagacacacacccagaaatacagggtgtggagtgggaaatcaggggtctcacagccttcagagctgagagcctcgaacagagatttacacacatatttattgacagcaagccagtgataagcattatttctatagattatagattaactaaaagcatttcttatgggaaataaagggatgtgccaaaat

SEQ ID NO: 227906 - DNA, 435 bp, Homo sapiens
ccccacaacccctgcccttttcccctgaagccgtccatacaatctaggaagaattgtctgaactttccctgaagcaggtcttgagatgcttatgtaagaagtcctctcctttgtagggacatggttgaagctggaaaccatcattctcagcaaactattgcaagaacaaaaagccaaacaccgcatgttctcactcataggtgggaattgaacaatgagaacacttggacacaggaaggggaatatcacacaccagggcctgtcatggggtggggggaggcgggagggaaagcattaagagatatacctaatgtaaatgatgagttaatgggtgcagcacaccaacatggcacatgtatacatatgtaacaaacctgcacgttgtgcacatgtaccctagaacttaaagtataatttaaaaaaataataaaatta

SEQ ID NO: 227907 - DNA, 419 bp, Homo sapiens
gagccgagattgcaccattgcactccagcctgggcgacagagtaagactctgtctcaaaaaagaaaaaaaaaaaagcacacatgaacatgtattccctcacattggagctcacttcaccaccacagataataagcataaatttagagttgtctcttttaagtctgtgtcctacatcctgcaggagagctctctatggcaagggttgtcttttgcaagtcatttatattctagtagcaccagcggtagttctgcactcaaacctcctgcagtggctcttccccctcatgccaagttcatgactgcatctagagttcatgtgtttgccccagtgaggaacactagccatggtccaggtcctgagagccaagcctcacagaatccttggcaacaaagaattccaccactaccccttggaccc

SEQ ID NO: 227908 - DNA, 823 bp, Homo sapiens
agaaactatgtagtgaaattacatagtgatttttcattctcgcagtaaaaatttcctgggattttttttttttaatgggtgggaaactacctggaaatagtggatgccagagtcttaaacagaaggaatgaaataataaagatcagagcagaaataaatgaaatagaggccaggaatacaacagaaaagttcaacaaaacagagttggtttttgaaaaggtaaacaaaattgacagacctttagttggactaaccaagagaaaaaaaagtcaaaatacatgaaggagacattacaactgataccatagaaataataagatcataaaagactactctgagtaaatatatgccaaaaaattgaacaaactagaagaaatggataaattcctaaaacatacaacctatcaggaccacatcatgaaggaacagaaagtctgaacagacctataatgagtgaggagattgaatcactaagtcaaaacctcccaacaaatagaagcccaagagcagacagcttcacgggcaaattcctctgaacatctaaagacgaattaccaccaacccttctcaaacttccaaaaaactgagcaggagagaacacttcccagattcattttatgaggccagcattacccttaaccaaagccagataaggacattgtaagaaaataaagttacaggccaatatccttgatgaacagatgcaaaaatcctcaacaaaatactagcaaactgaattgaatagcacattaaaaggagcgtacaccatgatcaagtgagatttttcctctgaatgtaaaaatggttcaacatatgcaaatca

SEQ ID NO: 227909 - DNA, 440 bp, Homo sapiens
aacaaacaactctggacacaccacctttaagagctgtgacaatcacttgcgaaagtctgcaacttcactcctgaagtcagcaagaccgtgaacccaccagaaggaagaaactcgggacacatctgaatatctgaaggagaaaacactccagacacaccgtccttaagaactgtaacactcactgcgagggtcagcggcttcattcttgaagtcagtgagaccaagaacccaccggaaggaaccaattctggagacaattggagctttgaaaactatttaactaaattatagtgggttcagtataaaagattgttttcttccctcccttctctttttttttttccttattcctatcctgctatagtattttctgccatgttatgcacgtacatttaaaaaattactcaccaatccaataaaaaacatactgctgccttatt

SEQ ID NO: 227910 - DNA, 108 bp, Homo sapiens
gccatcacaaaaaaaaccaatggccagtcagggttcactagaggagcagcaacatccaagagaggatcacaatgaaaaagcaagaaatgcctatcctttttatttctt

SEQ ID NO: 227911 - DNA, 257 bp, Homo sapiens
caggttcagacatttggtgtatgtgcttggctgaggagccaatggggcgaagctaccatctgtgggattatgactgaacgcctctaagtcagaatcccgcccaggcggaacgatacggcagcgccgcggagcctcggttggcctcggatagccggtcccccgcctgtccccgccggcgggccgcccccccctccacgcgccccgcgcgcgcgggagggcgcgtgccccgccgcgcgccgggaccggggtccggtgcg

SEQ ID NO: 227912 - DNA, 401 bp, Homo sapiens
ggagccattcctccaacaccctcccaacagtcttagcaggaaaaagcagcccatgagctgtccctttcatactgtaggtctgtggtccaattagcttgcttcagattaattcagttaaaacacctcaagctgaatctgtcgaatgtcttttttttttttccatgggccagatttattttgttaataggatcaacatatattatatacaaaggtaaccattaaataattataaacaaataatttcatgacatattcccagccaattttgcatctcctgccagatacaaaacatttacttttcataaatttacagtgagcaatttgataaaaccagtgaaagtggggatattttcaaagcagctgcttatgtgatgtgattagcaaaatctcccctccccacc

SEQ ID NO: 227913 - DNA, 443 bp, Homo sapiens
ataggtgattctgagatgaggaaacctgaacagctattacataatgtgcagcctcactggtagtcaggaaaatgcaaatggaaacaggtgtcatctcacactcagcagattgacaaaacattttggagtctgacatcaaggatatgaagcagtgggaactctcaggcactgctgatggggatataaattgacagaactattttggacgaaatttggtgctgtgtagtgaagttggagataattatatgctgctgtccagcaatcctgcatctatgagaattgttacacacctgcaaaaggggacatgggcccgggtccttgaggcagcattgtttgcaagggcaaataccaggaaattgcctgaacatttcaaatgttagtaatgttataaataaataatgtctttgtactaggtagcaattaaaataaaggatatttatagt

SEQ ID NO: 227914 - DNA, 118 bp, Homo sapiens
gggcaggagccaagtcgtctgggcctgagtctgccaggggacttgaggctggacttgcttccaacttttcatctgttgggggagaagtagtcccaggaatacaaaggtcaagccctga

SEQ ID NO: 227915 - DNA, 452 bp, Homo sapiens
attttcataaaggtcaactaagaaatgtgacaaggtttgtgaactataaagcactaaacataactgtgcatccctacattttaggagttacaaaacaaagaaaaacagttaacaccactccaccaaatgaatagaggaaatttagtaaagatgtcaacctctctgtattggaagaagctccttgttgcttgtcttgaccctgcctcccatcgctgaggagtctagttcacctctaagccaagtaggatgagagtatatttggtgtctgagctcatttttgaatctacttcatttgtgttaccacacattattcattccccctgttcaactatctactaagacatttaaactggccaagaaacatctatctagcaaaattttggctgagagtgttcctccaaatagaataatctatttctaaattaaaccagattagcaaaaatgtgaaaaaa

SEQ ID NO: 227916 - DNA, 283 bp, Homo sapiens
  misc_feature (240)..(241): n is a, c, g, or t
  misc_feature (271)..(271): n is a, c, g, or t
ctacacattttacccaggccatctttattttctcttctcagcctccctgaggggggactattacctccagtactggggctgacacacatgagcaatgaggccaggtggggttgtccatagacaccttctgcaaaggccaatgttggtgctggcaaaaagaaatgaagtgtctagcagtgagctggagattggatcacagccgaaggagtaaaggtgctgcaatgatgttagctgtggccnntgtggatttttcgcaagaacattaataaantaaaaacttcaa

SEQ ID NO: 227917 - DNA, 554 bp, Homo sapiens
ccactcagttaatagtccactgttttggcagccctaacaaaccaataaaatgagttacctggtgatcacatgaaacgtcagctgtgatgacaaaaaggtgcccttaagaacacaaaacaactggggtccaccatgtggaagcagaagcctgcaaggagtgaaactgcaggaaaggaagaaatgcccagtagaagagaggccccaggtgctcgctctggcagtacatatactaaaattggaacgatacagagaaaattagcatggcccctgtgcaaggatgacacacaaatttgtgaagcgttccctatttttaaaagttaaaaaaaaaattttttaaaagacaggaggtcccaggaagccctgctgcctctctgcccaccctctccaggccaaccctgctaccaggaagaaattcacagggccaaattactcagtcatgtgtattgaggccagaaatgcattatttaattttttgcagcagatgtacctttttaatactgttttgtttcaggctaaaattacaatattaaaatttaatattcaaacattagcat

SEQ ID NO: 227918 - DNA, 405 bp, Homo sapiens
aaatgttaaaatggaacaatacaggaaaattaggcattattcattatatatatggaaaacttaattttacatttgagattttagaggaatatggattatcgaattgaatatacattaacattcaaattctattacaaaacaataccataaggaaaattatcctgtgacagaaatgcttctcattctgtagctgataccctctctattgtatatgaataatttctgtgtagcacaatttctgtataataaatgtagttattttttatgtatatgttaacatttgacttgtatttatcccagctacacccttcaccttaggggtttgcagggaatgacaaatcaaacatgtttttgtttgtttgtgcagaaatgttttgttctcctaataaaatgaattattgttta

SEQ ID NO: 227919 - DNA, 499 bp, Homo sapiens
cagaaggatgatgggaaggcacatgcgagagctgatgccaacagcctagaagggcatatatacatcttgttgtagaaggtgctgctgagggcatttatcaaatatttagaaagtgacttcctttacagaagtcacctggggttcaaaaatgaaagtaaaataatctggcaattgtgaaagctttctgaaaatctttctcctccaaagtcctaaggaaatttaaaccaatcatgcccatggtcagatgaacagattttaagtaaatctaagaacatcccttattattttttattttgtttactagaacatatttaaacgaactgagagtccagagaaagtaggttattatagaaaacatttcccttcgcccttaaaatcactggatttgggttattcactttgaagttctactatgatccagtttcccatcaaaagggaagcacttttagccactgaaatctaagaggactttcttcaatggcacccagcagaaaaggaa

SEQ ID NO: 227920 - DNA, 403 bp, Homo sapiens
tttatatcttctgccaaacatacttttcaaacgttgagtcacctcatgtcacttctccactcaaaaccctcgaatggcttcccatcccttctaagtgaaaaaaccagagccttaattaagacctacaaggccctgtatgatctgtccttctttttggacctgtctttgagtgctttccacattctttgttttctccagtcaccttggtgtgcttgtcaaacacccccaagcactcttagtcttccgatcctttatactagcagtcctgcctggtatattcttccctagatattcaagtgacacataccttcacttcatttaggtccctgttcaaacactgtcttatcaaagaggccatctttgacccctgcaaataaaagaggattttctttctttctctttt

SEQ ID NO: 227921 - DNA, 824 bp, Homo sapiens
agttgtccgggtgttgggaaccctgagggggcggtcttgggagcctgtgcctgggaaggatatttggaggcaggggcccagcagcgggagctgagtccggtccggcatggcgtgtccaggggacttttcgggactgagtgaggggcgccaggcggggaggctcaaggccctccgccggtttttacctattttctttctttcttttttgccttccgcagggaggcagaatctgggtaatggaagggagaatgggctcgctatctgcccagagcttccctggactgcaggaacccgtcctataagcaaccccgaaacttcggggcccgaggaccagggaagaccccctttccttgctgtcttgacagggttgcagaagccaaggagttcggcagggagacggggctcctggggtggttaaggacgcggtgaccacccctgggcgggagctgactcccgcgggcccggaggctctagctcactctacagcaaatgcttttgttcccggaggctgccctgggggaaagacgccccttacccctgccttcgaccctggagagcccagtgcccgcccgggcagggctggagcccgagtcgccccaggcagagtccgccgaggcctggggtgggagccgcgacttctggatctgcctccgagctcagctagaagactgcgcgcacctcgtccggcgccgtccggcgcgcagaagcgggtctaatgtttataacgttaataatgacagttagggagggctgtggagccgggaaccaagacctcatcccgccgccgcccacgtctttgatcattaaagaaacagacaactaat

SEQ ID NO: 227922 - DNA, 397 bp, Homo sapiens
ttttggagcacttagtagtttccaggatcttccaggcttggcaaggaatgaggtatgaccacaatcccagttctggccgatggtatgtaggcagagccaatggaggcaaacagcctctcctttcccttctttccttcttgccacctgggatgaggatgtgaaggtgaatcttcagggaccatgcagagcgggcaacacgctggagatggcagctgagtgagaagatcaaaggagcctggttcggacagttgacatcaagattgacacatgagaaacaagatggactttgaaggaagacaaccacaacaactcatagattacacagtaaagatgcatttaagccagcatctctcagaataattccctaataaaaaaagtacttgttcataaaaaaaaa

SEQ ID NO: 227923 - DNA, 340 bp, Homo sapiens
caccataaatgttcctttatttttaatttcaatttttttttgttagcaactactgtgtgccaggtgctttatgtactaagttattcatttattcttcacacaagcctatgaagcgaggagtgtcttctccattttcagatgaggtgacaagagctttggtgacagcacgggcacaaagcaggtaagtgactaagccagagttccacacacaaagctgcctcccagagctgcctcccaggggcttttctttatcttccctttagtgctaggccaagagattccagcaaagagctgaaactaagtatgagttgcacactgagtacatgggtgagctctgaca

SEQ ID NO: 227924 - DNA, 464 bp, Homo sapiens
atgagtgtccaggggcagcctctgaaccctccttgtcttgatcttggccctcttacctgctgtgtgatctttctggactcttgctaattttctgaatctgatcctccaggcttccagttaattctgtgaactatctaatactttgacaacaaatgcctttcctgattaagttagagtccatttctgttgtttgcagtcagtcagtactacaataagtaagaatttgtgctctttgccactatgtataacatttattttgagaacagtaggtagatggtaaagtgaaaatgaatccagacgaagactctagatacgtaagtgtgatatagatctttctgaacttgctcatcacaaaagggacatcacttaataagggaaaaatttaaattaccagctaacattttattaagtactgtaatagtttcctacagctgctgtaaaaaattattaaaaacttggtggct

SEQ ID NO: 227925 - DNA, 208 bp, Homo sapiens
cattgaaacgcgcgcgggccgcccaggggagccgggccagggccccggcgagcacccatccgcgccccccaacgccaaagcgaaacttcggcggccccctccccgccccccacccccagccttggccccgaggcgctttgtgtttgttactgtttggtgtgttgcacccgcgaggggatcagagagacaagaattacatcttcaaaat

SEQ ID NO: 227926 - DNA, 389 bp, Homo sapiens
aattaatgataattaccgtgtcccccccacccccaatttataaacagccaataaaaactcattttggtgagtttgatatactgttcataaaatctgatggctgggcacggtggttcacacctgtaatcccagcactttgggaggcccaggtgggtggatcacaaggtcaagagatcgagaccatcctggccaacatgggaaaaccctgtctctactgaaaatacaaaaattagctgggcatggtggtacgcagctgtagttccagctactcgggagactgaggcaagagaatagcttgaacccgggagacagaggttgcagtgagccgagattgcaccactgcactccagcctggtgacagagcgagactgtgtctcaaaaaaaaaaaa

SEQ ID NO: 227927 - DNA, 477 bp, Homo sapiens
gaggatgacctaagaaggtgacctggagtcagcactgagccttctggttggaaaacagtctagggcccatccctttgctatctttaaagcctcaactcactccccctgtatttattggcttgctctgagctgtgcttgactggacgccagtctctaggacccaagaatttaggattccttgtggaacatcgtcagtggaaggggccaggaggatcttagcaagaggaacagtgaaccaccttccccataagcccaaatcactttcttgtgtaaaaatagagaatggctgctgcttaaatgtctaataaagaaacaaacattgtcatacccctatttctctgtcacatgaccatattgagttgctacaataaggtactgtccacaaaaaaaaagtagtactgaaagtcaaagttctgggcagctttgtttaagatattttttaaagcgagtccttttatactatctgggctcttatac

SEQ ID NO: 227928 - DNA, 1529 bp, Homo sapiens
  misc_feature (1166)..(1166): n is a, c, g, or t
aattagttgaaagttgcccttgccagttacatataattggtgacttttaagttatttgtcacctggaacagacataacttctttagcatacaattcagatacaactgtcattgaatttatgtttccataaaattggtggtagaatttttagcattaggtaggagaagaggacagggaaagacagctgtgtctcaggcactgtactgttttacctattttgttaaatcctcacagcaaccctgtaggtaggtgttaactgaagcagagaggttagataacttgctcagtgttacacactgatgataaatgacagagcaagaattcaaactgtaatgtttcggttcttgttatcttttattcatcgcctttattgtttcttttctttctttctttctttctttttttttttttcttttgagatggagtcttgctcttgtcgcccaggctggagtgcaatggcatgatctctgctcactgtaacctccgactcctgggttcaagctattctcctgcctcagcctcccaagttgctgggattacaggcgtctgccagcacgcctggctaatttttgtatttttagtagagacagggtttcgccatgttggccaggctggtctcaaactcctgacctcgtgatctgcctgcctcggcctcccaaagtgctgagattacaggtgtgagccaccgtgcctggccctccttgctttattttatgattccattcagtcattagtcttgtcggtttttaaaaaaaggttttattgagatatgattcacatactatacagttcactcattaaaagtatacaattcagcttttagtatattcagagttgtgcaaccatcaccacaatatcagaattttttttttttttgagacggagtctcgctgtgtcaccagggtggagtgcagtggcaaaatcttggctgactgcaacctctgcctcccaggtttaagtgattctcctgcctcagcctccgcagtagctgggactacagaagcttgccaccatgcccggctaattttttgtatttttagtagagacggggtttcaccatgttggccaggatggtcttgatctcttgacctcgcgagccaccgcacccagccatattggaacactttaatcacctcccaaagcaatgccatactcattagttgtcncccctaacctcccctctccgtgtcctaggaaacctccttttcttccaaaaattttagcacgtattttcatatgttagtgtgtagatcaattcaaataatagatacaacaaatactgtaatatgttgtgtaccttgtaattattccagctgtattgcagaaatattttataaatttaatagggctgggcagttttttttggaaatgcttgatcatttgcaagtactacatgctcttgaataatatattttcatttttagaaacatttagaatatttagtgtacaacccctgtctcccagtaattctgctgcccaaggaaatcagttactttattttttcttttcatttcttagctatagtcttt

SEQ ID NO: 227929 - DNA, 400 bp, Homo sapiens
tggggacagctgttctagaggacaaatggtagtcatataaaaaagtttttaaagtatacatgttttggatccatttatttgaccaacagaaatttatgttaagaaagtaatttaggatcaatgtgaagaattgactaagaatttttcatctagttatcacttatgaaaaattgaaaacaacccaaatgtccaaaaatatgggattagttaaattatgtccataaaatggaatattgccattctaaattatattatggtatggtatttattgatacagaactatatttattatatttaatttaaaaagcagtttgcaaaagaatgtatccaatatatgatccagtttcttaaaaataaatacaaataaagtagaaaaacaacaaaatgtaaaaatacatat

SEQ ID NO: 227930 - DNA, 637 bp, Homo sapiens
ttccacctgaggaatattaagcttgcacagttaagtgatttaacaaagatcccaaaaatagatagtggcagcacacaccaggctaaagaaatttattaaaagttattgctatgtgaggaattgtataactgatttttttaatgaaggcatagtttgaagttgaattggagcactgtcactgtacttggaaaccaatgaaggcaaggaccatatttttgggagggactttattctccagctcagcacattgttgagtagaagaccctaaaatacaccatacatgaaaactctatctgtcatgtgcccatgagatattatttttttttaagtcactttctaaaacagttgagatttggggatttgctgatttactattttcacctgagtgatactagtttttcacatagtatatttttccagtaaagagaaagaaaatacctctaagtcttggctgctctttctattacaaggaaaggaattgggtttccataaataacttaagaattaggataatttcaatttatttgtacatacctttgtaatatgatttctcaatttaaatattattttcagtactatagaatgtgcttcctactattcaaaactcaacttgttttaataaaggagtattgctaga

SEQ ID NO: 227931 - DNA, 395 bp, Homo sapiens
ggttgaaacagggtcttgctctgttgaccaggctggtctcaaactcctggcctcaagcaatccttccacctggacctcccaaagtgttgggattacagacatgggccatcttgctgagccccgaattacttttgattcaaaaactaataactgtaacaagggcaatgcaaaaatgaaattaactcagagcctgataattgacaacagtgccttcctgtgaacgtggtcaatgactataaagtcagtacacaactcctttaagatgtttatctcttcaggaaacaaagatgaactgagggatgaagccatcagttattgctcccatacctaaaacagtcaagcgaattactaccaaatatttgaagtggcttaataaatatcaatactgaaattaa

SEQ ID NO: 227932 - DNA, 427 bp, Homo sapiens
agagagagaagaaacaaatcagcaagagtaggctgcaatctgttctgtatattcaaggaacccttacatgaagaaacagtgttgttcctacatctgagctgtcttataaacatagcttgtgcttttgcttaaaataaaactgttaaaataggaaagtcaaatacttgctcaattaacctgctgattagtgatcgacatcatgtcaggtaagagagtatttagtcatgccaaactgtcctccagaaagtttgaacagatgcacactccttgcagcagtacacaaaattgtctgtttcccatgccactgccaactcccagcattggcatagttgaacatttgtggattgcatgaatgaaataaatttacatgtataaatatgcattttatttacaataaaattttacattaaaataactgtacaatcat

SEQ ID NO: 227933 - DNA, 484 bp, Homo sapiens
agagtgacaggagaactgggagcgagtccaatcatttacattatttagggccttgtgtgtaggccatgccgaagagtttgaattttattctaattgctatgaaagacgtttagtagctttcaaactggagagtgagataagcttatttatgatcactcttcgctgctgcataaagaacaaactgctggaggccagagtacagatggggaaactatatgtaatcaaacctcttagccctactcatcccaggcaggaattccaatttaaatcactgcctttggcaacagaaataaatggcatactgccaaaattatcatggctaaacagaatttttatatattcaaagcactggtctatgcctgattattcatgtaagaacacatgggtattttcctcgaaaacaatgtggcaatccacaaatgaatatattatcaaagttatacatgcataaggtttcaaaataaaataaaatcaaagccttcta

SEQ ID NO: 227934 - DNA, 605 bp, Homo sapiens
tccacatgtaactgatttatcattttcttagacctcttcatttccgtcatcgacgttgaggatattgtttaggaggctgctttttaatgcccccaggtttagttgctccccaatatttaacagcagaggtggtgtcaaggctccactgagacagggatgctgaacctcagttcgctacctggctaaacacctcacccttcacatcagagcatgtcggtgggtgggagtctcaccaagggacacgttctcccatgccctgggttgtaaggatgctcttacatgagagacattaaatttgaggttgctaacataagttccatacaatgcaaccaggcctgttcagtgggtggtcagcaaatacatattaactgtcagagtgagtgaatgttcacctatttttatcttatttttgtactgtcatggaaaacaaatgtttatcctataaaacaattgtccacacatcgttgcttaaagaaatgcttcccctaagctattatgccaaattggtactgaacaaataaattttaaaatggttattttcaaaatcgtaactttgccttgtgttgcagaaaaatataactatttagataaaaataatttctaaa

SEQ ID NO: 227935 - DNA, 508 bp, Homo sapiens
gagggcacggcaggatggcctagggaggacgggcgagggcctatcagttacaagaggaaggagaaagaggatactggttttcctctgcataaaaaacgcgatggattctcaagaatttattgaaagtctgtgtgtccaccatagtccaggatattttggaatattcaagggaaatacaaatccaagaatttagctcaggaatcagcatcagaacagaatccccgaagagtaaactattcatggaaaacagtagactgataacatttgaaaaactgatttcccatagaaacaatagttactgtttgacgaattatacaacgtagacctaggtcgtgcgatagctacaaaatacctaaggaaatggactaggtcgtaacaagaaaaagtgatatcaagcccgggcagaagggcgcattctcggcgcggagggcggagcctttcctggagtggcggcggatgacccgggctcccgctcctcacctcggcgtggggcgcaggcggcggccgc

SEQ ID NO: 227936 - DNA, 172 bp, Homo sapiens
ggcacagagtttcttttggggaagattaaaaagttctggaaatagatggtagtgatggttgcacaacaatttgaatttaattaataccacagaactacatacttaataatggttacaaggataaattttatgtttatatattttttaaaacaataaacaagaaaatccaata

SEQ ID NO: 227937 - DNA, 515 bp, Homo sapiens
agctcagatggcccccaagagcccccagctcctgttcactgctcttccagttagtgacccccgtgtcagcatcattgtcagagttcctgggcttgtgggggctggagaagggaaggcgctgaggagggaaagatgagtgcaggttttgttgaaaccacccgacccgcgttttcagggggacgaggccactgccttggcccaaggacctgcaggcttgggggaccccctcgatgtccactgggctgcggatgaaacatcacactgtggtaggaaaggaaggggagcacccccagacgggggggtcctgcagagaccccaaccccttacctacctagttgagacacccatggggagcagccccaacagcatgtcggagtccctaggcttgcggggtcatgctctgttgagggcccttcctctaactggcgagcttgtttacagctgagctcgcctggtcagatgggcccagtggctttatctaataaaggctggacatgtccacttcatgagcatcc

SEQ ID NO: 227938 - DNA, 434 bp, Homo sapiens
actcagttcccttctcctcagattgaagataatggcttggttttggtataggttttttatcccccataaatttaatagtgtatgacaaaaattaagtgattatatgacaggtccagtttgctttctcttgttttcttttctccactgcttcagtcagcataaagttagtcgttctgaggttcagtcagttctagtccatttgccaatgatcccgaggctccttttatggtctgaaaagcgatattcatatctggaaagcatccagatcataatgatactctagctcatgtttgtcagacatagctacaaaaacagactataaaatattaaaagtaacagaattatttttctataccctcaaaagaacttaacaaaaaccaacggaattcttagacttgtatgaccaaaaccatattacgatatatgattataat

SEQ ID NO: 227939 - DNA, 747 bp, Homo sapiens
acatgcatttcctgtttattgtgggccagtactcttcaaatattttacctatttaatcctcataatgattttgtaggtcagtattaatatcatccccatcttaaagatgaggaaattgggacacagaaaggttaagtaagttgccagagtcacctagcagaacttccctttggagtagactattgtttaccaaaagtgacctgatagaagccaaggactcttccctcctttcctcaattttacttccaactcaccaactacattacacagcactctgtatttcttttgcattacatggtgtggttccttttgggaggagtggggaagaggtaatagtacactagaaagggtgagagctttgtggaattatcttttagcaaggaatagcttaactgatagccgaactgcaggcaaagggaggataaaagcacagaagaaacataatggtcatcaaattataattaacatcaactattttctgccttgaataaacaataaaagcctatttccacatattactgcaaaacctcaccaatttagattgctacagggaaggcttcggagaaagtatgctaaagggtaggttatggaaggtccgaccattaaaaatctgaattacatctcattttaagagaaatgctatttcattcaagtacagaatacacaataacacaattggaaactaagtcaatagttaaggattttttaaagatatgtactttataataagtctgcaattcattcatt

SEQ ID NO: 227940 - DNA, 498 bp, Homo sapiens
tcatcacgtacttattttgatgataattcagagttactatactgggatttaactaaacgtaacttttgtaggagtcacctatgaaatagacttgtgaacaaatggataatgttttctgcttacatagagcctttaaaaacagaaaatagaaccccagctctttgtgcccctccctttcttaccacagaaacataatggtcatcaaattataattaacatcaactattttctgccttgaataaacaataaaagcctatttccacatattactgcaaaacctcaccaatttagattgctacagggaaggcttcggagaaagtatgctaaagggtaggttatggaaggtccgaccattaaaaatctgaattacatctcattttaagagaaatgctatttcattcaagtacagaatacacaataacacaattggaaactaagtcaatagttaaggattttttaaagatatgtactttataataagtctgcaattcattcatt

SEQ ID NO: 227941 - DNA, 1591 bp, Homo sapiens
gtgcaagctaagccttctgaagatggtaaagaacttggccgggtgtggtggctcatgcctgtaatcccagcactttaggaggctgaggctggaagattgcttgagcctaggagtttgaaaccagtctgagcaacatagtaagaccctgtctctattctaaaaaacaaaataagtaaaaaggactgtaggaggccaagacaggtacaggaggcaccacactaccctgttgacacagcctggatccagagttcagcagaccttgagacaatgaaaacaaacttagtaataatcatttttcaatcattgcagtaattattgatttggacaaaaatcaattgacgtcaaaaccttaaagtgacgtttctctgcctatggagtggtcattcttttattcctttagtttcataataaattttcttttacttaaaaaaacttatagtttgatgaagagtgagatatatacctcatctcaaagaatcttcacacacacacttattaattacaaaaggaaaatcagtaattttgcagtggagacatatggccaactccaccttacccaagtggctgaaagtcactgcaccagtaatggcacaaaccaatgtgagatgattcctgatatgatacactaaaaagggcactgtctcttctgcatgttgcagacaaaaagtgggtaagctgaaactgaaactaataattaggcaatgtcaagcaaatacaaattcaggttgacagtctgcaaaataacatccatgtactcttcaacaatggatcgaccctagctactcaggaggctgaggtggaataattgtttgaggccaggagttccagatcagcctgggcaacatcatgcgaccccatctctaaaaacatctttttaaaaatgagccaggtgtggtagcatgcacccgtagtctcagctactcaggacctgaggcaggaggatggtttcaacataggagatcgaggctgctgtgagctatgatctgctactgcactccagcctgggtgacacagcaagttcctgtttccaaacaacaacaagaaaacaaaacaaaacaaaacaaaaaatagatagaatagtgacaataaaaatggagaaaaagtaggctgactcaggaaatgcttagaaagtacagccatacctcaaagatattgtagatttgattcgagaccaccacaataaagcagatattgctacaaagtgagtcacacaaattgttttgtttccttgtgaatatgaagttatattggctgggtgtgatggctcatgcctataatcccagtactttaggagacggaggcgggagggtcacttgagcccaggaattgtgagatcaacctgggcatatagggagatcctgtctctatttaaaaaaagaagctatgtttacactacactatagtctatttaaagtgtgaaatggcgttatgtccttaattttaaaactcttgatgctggctgggttcggtggctcatgcctgtaatcccatcactttgggaggccaagacaggttgattacttgaattcaggagttcaagaccagcctggacaacatggcaaaacacgtctttaaaaaaagaaaagaaaaa

SEQ ID NO: 227942 - DNA, 706 bp, Homo sapiens
cttctctctccttgtcaggtacaagagaactctgcatttgtcttctgcccacaacttcgttgaagaagtggagaggccaagcaactccaaggctgtttggaaggagagctgggctctgcctcctgggagagttggaggacatttcttctctgtggagtgtgaagggaggactgccctattccttgtctgctagtgcttgcccctgggagccagtgcatcttatcccttttaattctcgctggctcccaggggcacgtattaccatcccattttacggatgcagaaactgaggcactgagaagaatgatttcagaccatacagtcttccaagtggcaaagcctgggcttgaaccaggtctcctgacctacaacttggcagagagagggacaaccaccatgtccccttgtccgtggctgcatccagtgccgatttaactcagcacttccgggaagcccctttctcaccctggccccaggctcgttcctggggaagattcagtgattgggtcttactgaaggggctcttgagtgctgagagctccacgagaggaagaagatgcctgggtgctgagtaaggaaactgacatggaacacctgccttccaccaggcagggctgctgggaacaccgtgggcattttctcacttcattttcacaatgaccctacgagcaaaccatgggtgcagcaggaagacatgacacgggac

SEQ ID NO: 227943 - DNA, 701 bp, Homo sapiens
cttctctctccttgtcaggtacaagagaactctgcatttgtcttctgcccacaacttcgttgaagaagtggagaggccaagcaactccaaggctgtttggaaggagagctgggctctgcctcctgggagagttggaggacatttcttctctgtggagtgtgaagggaggactgccctattccttgtctgctagtgcttgcccctgggagccagtgcatcttatcccttttaattctcgctggctcccaggggcacgtattaccatcccattttacgggtgaggagactgagtttcagagagttgttcctgtatagctgtaaatatgggaggccgaataggatgggttacatcacctgcaactagttttatggccaacaggaattcattttcctggttcttgcaaagcggtggataaggctgggaattaggatgccctccttctactctagtcatgccagtttggcctctgctctataaacagcccttgttcttttctgtctcctagattctctcacatagcttccccaacttggaatgccactctccctcccaccagttcaactcctgcatacctgaaaggcccagctaacctcttcccacaggaaccttccctgcccactctagctcttggccatctctccctactctaactctaacaattgcattctgtgccataaaatcaaactcttcatgacagtac

SEQ ID NO: 227944 - DNA, 370 bp, Homo sapiens
agaaagtttggctcccatttctcactctcacaccgaccaggactgtaataatcaatgacttgttgaaggccttgttgccttgctaccctgagtcctcagtgcctagagatgttgtttgatatttgatgaatgaacaaatcctatttcagagaatcccaggaagtcagagatggaagggaactagtattttaatgacatattttctggttataaaacttggagaattcatacattggaaaattacaaaactgttaaggaggatgaggagggcattcaccatgtagtgatggggaataatcactaagacaaaagagcaaggtgcagaatagaatatgctgccatttgcctatatatatgtgtgtgtgtgtgt

SEQ ID NO: 227945 - DNA, 301 bp, Homo sapiens
ggggggccacagtgagtgaagcgaactgagatcctggaagtctcactgtggagaaagcagtaattttatcagagaaggcccacaggtgtggaaaacactaaaggaaagaaatctacctcttgacacaagcagctgtgactccaaaagaatgggccatgtgaagttctggctccccatttgccttctgccatgactgtaagtttcctgaggcctccccagaagacaagcagattgccagcatcatgcttcctgtacagcttgtggaagtgtgaaccaattaaactctttttctttgtaaatt

SEQ ID NO: 227946 - DNA, 229 bp, Homo sapiens
cttcactgcacctggcctaaaaatccacgtgtaaaggtctcaaagttatgtgcatgccatggaaaatattcttaatttcctgtcacgtgtctgctacaaacccatcaaattcctacggcttggggcccagagagatggtagtcacacaccttgcagaattcctgaatctgaaagctgccccttttttttctgagacaaggtctcgcttcatcacccaggctggagtgca

SEQ ID NO: 227947 - DNA, 515 bp, Homo sapiens
ggaagactgtgtggttttctcaacactgtcctgatggagccctgaccagcaagcgtgcaatgcccctagccctaatgtgccattaatgataggttaatgtacagtataatgtttttgggactacgggttcattacacttctgagtgtgaggtctttccacagagcgcccaaggtcccattgcattatatcatgcaataaaaatacccttttcgtatcacacactaataaactgtatttgaaatgctgtctgagggcactgccatcttgtctataggctgtgcacaagtgcaacagttgggattccttttttctattttgtggtttagttacatggaattctaaacccagaagtctgctcattcttgttttaaatggggagcaagttgggtctttagggctgaggctcagaggaggggctgcttactgagtggtgagggtctttaagatgtggagagcagcctttaattctctactgcagctgtcaggagagccagtcacataaaaacaaacaaac

SEQ ID NO: 227948 - DNA, 257 bp, Homo sapiens
aggctggtccttgaactcctagcctcaagcagtcctcccactttgacctcccaaagcactgtgattacaggaatgggccattttttccagcctttagctatgtttctgtagctagactcttacaaagcttccaaatttgaggtcaagttgttttaataactcctgaattaaaagtaatacatggtcgggcatggtggctcatacctataaactcagcactttgggaggccaaggtgggcggatcacctgaggtcagg

SEQ ID NO: 227949 - DNA, 634 bp, Homo sapiens
tctactcttttctctaaccttatttttttctcttagccgtatatcctggcgatcaatccatagtcctatgtaaagatatttaatatttcttatttctaggactatgaactatttttgtatcttctacactaatctgagctgggcacattaggcatgtaataaatactttttgaaagtgaatgaatagtaatttaaaatagttgatgactaatgcacttgttacagtcttaaaatatattttaaacaaataaataattgtctaattccactttcagaagaaataagaagttcttattcctgtttgtaatttttttttatcatttggtaattttgaaatatttaggtttagcaaaaaattaataggctcaggttttaaaaagaaaatgccttctgcttatgactgttatggtatagaattttgtgtcaatgtagagctccttcagtatgtgtaatttggcacacaacccctttagttcgtcagcatttggcacatcggggatacctaacaaattgtaggtaaatttgtttatttatttattttttcccttaggtaaatttatttgcagttctgcctttgtgtatagagtagagctctttacatagtattatttaaagtgtaattgcttgactaagg

SEQ ID NO: 227950 - DNA, 639 bp, Homo sapiens
  misc_feature (577)..(577): n is a, c, g, or t
tctactcttttctctaaccttatttttttctcttagccgtatatcctggcgatcaatccatagtcctatgtaaagatatttaatatttcttatttctaggactatgaactatttttgtatcttctacactaatctgagctgggcacattaggcatgtaataaatactttttgaaagtgaatgaatagtaatttaaaatagttgatgactaatgcacttgttacagtcttaaaatatattttaaacaaataaataattgtctaattccactttcagaagaaataagaagttcttattcctgtttgtaatttttttttatcatttggtaattttgaaatatttaggtttagcaaaaaattaataggctcaggttttaaaaagaaaatgccttctgcaaaaggaacaatatggtatttttaagagttgaagaaaccatattagttcctggtttatgactgttatggtatagaattttgtgtcaatgtagagctccttcagtatgtgtaatttggcacacaacccctttagttcgtcagcatttggcacatcggggatacctaaccaaaatgagggttggntaaattaaattatttttcccctagggattatttaaaggggaaatatgcttggctttggtggc

SEQ ID NO: 227951 - DNA, 873 bp, Homo sapiens
tcatttctgaattcttcattcttcatttctggactttacagctatgaaagaacaagacaaaggaattcagagctttcaagaaccaagtatgtcaggatagttgtggaaaacagatctttttctcattttctttgagatgaagataggcaacatttgctgcccattaaataccttaaaagtatacaggtgtatctgcaggattctttttgctgcttttaaatagtatattgttttaaaaggtctgtttttatcttgcctttacaattatatagacttttattgactagctgatcatatagggccttagtatagactaccatattcgccagcatttaagaaatagtccccttccctccaggagagtatttatctggtactcccatattatggattgaaggatgagacaagagactgagtattgctaatagttctgtgtgagcctgcagtgttaagtaaaacctattgagtgcacaaaaaaatcatgttacaattactacaaaatagagaaaccacctaggttaccaagatgtcaaataatggattaatggaagaaagtaatgtacctccttggtagcctacataatccaccttaatttgttatttcttatttaactattttgctatgtcttaagaaatgtatattaagtgaaaatggatgcataaaaataaaaaaagagaaatgtatatatacaagctacatgaaaattggtcctgggaataaatcaagaaattcaaccaacaaggctaccagttatttagtaaataccaaagagataggtggagtgcagtggtgcagtctgcaagctgcatctcccaggttcatgccattctcctgccccagcctcccgagtagctgggattgcgggcggccgc

SEQ ID NO: 227952 - DNA, 779 bp, Homo sapiens
ctttttctcattttctttgagatgaagataggcaacatttgctgcccattaaataccttaaaagtatacaggtgtatctgcaggattctttttgctgcttttaaatagtatattgttttaaaaggtctgtttttatcttgcctttacaattatatagacttttattgactagctgatcatatagggccttagtatagactaccatattcgccagcatttaagaaatagtccccttccctccaggagagtatttatctggtactcccatattatggattgaaggatgagacaagagactgagtattgctaatagttctgtgtgagcctgcagtgttaagtaaaacctattgagtgcacaaaaaaatcatgttacaattactacaaaatagagaaaccacctaggttaccaagatgtcaaataatggattaatggaagaaagtaatgtacctccttggtagcctacataatccaccttaatttgttatttcttatttaactattttgctatgtcttaagaaatgtatattaagtgaaaatggatgcataaaaataaaaaaagagaaatgtatatatacaagctacatgaaaattggtcctgggaataaatcaagaaattcaaccaacaaggctaccagttatttagtaaataccaaagagataggtggaatgtagcagtacagaatatcacagctaagatatgagtaggtagttccactccctcctaccccacctcagtttttattaagaaaatttcacgcatgcgaaaagggagaaagag

SEQ ID NO: 227953 - DNA, 521 bp, Homo sapiens
gtgaaattttctttatcatttgtaaggctatttctagatccgtgaactgcaagttatatttttatgcatttttccccaaggaattggaaaaagtctcaatatcaatattctattctatatattcttttaaaaatcaatgtctgaagagggaagttgtaatgtaggtgtagagaatgtccttctctggctcagagtattaggaagttggactaggcattctgtagggcccagggctcctcttgactattgtagcctgagtcttcataccttccctgaacactctccattgatgactatatagccctttatttatcctttccctcatcagcatgttgaggtgtcacatttcctcagcagtcttgctggcgtgggtgtcatgtgttgtggggaggccggggtggggtcggggtgtgtgcgggatggtcctttttctgctgtccaaggtcctgaagatgtgtttctgtgtttcctgaaagtttctcagtttcccaaatgcaagtttgagattttatttgtttttg

SEQ ID NO: 227954 - DNA, 479 bp, Homo sapiens
tggcaccagctccttcctaattaatggcctctgtttttgaactttattttgctacccactggctcctgcagaactcttgcatggctggcttcccactgtgttttaagacactgtctctggcctcagtcccagccctaccgtggatcatttcttcagttaaagaaatatgaaaattgtttgaaacaactgggatacactacttggagaaaagaagatccaaggagcccatatcaaatgtctaaggcccctagataatcgaaatctagaagaaagtctagatttattatgtggctccagacaggatattagaacaaatgggaaaacactcttctgcccaatatcgagaactttccaaaattgtggttgtccaacaatggaatatgctgctactataagtcatgtattttctgtaattgagcatactcaagcagaagtgtaatgactacttcttgggaatgtagtagaagtgattcttgaat

SEQ ID NO: 227955 - DNA, 411 bp, Homo sapiens
cttactaatatggtatgccttctgttggtacctatgactcttaattaatttttggtcctgttgagatttctggtcaagagaaattccatccccccaacctcctccttgagctgtttttcctatcctagcctctcaggcacagatctagccatttcccccgacttttagactgttatgcaaggcgactacatttagagctggtcactctgcattttgtacacattgaattaaagatatagcataatacattctgggcatgcacacctgcactctctaggctttactagttgcatgtttgctccttacatcatagttttaggtttatcaagcaattggcttcctctctttgtgcccccaggacagctgagattagcaggggccagtgcttctccacagaatttgaaggaacta

SEQ ID NO: 227956 - DNA, 472 bp, Homo sapiens
ggcctctagggatggaggtgcaatgacagacttacaccgtgattatctgatagtgggctacctccttcccagttgcttcataaagacatggaatgatttcccatgaatgatattttaaaaagaattactttcgtatggtcctgagttatatataggcatagagatgtatgtacatacatatgcatatagagagagagacagagagaaaatgacaaagcaaatgtaacaaaacgctaataactagagaatctgaaggaaggatgtacaagagttgcctggtatactaaagatttcaaaatctgggagaagaaaattttctgcattatacagaacaaagtcacttgagggaggccaggtgcagtggctcacacttagaatcacaacactttgggaggccgaggcaggaggattgcttgagcccaggagtttgagaccagtctgggcaacatggtgagaccctctctcaaaaaaa

SEQ ID NO: 227957 - DNA, 385 bp, Homo sapiens
ttctttggttttcagaactttcccctgaaagacacccagccttgtcctcaccagccactgctctgttcaccaacctcttccttgttaaaattcccttttgcacagggtgcggtggcttacacctgtaatcccagcactttgggacactgaggggggtggatcacaaggtcaggagatcgagaccatcctggctaacatggtgaaacccccgtctctactaaaaatacgaaaaattagctgggcgcagtggcaggtgcctgtagtcccagctacccgggaggctgaggcaggagaatggcgtgaacccaggaggtggagcttgcagtgagccgagattgcgcccctgcactccagcctgggccacagagcgagactgcctctcaaa

SEQ ID NO: 227958 - DNA, 360 bp, Homo sapiens
tttttttttttcttttttgagatggagtcttgctgtcacccaggctggagtgcagtggcatgatctcggctcactgcaggcttcgccccctggggttcacgtgtgtttctaatttttaaggccctactttaatttctactgtcactaaataaaaaagaacaaaagctttttcttttaaaaaccctagacatcatgttcctgcttctgctggaaaaagagacaggatatcaccatctcaaaccagcacctttcagcaactgaagcctttttgtcctcaccctgagtgttaagacaatggctccctcacacgtcacaggccctggaagtgctacaacagctgaatgggttttcatgggacat

SEQ ID NO: 227959 - DNA, 559 bp, Homo sapiens
ctctcaaatgtgccctatttttctcctcacccactatgactgctcagaaacaaagggtggggtgatggtgagttacaatgcagctgcaaggactgtcaaattattggtaagtcagggagtggaaacagtgatgagtgaaattgaccataaactatctacatagcataaacatttgtacgtactcctaactttgcagatgacagttttcattggggtctttcatgacagaagccaagtttattgtatcaaacataataaagtaattcaaacataataaagtaactgcttacaagcacctttcctttgtcaacccagcctttgggagcatagcatttttttttttttttcagaataacatacagtgtacagaaatatgctacattttgatgacacaggccaggtgacttacccgcaagggtgcagaatctgatatgcttgtctatgtatgtgtgtgaaaatagaaagcatacaagtataacgaaggcacccgttctcagagcacactcttctttgagctccttgtccttaggctcacagggatgtcaagttggggtgcttc

SEQ ID NO: 227960 - DNA, 601 bp, Homo sapiens
taatgataacaataataccattaagaataataccttcaagccatggttaaataaagtagtgtaaagcaactgagtgaaacaatttatagacaaaaaaggcattgtagaggaatatctaataaaatgaaaaaatataaacatgcatattaagtaaagaaaaagctgtaaattggtatgtttagtttatcgcatttgcaaaatatatgtagaaaaatctgggaggaaacgcaaccaaatgttaaccagttattagtaatcttcaagtgggagattatagtggatttttcttttactgttttgactctgtattttataatcatctttacaattagcaatattattttcttttaggagaaagtcatatgaaagaacagaatgtattcagcatgactgagcttgtcataatcgaagactgtgctgtgtttctttgttaaacctaagtagtgagatgagttcaggcagaaaaccatctggaagatgaatgaatgaatgaattcatgaatggatatacgaataaatgattgaatgaattctaggagttggtatttaatatatagcaaacgacaaggtagccaggaattatggctttgctttttgtttt

SEQ ID NO: 227961 - DNA, 328 bp, Homo sapiens
atgctaccactctggaatggtaaagtgaaggagattcgtagggcaaggtttgggatcaggggtatggggctcccatgccttctctggtcatgtcactcccccagcatcttgatgtgttcaccaacctggaagctctccaaatgtcatcatttagggtttcttatggaagttttatctgtgggcaatgattaaatcattggccaccagcaatcaattcattctccagctcctttccctgtgctagagattagagggaggtgggtggaatgttccaagcttctaatcaaggctggtttttctggaacagccaccctcctgaagctaccta

SEQ ID NO: 227962 - DNA, 143 bp, Homo sapiens
cagcacctctgatggttttctacagcccttggaattcaagccagacttctcccaaggtccttgaggacccccagtagccatgcctctttcctccctgctccttctgctccagccactccagcctccccacagagcaagctctt

SEQ ID NO: 227963 - DNA, 2561 bp, Homo sapiens
ggacctctagtacatactgactcctacagttgctatgtagactgtggtttcaagcactgctaaattatttaacatgtgtatctatgctgtgtttatgacctacagaaaagaaatagaaactggctgtgataggttagtcttctatatcattcaagtaattccaaaataattcaaactatgagatctatattttcagccaacctagggaatatttcatccattcatatgtcaaaaagttcatgacatgaacccctagactttagttgactttaaggcctgtagcacaaacagcagaacataagttaagtacattctattgcaaagcagaatctaagaatgtaaacacacttttctacattgtacttcccagccctaaaacttggagcatgttattttccacaaactgcccatcttccactaattttttaaaaaaatttaatggcttcagataaagggcaatgtagcacaatacacagccaagaaacaaaagaagtagtcttatttttcccaattaatcatcatgcataaatctacatattagcaacagatcaaatataaagttctatggctgcccagtaaggtaatgctagagccgttaaatatgcatgctggtgggggagggaaccacattccaatcagaagacttcagtaatgtataagatgacacaaagtaaaaactcaaggcaggtccctttttaaatttttatcatttataatgaattcacaatttatgcctataaatttcagatgatttaaaattttaaacctgttacattgaaaaacattgaagttcgtcttgaagaaagcattaaggtatgcatggaggtgatttatttttaaacataacacctaacctaacatgggtaagagagtatggaactagatatgagctgtataagaagcataattgtgaacaagtagattgattgccttcatatacaagtatgttttagtattccttatttccttattatcagatgtattttttcttttaagtttcaatgttgttataattctcaaccagaaatttaatactttctaaaatattttttaaatttagcttgtgcttttgaattacaggagaagggaatcataatttaataaaacgcttactagaaagaccattacagatcccaaacacttgggtttggtgaccctgtctttcttatatgaccctacaataaacatttgaaggcagcataggatggcagacagtaggaacattgtttcacttggcggcatgtttttgaaacctgctttatagtaactgggtgattgccattgtggtagagcttccactgctgtttataatctgagagagttaatctcagaggatgcttttttccttttaatctgctatgaatcagtacccagatgtttaattactgtacttattaaatcatgagggcaaaagagtgtagaatggaaaaaagtctcttgtatctagatactttaaatatgggaggccctttaacttaattgcctttagtcaaccactggatttgaatttgcatcaagtattttaaataatattgaatttaaaaaaatgtattgcagtagtgtgtcagtaccttattgttaaagtgagtcagataaatcttcaattcctggctatttgggcaattgaatcatcatggactgtataatgcaatcagattattttgtttctagacatccttgaattacaccaaagaacatgaaatttagttgtggttaaattatttatttatttcatgcattcattttatttcccttaaggtctggatgagacttctttggggagcctctaaaaaaatttttcactgggggccacgtgggtcattagaagccagagctctcctccaggctccttcccagtgcctagaggtgctataggaaacatagatccagccaggggcttccctaaagcagtgcagcaccggcccagggcatcactagacaggccctaattaagttttttttaaaaagcctgtgtatttattttagaatcatgtttttctgtatattaacttgggggatatcgttaatatttaggatataagatttgaggtcagccatcttcaaaaaagaaaaaaaaattgactcaagaaagtacaagtaaactatacacctttttttcataagttttaggaactgtagtaatgtggcttagaaagtataatggcctaaatgttttcaaaatgtaagttcctgtggagaagaattgtttatattgcaaacggggggactgaggggaacctgtaggtttaaaacagtatgtttgtcagccaactgatttaaaaggcctttaactgttttggttgttgttttttttttaagccactctccccttcctatgaggaagaattgagaggggcacctatttctgtaaaatccccaaattggtgttgatgattttgagcttgaatgttttcatacctgattaaaacttggtttattctaatttctgtatcatatcatctgaggtttacgtggtaactagtcttataacatgtatgtatcttttttttgttgttcatctaaagctttttaatccaaataaatacagagtttgcaaagtg

SEQ ID NO: 227964 - DNA, 3169 bp, Homo sapiens
gcaacaggtgaaattagcttaattatatatattttattgaacccaatgtagtcaaaatattatcacttcggcatatgccacatttaaaagttgagaaattttacattcttttcttcgtaagtctgcaaatctaattcagatgcaaaattttcctcaaaaatacttaactgtatttagattacataaaatcaaagatacaaaagtagattaatataatcaagtcgttccaagtatgcttaatattctatcaataactgaatttaagtcaattacaataaaaactttagttcctcatctcactagtcccattccaaggactcaacagccaaatgccactactactaggatggttcagcttcaggcagaactgtggccgcttacttcagcacaactcaattcaatgagcacaaactaaataaaaatcattttctttcccctttgtctcctaagatagctattttctaggccccttaactaaaagagtagctgtcattttctctactgcctttatcgctacatggtaagatattatttgtcactctattacacaaatgctatcagggcaaaggatgggtccactgtgttcacacttcaaactgcaagaaactacagtctacatagcaaactgtaggaagtcagtatgtaactaagagggtttcaagcactgctaaattatttaacatgtgtatctatgctgtgtttatgacctacagaaaagaaatagaaactggctgtgataggttagtcttctatatcattcaagtaattccaaaataattcaaactatgagatctatattttcagccaacctagggaatatttcatccattcatatgtcaaaaagttcatgacatgaacccctagactttagttgactttaaggcctgtagcacaaacagcagaacataagttaagtacattctattgcaaagcagaatctaagaatgtaaacacacttttctacattgtacttcccagccctaaaacttggagcatgttattttccacaaactgcccatcttccactaattttttaaaaaaatttaatggcttcagataaagggcaatgtagcacaatacacagccaagaaacaaaagaagtagtcttatttttcccaattaatcatcatgcataaatctacatattagcaacagatcaaatataaagttctatggctgcccagtaaggtaatgctagagccgttaaatatgcatgctggtgggggagggaaccacattccaatcagaagacttcagtaatgtataagatgacacaaagtaaaaactcaaggcaggtccctttttaaatttttatcatttataatgaattcacaatttatgcctataaatttcagatgatttaaaattttaaacctgttacattgaaaaacattgaagttcgtcttgaagaaagcattaaggtatgcatggaggtgatttatttttaaacataacacctaacctaacatgggtaagagagtatggaactagatatgagctgtataagaagcataattgtgaacaagtagattgattgccttcatatacaagtatgttttagtattccttatttccttattatcagatgtattttttcttttaagtttcaatgttgttataattctcaaccagaaatttaatactttctaaaatattttttaaatttagcttgtgcttttgaattacaggagaagggaatcataatttaataaaacgcttactagaaagaccattacagatcccaaacacttgggtttggtgaccctgtctttcttatatgaccctacaataaacatttgaaggcagcataggatggcagacagtaggaacattgtttcacttggcggcatgtttttgaaacctgctttatagtaactgggtgattgccattgtggtagagcttccactgctgtttataatctgagagagttaatctcagaggatgcttttttccttttaatctgctatgaatcagtacccagatgtttaattactgtacttattaaatcatgagggcaaaagagtgtagaatggaaaaaagtctcttgtatctagatactttaaatatgggaggccctttaacttaattgcctttagtcaaccactggatttgaatttgcatcaagtattttaaataatattgaatttaaaaaaatgtattgcagtagtgtgtcagtaccttattgttaaagtgagtcagataaatcttcaattcctggctatttgggcaattgaatcatcatggactgtataatgcaatcagattattttgtttctagacatccttgaattacaccaaagaacatgaaatttagttgtggttaaattatttatttatttcatgcattcattttatttcccttaaggtctggatgagacttctttggggagcctctaaaaaaatttttcactgggggccacgtgggtcattagaagccagagctctcctccaggctccttcccagtgcctagaggtgctataggaaacatagatccagccaggggcttccctaaagcagtgcagcaccggcccagggcatcactagacaggccctaattaagttttttttaaaaagcctgtgtatttattttagaatcatgtttttctgtatattaacttgggggatatcgttaatatttaggatataagatttgaggtcagccatcttcaaaaaagaaaaaaaaattgactcaagaaagtacaagtaaactatacacctttttttcataagttttaggaactgtagtaatgtggcttagaaagtataatggcctaaatgttttcaaaatgtaagttcctgtggagaagaattgtttatattgcaaacggggggactgaggggaacctgtaggtttaaaacagtatgtttgtcagccaactgatttaaaaggcctttaactgttttggttgttgttttttttttaagccactctccccttcctatgaggaagaattgagaggggcacctatttctgtaaaatccccaaattggtgttgatgattttgagcttgaatgttttcatacctgattaaaacttggtttattctaatttctgtatcatatcatctgaggtttacgtggtaactagtcttataacatgtatgtatcttttttttgttgttcatctaaagctttttaatccaaataaatacagagtttgcaaagtg

SEQ ID NO: 227965 - DNA, 262 bp, Homo sapiens
cgtcaggtcccaaatatgagccgcgagaaatgcagccccggggaaggcgctgaggagggaagggggtctgaggcctcggggctcaaggccagtgcggggaatcgccgtgctcaggaggactcgggagcaagcccggggacaggaggtgcgcaggcgttggggccacacggacgacccaaacacaagactgtgtgccccttagagagccaaagggatccctgtgccatgaattaaagctttctggaaaatgttccaaacttca

SEQ ID NO: 227966 - DNA, 376 bp, Homo sapiens
ccagccagggcagttcccagacagactctggctgcctggacccaggtctgctccaaggaagcagcacgtttctggaggaggcttagccaagaaaccattacggagtgagagaggagttatctggataaatgcggaactgcccaactcctagcatttgttcctgggacccaggctgtaacatcctctggagccaaactgcctctgttcaaacccttgtccccgcactccacctcctagctgtgtggcactgtgtgcattacttaactttgcatgccttactttttccatttgtaaaatgcatataataataaatcctacctcctagggttgtgtgaggatttaatgatttaataaataaaaaacacttagaacaatt

SEQ ID NO: 227967 - DNA, 654 bp, Homo sapiens
gtgaggggctaaaccgacagggtattgctgggcatggaggaggttgggtccaggttttttgctctttgtgactttttaatgcctttcagatgtgacgactctccatacgccttctcacacgtgacccgtgactcatgggccgaggcctctgcatttgggacccccacctccacctccccaagatgcatttcattcccttgttaatgtgtcattgtagttgacgctttgaggataggcaggcttggtagataataaaacagtatttggcttatgtttaatcgctgtctcctcccacagcccgagaacgccttagcgtccttcagaaaggatttggtggtactggtttttatgtgtgtgtgtgttgttttttaaaaaaattttctccaagggacctggtcaaagatttcaagccttaaatctgatcaacccaatctggggcggcggcagctcagtctctcctcctcgctgtgccaatctgtttctgtggtggcgggtggcggctcggtgttaaatttggagacccccgtgggtttcccatgccgacctgcatatgtctgcgggcacggggaagggagggccgcagacccccgttgagtccccgactgccagcagcaagttgccgcaggcgcactggctctgcagccccgggatcaa

SEQ ID NO: 227968 - DNA, 469 bp, Homo sapiens
ggcctcatttgatatgaagaaaaatgataaaatgccgtatatttttactttaaatataaccaatgtaatgcctgaaatctaaagtcagtaaaattttgaatgacttgacaaaagtaaaaaatgatatataatttcctcacattttaaagtatgaagctgttggttctagtttctctaattttgttgttaaaggttttctataaacattctataagtgaaaatgagagctgcacaccactgtgtccaccgtctttgggagagaagggtgaagttgacctgaaatcagagctgtttttcactcttccattcactcacattgtaaatttggaagaagcacattatctgttgtgaatctcaggttcctcatatgtaaagtggagtggttatctttttgctgcttctactcatgggtatggagtgaagatttaatgcaataatatatgtgaatgaataaagagctttttttggc

SEQ ID NO: 227969 - DNA, 894 bp, Homo sapiens
gacctgtgtccgttccagcaaatgaaaacctaaataagtcccacaacagcaccgagtgttctctaaaggactgtggtctgacattttcacgtaaaataaactaacactcataagtaatggtgcattttcaacatgctcgtgtgacaggtatatgaacgcgattggtggtggggggcatatttttgggggcaagagaggactcctcattcacccttccccaagttagaaaatgccatagcatagtaggaatgcgttcaaaaacaaatttctagatgatatcctgcatatgaaataaactccagtcttttgtaccatctgtatctagcatacttataaaatagaacaaagtgtgcatttttaataaagaagcatggtgttgattttcttcttcagtcctcttcttcttttctattattttataaggtacacaaagtatattatttgtttttaggaatattttagtggggcaacaagcatggccaaacattatctcgtgaagcactttttagaagaggaagcatttgagattctcaaaagcactttcagtgaaatgtttttaaatgcacattatgatgttaagaaattaacttgagttattaaagcggcaagtatgttagactaataactactaccatcatgctttcccaggtttgaagagctgctatcacagagatttaataattctaattcgaggttatcttcattaagaatactaagcttgcatgactgataaaagaattagaaaaaatagtttaatatcaatttactcttctatagggcttgacaatttatcaagtgcctttacctatattacatgatttgatctttaagaccagtacaagccctccatatccttgggttctagatttataaattcagcccaggaattgaaat

SEQ ID NO: 227970 - DNA, 375 bp, Homo sapiens
  misc_feature (375)..(375): n is a, c, g, or t
gacctgtgtccgttccagcaaatgaaaacctaaataagtcccacaacagcaccgagtgttctctaaaggactgtggtctgacattttcacgtaaaataaactaacactcataagtaatggtgcattttcaacatgctcgtgtgacaggtatatgaacgcgattggtggtggggggcatatttttgggggcaagagaggactcctcattcacccttccccaagttagaaaatgccatagcatagtaggaatgcgttcaaaaacaaatttctagatgatatcctgcatatgaaataaactccagtcttttgtaccatctgtatctagcatacttatttcagtcctcttcttcttttctattattttataaggtaccn

SEQ ID NO: 227971 - DNA, 697 bp, Homo sapiens
atgactggatacaataaaagaatttatcaaatggatccttgtataaaggacactaaataacataatagtcacagcttataatagcagctttacaaaaaggtagagaggttctttgtgtggccatctggtccatccaactaaataaatgccatgagctaaatgttatactttactgctaggaaaacattgccactgagagttaaagaagtatcatcaaactgtaaggctttctggagacgtctcttaatacagaatagcacagagagactggatgaatctctggttagtatgttctgtagaccagagggtttttttgtgtgtgtgttttgtttgtttgttttgctttacttttaactgcatgtggtgatctattactgggtagtgaaattagtgagttgctgtaagcattctttaaaagaaaaggctgggtgcagtggctcacacctgtaatcccagcactttgggaggctgaggcgggcagatcacgaggtcaagagatcgagaccatcctggccaacatggtgaaaccccgtctctactaaaaatacaaaaattagctgggcgtggtggcatgcacctgtagtcccagctactcgggaggctgaggcaggagagtcgcttgaaccctggagccggaagttgcagtgagctgagatcatgccattgcactccagcctggtgacagagcgagactcaa

SEQ ID NO: 227972 - DNA, 787 bp, Homo sapiens
cctagaataaaaacatatcattttagaggcagaggtacagtcccattcctctgtttaaaaagatgaggtagataaagtccaagatctttcatctggagtgtttgaaagagttgggactagaagcacatctctggtctccagtcaagtgccttttctagttgagcttgacttctttatatctggataataaaatcaatctcatacaatgatataggtcatatttttccaaggcagttaagtattcattcactcctataccatcaataataatgacaaacatttatataaagcttacaacctaggcagtaccctaattgctgcctagcaggctgtaagcgctatatgaatattgctgtatgaatgttgcctgacgtgaagagttagacactgtagagtaattttccttatattgccttttgcttaatattgcccctcttttaaatcttcacaagagccacattaactaggtactgttgtcctcatttcatagttgaaggaggaaactgaagcacagagactttaaatatattcaccaaggaaatcgagccattaattggtaaagcctggatttgaacccaggcagtctgggtttctgagcttgtgcccttatccactatactgtgtattgttccaataatttttagttgcataaacgcttagaaatagcatttataagttctctgtgctccagaagaaccagtttcaagaaagaataaaatatatgtaaatagcagataaacccattatattttaaaaaggttggaggcactggatactaaaaaaaaaa

SEQ ID NO: 227973 - DNA, 476 bp, Homo sapiens
tgaatagtattcaattgtatgaatgtaccacactttgtttaccctttcacccttagaggaatatctgtgttctttctagtttgaggatattacaaggaaagttactatgaacattcctttctaggtttctgtgggaacatgtgttttctttcctctagggtaaaagcattatactgagggaaagaatatacacacaaaaagtgcttgattctctttgtttgaaatactatagcagtcaaaatttatcttagtgacagaaagtagaggagtggttacaggggatggaagttgggtttggtgttgattgcaaagggcatgaggatgctttttgagattatggaaatgtcctatatcttgattatggtggtggttacacagctatgcacactgtcaaaactcaatgaaatctacacttaaatgtgttcattttaatatatgtaatctctacgtcagtaaaattgtttcaaaaatgtttt

SEQ ID NO: 227974 - DNA, 598 bp, Homo sapiens
aacaacaacaaaaaaaattgactttaaatgacactctcaaacaaatggacctaacagatatttacagaacgttctatccaagatatgcacaatatacattcttctcatcaatacatttaacattctccaagatagaccatatgataggctcagaccacagtggaataaaagtagaaattaactgcaaaagaaaccctcaaaactatacaaatacatggaaattaaacaatctgctcctgaattatttttgagttaacaatgaaatcaagatggaaaaaaaattcaaatgaatgacagtagtgacacagattattaaaacctcttgagatacagcaaaaaaaaaagtgctaatgggaacgtttatagtgctaaatgcctgcatcaaaaagtcggaaagatcacaagttgacaatctaatatcacacctcaaggaactagagaaacaagaacaaactaaacccaaagctagcataagaaaagaaataataaaaatcagagcagaactaaatgaaattgaaacaaaaaaatgcaagagataaatgaaaaaaagctggttctctgaaaagataaaattgatagactattagctagattaacc

SEQ ID NO: 227975 - DNA, 662 bp, Homo sapiens
ataacattcaggaataaaaccagtgctgcctgggcttgttaatcctttccattttcaaaaaggagaggaaaaaaaaaacagtctgggagaacccaatgttaattaacttgtgtcttggtgacatgaaataattcttctccctgccacattcctaggcaacatgttaattaactctgcattagtgcaggcatttccagccattctttaatatttatattattgttattaaaatgggcagcagagagcttaagatgggacatctcttgacagaggagaaaaattgtcttttgcgtcagggatggtcctttagccaaggtcttgtttactggcattcttagtatatctggcaggatcttttaacaaggcaagttggaggagtaactgaacgggccctctaatgtgtttgagttcttcttcacccctaggataacttgtccccgtgaggatttccaatggctgagttgcctgttacagttcttttccgacatttagcttcaaatattcatgagacccccatgcagaacctcaactctgctgctgtgttgtattgttgggaacccaagagcagctgttcatgtctgtgctgagccagatctccttggatcccttttcactaattcttgtgtgctgggagtggtggggtggcggtgatggcagtggtt

SEQ ID NO: 227976 - DNA, 454 bp, Homo sapiens
agcttttaaaattgcttatctcatttgtggggagattatagatgttctagatgtaggtagaaaaatacagcataactgtgcattaaaaatgtggactagacttataactacccagaactggactcaaaactacattgttacattattaatgacaaaagtgccaccacagatcggtggcaaaaagatggtcttttcagtaaatggtatggcagcaatcagatggccgtacagaaaaaaagaatcatatcattacctcaacctaacacagaaattaatttgagatgaatttaaaagcctgaatgtgaaagttaaaaagaaacttctaaaataaaatacaggagaataagcataaaacaaaatattagtaaattgaacataattaaagttaaaaacttctcttcatccttagacacttttaagaataaaaggcaattgaattctggcactcaaaaaa

SEQ ID NO: 227977 - DNA, 507 bp, Homo sapiens
agaagaacccgtaggcctgtccatgttttcctgcccaggggctcccgagggctgactggagcccagccttaaaccccaaatccaacctgcattgtggccaaacggagtcagtgctccctgaacacaaactgcaagttagttatcaacaggtacctccaatgccctgtcaatcacccatgtgaggacaacctggcagcaggaaggagaaaaaacaggagctgctttaatctcccggaatcctcacttctccccattcttgttggtccaaaccatcaagatctcttgcctgggtgacgtctcctaactcttgctgccttctctgtcactacaataatcaaaaccatccaatggcttcccagtgcctttagaattaaatccaaacttggtactgtggcccctgctgccgcccccaaaaaatctctctcccatccttcctgttctctacctgttaatgccttcccatccctcagaacccatcaggacacacgtgagtttgaatgccctgaa

SEQ ID NO: 227978 - DNA, 577 bp, Homo sapiens
ccatgtttacttttgacacgtggccaaggtctgtgttgttacaagaacctcattcttcccaggagatgctgggccagtggcttttggcagctgcttggagcactgaaagatgttttcctggtatggacatcatcactactacccctaagcattgaaacacgaaggcttgggtgcaaaaatatgtacctggatagatacacatttgcaccaaatccaaatacagtacccacatgatggtttcactgcccttttggagttaatgactccattcttaataagggtggggcaacatcttttgcctggagagaatcctcaccatcctggtattttccatatcctcgtcttcctaaatcattccatgacacagtgagttgataggggtttaagaattaatcttcacttatagtattttccgtaggggaagtcagcactgaatcccgctgatgcctacatcccaccttctatgtaaaccctcctgccctccctccctccatttcctcaattcatccgtggttgataggtcaaccatcatcaatgactgacagcggtatctacttcacagagcattgtcaagacg

SEQ ID NO: 227979 - DNA, 371 bp, Homo sapiens
tcttgctggccctgagacactccagcctcagggcctcttgacttgctgctcccttccctaaactgcccttcatggcatcatatcaatcaggtctctgcttgaaagtcacttcccccaaaaggccttccatgaccacagcacatgccttcatctccacgttcacatcgcgcttcgtgttcttcacagtactcaacactctgcagctctatcaagtgtctttcttacttgctgtctctctcccacactagaatgtaatttgtatatggcatcttatttaccatagcattcccattgcttacaacaatgcctcagacgttgtggacatttggaaaatatttgctatgctgacacattaaaagaaatgtgtatat

SEQ ID NO: 227980 - DNA, 525 bp, Homo sapiens
agcagattaccaaacccctccaaactttggtttctaaaacagctgtcagtaaggggagtaaagtaaagtatagttcacagaattttccaaaacatcaatgtttcgaggtagacaaaagggtttataatgatacttggtttgggataggtgctcatgaaacattttctttcttcctgttttgttttttgcctttacctggggttggggcctctgctgcttattcatcacgcaactttaggcaagttgttaacctaaaattcagtgtccctgtcaatggatgggttgtggaggactgaacacaacggtacgtgcaatgagcttgtgacatccacacaaggggtcagaatatacatgtgcagcataatcataaattacggtctgaattcatccattcactcattcttccaaacaaacaggtaacccatggcgcttgtgtgccaggcattgtgctattgctggagacgtaaagaggatcatgataccatccctgccttcaaaggaaggcagtctatatcatttttgcct

SEQ ID NO: 227981 - DNA, 491 bp, Homo sapiens
atatgactatagcccatgtttgttaatgctttaggagtaccctggaactaaatacatattaaataccattaaataattgttaacagtacttgtcttggtttagcaaaatattattttcttgattttccaagtttttcagaatttctgacattgtacatcaaatctgtaatcaaggaaataccttatttcgaatgtcttttggaaaaaattattataattcctattgttgttgcatgtcgtacgaatgaaagaatatacaatattctcttaatacggttgactgttgagcatggaaaagctgaagttgcccatatactttttaccttaaaagggaaatagttgtttttcacttcacgttgatcttttttaaggtgcacaagaggaatttagagttttcaaataaaagttgtacctagatgatttgtaacaatataaactaagaaactctatattataaacattaattaatttgaatatcaacaaaaaaaaaa

SEQ ID NO: 227982 - DNA, 273 bp, Homo sapiens
acttttttctacagttactttttttccacacttacttttttttaatatcagttcttaagggcatttgcataatccccatgttttgtcacagtagtctcagaataataataccaactctttcaccaacaatataattttaccaaaaaagtttcagggccgcacacgatggctcatgcctgtagtttcagcagtttgggaggctgaggcaggcagatcgcttcagcctaggagttcaaaagcagcctggggaacatggtgaaaccccatttctac

SEQ ID NO: 227983 - DNA, 448 bp, Homo sapiens
tgctctcatacagagattacatttcttaaggaagtcaggcctttggaatgcagtagacaaatggccatgagagaaaaaacatataagtatcgaaactaatggcacactcgatatgtcataagtgaatgacagtctgtaaatgccaaggaagacagagagaggtagaaagcagccttctttggaagataagtggtaaactcaagattgctatagctaaacgcataacaatcctcaacaggggagatgaaagaagtggtttctgtaagaaggaattgataccacttgaaattttagtgctgagtaactaagaaaacttacatgagggtctatggttatgcggagcagacaccatcttctttccctttttcttcttctcattctagttttctaagatgcagcctttggtgagcttactaaaaatacagattcttttaaagttagtgccgaa

SEQ ID NO: 227984 - DNA, 590 bp, Homo sapiens
gatggttcctttgacagaaagtttgggctgggtgcggtggctcacgcctgtaatcccagcacttagggaggccgaggcgggcggatcacctgaggttgggagttcgagactagcctgaccaacatggagaaaccccgtctcgactaaaaatacaaaataagctgggcgtggtggcacatgcctgtaatttcagctacttgggaagctgaggcaggagaatcgcttgaacccggaaggcagaggttgcagtgagccaagattgtaccattgcactccagcctgggcaacaagagcgaaactccatctcaaaaaaagaaagaaagaaagtttggagtaggtgaaaagttttccttagtctgccaaatctagactaagttttgcaggaggtggggtttgagtgtaaaataccagacctcaaaggtaatctagatcaatatttttcaaactgttggatttaatacatttaatagattgtgaaattaataggtcacaaccaacattttaaaaaaggataatataataaaaaatgtcagtctattacatgtaagtaagaataagtattgtttttagaaactttgtagttatatatg

SEQ ID NO: 227985 - DNA, 412 bp, Homo sapiens
aagaatgtgtcctttaacctcagagccccaggccttggccagtccccccaaaacacttggggtcacatgacccctgtccctcaggaacttcctgggagaaggggagggcacctcccagcacctctagcccccactgaaaaaccagcctgggtggccctgagagggcagaccgaaagccttggcacctcctccccaaccatccctctgaaggagagctgggggaggggacggctcctcggctttggcctccaggacctggcactggataggtgccaaatgtttgctggctacatgaggcacttgttcctgcagaagggaaactgcacctgacaatgactgcttcctccacctaagtggggccttcttccctctctcattcattcattcaacaaatacacactaagctcaaaaa

SEQ ID NO: 227986 - DNA, 309 bp, Homo sapiens
cttggcagttcttcagctgcagaggtttagctgcaaccatctgcaaaaaggccggtattttcgattccattgaccttgtgatcagggtgttaacagtgcatggagcaggctttggagggccgtaggtcaaagtctgaggcccccgatatcccagtatgactttgggaactgccctgaggtctgggctgtgtctgagggactcctggccaaggagcgttctctccttcagaagcagcatccgtgctgtgtgctgggtcagggcgacccctggctccagggtctctacacacagctctccttggcagggag

SEQ ID NO: 227987 - DNA, 255 bp, Homo sapiens
gtattttcagtagagacaggattctattatgttggccaggctggtctcaatctcctgacctcaagtgatccgcctgtctcggcctcccaaagtgctgggattataggtgtgagccaccgcgcccggcctctgctactttttaaaagtctatctccagaagtctgctttctcattttgaataccgtaggtattcaaatgaattcactttcaaatgaattcactaggtgctgttctacccttctgttagccttttac

SEQ ID NO: 227988 - DNA, 231 bp, Homo sapiens
cagcctatttccaatatgccctctttctgcctggcaaacatcttgtcttttctaaactcagcccagggacatgacatctgtaatgtgtttctgtgtgactcccaggcttctgccttcttaacctctcaccttccagctcatttgagtgaatctttgtccaagaattgagagaaactttataggtaaagcatgcacatgttgtctgatttaatctaaaatagaaataagaaa

SEQ ID NO: 227989 - DNA, 358 bp, Homo sapiens
acatgacttataaaggaacaacagactgacaaattctcaacagaaggcagaagggagtagaattacttcagggagctggggtaaaggcccatctgaagattctccatgtgtcacagcaagactcagactgccttttgctgagggaaaatagaacttctccagctgagctgtggttttggtagccatgtgggccagcgaattcagaaatcagagttcggcccctgctgggtcgggggttgtcataacagtcccgtctgtactactaagctgggaccttggggcgctgcactcttgaagtaaaccccatcaggagatccacagcgcactgtgggcttctcaagaagcccaaattccagga

SEQ ID NO: 227990 - DNA, 348 bp, Homo sapiens
agcaaaggttagattttgttactctggctcatcaaactgatactgtgaactgtgtctgtgtactcgagtggactgttatcaccttgtcaggcagggcgctgagggctttgcctccatgatctcgtttcaacttctattatcccctaaaagggttttacagagaagtaatttgctcagtgtcacattgctaattggtggtaaagtccaccctcaaacccacatatggttgactctggggcataagtattcagccggttggcctcactgcttcccatactttgacgtttgcttgcccaccatgacccgacttatttttaaacaagtaagagattattttccaaaaaaaaa

SEQ ID NO: 227991 - DNA, 216 bp, Homo sapiens
caacagtgaacaatctggaaaagaaataaaaactaatccaatttatgacagctatgaaataaataaaccagaaatgaaagtggaaatattattgaccttaaagtaataaaaattattacactactataaaagttgtatgctaacaaattatataaccaaaatgaaatgggcacctttctagacatataaattacttaatttcgctcaagaggaatt

SEQ ID NO: 227992 - DNA, 813 bp, Homo sapiens
ctttttaagtttcttgttattttttgtcaccagtaagcaatgacattattctgaatttgagtttcagctttaacacaatggtcttagttaaatttaaggtttcaaatagatttttacaatttaaaatctattttggtgacaatacaacttcagagagagtcctatagaaatgattacaaagagtttttaatactagacttgtgctattaaatcttttcttgtatgcctcagttactcttaggttttccacatgcctgttaatttcacttgttttaaagtgatgctccttggaatttagtaaaagagacactgagataatttggtgaaagattcatttatctttgttagtcttccatatacttggtagtatttttgcttttggtgccccgtcattgaaaaatgtttctttggtagaatgtttacacattataagctgttttataaaggagataaagattcattttatatttagtctaaagtgacaatggagatgtatgtgtgggagtgtgtgcgtgtgtgtgcatgagagagacagtgaatatatcagtgtaacttcctgctgttgttcaatagtccttaaactagtgaaaaaagtagtgaaatgagctattggcccaatggcttgaaaacttatttgtgtctatctaatatgtttaaaaggaataataatatatcatggatatgagtgtatgtattaactatagaatgactgattttttaggaagttaattctggtgagagtggtcaagccttagtaacacagatttcccagatatcagaacttaaattattatagaagcaactgatctacct

SEQ ID NO: 227993 - DNA, 484 bp, Homo sapiens
gaatggagatgattattctggaagatacaacttgaccagctttgtaagctgttaattattaaacaaaatcaatgtttttaagtttaatttggactctttcagttggaataactcaaggtcattctttcaaaaaaaaaaaaaaaaaaccccagaaaatccccgtgtgtgtttttggtgaccttcttggaaaagggagttggaaaaaaggcctctaaggcaacagtgaaagaggtaagagcctggcttccatgtgtctggagttccttatgtctggattcttggtcatttctgtcactaagacctgaggatcagcatggctgggagaggcccgagctggctcagttggggccatgaaatctgtaatgacctcgggtcatagccagcccaacaaggggacactctgtgactctggtaagatgtaggggccaccggccagcagtagccagcaatgaccactatcagttggccaaagtcaaaaaaaaaa

SEQ ID NO: 227994 - DNA, 348 bp, Homo sapiens
aaaagcggggtggttattcaaagagcaggttgcttagcacctttaaggaattttgggggtgggggcagcaggaacccaccatcacaaaaatcactgacatgccatatcatggatgaatctcaaaaacattataagtgaaagaagccagacacaaatgactgggtatagtctgattaagtgaaatatcctgaaaaggcagttctataaagatagaatgtagattagtgggtacctggagttggtggtgaagatggtaattaactacttgggcataaaggatctaaccgggatgacaaaaatgttctaaaactggatttcagtaacggttgcacaacctggtaaatgtat

SEQ ID NO: 227995 - DNA, 151 bp, Homo sapiens
atattaaaatttctaatcttcccttgtgtttgtctttctctggggccagttttatgtacatagtcacttgtgcatataattcctagctgattcagtaaatatgtacaactgaagactgaaccctcagaaactgacatgaacctgcctttaa

SEQ ID NO: 227996 - DNA, 414 bp, Homo sapiens
tcttacatgtgatgttcaatatgagttagagccaaagaaaaatgtaaatacaaaatgcctttgacctagcttttcagtaaagctgaaaaaatgatgttaagatttgcagggctgagtttgtcataatctattataatccagcaagtttagattgctactgaaaatgataatattctcttacatcagattaagaaatgctcaggatgtatattaagaaatttcatggagaaatactgtccctactaaaaatacaaaaatcagctggacatggtggcacacacctgtagccacagctacttgggaggtggaagtgggaggatcacttgagttcgggagacacagacttcagtgagccatgcctgtgccacttcactctctagcctggctaacacagtgagacgctatctcataaaa

SEQ ID NO: 227997 - DNA, 724 bp, Homo sapiens
gacagagcaagaccctgtctcttaaaagaaaaaaaaaaaaaaagagccaagaatactcattgttctgccagtgatgtctaggaaaggaatgccaggtgctgctaacatggacattttagtgatgactcacaagttcatgccttatggctggggaaaggctctgtgatggggccgtgccgtttaggatagcacattcagacttaattcgtgtatgcaatgctaggaacgaaagaaagtgaatgtttttttctttagtgggtaattcttctcctagtcctttggtagagaacattggtcttttcagatttttgcaggttttgtgttctttcatgtcctgctcttcatgtagagttaggcagatgtcttcactcctaatagctttccgatgggatagaatagaaatacttggtttcactaattattctatttagtaattactcaaaaatttgtttggacttaagtttcctggtaactggggcagtagtggtgttggagtattggctgtgatgaggattacattccttattcttacagagatgagcctgttgaggtttataagaaatgtagctacttcagctgtgtgttttgtatatgcctgaatacaaagtgatcccctctttgcccagtgagaagatccctgcaaaaggttttaggtctacttgaaaatataaatttttaggactctaaaaatatagttcaaagtccacctataatacttaatttg

SEQ ID NO: 227998 - DNA, 685 bp, Homo sapiens
tagcatgtaactcaaaatctaaattgagtaaagcccaggaatctgaggaatgatcagtgctacaaaatgtgaaaggtaatctcatctgagaggaatccaggtgttaaagcagggggcagttctatcactatactacaactaagtaagtttaaacatggctaacagagacttctagttcaatgtggctaagcacacaagtttatcttcttctagattcttatattaaaattactgtaagggaggaaaccaaacacaactatataaaataggagtagagtcatcagcaagaaaatgatttcaacacacagttctagagaagtaaataaaaagtttcaatttagagtgtacacaaaggaacctaacagctgaggaggacctaatctaccacatagagcctcaaagggatcaggacttgaaaatgccagatatggtagaaggcagaaatgcaactttgataaaaatagaataattcaaaagatccttactaattctaaagaatgtactttaggcagaaggaaaatgatccaatgtggaaagctgaagatataagaagaaataaaaatttttataaatatgaaggtatcagatccaggaagtaggctgggtgtggtggctcatgcctgtaatcccagcactttgggagaccagggtgggaggaccgcttgagtccaggagtccaagacca

SEQ ID NO: 227999 - DNA, 262 bp, Homo sapiens
ccttaccacccccaccacgacacagacaaccttggacagactgtccacatttgtggcttttctttatatacgcatcacttttaatacaaattccatgttactataatgagccaatatacttttagtatgtatatgttcatagctctgcttgcaaaaaaaaaagaacaaggctctctttatatataaaaatcacctggaaataaatatttaaaagaccaaaacccagtacaaaaataggcaaagggtaataacagacaattta

SEQ ID NO: 228000 - DNA, 333 bp, Homo sapiens
accctccccgccaggccccgctccgctcccccaggtccaccccttcccaaaccagccccgacaggtgaccgctccgtggcccaaagcccgtcttcctggccaacagagaaaaataaagtttcattttgcacactgcctcccgccccgcgccccactttttgaggaacggggagccctttctttcctggctccttcccacatctgggagctgtgtaggcagcgcacccacacaaatggcctcgcacctttcccaaatcgggattccagagcgatccactcaacaagcctcagtgatttaataaagcaaaaattaaaaaatgaataataacgaaa

SEQ ID NO: 228001 - DNA, 401 bp, Homo sapiens
aattaaaagtgtgtcttctacttggagattgtggagataagtcttgatgataaagacttgataaattctagaaacataaacttagaacaaatattttcccagctataactatgtgtgaatcccttggcttgatcttgtagaagagacaaagtaagactctgcaggtcttgcccttaaagtgcttacaatatgattaacttagtaaagtacggttggctgtctaatccaagatagatgtaatagctacttttctgttatagcaacatttggttgagaaaatgtgggagtcattgtagatttttggtttaaaaaattaagaaataaaaattgtgttggcagattgctttagcccaggaattctagaccagcggtaggcgacgcggcaggatcttgtctctcca

SEQ ID NO: 228002 - DNA, 596 bp, Homo sapiens
gaaatttgggaaggaaactttttaaaaacactgttagactgcaaactgacaatggaaaaacaatcagtatgagattatgatgggaatgagcaatttatgagggacaaacagctgaacttacctagagcgaaatatattcactctagacttgtaaaagaatggcttggttctaatctgaatctaaatgtaaagatatgtttacttcagtgataccttgtttaaaaaaaaagtgtttgttcttgggacattggactcagtatagtataggacagttgatgaaataaagggcaaatcccacagctggaatagaaccataaacctgatcctgtggcaaggatggcttgttcactcactgatttcactcttattgttgcatacttttatttctagtgaatcagagctagaaaaacaattgagccaggtgcagtggctcatgcctgtaatcccagcactttggaaggccagtgtggatgaattgtttgaggctaggagttcaagaccagcctggctaacatggcaaaatcctgtctctactaaaaacataaaaactagccaagcatggttgcgtatgcctgtagtcccagctacttgggagg

SEQ ID NO: 228003 - DNA, 419 bp, Homo sapiens
ctatcaacattctattcacgctatcttagaaaacatctaagaagactgaggctttctctctaacttttctcttcttctgagccctcaccagaattactcctaatgctcccccatttatggcaatgtgggctttttcctagcatgtacttccaaagtctatccattacccagtttcaaagtcccttccatatttttaggtatttgttccagcatcagcctcacttctggtagcaatttctttcttagattattcaggctgctttaacaaaataccttggattggataatttacaaactacagagattaattgttcacacttctggaggctggaaaggcaaaggtcaaggtgccagcagattcaatgtctggtgaaggctcactctcttcctcacagatggtaccttcttgctgtatcttc

SEQ ID NO: 228004 - DNA, 419 bp, Homo sapiens
tgagcgcttcaggatcacctccaagaatttgataaggactttgctgggccgccagccagtcagagggaagatttatggctttgaagtttgccgctacccaatcatcaaagaatagcggctctttcagaagcgaaagcaaatcctttgaatccacaaagctcctatggtgtgtttgttggtctggataaaagaactgattattaggggggatgggaagggaggagataaaggcgggacaattaatgaagtaatcactatgtgggaaatgtatatacacaaataattggattttcctgatcaaagggggccttgccgcctggagacccgcgcttgggttgctcgagacactcttcccgccccccccaacatacacacacacacacacacacacacttgcaattaaagatttgcaccgacgc

SEQ ID NO: 228005 - DNA, 398 bp, Homo sapiens
ctgtctctaaaataaataaatattcatttttgttggcccctaaaagtattggaggccctaagccctgtgcatactgtactgtgcctaatggataaggtggccctgccttagttccccacccccaaattaaatcaatctttctcttagcgttcaggaccttttatgaactggttctgccatgaacaagtgagatttcactgtaaaagtgtgtgccagtttgtacatctcatattttcagagacctgggttcgaattcctgctctataatctaatggtatgcagttgtgcatgtcacttgatttctgagattgtcagtcttttctgcaatatgaaaatagtaatatctctctcaaataggtctttgtgaaaattaaatgggatagtatatgcaaaatatc

SEQ ID NO: 228006 - DNA, 717 bp, Homo sapiens
actgagtgacttaaacaatagaaatgtatttctcacagttccagaggctaagaaatccaaaatcactgtgccagcctggttggtttctggtgcagcctctcttcctggcttgcagatggcagccttctcgccgtgtcctcttatggcagagaaagtttgtgaactgtctggtttccggtcttataaagacactaatcccattgaaccagggccctaccctcataacattatctaatgttaattacatcccagagatactatctctaaatattatcacactgaggattaggattttaacatttgaattttggggtgacacaaacattcatttcataacacctcccttgagttagccttgtgggggttgccctggtacaggttaccatttacttctgataagactctaatttacttttggcaaaaactgactaaccacatataaataagtgattttatttaccttttcccccatttggtgcatacaatttaccatgtagtccaagcctttaggcctcacaagacttcagctcaggaccaggtaggctgccagttcgtcccccatatccaaacagccccgggagagagaagggagagaatttttaaaatgacaatcctgggatgtcctacggtttagagcactgggaggtgtacttgtagtcattaaaaagcaactgcagtgacccagcatagtgctagtaatctggctcccaggccgtt

SEQ ID NO: 228007 - DNA, 405 bp, Homo sapiens
acttcttttaaccagaccaaacagtctatttttgcccaagcccaaatgaaacacagcacctttgttacttaaattacacattacagcaatacaattataggagaacttttcctgttctctggggagccctctgggtatgtggattctatgggtggtgatagctgcccccatactggagggggagatgcacttgggggaggccattaatttcattcaccatccgggatgattttcccctccccagtaatctaaatgcttacaaacatcactggttacaaatgcaccgggccctctggtggtggtaccctatcacagtgttcgcccctgccgctggtacgatcctgctacagaaataaaatattaagcttacatgtaaaataaagctcttaatgacagtggtactga

SEQ ID NO: 228008 - DNA, 115 bp, Homo sapiens
caacacaatttcatgtcattttcacaacaaccctacgaataaataccatgtatttggttgtgagacactgaggcactaagtgattacgtcacttgtctaggttcacttatctagt

SEQ ID NO: 228009 - DNA, 364 bp, Homo sapiens
gagacaaagtcttgccctgtcacctaggctggagtgaaatggcacgatctcggctcactgcaacctctaccttccggattcaagtaattctcctgtctcagcctaccgagtagctgagattataggtgcatgctgccatgcccagctaattttttgtattttagtagagacggggtttcaccatgttactcaggctggtctcgaactcctgagctcaggcattccatctgcctcggcctcccaaagtgctaggattataggcgtgagccaccacgccaggcagctgtgtttatttctttgtggcttgtctgttgggtttgttctgctgagaaatgcaaggccctatccccttcttctgtgtctt

SEQ ID NO: 228010 - DNA, 449 bp, Homo sapiens
ttcccattcctatctggtggtcaaagcacatttttttttttctggattgtccctgcttccctccctctcctttttgctcataggtgggggaaggggctgcagtctccttgcaaatgtcatcagtaggcagagaaagccaatccggcttgtttttgttattcaggagtttttaatcctgaaattgcatcagttgaaaggggagataaggaagacccagataagagagaccctgccccacgcagccggttagaggaatgtggaaggccctccctttcttattggcaccatccaaggggcaaggctgaaaacccagagccagggtcatgaggatggatcagggccttttctccttcagagaaggggtggtccctgcatccctgagaccctagaaaaggcttcctttaggccaaagagaaagaaggcgaggaggtgtgtgtgggagggagggg

SEQ ID NO: 228011 - DNA, 285 bp, Homo sapiens
tcttatatttttagttgagatggagtttcatcatgttggccagactggtctcgaactcctgacctcaaattatccacccgcctcggcctcccaaagtgctgggattacagttgtgagccactgcacccagccggatctgattttcatgaggcatctgacacattgcatacggaagcattcaataagtagtcattgaaatgaaagagtcaagaaattgaagactgttatgaaatgtctgtggatagaaataataaatgtagtctaggtaatggatactacacttag

SEQ ID NO: 228012 - DNA, 326 bp, Homo sapiens
cagttatactgtttttcccatcatttgctatacaatttggttcctgctttcaatgttttgtttgttggtttgattggttagttttggttttgttgttgtttaagtaagggatgattcctccagtattgatcatcaggcaatgagaacccattaaacttactgaagaagaccaaagagactgccaatttagaaagagtgggctgggcgtggtggctcacacctgtaatcacagcactttgggaggctgaggcaggcagatcacctgaggtcaggagttcaagaccagcctggccaacatggtgaaaccccgttctctactaaaagta

SEQ ID NO: 228013 - DNA, 467 bp, Homo sapiens
cctgctcgagttactggtacacagatctttaattcactcaacaagtgtttattgaatgtctattatgtgctagggctgttccaagctctgaggatgaagaagtgggaagaggagacaagtccctccaatctagtcgggaaggtgtattctcactgtttcacctcaggctgttctcaagtgtgtctgatccataataggaacacagtgttcatgcattcatgctggtcttgcttggaaaaagatcatctttcttggttttttggctataacaaatagtttgtattaatagtagccaaatttttaactttccatcaaaatatgccatgtccaattttgtccataattatgttaactcaggagctcaaaattgtgccatatttatccaagagaaataaaaacatattcacaaaaaaacctctttgtaccagaatgtagtgttcattgcagctttatttctaatagccaaa

SEQ ID NO: 228014 - DNA, 443 bp, Homo sapiens
gggatagagttttaagaatatccccagtgagggtttagaaaaatttaattcattataaatagatctattttaccttaattattattctattataattatttctttttttttttttttttttgagacagagtctcgctctgttgcccaggctggagtgcagtggcacaatctgcaacctccacctcctgggttcaagtgattctcctgcctcagcctcccgagtagctggaattacaggcatgccaccatgcttggctaatttttttgtatttttagtagagacggggtttcgccatgttgccaggctggtctcaaactcctgacctcaggtgatccacctgctgtggctgggtgggattacaggcgtgagcctgggattacagtgctgggattacaggcgtgagccaccgcacccagcctgttataattacttctaatcataa

SEQ ID NO: 228015 - DNA, 423 bp, Homo sapiens
caagcgcagctgttaaccagatgcatgcaacataagccacagagtgtgagaaaaaaagtattagcattatttccatggaactagtcatgtggttattatagaaataatcagcattagcatactacaatatttgttttgttcttgaattgtaacaccctagggaaaaagttgcctttatttttaaaaagttaaaaatgaaagtacatgttatatatctttgctgaaaaatggtgggaaatggatttgtcaaaaccatatggaaaggaagagggaatcaattaaaaacagaaatctaataaatctaaaatatttccaaatgaaatgcttgtggtaagctaacttcttgtaaacaccgcactcaagtcacttgaacagtcccagatggtgaactaactttgtggtcttaaaacaaaagtcagccaa

SEQ ID NO: 228016 - DNA, 368 bp, Homo sapiens
aaggcgagaggattgttcaagcccaggggttcaaaaccagcctgggcaacgtagtgagaccccatctctacaaaaaattttaaaaattagccaggcatggtggcatgcacctgtagtcccagctactcaggaagctgaggtggaaggattgcttgagcccaggaggtcaaggctgcagtgtgctgtgatcgcacccctgaacttcagcctgggtgacagagcaagattctgtctcagaaaaaaaaggggtggggtgtggggcctagtactttcaaacctttttagcagaaccctttcctctcctcccaccaataaagtttttaatcttgtgtggaatctcactgaataaacaaaaacaatgttttatt

SEQ ID NO: 228017 - DNA, 407 bp, Homo sapiens
gaggatattggcttaattcaggcaagagatgatggcacctacatgtccagctgacagtggttaagcaaaatgtagtatgttggtgagatggaacattaggtgaccatggaaagaaatgaggccaggtgtggtggctcacacctgtaatcccagcactttggaaggctgaggtgggcggatcgcctgagcccacaagttggagatcagcttgggcaacatggtgaaaccccatctctgttacaaatacaaaaattagtggtggcgggcgcatgtagctcctgctactagggaggctgaggtgggaagatcgcttgattgagcccgggaggcagaggttgaagtgagctttgattgggccactgcactccagcctgggcaacagagcaagaccttgtctcaaagagggg

SEQ ID NO: 228018 - DNA, 729 bp, Homo sapiens
tagataaaattaattacttctaccatggtagaacttctttaccgtgtacattattgcatattttatgttctgtccttgcacaccttggctcgcaataaccatgccctcttaccaacacacgcttaatagaatttgtatgcacagttacattttttttggaaaggaattgagcattgacttgttctacatccctaagcctcaggctctcctatgatcagtgaacacgataatacctgctttattggggatcagataagaataatgtgaaagaatctccaaggactgaccttgtaaatcagtaactctgggttctaggctcttccctgccaaatttgacatgatctcagacaagttgtcagatgtctctgatcttccctcttccaccagtagcaacagagtttttaaatgtataaagtgctaaacaaacttgagagagttttattgtgagcagtaggaaaatgcattactttttaatttaatgaaatgaatatccaaaattaattgaacagcattgaattaattaatatatcgttaatttctacatgaattctctccattagcagtgcagtgtgtcttataaatgtttgctagaggagtcttatatgtaagcattactcactggtagaagattctcgcctaatacatatgctaaatttccatcttcttgcacgattctggttaaggatcgtattattccagccttagttgtccccgaggtatgcaggaatt

SEQ ID NO: 228019 - DNA, 131 bp, Homo sapiens
agtatggtctcaggtttatttgctttcaggataatttcttgcccctttttcttgtgcccttaaagagctcaaataattcctttctttagaaaataaataaataaaagaagtcatataatttaatcattacc

SEQ ID NO: 228020 - DNA, 344 bp, Homo sapiens
tcgccatgttgcccaggctgatctcgaactcctgagctcaagcaatccactcacctcagcctcccagtgttgggattacaggcgtgaggtgccacacctggctccccaaaatatatatttttaagagacaggctcttacaatgttgcccaggctggtctcgaactcctgggctcaggcaaccctcccaaagtgttggcattataggcgtgagccaccacacctggcctctttgttgagtaactatgtacatgcaaacattaaaaattttggcaggccgggcgcggtggctcacgaggtcaggagatcaatactatcccgtctaacacagtgaaaacccgtctcc

SEQ ID NO: 228021 - DNA, 449 bp, Homo sapiens
tcaggtgtcaagaagcatttgggagtcaaaaagggtggaggagattggtgcagggatcctggcaaatctctgggtgagcagcagggggcgccctgatcagggcagggaatgttgagttggatacacagccataagggggtgtcatggggctgtgggaagtccacggactctgcctcagaagggaaattacttgatctctgtatgcctcagcgtcctcatctgcaaagtggacatcagagctcctacatttattagcctgagaacaaaaatcaggcagaataaatgaacaaccacagcagcaacaacaaacaagaacaagagccaaaagcaaacagagagatgagcccttatatcatcggaccctgaaatccagccaccgttgaagccaggtctacccctctgatttccaagacaacagaaatcaatgctttttttcattaaaagccaaa

SEQ ID NO: 228022 - DNA, 425 bp, Homo sapiens
cagttatatagaatatggtcagataattaaaacttaacagtataaaacatgcaaaaaaaatttcagaatatttcttaatcaaacaacatcagggtctgtttagaatggttcccatacaaaatgggtataaagttatttcaaatcatgtaatattgtaatactaaatattattcagtactgtatagtaaacagtgctgaagaagaggtaaatttcatagatatgggggcttacttatgctgtaaactcctgtccttcttgttcacttgaagcagcatacaacaccccagaatttcataaagtaagaaaaggacggctgctgctctggcaaaaataggatgtgtaagagtcaaaggcacactattcagctagccacagtgattagcaaacacttgcccttcccaccccacatgctctttccccatgt

SEQ ID NO: 228023 - DNA, 523 bp, Homo sapiens
ggggggctttgaggccaggggcgaggatagatcaaagaacagagaatgctgacgggggccagggcaagtgtctagcaactccttgtcttgacacagggttgaaagggaacccaaagccttgaagacccccttccccattccgctttctggtcggctttgaaactatcccattttgttttccctcggcgtccacaaaaatataaagtagggcctattttctctgtccttatgtctctttttccctatatcaccgatgagatctcaagggtgcaggattttttttttcttgattcatttttgcagtccccttcgtagatacttcgtttgacaggcatactcattttcgagttagcttttaaaacacccactgaaagctctttcaatttctaaccagcagcagttatttctgtgccatatcaaaacttgaacatcagtgtttataattaaaagctttcagttgctgtatcaaggatgttgtaaacactctagagtagataagtttccggagaaggagaacccccta

SEQ ID NO: 228024 - DNA, 497 bp, Homo sapiens
tatgcttagcatgctacatttgaggtgacagcctgatgagtagtgggaggcatttatgcggtatgtggatttcttagatgttgtctattggagccatataggcctgcttactaaacttatttagaatttccttacattgtttttacccttttaaagattattagtgaaaaaaggccaggcatagtggctcatgcctgtaaatcccagcactttgggaggccgagacacgcggattggttgagctcaggagtttgagaccagcctgggcaacatggcaaaaccccatttctacaaaaaacataccaaaaaattagctagatgtggtggtgggcacctgtaatgccagctactcaggaggctgaggtaggaggatcgcttgaacccgggaggcagaggttgcagtgagctgagatcaccaccactgcactccagcctgggcaacagagtaagactctgtctcaaaaataaataaataaaaataaagattattagtgaaa

SEQ ID NO: 228025 - DNA, 585 bp, Homo sapiens
gattattatcgtacatgaatattcatagcagcattattcatagcagcgttatattagctttctaacttcctaaaaggattgttgcaaagttcaaattaaaagcttgaacaaaagtgctttgataggtataaaacattgtgtgtaaggcagtcatgccattattcattcagcaaatatttattggtgcctgctaagcttacatcactcctggaagaccagtgggatcaatggatgaatcggatgaagagcaggccctcagcatgcttttaatcttctaagaaagagaagccacgtaaataaccacagctcaaggtaggagacagatgaaggaaaggctaagaatggaattttctttccataacctgtgattttgaggtagagaaaagaaagggttttttttggttttttttttttgtttgtttgtatttttgagacggagtcttgccctgtcacccagggtggagtgcagtgagctgagatcatgctaccacactccagcctgggtgacagagccagaccctgtctcaaaacaaataaaaatttttttaaaaaaattaaaaagatgaagagacgtaagaggtatag

SEQ ID NO: 228026 - DNA, 766 bp, Homo sapiens
tgaggagcttaaattgagagaattttacttttaattttgtagattgagaagaggaaccgctttttaaaattatagctaaactgtcattgttttcctaagagtcacttggccatctctggccccctctttcatcagcctgaagagagggtctttgtagactgctgagggtgggccttgtaggacttgaccatggcttacacctacttaacctttatcctgctttctttcagcttgtgcttttcagttataaactccagtgggtacagcaggctggccttttcatccagctgattatttttccagcttaatatagattgacccatatgaaatttccaataatggaccatattttctgcaaatagacagtattcgcatggatcacctatatcttccccctgatacactgtgggtcccaacaccagatgtcatttctccagagcagtgctaatgaacacaaaaggtataccctgggtggcccagctcttttcacgaacgtgctgccctgctcatagtgatccttgcatcacttggtgaatgggccatctcctgggacatggaagttgcagaggtagatagtgcactgcagcttctcttaagccggattggccatcaggcatatcactctggagtttttagctgctgtcctttcctgatgagcagtctgtattagctgacctcagcctacttgttacgtgacgtatgggtcccaaaagtgtcctttgtcaaaaagcagaatgtgccttctagtctccctttccccatctaa

SEQ ID NO: 228027 - DNA, 310 bp, Homo sapiens
tgaggagcttaaattgagagaattttacttttaattttgtagattgagaagaggaaccgctttttaaaattatagctaaactgtcattgttttcctaagagtcacttggccatctctggccccctctttcatcagcctgaagagagggtctttgtagactgctgagggtgggccttgtaggacttgaccatggcttacacctacttaacctttatcctgctttctttcagcttgtgcttttcaaaatattccacataggtatttttaccttccctgatcttattgtttagctctgactgaatgtcgacgc

SEQ ID NO: 228028 - DNA, 153 bp, Homo sapiens
ataaagagagagagagagagagaggaaaagggaaaacaaaaccaaaaacccaagcccaccaaaggaatctgatcttatttgtcaagaccaatgacccaaactgtgccacttaagaatagaaacaaaggttttaaagcaaagacacaaagaacc

SEQ ID NO: 228029 - DNA, 603 bp, Homo sapiens
tggcgtttttcttgttcttagcatcatataacaaacgtgacagtcattgacatatttgaaaacagaaccttgctcggattcctctattctccgagctctgcctcccactgtctctaaccattcttctgagctcacatttggaagttgcattctgatttaaaacacactctgaaaggatggtaccagaacagtgtggaatggaccatcacttctgaacaatgtaaaatggattcaatatatagtgtaaaagatgaattatttttctgaaaattggatcaatgtacatcattttgctcatcttgtatagcaccataaggatcactgaaggtgtttagtttttcttcaggttatttcactatctttagattgtatacaaatatcaagggcacttgaaatcattcagaacaatgagcttcttgatgtccctcaaaccatttcttgcaatagttgctgaggtgttttcttagtggccattattctgcttttgaagagtacacacaaaagaaaaacaagcactcgtgggatttctttttttttagaaaatattaattatcagttaattgtaagtaacactgtcttataatatgcattatgatttgataa

SEQ ID NO: 228030 - DNA, 650 bp, Homo sapiens
ggacccgttgtacattattggtaggaatgtaaaatagtgcaccaattgtggaaaatggtctgtcagtatcgcaaaatgtgaaacatagagttactatgtgagacacaactattccgctcctggatatatgcccaaaagaaatgaaaatatatatctgtgcaaaaatcctgtacattaatgttcatggcagcattacttgttaatagtcaaaaagcagaaacaacccaaatgctcatcaactgaggagtggataaacaaaatgtgttatagccatatgatgacttattaagttattaaaaggaatgaagtactcatactacaatcttaaaaacatgctaagtgtacatcaaattacatctagtgtaaaaaaaatgctaagtgaaggaagctggtcacaaaagaccacatattatatgattcaatttatatgaaagtctagaacaagcaaatccatagagacaaaatgtagactgatggtaaccaagggatgaggggaaagtgcaatgagattgtactttcaagaatttcaactcctcaaaaattgactagttcttttcaaaatgataaaaatgttctaaaaatgattgtagtgctggttgctcaactccatgaatatattaaaatttgttgaattgtatgttttaaatgag

SEQ ID NO: 228031 - DNA, 303 bp, Homo sapiens
aaggacacagctagcaatgggctggaaaaagagcagagaacctggagtgatcatctccaactcaactcaatcacactacctaaaatcggcactgacaaagtacaaataatccacctatccagtagaggcagtactgatctggctgattcctggatatggggaatcctctttatgaaacaaacttataataagaaagaatatgtttgtgggagctctggctgctcttcttgattttgctagctaagagtaaagtggttaagagagtcaggattagagtgttctggattcatataggttctgtcc

SEQ ID NO: 228032 - DNA, 536 bp, Homo sapiens
tgtggtactggcataaaaacagacatagggacaacatgaacctgcaagatgttacattaagtgaagtaagccaagcgcagaaagacaaatacggtatgatttcatttatttgtggagtgtatatatttatccataaaagtagagaataaaatggtggctaccagggctggtgagagaaaaggggatcactgagagtttgctcaaaggaaatcaacatttcagttagataggaggaataagttcaagaaatctattgtacaacctggtgactatagttaataatagtgcattgtattctttaaagttgctaagagaatagattttaagtgttttcaccacaaaaatggtaagtatgtgaggtaagtatgtgaggttaattagctgaatttagccattttacaatgtatacatatttcaaaacaacatgcgtactataaatacaagtttttatttgttgattacaaaagacatagatttacagaatagagagcctagctaattaacatacacattatgttaattagctaaattatgca

SEQ ID NO: 228033 - DNA, 474 bp, Homo sapiens
attcattttagaaataagcattccaactgtatggatgtcccattcaacacttttttgtttgtttgttttttacagtcttttgttggtggcgcatgctgatgctgaaaggagaaaataactattgaaaatatctaataagttaaggttaaaaagaaataacctaacatagtgcacactgagtatttttcagggtaaagaaagacacatttatcaaatgcctactccttttcagggactttatatcaattatttctcatcttaaaaaaacactgcaagaaaggttttattatcaccactttacagatgaagatcaaagttcaaaatattacataatttgcccatgtcacatatctgttaagcagcatatagctcagatctgtttctaaaagctaagatctatgctttgcaaaatcatgtttactcatcagctatctgaccttaggcaagttatttaacctctttatgaagcttcaa

SEQ ID NO: 228034 - DNA, 353 bp, Homo sapiens
gtagaaatgtcccttatttctccccttatttcagaagtattacaattattgtagaaaaataaaggagaaggccaggtgcggtggctcacgcctgtaagcccagcattttgggaggctgaggcgggtggatcacctgaggtcaggagtttgagaccagcctgaccaacatagaaaaaccctgtctctactaaaaatacaaaattagctgggtgtggtggcacatgcctgtaatcccagctactccggaggctgaggcaggagaattgcttgaacccgggaggcggaggttacagtaagccgagaccacaccatttgcactccagcctgagtaacaagagcaaaactccatctaa

SEQ ID NO: 228035 - DNA, 291 bp, Homo sapiens
ctgtatttctacaaagaacttaattaacatgtacagtgaaaaagtcagaaaataaaatgtctagttataatttatttcttcaaattcccaatacttataatggcatatacatttccagctgaaaaaacaaactttaagctttttcctcaaagtatctgaaatcctaaaatttagaaagccaagttagtttttagagaagacatacatgatttgactcccaggacaaaaaagtaaactctgtactacttcgttataataattctacttaaaatggcaactcaaagtactgta

SEQ ID NO: 228036 - DNA, 367 bp, Homo sapiens
ggaggcacagacgggggcccgtgggggcaggacagcagcctccccgaggcacatggctgagtgctgagctgggaaggcaccatcgtaatgccctggagggccagacttgaaatgagaactcttagaaaaccacaccagagcacagcccacctcccttctcttccctgactgtgccccccagcagaggaccctggcccacagccaagccacatccatgccactcctgcgaacagccacttctaagtatggggaaccaaggaaatgttactaagacaacttggtggggagggagccagtgttcacagcccctaggatccctttacagtttctgagcacaagactccaacttgcccgcgtgatttcactc

SEQ ID NO: 228037 - DNA, 314 bp, Homo sapiens
ggaggcacagacgggggcccgtgggggcaggacagcagcctccccgaggcacatggctgagtgctgagctgggaaggcaccatcgtaatgccctggagggccagacttgaaatgagaactcttagaaaaccacaccagagcacagcccacctcccttctcttccctgactgtgccccccagcagaggaccctggcccacagccaagccacatccatgccactcctgcgaacagccacttccagtgttcacagcccctaggatccctttacagtttctgagcacaagactccaacttgcccgcgtgatttcactc

SEQ ID NO: 228038 - DNA, 454 bp, Homo sapiens
atcaagaaaaaaaaaaaacaaaggcttaagagtcaatgtggaataaacttgatgctttttgctgctttctgcaggagttttaaggtaggctggcttcgtccccgtgctgtgcacgtgctgtggtggtgagtccagcgtctgagggtactgcctgccatcgccgccttgcactgtgcagatgcacctgcagtttcaccttagccaccggagcaaatgtcagcacagggaaaacacaagccgctctggccctggggacctccctgaagctccccggaccacacttagagaaccgctaagtcagaagactcctaactcctgttctgtttaactctcgaatgatctgcatgcgcgcgtgtctacttaatcccagagtgtttcggagagatgttccactttaattaaattgtatcatgatttacacacatgtttgaataaaaccacccaagaagagcat

SEQ ID NO: 228039 - DNA, 476 bp, Homo sapiens
gagatggagtcttgctctgtctcccaggctagagtgcagttgcacaatttcggctcactgtaacctcagcctcctgggttcaagcaattctcctgcctcagcctcccaagtagctgggattacaggcgcccgccatcgtgtccagctaatttttgtatttttagtagagacagggtttcaccatcttggccaggctggtctcgaactcctgacctcgtgatccacccgccttggcctcccaaagtgctgggattacaggtgtgagccaccgcacccggccgaattttcccctttcattttctgcactgctgtgttctctgagctttccactgctatagtgtttcctgatgagaaggaagtgtttcctccagcttttttttcttcctggaggagtaggatatgaaggaatccctgcccccacacggggtgggatccagccagctgctccagaggatctcggcccctcctgtagcctc

SEQ ID NO: 228040 - DNA, 121 bp, Homo sapiens
gctgtttgcttctcagcgctacgcttccgcaccctttgtcgttggtagtaaaatctcaagcccaaccgcgtgagccgggggcgttactcacaccctcatcaccatcctgatcgccgtccaa

SEQ ID NO: 228041 - DNA, 505 bp, Homo sapiens
ggctattttttttgtattttagtagagacgaggtttcaccgtgttgcccaggctggtctcgaactcctgtgctcaagcaatctgcccacctcggcctcccaaaataagaacagtaattcttttgtattcttaggtaggtgtttagaagaccaattaaagtaagtcgcattaagtgatgaatggctgacaccctcagttctgctaaggtggtacttgcattttaaaaatgcattttaaaaagagatttcttaattgatgcagtggtgcaattgatgtttccttctgaaaagaccctaatggtccacgctttctagggagggaacaataggatggttggacatggggttgcttctcaaacctgtttttgaaagaaggtgattaataattagtttttgggaggaaagaataggctaattttaaaccaaactattaattatcccatagccgtttgtgtttatttaaccttttcttaaataaagtaactcttaatttttccttgatatca

SEQ ID NO: 228042 - DNA, 484 bp, Homo sapiens
cagacagtaggctgaatagtagtttactgattcctgtactatatccacaagtatataaagaatgatgaatgtgtataaaaactatatgttccttgctcagctatggaattaaaagacatgtgaatgtagccacaagtctcttgatttatcatctaattcacaacttgaaagatagtttggccaaatgcggtagcttacacctgtaaatcccagcactttgggaggctgaggcaggcggattgcttgagctcaggagtttgagaccagcctgggcaacatggcaaaacgctgtttcttcaacaacaacaacaaaaaaaacccgaaaccaaaaattaacttgagtgtgatggcacatgcctgtagacccagctgcttgagaggctgaggcaagaggatcacttgagcctgggggttcgaggctgcagtgagccaagatcacaccactgcactccagcctgagtgacagagtaagaccctgtttcca

SEQ ID NO: 228043 - DNA, 366 bp, Homo sapiens
tgacaccctcactggctccacggctcccccttcccatcccaggtttccatctgcccactgaacagggaggggaaactgaggcactcccctggcactgagggctccttctgtcatcctgcctgccctggatggtcctggctgcccctcagggcttggccctggcactgtgagcctcacagggctcagacccccacccccaacccagcactaaatggcactcggcaccagaatctcacttcagttggcaaaagcagcaattagcatgtaatgaggcttcttgctttatttttaggtaacctccaaggccctgcctgtgtaattcagcccgccattgctcggtggataattaaagcatgtcaccataat

SEQ ID NO: 228044 - DNA, 418 bp, Homo sapiens
gctgtgtgttgctacaatccagctttggagcatgaactctcacactcccactgtattccttccattgaaattaaagaaatgcaactcatcaaacatttggcagcttcatatctaacgctcacatttcagtgtctcctttgatgttgtaagagaagcagatgcttctacatgagaaagcaagatagggagccatgtatttttacttttactttaactatctctcaatgtgatcaccttacctggattttaggatctttctaaactagaaagactctattgtcacaacgtaatgtctgaaatgaatgattaaaggaagatacccacattatgtgaagtgaattaaatctaaatcttaaatctctatcataaaattattctgtaatgaattaggagtttcaattaaaacatgcaaaggaaa

SEQ ID NO: 228045 - DNA, 293 bp, Homo sapiens
gtgctgggattacaggtgtaagccacggtgtctggtctggatgatactttttgtagagtatgtgtgcataattatttgctcaatgttatattcatagcagtctctttacacatttaatttatcctttatgatttaaaacaatttaaagctacagattacatgttacaatttgattttttataaaattaaatagacttttgtttataaaaaaattgacaatgtgtttcatcaatgttaatctgtagtttgtaattacaataataccaaataaaatttttctagagtcattatga

SEQ ID NO: 228046 - DNA, 833 bp, Homo sapiens
gcacgagctcgtgccgaatcggcacgagtgaaaagtcaaatataagaaactcctggaaatgacaataaatatgttaaatgtatttggaaatgaagactttgattgccatggagacttaaaaacagatcaactgaaaatggatattctgattaagaagctaaaacagaaggaacaagcacaatatgaaaaacaattagagcagttaaacaaggataatatggcttcactaaataaaaaggaactcacacttaaagatgtggaatgtaaattctcagaaatgaaaactgcttatgaagaggttacaaccgaattagaagaatataaggaagcctttgcagcagcattgaaagctaacaattccatgtcaaaaaaattaacaaaatcaaataagaaaatagcagtgatcagcatgaagctccttatggagaaagagcagatgaaatattttctcagtgctcttcctacaaggcgagacccagagtcaccttgtgttgaaaatcttactagtataggactcaacagaaaatatattccccaaacacccataagaattcctatttcaagcccacagacttcaaataactgcaagaactcctagactgtggttagttacatgaccatttctcttttgggtttcatttctctaatataattcttgtttttaatttggtgaaatactgaattctgttgacttatgcatgtttagtaaagatcataattagctgtgttaacacagaaaggaaatggaaactttacattttttaattccctggagctctcattttcaagagatacccgtttactaactttattccataaatgtgactaaactg

SEQ ID NO: 228047 - DNA, 502 bp, Homo sapiens
acagcataagccacctgcaaagccaagctggtcactcccagaagcacagtggaaatttccatctggcttgagtccctagatggccagcctccacagccagcctcaaatccctccccaaggccccacgcagaaatggagatacctgcaacaaagcatttcaaacaaaagaaacaactgagacttgtgccccagggcatttaaacagtggctcagactcaaagctcactcaaggagggagatgcccaccacagcacctttcagcaaagcccagaggctggactagccacacccagaagtataaacggtggctcacctcagcctcaaagcccaccccaagtctctgcctaggcaagggggcaagcctcaaccatgcatttcaacaaagcatagcagctggtcccaactaccctgaacaaaacctatctaacctcaggacccaaacagtggtagtgcccggccggggaaaataccatgtctgttaagggttcttaccatgatttta

SEQ ID NO: 228048 - DNA, 465 bp, Homo sapiens
tctttccagaaagaggtaatttagaacctgtttgttatgttctagtataatagttggaattacgtgttctaaacacaaccagaatgtgcagacaggtgagccctttacaaaagccacagaaggccaggcacggtggctaataaatatgtaaggaattacagaattaaaatatcatcattggctggttgtggtgtctcacactggtaatcccagcactttgggaggctgaggtgggcagatcacttgaggtcagcagttcaagaccggcctggccaacatggtgaaaccccgtctctattaaaaatacaaacaaaattagctgggtgtggtggcatgcacctataaacccagctattcaggaggctgaggcaggaggattgcttgagtccgggaggtagaggttgcagtgagctgagatcatgccactgtactccagcctgagcaacagagctagactctgtctca

SEQ ID NO: 228049 - DNA, 392 bp, Homo sapiens
tgtagaaaataagctatttgtaccatacctgcaagttttctcagttattgtcaagaaaaataaataaaggtaataagaccccaaaattgcggcccaaaccccatccaggatggcaactatcctagctccaaagacatcaaagacatattctctggggaccagtgaatatggagacttggtactgacaggtatcaagcacaacagaaaataggtttgaggcacaggactgaaaacaaaagtgaaggctgagcacagtggctcacaactgcaagcctagaactttgggaggctgaggcaggaggatcacttgagcccaggagttccaggctgcagtgagttgtgattgtgccactgcattccatcccaggcaagtgagcaacaccctgtctcta

SEQ ID NO: 228050 - DNA, 393 bp, Homo sapiens
tatgcttgccagagtccctgtcttcctatctgaacacattccagaacaatccaattcttctttgaaatgttcattttatttcagatacagaaagaaattaaacaagattgggtgcggtggctcatgcctgtaatcccaggtcttttgaaggctgaggcaggccgatcacttgaagtcagaagttccagaccagcctggccaacatggcgaaacccccatctctactaaaaatacaaaaattagctgggcatggtggcaggtacctgtaatcccagctactcgagaggctgaggcaggagaatcacttgaacttgggaggcggaggttgcagtgaactgagatctcaccactgcactccagcctgggaaacagagggagactcctaaaaaaaac

SEQ ID NO: 228051 - DNA, 973 bp, Homo sapiens
ccgtgcgcacaggtgtgtgctgggggacatgcatttaggctgtgcgtgtgtgggcggcccccagagaacgctcagcatttaagcagtcgcaatgagggaggctgacaaggctgctgggaagaggggtgcgcttcgccctctaggctactctgcttttgaggcccattttgaatgtgcgtacttcctgtttaaataaaaccaaacaattttaaagatcaaattctggaagcacgtacttgaaacattaacaacaattaccttggagaagaaagagggcaataaaggcggcttttgtgttttattctggacgctgccatgtttaaaaaacaagaattcattcatgaccgggaggccttcaacagtcacactctctttcttgagctgagaggtggatgcgcgggcattctcggttactcttgaaactgtatgcgcaccttatatacactcccatacatatgttcggtttcataattaaaaaataatactttcatctatttcttagaaaaggtgaaataaaacaggatggaacaacacgtcgttttaggacacagaggagagactgtttcttcttcctgctaggccatgtaactgacaaggcaacccaagtgaatagatatactcaacgctgggaaacaggtagcacagcaaatgggcaccagaatatgccaagacaaccgattccagggacaagttgagagttctctgtatagagaacataaaattctatgtggccaacattaacaagcccttcggactggccactgaacctttctggaccagcattagatggtcttgaagaggtctgctagatccaaaattctgagatccataacaagtccatccagtggacacagatgataatgtatagatgatacataataggtccgttgctacaaatgctgctcagtccctgacttgccagtgagggatctgggagcagaaagatgcagagagagcttgaagatgactttgt

SEQ ID NO: 228052 - DNA, 672 bp, Homo sapiens
tgtgatctcttagcagaatagatttattatttgattgcttgcagaataaagcctatccttgaaagctctgcatcatgggcagtgagctcagtggtatctggaggacaaggctactatcacaagcctgtggggcaaggtgcctttgctcatgatgtccctaaaaacctagattgtctttaactcttttcactcacccataacttgcatctcacaaactacaactgaactacaactaaactcagtaggtgctaacaatgaccacaatgcacacatcatccccatgctggggcacactcactcagcagagcatgatttagtgcctggcagttctttctttcagatgttttcatctttctcatatactgtaaacactttcagtggctcctatagttctttactatgttgggagcattttaagtccttagtaaatcttactgattagtcagtcaatcactttggaagctatcacagaaactttcttattattggtattttaatatttaatatatttgtaaaattataaaatatttactgaagtatatcatcaggtacctgcaactcaaaattctggttggcttcactgaaaaagacggaaatgaaagaagggttagcttgcctttctaaagataaattttacttacttacccaggttgtagtgaatacaaggaactg

SEQ ID NO: 228053 - DNA, 802 bp, Homo sapiens
aaatagattgacaattaggtagtttgaaatgataaaaatttctttgaaaacattaaataaactagctttttttctattgggttattttaatgtcaaaatattttaagtcatatataaaaatacctaatatggtgaatttaattgattaccattaataagatccagaattgaaggtagaatgatttttaaatttataatatagtaaaattgaccaagatgggttatccaaaggttgttccattaaaacctaagagagttcaatatttcttttatcagatttatttggaataaatgccaattttcttattcaaaccatttaattttgaaataattcaatagttaatatataacctaggcaatgtatatttcatggtagtattgtttttctataaatatgttctagtgacaatctcaaacaataaatttagcttttgcttccatttttgtttctggatggtgtatataagaagaggaatatacaaaacacttactgaccaagtcttgaaatagttctcattgatttaagaataaatttgtttaagttaaccggtagtatctaaagatagatttcttgtgtaaattctaaaacaagaacaataatgagttgaagattctgacaaacttgaaagtacaatgttatttttgaccagggttattgtaatagtattgtagaagagcattactgtttctacacatttatgaggaagttgtatattttatttttcttatgcatgagatttcaagaatgtaccattagtatcgacacaaagaaaatattaaaggcaactttagaataacaaat

SEQ ID NO: 228054 - DNA, 438 bp, Homo sapiens
tttttctttcttttgacagagtctcgctctggccagagattttctaaataatggtcaggaatctgcattgtaagtcttactctttggtaagaatattactgtagttgatctgttgttcttattgtgttatctagtattactgatgtggtatgatgagcacataataaagtgggtacattatttccctacattgagttaaccatgctctcttatatatgtatatatggaaattgttggtctctgattagttacacccaggtgtatgctagtgacccttattttttcatgagcctttaataccctcattttaatttctctcagaatatgttaagaaccaaaccacaagatttctgctgtcactgcactgaaattgtaaaaaatgtgggatgggatattacatgtgctctaacatgtattaaggatccaacatctttttac

SEQ ID NO: 228055 - DNA, 423 bp, Homo sapiens
tcgtgagaaatggagagaaagatagacccttggcaacaccattcaaactcctgggcccagctctgcttgaatctagttctgtctccagattttttcagctcaaagagaaaattagttttctttttaaaaaacaaagtggtaaaatacacataacataaaatgtagcatcttaagcatttttaagcatacagttgagtggcattaagcatcggcacagtattgcaagaccatcatcaccatccatctccagaatcttttcttcttctcaaaatgaaactctgcacccattaaacactaccagtccattctccactcctcccattccttgacaaccaccattctgctttctgtctctatgaattcgactactggagacatctcatgtaagcggaaccctacagtatttgttcttgtgtgactgac

SEQ ID NO: 228056 - DNA, 385 bp, Homo sapiens
atttgtatattttttagtagagacaggatttcgccttgtgggccaggctggtcttgaactcctgacctcaagtgatccgcccacctcagcctcccaaagtgctgggattacaagcgtgaacccctcgcccagcctattctgccattttacaaatggaaaatagagactcagagaggttcttctcccatccttatccatttttgacatgcaaacatatttcaattcaataaacctgtactggggccaggtgcagtggttcatgcctgcactgctagcactttgggagaccaaggtaagaggactgcttgagaccaggagttccagaccagcctaggcaatatagcaagacctcgtctctaaaaaacaaacaaaaagaaaacaataa

SEQ ID NO: 228057 - DNA, 886 bp, Homo sapiens
cctctcagagcacatggataggtgacgggtttctcatgtgaatctacaagaaaaggtacgcctgggccacacgcaggacatggcacccactagggttgttcaggtctcattcactgcaagcaagaattcacgtacatgagtgcacaaaggtgttggagcttggtctcctcaggcttaacccaaggctgactcactaggacagcttccaagaaccacagatgtaactgcaaacttgaagagagtcagaatgttttcaactgagtcacgaagctgtcccagaagcacccgacatagggtggaggtcagacacattccctggctgcccacaggcgtgagccttcctgccaggggacagtaacagggcccgaagggctgggggtgccgctggcttcccagggccaagcgctcagagctgggccggacttgcccatgctggcttcagctcacattgccaaggaagatgtgtattggggctgtgcaggctgccacattcttgctttttctgtagacaaaagtcacctccctcggatggctgtttacttcaaatcaaacttctctgacgagattttaatctgaaactgcatctgttcttcccagctttatgtggggccaacaagtatctccagcctttcatgactgtaatccctctttaaggcagggaaaacatatttccctcccatgccttcagcagtgtgaaagaaggatatcaaagagaatcagagggaaaaaataccaaatccacccaatcagtgccaaaataaactttctctgaggacatcagtgtttgcatccatctaaaaccaccagaggttccaccaaatgcttgagggtttcagctgtacagtgtccaggaaaaaacccaaatgcacacagcaactgcagtttc

SEQ ID NO: 228058 - DNA, 384 bp, Homo sapiens
ctgtgctcatcagcgcccaaagtccagagggggccgaggcagaaggaggctggtgtgttatcaccaccctgcgcacacacacacccagctaggtcgccacagcacctgggcttggcctcaactttggaaattggagcaggcgctgggagcgaggagaggccaggcagtgggagcaggtacttccaagcctgcaggggctgaggggcttcctggaccccgcgagagcacagggatgcccaggtctgcagccgtggctgggcagctgcagttgcccccagaagggcaggtttcccactctgccaacttggaaagggggcagggctcccacctgttcccagctcccgcaggctccgtggagtgcacagccccagctgcgcgtccccc

SEQ ID NO: 228059 - DNA, 451 bp, Homo sapiens
attatatatcattcatctaattatagtagtttttcatgctatgaaggaaaagatacaaaaagaacatacaataatgagagctaatctggtataggcggtgatagatatttgaccatatgtgtaaggactattcaaagtccagggagggtgggtgtatatgtgtatatgcgtgtgtctgcaggaggaggagaatgttcaaggagagggtcattgcaaagagaaagaacaaaaggtacaaatatcctgagaccacagtttgtttaataaggatcctcaaaggaagaaacagtgaaaagagccaatatttgaagagttaattgctgagtactttccagacacatttatagacacaaaaaactaaatgtacacctaaaagaaaaacatttatacttagtcacactttaatgaaaaggaagtacaccaaagacaaagagatatttaaaacaatgag

SEQ ID NO: 228060 - DNA, 717 bp, Homo sapiens
acactgtattataatgatctgttttcacatctgtttttcctctgcgactataagcatcttgagtgctaagatttgttcttagactgagtttaatagcagaccagacacagaaaaatagcagattaatactgaaaaatagctaagttttttaaaaagagaaagagaggaaaaatgcgacataaaaagacacagagaaaaaaaaataagctccaatatatcttacggtgtttcggaagaaaatagtgatttgaagacaatacataaagagataatgactatcatcttttaagaactaataaaaatgccaatccatagattcaagatacccaatcaaccccaagcataaacatataggggaaaaaagtccacacttggacacatcatggtaaaacttcagaacatcaaagacagtcttcacagcagtcagaaaagggtaccttcaaaggaattacagttaaatttatggcagttttcagcaacaacactgaaagctggaagaaggtgaaatgacagctactttatgttaaaagacacaactgcctccttaaattgcgatatggtttggatctgtgtccctgccccaatctcatgtcaaactaagttccccagtgttgaacatgaggcctggcgggaggtgactggatcatgggtgtgggtctttaatgagcggtttagtaccatccccttggtgctgttctcacaatagtgagatctggt

SEQ ID NO: 228061 - DNA, 385 bp, Homo sapiens
ggggaagccacatgattaggcttctccaggagggcctggtgaccctgggccagatgttttgagaaaaatttataggatgaatggaaaaacaaagaagatagaaggaaatgggaaaaataaatccctattctgaaatcaccaaaagccagagagtttgaaggaaactttgagataaaaacaaatggctcaccaatactttttttctttctttctttttttataaagtttgcccaggctggtcccaaactcctgggttcaagtgatcctcctgcctcaggctccccaaatgttgggattacagatttgagtcaccacgtaccgcctcaccaatgctttttaaagtgcatatgcaaaatatgttataaggcaaatatatatttgtaaa

SEQ ID NO: 228062 - DNA, 843 bp, Homo sapiens
tccttccctctgcacttctcgctgctgccacgtcgcaaaggaagtgttttcttctccttccgccatgattataaatttcctgaggcctccccagccctgcggaactaagaggaagagacaccagagatgtgcacactcagagacaagacacatgaggacacagagacaaggcggctacctgcaagccagggagaggggcctcggggaagccaaccctgcctacgccttgatcttggacttccagcctccagaactccagaatctgagtgaaatgggtataaatcatgagctaggatacagttcaattattcctatgatgaaaagattttggtgtttgtgggaattcttggaaccaattccctgtgggtaccgaggagcacctgtacatgtcacatgttgcgtattcattcatcggtgggtggacactgcagcagtctccatcccttgcctactgtgaataacgctggtcataagacccccatttcagaaggggtcccgccccatccctggggaaggaaagccacacagacaggccaagaaggatctggacagacaggccctgctgggttccccactccgtctgttcctgctggatggtaccctttgtgtccaatcacctttccacatggttgtccgtgcctccatcatgcctgtccagtgatgtctccgtaaaggccaaacaggatgggagaggatgagcttcgggatggctgagcatgtggagatgtggagggtggcgcgccagggaggactgggagctctgcgcccctcacgtgccttctcctatgcgtcttcacctgtatctttcctactgttctatatgataaaccggtcaatataagt

SEQ ID NO: 228063 - DNA, 531 bp, Homo sapiens
tccttccctctgcacttctcgctgctgccacgtcgcaaaggaagtgttttcttctccttccgccatgattataaatttcctgaggcctccccagccctgcggaactaagaggaagagacaccagagatgtgcacactcagagacaagacacatgaggacacagagacaaggcggctacctgcaagccagggagaggggcctcggggaagccaaccctgcctacgccttgatcttggacttccagcctccagaactccagaatctgagtgaaatgggtataaatcatgagctaggatacagttcaattattcctatgatgaaaagattttggtgtttgtgggaattcttggaaccaattccctgtgggtaccgaggagcacctgtacatgtcacatgttgcgtattcattcatcggtgggtggacactgcagcagtctccatcccttgcctactgtgaataacgctggtatggacatgtgctatcctgcttttatatttacaaactcttcactaaattatcagattctcaca

SEQ ID NO: 228064 - DNA, 81 bp, Homo sapiens
gtagcgctgcgacccccgcacccctgcgaacatggcgctgcgagtggtgcggagcgtgcgggccctgctctgcaccctgcg

SEQ ID NO: 228065 - DNA, 483 bp, Homo sapiens
cccggggagccggaccagtgttacccagttgtgggagcagaggcatgggcgcatcgcagctatgtttccagtgtcctctgggtgtttccaaaagcaacaagaaacgaataaatctctggagttggcatcctttgaggaggtagctatgcacttcacctgggaggagtagcaggacctggatgatgctcagaagaaacctgtacagggacatgatgctggagacctacagcagcctggtatcattggggctttgcattaccaaacctgagatgatcttcaagctagagcaaggagcagagccatggatagtagaagaagccccaaacctgagactttcaagtcagttggtgaatactgggcagggaggcctgcaggagtaatgcccagcagattttggtagtgttatcttgttttcaccacttttttccctaggtcgtcaacctgaagactgttggtctcgattaaatgtacattatatagtcc

SEQ ID NO: 228066 - DNA, 514 bp, Homo sapiens
cagtggttgatcgacacagagtgtgtgtgtgggtgaattattctgtgctggctgtgggaaacaggcagtgctagatccttggcaagaatgttatccatgtatagtgatgcccacaccctccaagaaccttttgttctttgaatcccactcctgtgggttgatgttttagtgagactagtgagtagcccagcatttttcttccttctaattcatttaacacacacacgcacacatctatcttctgctaagatgtgtaagtatgagataaatgggaacacaaggatcatattgtacttgagttatatcattgctgacttcctgagaaggctgttcaaatgactagaggatgttaactaaattgacaatgtgtttctctgaagtggaagtgagcaaaacatctgcttttataatagtctgcttgcctggataggcatgtaccgttttgttgttccagaagactttcaagcaaatatactggtgagtttcaatggcttggaacttcctgttttgtgat

SEQ ID NO: 228067 - DNA, 448 bp, Homo sapiens
attgtgccactgcactccagcctgggcaaaaagagcgaaattccatcaaaaaaaaaaaagaattttgaatatgaagtaacatgaaaatagaattcataaagatgagtgtagcaaaacgggagggtgccagctgggaggcaacctcagcaacctgggatggttagacgtagcagggctgttgtagcaattaatattaggtagggtttagtagagaaaggagaccaatatagggaaaagaaatcaaaactcactatctgctccatgcctttccgagcctagaatccaagtgcaattatatcgcaaaactgacagggcttgagggagggtggacctaatgagtaaaatgtgaagcgaaagtgacaggatgactgagggtttgagcctcgggtgactggaatggtgagaaaaaacaattttcagtaaggaagatggaaattcaatagaattg

SEQ ID NO: 228068 - DNA, 303 bp, Homo sapiens
ctaacaactcctcctctgccacttgatcatccctttattgatttcaaaaatgaattacgatctctgtttgctttgtagcttgagcttgttcctagttgtccatcacagaaagcattagcagaggatgctgtggtgcagcgggaacagcttgggttagagggagagagcctggattcaagtccttgggaaagtgagaacatgggaccttgggctggtgagactcaacttcctcccctctgatgtggggtcactaattccaccctgccaggttgtttggaagattaaatgagataaaatacccag

SEQ ID NO: 228069 - DNA, 1017 bp, Homo sapiens
gcatcctattacccacgagttgggggtgatacgaatgtcatggttattctccgtcacatctgcgtctgcacagcgccacgttgaatggttatggtttcaattggagtaggaacaaaaaacatttctatgaatttgataaaatgactgtatgccatcatcaattagggatgattggttttctttttatttgagacggagtcttgctgtgtcactcaggctggagtcagtggtgcaatcttggctcactgcaacctctgcttcccgggttcatgcgattctcctgcctcagcctcccaagtagctgggactacaggcaccaccaccacgcccagctatttttttgtatttttagtagagacagggtttcaccgtgttagccaggatggtctcgatctcctgacctcgtgatccaccctcctcggccccccaaagggatgactggttttctttccaaatatgacctgagcattgatctgtccaataagcaagactgttatgtacattatgtagtggatctattgaggcatacgattttcctgtagcatttccattgaaccaatgtctagttctagtaagttctctgatgatatggttgaggctttcatggtcatgttcagattttatatatgtgtctcatgtaggaatctagtcttcataatctgtgtcaaacctaagaatttgagtacagagggattctggaacactgcccagatttggcccagttccattcatgttttctgtgcgtagagataagttaccattaatgacatcaatcgtagttgtaggccatccctttgcctctgttgcttcttccaagagctacactggttgatcataaatatcagccaactgccaagggaaggataccaacccttttcataacgccattttcctgaattgctcactcaagtgtgtatgggagcaggttctaatattagttgtgattctttccatttatctagaggattacgtagccaccaattgctttgcttagtagtgaggatggcttcatgttga

SEQ ID NO: 228070 - DNA, 919 bp, Homo sapiens
ctcagaaacaaagatgcctagctttcaccttgttgatgtttttctaaattttggaataataaatttatataggaatactgcaagaatagtccatttttttctgatgtcccaacatcaccaaatgtatccatcacaagtaggaatacatggaaacattaatgccagccactaaccattcatgtttacccagtagtcccaataatagctttgtcacacaaaaaataaaaaatcagcccggcatggctgtgggcgcctgtaatcccagctactcaggaggctgaagtagaattgcttgaacctgggaggcagaggttgcaagtggcacagtttcagctcaccgcaagctctgcctcccaagtttaaatgattctcctgcctcagcctcccaagtagctggaattgcaggcatgtgccaccattcccggctagtttttcgtattttatagtagagacagagtttctccattgctggtcaggctgtctcggaagcaacacgaaattatgtgaaaaagaaggacaaatacagggaaaagtaaaagagaaacaagaagcacaaaaaaaaaacacaaaagttacaagatagaacagaatggggtatgattaggcaatagcgtacaaaacaacgcacaaacgagtagctagatacaaaagtcacgagagtcacacccacaagacgaaccaaacaagcgaagacaaaaacaaccccacagagagtgagcagtagagaaacccgccagaaatgccagaacaaggcaagcatcacagacaatcgaagaaacaaacacaaacaacacacacaacagacaaacaagcaaaaacaacagcaacaaaaacacagcacgagaaacgaaaacaaacaaaactaacacaaagcgagacacacgaaaaaaagaagacgacaaacagaagaacacacagc

SEQ ID NO: 228071 - DNA, 365 bp, Homo sapiens
gatgtcccaacatcagcaaatatatcaccaaatgtatccatcacaagtaggaatacatggaaacattaatgccagccactaaccattcatgtttacccagtagtcccaataatagctttgtcacacaaaaacatgattatgttggctgggcacagtggctcctgtaatcttcagcattttgggagcccaaggcaggaggatgacttgaggccaggagttcaagaccaggctgggtaatgtagcaagaccctgactttttttttttttttttttttgagatggagtttcgctcttgttgcccaggctgggagtgcaatggcacgggtctcggctcactgcaatctctggcctcccagggtttaagg

SEQ ID NO: 228072 - DNA, 1019 bp, Homo sapiens
gttttatctattcattctacattcattcaataaatacttatttagcatgtgtgggccactcactggacacttcagcttctgcattcttcctaaacaggcatgttaatgtacatgcaaatggggattccacctatacttataagtcaagaggtagttcaagcatcaccttgtcagtgcagctttctccacttccccaaggtccttactccagtcttttgagtctccaagaatttgggggctaaccttttatgtcaagcttaagacattgtattagaattgtattattatgaattatattataattgtccagtttacctagcaagatcttgaattataatttcaattctcattttatctatcacatctttgtatctgtagttttctgtgctcagggtaattcccagcacacaatgtttaatcgaattaataaagtgtaacaatgtccaactgcagtgtgttaactagcaaactggctaagaaatgtagttgaaatatactctctgctgtcatttctcaaagcattctataaatacatttagtgaactcttgcatacaatggaaaattcagtaaccattaaaattatgtgtatttataattgttgggttttaaaatatttattatttattattaaataaggaaggttatagaataggatatttaaaaatattccatttcaaaagcatatgcatgtatattcaaacgcaaatatatctattaatagaggtgagaagggtataaaaatgttggtaatggacccctggttggtagaattatgcataaattttatttcctttgtgttttacaaattttaaaacttttttgcaacagatatgtacatttttgcaataatatcaaaaatagaggctatttccaaaactgcacagataaataagcaaacaaacatacaaaagggtagagagggatattttatcatttgcctatactcttaaagttgcttaaacttgtgtttgtttccttttatctatttttattaaagtaattactggtgactcatatt

SEQ ID NO: 228073 - DNA, 313 bp, Homo sapiens
cagttgggccttagtagcagtcgagttgtttgtgagatgggtaattagaaaattgaagaggccgggcgcggtggctcacatctgtaatcccagttcaagaccagcctggccaacatggagaaaccctatctctactaaaatggcaaaaattagctgggcgtgatggtgcacgcatgtagtcccaactacttgggaggctgaggcaggagaatcacttgaaaccggaaggtggaggttgcagtgagccgagatcgcgccactgcactccagcctgggtgacaaaacgagactccatctcaaaaaaaagaaaaac

SEQ ID NO: 228074 - DNA, 553 bp, Homo sapiens
tggtggcaggatcacggctcaccacagctcactcctggctcactcctgggctcaagtgatcctcctgcctcagccttccctgtagccaggacaacaggcatatgccatcatgcctggctaatttttaaattttttttgtagatataggatctcccaatgttgcctagactggtcttgaactcctggtctcaagccattctcctgtcttggccaaccaattgtgaaactgtgtctggcctgtttaactcttaagtgtagatgtaatttacttcatgaaagagtcagactcagtggcttatacctgtaatcctagccctttgtgggaagctgaggtgggaggattgcttcaggccctgagtttgataccaacgtgggcaacatagcaagacccccccccccccgaccatctctaaagaaaataaaatgaaaaaataagctgggcatagtggtgagctcctgtagtcccacttctcaggaggctgaggagggaggatcagttgaacccaggagtttgaagctgcagttagctatgattgtaccactgtattccaga

SEQ ID NO: 228075 - DNA, 325 bp, Homo sapiens
aatgaacatttctactgcttgatgttggagtgaatttttgatcatgttttagggcagatgttttcaaatttaaaaacaaatagctgaacttggctgggtgcggtggctcacgcctgtaatcccagcactttgggaggccgaggctggccgattgcttgaggcaaggaattcaagaccagcttggccaacatggcgaaaccctgtctctactaaaaatataaaaattagccaggcgtggtggcgcatgcctgtaacccagctactccagaggctgaggcacaagaatcacttgagcctggaaaggagatattgcagtgaaccacag

SEQ ID NO: 228076 - DNA, 1151 bp, Homo sapiens
gggacctagtacctaagaacttcactggtgaatggttgtatgtattgaccatgatcattcccttaccctccttccaaaatgaatgagaagcagagacttttctgtattttttaaatctagcagagtaaaaatactgtataagttccgggattattcaagcttctggttatattttcatatgttaatgttctatgtcaaaaggaacctctacccagtccccactcataatttcatcatccagaaaaaagccagctatatgcttccttaatgagttaagctagataagtgaagcccaatccagaaaggtgcatccttaacaaattagatttccacatttataatccttttgctgaaccaaagagttttgtttcctggagctgtatttttaaagattatgtattgtacatagaataatcatttttaataggattgacataacctgcttaaagaatttctaagagtttttaaagatttttatttgaatttggttggttgtactgtatgtttttccatgtatatatttttaaatttccaactataaagatagaaaatttatgtattgggtggatattagaactatacagttataataggaatgatattctcacagcagatcaatagttgtaatttttaaaaccctacatatatagaaataaccaagttagagtactacaggtttatttttcctgtgattgaccatgtcaatgtgttatcctcccatgtgattttttattgtttccttagagtactttaaaagatgaagaaatgagagactgaaccattgaataatcccaactccaccatttcctaactgagtgactctgggaaagtgatttagcttttttgagtactagctttctcattcatagaaaaaggcagagtaaagtaatatttacttagaggtttgtttcagggattaagttatgtagagagtcttttgcccggtatctgtgaaataaccattgctgcatagacgggagctactgttactgtctctattaaaattaaaggggccttaataaccatttagtcctgaatcttatgtatcattggtatctgtatgcagaattgtacttatcaaatccagtatctgtcttttttttcttttaaatcatgaagtaaaaatgattgaccaaaaacttcggtgtatg

SEQ ID NO: 228077 - DNA, 1439 bp, Homo sapiens
gatgccccaccctgcttctgctcaccctccatgggctgcatccactgagatgagctgggtacctcagttggaaatgcagaaatcacccaccttctacattgatctcgctgggagctggagaccagagctgttcctattcggccatcttgccagccacctctagacagctttaaataaagtgtgttatttaagctcttgtttatcttcatgatcaacaactatttatttagttatgatgtgaaattttatatgactgaacaatgatgatagtttctttcaagttgaagacaggcttcacaaaataatgatcaaaggatgaattaatatcgggtgggggacgttttggtgggatgtaggcatttaagcagaagcgtaaacataataagtgttcaagaaacaacatctcttttaatgtgccagctgctggaaggcaggcttcagtattagcaaatagcttagaggtgaactctggccaaaacagagggagagaggaaaaaaaaaaaaaaaaaaccagacttttattgagcatttactatgtgccaatcactagcccaagtactttaggtatgttgcctcatttaatccccacaaaaactcttaagataaaacagacactttgagaggctactcagctcgtattagcagtcaggatttaaacctcattttgtgagatttcaaagtctaagttgttaacccttgctttacgtcacttaggggagtcctggaccttaactgtgaaaactcattgatgctatatgagaagaaccctgtattcagaagtgccagagtcccagagtaatctctcccaccattttctaccatctgtaaggaaaacccagctctttcagaggcaagatcagcctgctatgaagtctctgaatgactcattcccttaatggcatccgtccccagttggcatttgcataaatcacatcagcacagttggatacttaaatcagcagaaatctggaaaccctgagacctagtagccatctcactagggaacagtgatgtcatctcataaatatggctacaaggagaagggatggggggatggcgttccattgagggccttcagctggccaggaacttgcctactctgagtgaaccttctcagcaatcctatgaggcagttagtgatctccactaaatcagactcagagaggttaaataatctggccaaagtatgaaatgatggagtgagggtatggagtcaggattcaaacccaggcctgtcttcttctttcaactagttttaagactgctgccctgaatagactgaggcatccctcaataacctgatgactgggtggtaccatgcatccttagttttctctgtcccatgagaaacatagatatgaagagagaatgcactaccattcaaatcccctctcgttaatatttttcccttccctgattatcctggggactttgcaact

SEQ ID NO: 228078 - DNA, 389 bp, Homo sapiens
ggtgggaaaggtcacagaatctgtgttgtttccctcgtgtcactctgttccatgacaacgcaacccccaagtctctgtaggtcttggagacaaacactcactccactgcctcccgctgggagtacacacattcccacaggcagaacagcccaggactttgcttttgaccctggcagggccagccctcctaacaggtaagagggagggagaaagccaagccaccaatcccagcagtgggatttctttttttttttttttttttttttttgagacggagtctcgctctgtcacccaggctggatgcagtgacgcgatctcggctcactgcaagttccacctcccgggttcacaccattctcctgcctcagcctcccgagtagctgggacta

SEQ ID NO: 228079 - DNA, 192 bp, Homo sapiens
tagggaagattgagtcaacacttttagaaaacatttttaaaaaaatggtcatatgaatttgtatcagactatcaccagattaagttacttgaggcaggagaatggcgtgaaccccaggaggtggggcttgcagcgagccgagatcatgccattgcactccagcctgggtgacagagcgagactccatctcaa

SEQ ID NO: 228080 - DNA, 473 bp, Homo sapiens
gtgtgacatggattttgcacattctgcctcattttcttatctggggtataactcatggagcataaatatatactgtattacaccccctggtcacctagctttgtcaccacaaccccctagttgatctgggagctcataccttctgtccacagttgagggaatcctgttgcaaaggggtgaatgaatttccagactgggaagccaggccagaaccagggctcctgccggagggaagccacagagctagctggctggtacctggcaggcaggcccagctacaggcattcacctccaaaggagggaagaaatggaagcaaccagcacaggacccaggcaggcctttcctgggcttcttgtctctcttggagcggcctgtttgggagttgggaagtgaccttgtactccagggaccctaatcataaatgtcagatagatattttactgagctgaggggatgccagatggatcttaaa

SEQ ID NO: 228081 - DNA, 504 bp, Homo sapiens
caaggcagtcattttcttgccctgtgggttttgatgaatagacctgttttgctggcagttgtggccatttgctgccttgattgcttttgtggcctttggtgccccaggtagtgcaaagcctacctgaaggagttaggagaagtagaatgaatatcacccccaggaaaccgcggtgtactttacatatgcaatttaaattaccctacttagcaggtggtagtattctacacctgaagacactaaggcggtgaaaggttaaattgcctacagccatgctgctgattaaatgttgactcagggatataacccaggtaggctaaccttgaaagcagtgcttcgtgaaaaaggctgaactgtctactgctaactgtgactcagggacacccgttaagataagttgggaaagttgccctttccactaagcatatatatgtttttttttttttaaaagtcacattgaaacagcaggagttataggaaaataaaaacaaattattgcaaagt

SEQ ID NO: 228082 - DNA, 600 bp, Homo sapiens
agtgagcaaatattcaaatttttggtgttccataaaatgtagagaaggaaaatgtcatagaaaacctatttaatggaataatagctgaaaacttccccagtctcacaagagacagctattcaaacacaggaagttcaaagattcctaaacagatatgacccaaaagatcttattcaaagcacgctgtagtcaaattcaaaagtcaatgacaaagagaatgctaaaaacagcaagagaaaagtgtcaagtcaaacataagagaaactccatcactctaacagcaaatttttcagcagaaacattacaggacaggagaaaatgggatgatatattcaaagtgctgaaagaaaaaaacccagccagtcaataatactatactagctaaccctcaaaaatgaaataatattttaaaaaaaaaaaaaacaaaaaaaactgagggaattcatcaccactagtccagccctacaagaaatgcttaaaaacatcctgcatttgacagtaacaggatgatatctaccatcatgaaaacacacataagtattaccctggtagagcagtcacacaaatgagaaagagaaatgactccaattttaccactac

SEQ ID NO: 228083 - DNA, 650 bp, Homo sapiens
ggtgctagctgaaggcatggcagtggggaggagagcccagggaaaattgagcactaagagtgtcggaccctggtaagcactgggagctgcctgcctttccagaattatttagtttgcccaggttctgggaaagtattcaagggaataaaacccagaaggctactatgtatgtatatgtaaatgtttttgtttgtttttctgagatggagtctcactctgtcgcccaggctagagtgcagtggcgtatcttggctcactgcagcctctgcatcctgagtagctggaattacaggcgtgcaccaccatgcccagctaattttttgtattttagtagagacgggatttcaccatgttggttagccaggctggtcttgaactcctgatctgaagtgatccacctgccttggcctcccaaagtgctgagattataggcgtgagccaccacacctggcctgtatatgtcaagttttaagaacacatattaatctcatttagttgtacataaactgtgtcttagaaggacactgtagaaaatctttccgcagctctaaaaatggattaaggtaatgactaaaaacatttattggtttatttttcatctttaaaatgtttgcatcaaagaaaaataatatggaataaataatatctag

SEQ ID NO: 228084 - DNA, 443 bp, Homo sapiens
tctctctgctctacaaatatttcatttcctgaaatattctatggcagtgagtgaattattattttatcaggctaactctgttaaagaaatttcatataatgattacatgaaaaaggagttgagaagtactataatagttgttaacactgagctagttaaaaaattgtgccattattccttatgtttaaggtggttcttttcaactttgatattttacattgttaaaaaaaactatatgaaatatgtttaatggataaaggtgtatctttcagctgattagttgcatttgtcttgaaaaaggactgaattttgtagatttgaatgataagtcgctgacaggaggtctttaattttttttttccctctgaacagctgtcttggcctgcagtgactccaaatcccataatccttccagttgtcccctccactaagtaaatttcaaa

SEQ ID NO: 228085 - DNA, 827 bp, Homo sapiens
cgggagtctggcagtccgtgcggcagcagtggagcgcagaggacagggccggcctggagcgcttggcgtctccccgaagtctctctgagagctggggaggcggttggcccgctaggtcactaggtcgggcaggggtcttcccccaaacatggaagttttcaccgatatttcgccggtgacattggggccttgtgccaacagactttgctgaagtgaacccaaagttcaaccctccgggagagtccttgcaacgattcggccactcagttctggagccgtcggcactacattctaagttgcggtggactccactggcatctgcgtgactatctccggccggtgtgcataggcgcccgtcgggtcgggggctgaggaccttggacagggcggccacacccctctcgtacagcagcgcctctgtccattctgcgcaggcgcctctggggtcagggacggaggaacccgggcgagtagccacgccccttcacaggtgtcttccctcgaccgctactttcgcccctggcagccaaacacaggaacgctgaaaaacaggctgagaggtggatttgaggaattacatcgttcacttagagttgaactggagaagcattcttgtacgtccttatacctccctgcactctcatcctaaccctgttaggatacaaaagtacgggacagacctactcgtaagaaatactgttagtgttaaatattctgatttttaactacagcaaaaatcgtactgttcaagtcatatccctgagcgttgtgagatgagggccaaagatcaaagcctctggtatttatttggttacagtatttcatat

SEQ ID NO: 228086 - DNA, 94 bp, Homo sapiens
gagttaattagcgtatatggttttggtagggatctaacttcattcttttgcatgtggctagttttccccagtgaatgctcgtggcatccttgtt

SEQ ID NO: 228087 - DNA, 405 bp, Homo sapiens
aaaagaaaaaagaaaaaacctacactgaaaaaacacacatggaactgcaagacagtgattaagaaaaatgtttactcataaactctggtacgcaacatcgatgtatcattaaaaaagtttgtcagtttgggcatggtgtctcacgtctgctatctcatcactttgggaggccaatgcaggtgtatcacctcaggtcatgagttcaagaccagcctggccaatgtggtgaaaccccttctctagtaaaaatacaaaaattagctgggcatggtggcacatgactgtaatcctagctacttggcaggctgaggcatgagaattgcttgaacctgggaaatggaggcagcaataagccaagatcacaccactgcactccagcctgggtgacagatcatgtctctgtca

SEQ ID NO: 228088 - DNA, 1808 bp, Homo sapiens
tattagtaagtccaattaccccatgcagtttaaaaacatagtattaagaatatgtacccataggtattagctgaaaggagtggaaaaaaaaaagttacagacccaaacattaatacttaaggaaatatgctgtctcatgaataatacagaatgatttaggaattcagatgctgactggccatctggttttagtaatcagtgaagactcattaggatagttttcatcatggtcttgaaagataggaataagctcattttagtgtacctgtttgcccttgggatatgtttattagtgtaagagtatcactgatgggaaaagtgtggtctgaaatagggacatggatcgccatcagcaagccaaaagaaaaacatcaagtcaccagttaataatggtctgaagcagcccttctttactcatgtcatttctactgtctcagatattagtgttcctccaactgcaaagtttatttttgttataataaccactagtgttttatccaatatagacgttatggaagtgagaggaagcaaacaagcttctttaaagtgaaaaagggaaagcttgaggggcattctcccagacatcaatttctattgtgaaacactactgtccaatgcaaatgatccttctgttctttcgaagttctctactaatctcctgccttccaccaactccatcatgcatctgaggcacataaaaagatacatgaccataggttaggataataacacactgtgatgacttccctaatttcttataggcaaaccgcttttgaaatgtggctttaggttagtagcacttatgtaagaacacaaagctcttgtatgtctgggaacttctggtataggctgaaggtgaaggctgaaaagaacgaaaattgcttcaagttcaataaatttaaataaaatatgctccgtagaaattaaaatgtataaatcaaatatcatatactttttctgatacgatttcaaagttaacacctatactcatacttatgagtgtaaagaatttacacattttattgcaccctaattttttaaaaaataaatttcattgtgcaactgaggtttacaacatgatgctatggaatatagacagcaaaatggtgaagcagattaatatagctatcatttcacatactttaacaagagctgctaaaatccacttatttaacaaaaatctctaatacaattttactaacattggtccccctgtatctctaaacttgttcatcctacatatctgctattttgtatccttgacctatatctccccatttcctctccttccccaccaccagtagtaaccactgtttcgttctgtgtattttagctccttaaaaaaatattctacatatgagtgagattatgcaatattttccttggtgtctggcttatctcatttaacataacgtccttcaggtccatctatgttgtggtaaacagtaggatctccttttttaaggctgaataatgttccattgtacattgtctatacacacacataaacgtatacacacacacataatttctttagccattcctcacccatcgatggacatttaggttgcttccctatcttggctactgtgaataatgctgcaatgaacgcgagagtgcagatatcttcacaaggtggtgatttcctctcccttgggtgtataccagggacaggtgttgctgtgcacccagaatcttcaaaataatatgtaaatcctacttttgctggtatactgtgaactcgtatttacctaaaaaaatgacattaacagcactctttcaagaaagtaatctgaagagaaaatata

SEQ ID NO: 228089 - DNA, 738 bp, Homo sapiens
tgtctgacctgagcagagctaggaatggtgggggcagctgcatgcgtgcaggctgcctgcaagtgccggactcatcaccagcttcagtcctgagagttggttctgttttgttttctttattctcatcatacctgtttcgtgagccaggactgtactctggtgtactcacagcattggccaccatcatcacagtcaatttacatcattttcctcacctcagaaagaaaccccatactcttctgcagccaccttcctcttccccagcccagtcttctctccctcccccaaccctaggtaatcagcgtcattgtctgtagatttgcctcttctgcatgttttgtgtaaatgaaaccatatggtctcgtgtgcctggcttctttcatgtaggatagtgtttttccaggttcatagttatagcatgtatcaagacttcatttctaggccaggcactgtggctctcacctgtaatcccagcactttgggagactgaggtgggtggatcacctgagatcgggagttcgagaccagcctgaccaacatggagaaaccccgtctctactaaaaatacaaaattggctgggtgtggtggcgcatgcctgtaaccccagctacttgggaggctgaggcaggagaatcacttgagcccaggaggcggaggttgcagtgagccgagatcgtgccattgcactccagcctgggcaacaggagtgaaactccccatcttaaaaaaaaaaaaaa

SEQ ID NO: 228090 - DNA, 282 bp, Homo sapiens
ctaaggtcttcactttggtccgctccccaccccaagctatgccatatataccaagaggtgcctggaacctcctcctggcctcctgcctgagcataggtcaataataaaaggatttaaatcaatacagggtcttgaagttactttgtgctgagtaccctggcatgttcttcattccttacattcttcccagtatcttaccactacaacaacagagctccaggataataacggtgaaccacaattgaacaagctgcaagacacaaaatccatttatgaatctcc

SEQ ID NO: 228091 - DNA, 473 bp, Homo sapiens
atgccatggggatataatcaactgagagattctatgcagtggaagtcatgaagtccgaagtcttgtgagaatcacattctttcatttaaagtatggaattggccaggcacgcctgtaatcccagcactttgggaagccaagctggtctcgaactcctgacctcaggtgatccacccgcctcggcctcccaaagtgttgggattacaggcgtgagccacagagcccagcttaacggtaaattatgaggaccaagcactctttattttctctttcctcagtttaccttctttaaggcattactgcagactaagcctaaaaaaaagtaatttgttttcaaatgatatgatttactctctggcctggatttcaaagatgtcagtataatatggattgtatatattgtttaaattttacaaataacataacgcctattatagaaattttggaaaatacagaaaagtgcaaagaaacag

SEQ ID NO: 228092 - DNA, 619 bp, Homo sapiens
ttatacacaggagcattcattctgaacaaaaactttacaaatgtgaagaatgcagcaaagcctttactcaatcctcatcccttaataaacaagagaattcatactggtgagaaaccctacacatgtgaagaatgtggcaaagccttttataggtcctcacaccttactgaacataagaatattcatactggagagaaatcctacaaatgtgaagaatgtggcaacgccttttatagatcttcacaccttactaaacataagagaattcattctgggcaaaaaccctacaaatgtgaagaatgtggcaaagcctttagacagtcctctgcactgaatgaacataagaaaattcatactgcagagaaaccctacaaatgtaaagaatgtggcaaagcctttagatggtccagaagcctgaatgaacatacgaatattcatattggagagaaaccctacacatgtgaagaatgtggcaaagattttacttggtcctcaacccttactgtacaccagagaattcagacaggtgagaaacatagttgataacatagttgaatgacatttctagtaatatgtttcctttggctttaaacagcaaataaagtgaagaatattgttc

SEQ ID NO: 228093 - DNA, 792 bp, Homo sapiens
gggtggattcaaggagaaagtatagctgcccgtctccaaacagtgcctggcagaaagtaagcattcaataacatcagctattggccaggcaaggtggcttactcctatattcccagcactttgggaagctgaggcagaaggattacttgaggccaggaattcaagaccatcctgagccacatactgagaccccatgtctataaaaaccaaagtgctgggattacaggcgtgagccaccgtgcccagcccaagcgttagttgtgaaggtttattttgttgcaaatcccagtcctgcatgaaaatgggaatgttagtaacccctgcctcaaggtggggcagtgaaaacaaaaaacaccctgggagtctgcagaggtgtgggcctttcccatcccattctttctgctacaatcaaaatgatcgtttaaaaatggaaatctaggttgggcaaggtaactcctacctataatcctcacactttggaaggctgaggtgggaggatcccttgagcccaggagttcaagaccatcctggacatgatggcaagccccttctcaataaaaaaaattaaaagtaacagtaaaaaagtaaacgcagaagcctgagttccccctgcagtcaggtcaaagcccccaagtcttactccaggcctgctaaggcgttcccatccccttcagcttcccctttgggcctctggcttctcactgtctgggctttcgtgacaatgacctttaacccctccgggcaacaggtggttccctcgcctttcagattccctctgcctgggatgctcta

SEQ ID NO: 228094 - DNA, 251 bp, Homo sapiens
ttttgtatttgttatagagacggggtttcaccatgttgcccaggctggtctcgatctcctggcctcaagtgatccgcctgcctcgaccttaaattcttaaatgatgaattttacaataaaaaattatctgtgaggcagggtgtggtggctcacacctgcaatcccaccactttgggaggctgaggcaggaggataacttgagcccaaaaatttgagatcagcctgggcaacatagcaagacctggtctctt

SEQ ID NO: 228095 - DNA, 445 bp, Homo sapiens
aggaactgtgacactaaagatgaaggcctgcagcttcactactgaggccagccagaccatgaacccactggaaaaaatgaacaattgcagacacaccatctttaagaactgtaacactcaccgtgagggtccgcggcttcattcttgaagtcagtgagaccaagaacccaccaattctggacacaataggaccaatgtaaggacacatgtttgttcttataccattcttgctgtatttgtaaatttttgttgcaggagaggtgtgattaccttggatatcttgatagtgggacactttgagaaggcaagagttaacctgatcttagctgacttggtgaattgaataaatcttaccttactatcacaggcagattgaggcaaggtttggggtagtaagttcagtttagaaggtttatttagaataaaattctgaagtccaagcaac

SEQ ID NO: 228096 - DNA, 364 bp, Homo sapiens
gcaatgttgccagggtactccctttgatttcttaactccaaactctttaagaacaaaatgtgggcctgattcacctttacagtccccacttccttctatggccatttgagtaactactctcatccactgaaactgttgccttcaatgctactgatctgaaaaagatcatgaggccaagttagggtccagtgggcaggaatgttgtgattgattattaatgtctgtcatgggcagtgggtagaggacagtagcagtatctgtgcctggaattttccatctttcattgtatatttaacaaatatttgttgagtgaaattcaacaagaatttagaataaagagatcctaggaaaaggctctttgagt

SEQ ID NO: 228097 - DNA, 550 bp, Homo sapiens
cgttatgtatcagtttggggactttcaggtctgtgcttttagcacttttttgttttgttttgttttgagacggagtctctctctgtcgcccaggctggagtgcagtggcgcgatctcggctcactgcaagctctgcctcctgggttcacgccattctcctgcctcagcctcccgagtagctgggactacaggcgcccaccaccacatccggctaattgcttttagcacttttttgggagaggtgtgtggcaacagtaaagctttctacatgttaaacagaatgaacaaaaccaacgcagagcagtgacttcctgtcagagcagaaggagacccttatagaacagctgtgccactgctccaaaggcctcgtgtggttctatcccttggactgcctttcttcaacagcccagacacctgctctgtcagatttataagccacaccccctagagccatgccaatcaaagcatggcccgcagacctgtgccagtctccgaacctctttgttaccgatttggagcaagatggggacagaaattgagagccagagtt

SEQ ID NO: 228098 - DNA, 386 bp, Homo sapiens
atctttttatttggaaaactgtgttagactccaaggtattctctccttcaatgtaacagaagtaaccagtttaattgttcagaacctgacatttatttaatcatgtcttcttagtgttcaggtttagtgtcttcaatgactggatgccaatctgcttcctttttgactttcctaggctcggattcatcagattctctacttgcgtcatttgcaatggaaagaccctcccacagggtagaggttattcattctctctctctctctcagtctccaccacaatttttgccaagagcaagtcaggtttttggtcaagctaggtttttactgcatgctttccttcaactaagtgtgaaagaaatctattaaataatatttaatttggtctc

SEQ ID NO: 228099 - DNA, 487 bp, Homo sapiens
caatgtcaaaactggaacttctgggaagtccacctctgcagcagcatgtgtggtggctaaaagcatggcttttggaggcaacagaactgccctgtaatcctggcaaggcagccttgtagcttcatgatcttgatcaagtcacctgactcttcaggcctatttcctcatttgtaaaaaattcgaaatagggcaggcgcagtggctcccgcctgtaatcccagcattttgagaggccacagtgggaggattgcttgagcccaggagttcaagactagcctgggcaacatagtgggaccctgcctctacaaaaaataaaaagccaggtatggtggtgtgtgcctgtagtccccaactactcgggaaactgaagcaagaggatcacttgagcctgggaggtcgaggctgcagtgaggtgtggtcgtgacacttcactccagcctaggcgacagagcaagacactgtctcaaaataaaataattgaaataat

SEQ ID NO: 228100 - DNA, 776 bp, Homo sapiens
gatctaactagaaggagtgagttagctttggaattattagccatctgaacagccaattttattttattttttggaaatgtaattcacatatcataaaatttaccaatttaaagtgtacaattcaatggtctttagtgtatcaacaatgttatgcaaccactaccactatctaaattccagaatgtttccatcacccctaaaagaaaccccatgccaattagcatgaacaatttttaaaataaacacggtatgggccagaaacacgccaagaaagacaccatgagccccactgagatggcaggggtgacactggggttcaggagctccaggggaagctcctgaatgctggcagtgtggccgtgccatccccaaaagaacctagggtttctttacatgccaagagaaagtgccaagtcttttagcctaagtcctacagggagtaactggaaaacgtactggagcaactggaaatttaatgtaaaatatgcaaagaaggccgggtccagtggctcacgcctgtaatcctagcactttgggaggctgaggcaggcgattgcctgagctcaggagttcaagactagcctgggcaacacgatgaaaccccatctctactaaaatacaaaaaattagacaggtgtggtagcatgtgcctgtagtcccagctactcgggaggctgaggcaggagaatggcgtgaacccgggaggctgagctttcagtgagctgagatcacaccactgcattccagcctgggtgacaaagtgagactccgtctca

SEQ ID NO: 228101 - DNA, 485 bp, Homo sapiens
tgcatgatgaggaggccaaggttgccttctcacccacatttcagtccaattatgaacctttaaaatactccctctcaaactgctaggcatgttgcccctggaaatctttgtttcttccagatttgaccctcttccagcctggcaaaggcaatggctgccactctagatttctgcttgacagacatgacctcaagacctgcagacttgaccaggcatggtggctcacacctctaatcccaacactttgggaggccaaggtggaaggattgcttgaggccaggagtttgagaccagcctgggcaacatagtgggaccctctacaaaaaagtaaaacattagtcgggcatggtggtgcatgcctgtagtcccagctacttgggaggctgaagtgggagaatcgcttaagcccaagagtttgaggctgcagaaagctattattgcaccactgcactccagcctgtgtgacaaagcaagaccctgtcttt

SEQ ID NO: 228102 - DNA, 2250 bp, Homo sapiens
  misc_feature (389)..(389): n is a, c, g, or t
  misc_feature (1394)..(1394): n is a, c, g, or t
  misc_feature (2029)..(2029): n is a, c, g, or t
  misc_feature (2123)..(2123): n is a, c, g, or t
tttttatacatcttatatctctttgcagattacagttctatatttgacttcccataacatgtcacaggacatgtgctttaaatcccccacaagttgttctcttgtggatatagtctaggtcttctgggttgtcccaaaatatgatgtgcacagacacaaacatattctgtatattggttttgattaacacagaatgcagtgggatttccttcctattatcattatatttcccttaatgcagtccaagattatgtattagtgtctaaagaagtataccacattcttaggtcttttagaaagtatcatctgcctctttggactctgggctatctttactaattcatctcaagtattatttttgtctcttcttttcatctaagactaaatantctccactctgctgttctactcagattaatgtatggccatatggcagtagacttctttatacttagtgctttctcaattttaagatgtttgaatattacactgatgcagaagttatttcataagcatagctttttcttgtgtggggtggaaagggaagaggattaaatcactgcctcacttgagcacatacatagctggaaaatgtgtggaaagtttcttgatgttgagaaaaaaagacagtgtcttgttaatcaataaattccgtttatttttcttttactatgtcctttactatatcataactgtagccttgctatatcctgaactcctcacaaaggccttctctgagccaactaaattaatgataaagaattgtaattcttggctgggtgctgtagttcacgcctgtaatcccagcactttgggtcactgaggtgggcagatcacctgaggtcaggagttcaagaccagcctggccaacatggcgaaaccccatctctactaaaagtacaaacattagctgggcatggtggcatgcacttgtagtcccagctactcgggaggctaaggcaggagaatgacttgaaccctggaggcggaggttgcagtgagccaagattgcaccactgcactccagcctgggcaacagagcgagactccatctcaagaaaagaaaaaaaaaattgtaattcttatacccttgctctgcttctttatcattgtgtaattttaaaaacaactgacatatattatacaggtacttgtttattgtctatttctaccactaaaatggaagctccaactgctattagattaatttccctcccaggtccaattttgattatgttactctgaccaagctgatcttttctcttcaatctagaccttttaactaccttcaaaaatacaataaatataattattctagacttctttatgtatgtgtgtgttcctaatttaactgttgtgtaatcacttgatagtataaactgtatttttttagnataaactatttttaaacagctttattgaggaatagtttatgtacattaaactgtaggtatttgaagtgtatgaattgatatgttttgatgttatgtatatactcatgaaatcattaccacaatcaaataatagacgtataaattaccccctaaagcttctttttgtccatttgtaatccatcccctatcctgtccccaggaaaccactgatctgctttctgtcactacagtttgtattttctagaaattggtataagaggaatcgcacagtctgtactgtttggcttcatttacttagcttactgttttgaggttcattcacgttgttacatggcttagtagtatttttttctttttattactgagtggtatttcattctataatttgcttattcattgatttgttgatgggcatctggattatttccagttcgaggtcattacaaataaaatctctatggacatttgtgtactagtctttatgcttttatttcttatgcttttattctctttgataattaactatctgtggaatggctgagtcatatggtagatatatgtttaagtggtaagaaactgcccagctgggccaggcgcagtggctcatgcctgtaatcccagcactttgggaggtngaggcgagcggatcacgaggtcaagagattgagaccacggtgaaaccccgtttctactaaaaatacaaaaaattagccgggcgtggtggtgggngcctgtagtcccagctactcgggaggctgaggcaggagaatggcgtgaacctgggaggcggagcttgcagtgagccgagatcgtgccactgcactccagcctgggtgacaaatggggactccgtctc

SEQ ID NO: 228103 - DNA, 1583 bp, Homo sapiens
gaagtaggaatagcttgggcccaggaatttgagaccagcttgggcaacacagggaaacctggtctctaaaaaaaaattttttttaatattctgggcttagtgactcgtgcctatattcccagcttttctagaggctgaggtgggaggatctggttcgcttgagcccaggagatggaggctgcagtgagccatgattgccctactgcattctagcctgggcgacagagagagcgagcctgtgtccaaaaagtaagtaagtaaataaatacataaaaataaatacgggtttctgtcacctcgcttcagaatcagacagctagaggtggggccctggaattggtgttgttaatgcattctccaggaatttctcctgcatagggaagttggaaaccactggcttccttctctctgagcatctcctgagactagctcctgaagtggatagaaagtttttcaagtagcagattaagttttatcccttaggctgctaataaaaaacaattgactgtgattgcgtaattttacctgtcgtacacctttcagaaggcagaggctttggttcacccctctacctccagggcctaaaacagtgcctggaggaactcaattaaacatttgttgagtgaatacgtgaattacattgcagcgaggccaatcttttaaaagttacttgtcaaattaatctatcagttagtggcatattaaagcccagcatattacaaaaaaattttttttagtagtcactgattttataaattaggagccacaagcactataccccagtgacttctgtaagtttggttagtttagaaaggagagagcctttcccaggcgtagtgtgctcaaggtgattagccagaaagaagattcagaacaaagcatttgcttagagagtcaaaatgtaaatttaagtcacagtgtagtggtaaatcatatatcaaacttatatttggtatattgtcttatatcaaaatatcattttataaaccataagtccaacatactgctataaaaattggtttctagcaaatagagaaaattgttatgttttccaatttcacttttcatactaataaaatttgacctttacaccttcttttcaagagttcaccacagggcaccatagatattatgtagttaagagctcaaactctggagaatattgtgtttgaccacacatagtcagggagtttgatctaacctctcaatgcctcatttctcagctgaacatggaaatagtaataataaagttcacatacttctaagtgcttacctaagtttttgagacacatccacttaataaatggtagttacagtgatgataaagaattggggtgtataaaaatacctaaaactcaaaagctaacccatttaattattgtactactggacttttatgatagtaagtagaaatctgttgcttaaaaaagaagtttctttggtggtgtgcgtctatagtcccagctacttcggaggctgaggtgggagaatcacttgaacccaggagatcaaggctgcagtgagctatgattgtgccactgcactctagcctgggtgacagagcaaggccctgtctcaaaaaa

SEQ ID NO: 228104 - DNA, 778 bp, Homo sapiens
gaagtaggaatagcttgggcccaggaatttgagaccagcttgggcaacacagggaaacctggtctctaaaaaaaaattttttttaatattctgggcttagtgactcgtgcctatattcccagcttttctagaggctgaggtgggaggatctggttcgcttgagcccaggagatggaggctgcagtgagccatgattgccctactgcattctagcctgggcgacagagagagcgagcctgtgtccaaaaagtaagtaagtaaataaatacataaaaataaatacgggtttctgtcacctcgcttcagaatcagacagctagaggtggggccctggaattggtgttgttaatgcattctccaggaatttctcctgcatagggaagttggaaaccactggcttccttctctctgagcatctcctgagactagctcctgaagtggatagaaagaatgtggtgcttagttttagataagttaagtttgtgatacctgttgaatatccaagttgagactctatgagagtctggagttaaggaaaacttttaggctagaggtagatatttgggtcatcagcgtgtaaatggcatttaaaacctttggactggatgagcctggaaaatgcattcgtggatgtggagggaagctggaaggtgtgagcatggatgtgggtcggcagcaccgggacacagctcacttcccggtgattctcttttcttggtgaaatgggaagcaaggtcatcagttgagggtgcagagtgggagaagattctgtagtgtg

SEQ ID NO: 228105 - DNA, 1491 bp, Homo sapiens
gaagtaggaatagcttgggcccaggaatttgagaccagcttgggcaacacagggaaacctggtctctaaaaaaaaattttttttaatattctgggcttagtgactcgtgcctatattcccagcttttctagaggctgaggtgggaggatctggttcgcttgagcccaggagatggaggctgcagtgagccatgattgccctactgcattctagcctgggcgacagagagagcgagcctgtgtccaaaaagtaagtaagtaaataaatacataaaaataaatacgggtttctgtcacctcgcttcagaatcagacagctagaggtggggccctggaattggtgttgttaatgcattctccaggaatttctcctgcatagggaagttggaaaccactggcttccttctctctgagcatctcctgagactagctcctgaagtggatagaaagtttttcaagtagcagattaagttttatcccttaggctgctaataaaaaacaattgactgtgattgcgtaattttacctgtcgtacacctttcagaaggcagaggctttggttcacccctctacctccagggcctaaaacagtgcctggaggaactcaattaaacatttgttgagtgaatacgtgaattacattgcagcgaggccaatcttttaaaagttacttgtcaaattaatctatcagttagtggcatattaaagcccagcatattacaaaaaaattttttttagtagtcactgattttataaattaggagccacaagcactataccccagtgacttctgtaagtttggttagtttagaaaggagagagcctttcccaggcgtagtgtgctcaaggtgattagccagaaagaagattcagaacaaagcatttgcttagagagtcaaaatgtaaatttaagtcacagtgtagtggtaaatcatatatcaaacttatatttggtatattgtcttatatcaaaatatcattttataaaccataagtccaacatactgctataaaaattggtttctagcaaatagagaaaattgttatgttttccaatttcacttttcatactaataaaatttgacctttacaccttcttttcaagagttcaccacagggcaccatagatattatgtagttaagagctcaaactctggagaatattgtgtttgaccacacatagtcagggagtttgatctaacctctcaatgcctcatttctcagctgaacatggaaatagtaataataaagttcacatacttctaagtgcttacctaagtttttgagacacatccacttaataaatggtagttacagtgatgataaagaattggggtgtataaaaatacctaaaatcaagtggacctctcgcctcagcctccccaagtgctgggcttacgggcatgaaccgctgcacctggcctttgattttttaaattcactttaattatcttaagttctgttatactctagactcttagcaagagtctag

SEQ ID NO: 228106 - DNA, 1949 bp, Homo sapiens
tgggctcaaatgacaggtccctttgaagaactgacagggacttggtcttcccagtgatgtggggtggtggagatgagtcttgacatagtaatggggctcctattttatgagactggtaaattttcacaggaaactaaataacaggttaatgaggggttttaatagaaagtggtgttaactttaatgaggagaaaacactttgtaaaggccaaccaatgcccactggggcagagatataaatctggggtaaggagctgcttctctgctttggggtgtctggcctcagagacctatcaattgcatctgagttgcaggggccatggcttccaaatgcctcaaggccggcttctcttctgggtctctcaagagcccaggaggggccagtgggggctccactcgtgtgtccgcaatgtactccagcagctcttgcaagcttccaagtctctcccctgtggccagaagtttctctgcctgctcagtgggtctgggcagaagcagctacagggccaccagctgcctccctgctctctgcctccctgctggaggcttcgctaccagctacagtgggggtgggggctggtttggggagggcatcctcactggcaatgagaaggagaccatgcaatccctgaacgaccgcctggccggctacctggagaaggtgcgtcagctggagcaggagaacgccagcctggagagccgcatccgtgagtggtgtgagcagcaggtcccctacatgtgccctgactaccagtcctacttccggaccatcgaggagctccagaagaagactctatgcagcaaggctgagaatgccaggctggtggtggagattgacaatgccaaattggctgcagatgacttcaggaccaagtatgagacggaggtgtccctgcggcagctggtggagtcagacatcaacggcctgcgcaggatcctggatgacctgaccctgtgcaagtctgacctggaggcccaggtggagtccctgaaggaggagctgctctgcctgaagaagaaccatgaggaggaagtgaactcactgcgctgccaacttggtgaccgcctcaatgttgaggtggacgctgccccacctgttgacctgaaccgagttctggaggagatgaggtgccagtatgaaaccctggtggagaataaccgccgggatgctgaagactggttggacacccagagtgaggagctgaaccagcaggtggtgtccagctcagagcagttgcagtcctgccaggcagagatcatcgagctgagacgcacggtcaacgccctggagattgagctgcaggctcagcacagcatgagagatgctttggaatccaccctggcagagacggaggcccgctatagctcccagctggcccagatgcagtgcatgatcaccaacgtggaggcccagctggccgagatccgggctgacctggagcggcagaaccaggagtaccaggtgctgctggacgtccgggcccggctggagtgtgagatcaacacgtaccggggcctgctggagagtgaggacagcaagctcccctgtaacccatgtgcacctgactactcaccctccaagtcatgccttccctgtcttcctgcggcctcctgcggtcctagtgcagcccgcacaaactgcagcccccgccccatttgtgtgccctgcccagggggtcggttctgagagcggggtctggctgaaaaggctttctgcaaatacatgccctaaagtttctcagagcctgtcacaaaggccggctgcccccaaaggtctcaactcctcatcatttcaatgggtgccagggtctctgttctcaggctgcctcctgggtcaggttttccttctaggtgctgttccggtggattctgaaatgcagtagagggcttttgttggcagaacaataaagtgcatttgctcaggcccctgatgcctaacttgcaccatt

SEQ ID NO: 228107 - DNA, 1331 bp, Homo sapiens
cagaaaagagggaatgagggaccagctccagtcacaaatcccccagtggtaaaggacaagagacctgtagcaactgacatgtccaggcagtaggtcctatatttgtgcaagcagatacatcttctgagtaactatcagttactcagagatgacactaacagggagatactttctagatcaaagaagccacaggggctaattagctcatctcaagtgagatgtctgattgtggttcatcctagctcaaactctgattctccgagcttctgttcttggattctgaggcctcactgagacccagattccttccttgctccttctctgacctctagcctttttcctccctacacaactcttgacctcacagagagatgctttggaatccaccctggcagagacggaggcccgctatagctccaaggaagattccttccttgctccttctctgacctctagcctttttcctccctacacaactcttgccctcacagagagatgctttggaatccaccctggcagagacggaggcccgctatagctcccagctggcccagatgcagtgcatgatcaccaacgtggaggcccagctggccgagatccgggctgacctggagcggcagaaccaggagtaccaggtgctgctggacgtccgggcccggctggagtgtgagatcaacacgtaccggggcctgctggagagtgaggacagcaagctcccctgtaacccatgtgcacctgactactcaccctccaagtcatgccttccctgtcttcctgcggcctcctgcggtcctagtgcagcccgcacaaactgcagcccccgccccatttagggagcagcagttcccagctcctgtcagactctctctgtcctaaagttgtcacagctattttcacattgtccacctggacagccaaccaagcattccctaccctcctgggtgagatctgagaatgagaaacaccatgcttcacaaggatgctctccatggaattctccccaggccctaaaatgaatgaaaaaaaatgtgatctgagccacatggggacgtttccatctttccttatggtggatttttaagcatcaagtatccaagggtttgctcccatctgtaatgaaactagctgcgctctgggatacagatggggtttcacttctcactctactgtgggctccattggtcaggtctgggcagcagtgagggggttgaagggatagccccttggactgaaacccagctctgcacagccaagacatgcttctggttcactcaccctccctttttctcctcatccacttcctcaatgcacgtgattaagatcctgctaga

SEQ ID NO: 228108 - DNA, 758 bp, Homo sapiens
tgtgaacactcactaatgccactgtgactgttgagacctaaccctgtccttcaggagctgacttaattcttgattagggctcaatcttaatcaaacacatcttaaattacccctaaaattctttgggactgaatctttttattaatacttcttaggttggtggaaacatttccttggagggattcttttcaaaggctgcccctcctttgcttcctccacagagacctgtacctgacacgaaagagatggacagagtacagggagcagcagttcccagctcctgtcagactctctctgtcctaaagttgtcacagctattttcacattgtccacctggacagccaaccaagcattccctaccctcctgggtgagatctgagaatgagaaacaccatgcttcacaaggatgctctccatggaattctccccaggccctaaaatgaatgaaaaaaaatgtgatctgagccacatggggacgtttccatctttccttatggtggatttttaagcatcaagtatccaagggtttgctcccatctgtaatgaaactagctgcgctctgggatacagatggggtttcacttctcactctactgtgggctccattggtcaggtctgggcagcagtgagggggttgaagggatagccccttggactgaaacccagctctgcacagccaagacatgcttctggttcactcaccctccctttttctcctcatccacttcctcaatgcacgtgattaagatcctgctaga

SEQ ID NO: 228109 - DNA, 2056 bp, Homo sapiens
tgggctcaaatgacaggtccctttgaagaactgacagggacttggtcttcccagtgatgtggggtggtggagatgagtcttgacatagtaatggggctcctattttatgagactggtaaattttcacaggaaactaaataacaggttaatgaggggttttaatagaaagtggtgttaactttaatgaggagaaaacactttgtaaaggccaaccaatgcccactggggcagagatataaatctggggtaaggagctgcttctctgctttggggtgtctggcctcagagacctatcaattgcatctgagttgcaggggccatggcttccaaatgcctcaaggccggcttctcttctgggtctctcaagagcccaggaggggccagtgggggctccactcgtgtgtccgcaatgtactccagcagctcttgcaagcttccaagtctctcccctgtggccagaagtttctctgcctgctcagtgggtctgggcagaagcagctacagggccaccagctgcctccctgctctctgcctccctgctggaggcttcgctaccagctacagtgggggtgggggctggtttggggagggcatcctcactggcaatgagaaggagaccatgcaatccctgaacgaccgcctggccggctacctggagaaggtgcgtcagctggagcaggagaacgccagcctggagagccgcatccgtgagtggtgtgagcagcaggtcccctacatgtgccctgactaccagtcctacttccggaccatcgaggagctccagaagaagactctatgcagcaaggctgagaatgccaggctggtggtggagattgacaatgccaaattggctgcagatgacttcaggaccaagtatgagacggaggtgtccctgcggcagctggtggagtcagacatcaacggcctgcgcaggatcctggatgacctgaccctgtgcaagtctgacctggaggcccaggtggagtccctgaaggaggagctgctctgcctgaagaagaaccatgaggaggaagtgaactcactgcgctgccaacttggtgaccgcctcaatgttgaggtggacgctgccccacctgttgacctgaaccgagttctggaggagatgaggtgccagtatgaaaccctggtggagaataaccgccgggatgctgaagactggttggacacccagagtgaggagctgaaccagcaggtggtgtccagctcagagcagttgcagtcctgccaggcagagatcatcgagctgagacgcacggtcaacgccctggagattgagctgcaggctcagcacagcatgagagatgctttggaatccaccctggcagagacggaggcccgctatagctcccagctggcccagatgcagtgcatgatcaccaacgtggaggcccagctggccgagatccgggctgacctggagcggcagaaccaggagtaccaggtgctgctggacgtccgggcccggctggagtgtgagatcaacacgtaccggggcctgctggagagtgaggacagcaagctcccctgtaacccatgtgcacctgactactcaccctccaagtcatgccttccctgtcttcctgcggcctcctgcggtcctagtgcagcccgcacaaactgcagcccccgccccatttgtgtgccctgcccagggggtcggttctgagagcgggtgacccagatggccatggctattgtctccagggcttgaacttggcctctacccaaacttaacccttgtagcccaatcccctctcttcgcgcagagcccaggcccagggtctggctgaaaaggctttctgcaaatacatgccctaaagtttctcagagcctgtcacaaaggccggctgcccccaaaggtctcaactcctcatcatttcaatgggtgccagggtctctgttctcaggctgcctcctgggtcaggttttccttctaggtgctgttccggtggattctgaaatgcagtagagggcttttgttggcagaacaataaagtgcatttgctcaggcccctgatgcctaacttgcaccatt

SEQ ID NO: 228110 - DNA, 448 bp, Homo sapiens
caatgccctccagtataaaataaatgagtgggactggggaatcgggaatgtctttcttggctcatgattctaaccggcctctgtagctctctgaagccaagtccctggtgtggctgaccaggttctgtgtgtgtatgtttcagagtgaggagctgaaccagcaggtggtgtccagctcagagcagttgcagtcctgccaggcagagatcatcgagctgagacgcacggtcaacgccctggagattgagctgcaggctcagcacagcatggtgagccccaaggcagggtggagctgcctctggaccaagccgaggagcacacaagctccccagcttccatgctttgaccacacaggcggactccaggggtccatgttcttgagcaccaggggttctctatgcagaaaagagggaatgagggaccagctccagtcacaaatcccccagtg

SEQ ID NO: 228111 - DNA, 493 bp, Homo sapiens
ggacgacaagacattctaaaaccaaatggagataattagattttttttttcaatcaaggagcattacccgtgcatctctatcaggtaaacaagagatggcagtgaaaaattacagttgtttacatgaattattcattgtctcactgggtcccagatgtaccaatggaatgcatggtgaattcatattcttgagcctgaagaggaggtttaaaaattctcctttgcactttttccaagagaaaaaggcatttacagattgatttaaaaagaaaaaaagctcaattatgtttccttctaatataaaggctgacaaggaaagcaaagcaagcaactagaagacatttgctgtgctcttgactttgggaaagaccatgggcaaattatatcacttttaggaaatttaatttccttacctacagaaataaggcatgtgaatcaactgattcagcaggctgtcttcagcaataaaattttgtacttatcaaaaaaaaaa

SEQ ID NO: 228112 - DNA, 746 bp, Homo sapiens
ctttcagtaaataaaaactacattatgattgttttcatatctattatgtttagatcagacgggaatttgtacagtttcattttgtttatggtttctcactttacctttatcctctttgattatctggagtttattttggtgcatgttataaagagagaaaataacctaatttttcctctcaaatatttaaacaacttttaaaagcattttttacaaatataaatttttactttgtccttattataaaaacatttaacactaactgaagaaatgtcagaagtacaggaaaaaattacagcatttttcctagaatctgcataaatatatataagaacactctttgatactcagatgtaaagaaagtgactcaaaaatcctttggtaggggtaatggataaataatttatccaagcaatggaatattaaaagctattaaaaataaggtagatttaaatgtattactatagaactatgataaatgaataaagcatttataatgataccagaaaaactatttgcagtcaacaatttgtatttcacagtaatagtaatgttctcctcatagtctaatgtagcatctaaaaacattactatgaatgttttctaatttgctgctctctttataccaattttgactgacatacgtcctttgtctgtatgttctttaaagaaactgactgcattgcacatgctgtttagttactattattcactaaaacacagtactgttaaaggtatttaaaata

SEQ ID NO: 228113 - DNA, 498 bp, Homo sapiens
cctgtcacagtaatatgccaatttttggtgtcgctttagtaatttttttgggggggactgtcaaatttcagtaaactttataggctatagtttacaatttaaggtctttcctcagttgtctcctaaaaaattttgtggaaatcgaaatttcttttcaattgatcgtcttgtgcagccctttaaaaaatgcgttttgcattcatgtctttgcagtacaaatctgtatctttcattttggaagtgactgtcatagatgggtaatataaagtgacaacacacacaccagggccagattgcgtgggttctagctagggacctagagctggttacttgatttctctctgttccatttactatctgtaaatcatatataataatagtaattatttcatagagttgctgtgagcattaaatgaggtaaaacatgtaaggggcttaaaagtgcttggtacatagtaagtactaggtgtcagctattgtcagttaaacaataaaaaa

SEQ ID NO: 228114 - DNA, 266 bp, Homo sapiens
tttcatgtaatagtcccataaaccctgacaggttcgcattgtcatcccatcaaggaagaggtggagagtcagagaggttaagtaattaacaacctgtgtcacctaaagtgagtggcagggtcaggaattgaaccaggtttgaggaggtcctaactaggttgaactactgaccttcataaaagtttggcactacagaccagctttataggacaaaaaaaccttctttcagagctcctttttctcgccttcctgacagctccctagca

SEQ ID NO: 228115 - DNA, 424 bp, Homo sapiens
aagatggagactctgtcccaaacagggctgcagcgtctcctgagagaggtgaaaatgacctcagaagccagtttctgatgacaggccggacagggaagcagctctcagcctctgcctggggctcctggaacacctgctacctcgactctcaggcctcacccctgccaccctgaccaccccgccccctgcagctgctgaagggcccttcctcttgacttgcagatctgactgtgattgaaaggtagtgtctgtgcaggaaggggaccatcacacaccggggcctgttgtggggtggggtgagggggagggttagcattaggagatatacctaatgttaattgcagcacaccaacatggcacatgtatacatatgtaacaaacctgcacgttgtgcacatgtaccctaaaacttaaagtataataa

SEQ ID NO: 228116 - DNA, 492 bp, Homo sapiens
gttttcctaagatcttccccattgccattccctcccgtcatctctctgtgtcagaacaacattccgtagaatgtcttctttgatgaaaatcatcacaaggtggtcaaggcttgaggggccagcccatcagtcctcctagcctttggtttctgtacaagtcatgagatcaggcagtcgtccagtagggatcgagatactagctttgttactgagaaaggattggagagctctgacttgaggccaaaacagatttcctgctgcccctcccttcccagtggtagacaggatgcctgctgtccgggggcagagctggcagggcccgacgtcctgcagcccgtgagcgcaaggcccctctcccattgcccacaagcaagtctttgcccccatgggctgggagggagggcagggactgccaggtgttgccttgggagtactggggcatcatttcctgggcgacagagggagactctgtctccaaaaaaataaataaat

SEQ ID NO: 228117 - DNA, 566 bp, Homo sapiens
atttggaaaggaaatgtccctagtagagatatttgatttaaattacaaggaatttagttctaagggataatcgacatatttcataaataaatgcagatatctctagatatcaaatgataaaagatcttgagcagtgatggattactgctaatgggtttctgtctgctactctgagcacagttcaggctcaagaactgacatgaagggtttgagaatttagtcaaaatctggaagtaggcaggtggtcacaggctaagagttcataaccggatgcagtcgttgaaggacaattgtgaagaaaaaatgctgatggtgaaacgaatgcaaaaaccacaaacacattgaagaggcctatattcctgggaacaaagaggaaggttatcaatgatgtgcttgtagaaaacatattaatactggaatatggtcttctttcccatcatttcaggtcagttagcttagattactattcagctagaaaaaacaaatgatacccttgcaaggactctgaacaatattggaattcagctgttttgtttctaataaaacatggtttaactgttaatgaa

SEQ ID NO: 228118 - DNA, 230 bp, Homo sapiens
ggtttctccatgttggtcaggctggtctcgaactccggacctcaggtgatccacccgcctcggcctcccaaagtgctgggattacaggcgtgagccattgcgcctggctgactctcaaatttttatctctagcctggaactccaggcttgtgtatgctactgcctacctgacatctcttatatcttctatccttatttcaaattgaacttaccctgtctcctcttccccg

SEQ ID NO: 228119 - DNA, 427 bp, Homo sapiens
cggtatgacacgtacttagaatttacattgaattagttattgtaagctagaaatgacttaaagtatacagtaagatgtgcataggttatatgcaaatattatgccgataagggacttgagcatctacagattttgatatctgtaggggatcctggaaccaatctctcatggatattgagggacaactatatatcccctatttgatgatcattactttaaaagttaatagagcaatatgtaaaagttttagggaagtagctctcagtcctttataagaaggtttcaataatcagtccccttagcaatggattggaccacttagaaagatgctaaggtccatgtcacctggccattttggaggatgttgtagaaggtagagtaaatattggagtatatgatgtttaaagtactcttcagcaacctcact

SEQ ID NO: 228120 - DNA, 568 bp, Homo sapiens
tgggacatatgtgtctggaatttaggagagaggcctggactgatgatgtaaatttggaaaatgttggtgtatagatggtaattaaattagccaggaagagggctcaccatcaaagcagcaagtacagacagcaaagagaaaaagactcaagacagccgtaggcccacaacattcaggatgacttggagtagaggaggagccagcaaagggactgagaaggagtgaccagggaggtaagaagagaaccaacattattaatgttctagaagcaaattgaagaatgtgcaaagaagcagagtgcatcctggggttctgtgagtgtccccaggcctgtgctcctcaggggtgagattcgtccctgctggtgttaagagttcccaacagccaggattgtttctggctcaccgtgcaatcccagtgttgtttttttgttttttgttttttgtttgatgtatactgaatgaaccccagaacagtgtatttctgatatgtttgtttccctttgacagtctgtaacataaaataaaggtatacagtgttcatggttaattttgccagtgagcatgct

SEQ ID NO: 228121 - DNA, 431 bp, Homo sapiens
cctgagatgatgagataatatgttgctagatagggatacaatttccttgtcacagcaactctatttctgtaagagatccaagattttcttcataataaaataacatacagatgcccacacgaagaagagagagaggcaattttacagcaagaaaaattgtcagcatatttgagttctaattaagaaaggaagcatgtgaacaggagtgatagctaagccaggcgggagggcgggtggcaccaggcccacacagcacatttctaaaggaatatggcaactgctgtctatcttgttccaattactatatatcaaataaatggctgcctctatggtgggatgcaaaagaatgttaagaaggcctgtttgcctttctaaaattacataattatatttgtcagaatatgacatagaagtcagttgtttcttcaaat

SEQ ID NO: 228122 - DNA, 239 bp, Homo sapiens
caaatagaatgcaatcctcacagcagcccaatgatgtactgttattatctccagcttacaaacgagagaactgaggtgcagagaggtgacgtgacttaactcatcccaggctttccaggaggaggtctgattccagatcctctgtcatgagacattgcaaagcccatcctcacagccctaactgtggaataacctttccaaatttgcctttgtctgctgttgtgcttgcctagcccttg

SEQ ID NO: 228123 - DNA, 344 bp, Homo sapiens
ctggcacctacttctcaccccaggctctgctctatgggggacgaaggctggctgaaatgtccttcctgcgagacatgaaggtcaaccttggagagctccagggacatgagcattgagctgtccagcagtgtagaaacgtgcacacttctctgagcttctgtgtgtcccgacctgttgttgagtttggggtggaaaaatggtgaccgacaatgaaacaggaacctcacagcctgtcagtcaccaggaaggcaagtggacttctcctctgaggagcagagaggagaaccaactgtgtggcctctttctcaggtttaacttcgttggaataaaagctgcatatggca

SEQ ID NO: 228124 - DNA, 281 bp, Homo sapiens
ttaaggaagcaaaggacccaagatcagggtcaaaggcacgctcctgaccacctggcaccttgaggttacagggggcagcaacctgaagaacaagattcctaggaaggtctatttcctaggaacagatgccactgatggaatacgtgatgttttttgaatgtattgagaagagatttacatttctgatgaagaatttttggaatgaattctcaacaggtaaagaaaaatggataacctgtggtaccttacaatagaacagatatctatttctgcaatgaaat

SEQ ID NO: 228125 - DNA, 411 bp, Homo sapiens
cagtgaattgtttccttaaactataaaggaatcaggtactattgagttttggatgcaagaggaaatgaaaaagctgcccctttttggaatgggaagttcttcagtcactgttaaaactatttggactgaggccgggtgccgtggctcaagcctgtaatcccaacattttgggaggccaaggtgggcagatcacctgaagtcaggagttcaagaccagcctggccaacatggtgaaacccccgtctctaataaagatacaaaaaatagccagatgtggtggcacatgcctgtaatctcagctacttgggaggctgaggcaggagaactgtttgaacccaggaggctaaggctgcagtgagccgagactcgcgccgctgcactccagcccgggcaacagcaagactccatctc

SEQ ID NO: 228126 - DNA, 93 bp, Homo sapiens
cttatttcatttttaattgaattagtaatgacttgataaggcacaaaggttagtctaactaacattttttttttccctgacatacgagtgatc

SEQ ID NO: 228127 - DNA, 397 bp, Homo sapiens
ctcaggaaggtattcatatttatacagacggaaagctgggtggggttgcggacacactcccatagagaaggtggtgtgagcttgtctggcaggccgtgaataactttcatatcaataaggtaaattagtctccagaatatttgcgagatggaggcctagtatctatatgcaaaaaagaggggttctcagtatctcgactgtctcaacaagtcacgggtgtgccgtggcttccggcgtctcttaagggaatggtgctgcagagctcggaccaagaaggttttccagcaaagtcccatgctttgccagttgccttgagcctgggtctgggccctcaagttgaaaatgcactataatgaaaagggagaggtgtcctgaatcagtatcttatatgagagat

SEQ ID NO: 228128 - DNA, 449 bp, Homo sapiens
cggaccagtttcgtggaagacaatttttccacagactcggggagggggatgatttggggatgattcgagaacattccatttattgtgcactttatttctattattattatgttgtagtatatactgaaataattatacaacacaccataatgtagaatcagtgggagccctgagcttgttttcctgaaactagatggttcccatctggagatgatgggagacagtgacagatcatcaggcattagattctcataaggagcatgcaacctagactcctcacatgcacagttcacagtaggatttgctctcctatgagaatctaatcctgccaccgatctgacaggaggtggcactcatgcagtaatgctcactcacctgctatgtggcctggggttggggatctctgctgtaatagagttcacttgtaaataaaaatgctttcctgagca

SEQ ID NO: 228129 - DNA, 476 bp, Homo sapiens
gtgagttgagtatagggcttgattatgagtttaatatctacttctctcactggactgctccatcactgagggcaggtttatctgtcatgttcccctgtgctatgttttttttttgtccctacctaagctcatgttgaaatttaatccccagcgtgatggtattaggaggaaggtattagtggaagatgtttgagtcacgggaaaagatcccttgtgaatgactcggtgctgttcatatggtagtgagttttccatctcacgagatgaattggttcctaaaggaatggatgagttcccttgagagtgggttgttatgaatccaggacactctcaggtttggtccccttcaagtgcctgattcttctttgaccttctcactaggtttggtgcagcacaggagcccccaccagaagctgagcagaggtacagcctacagaaccatgagcaaaattaacctcttttctttataaatcacc

SEQ ID NO: 228130 - DNA, 208 bp, Homo sapiens
gcataataattcacaaactacaaccattttgactcccacttccataagcaaccttcaggttttttttcaaggtaaagtactgtctttgttgtagcatttatggattaaaaacaaatcatttagattgtgtaaaactgtgttgccatttttattaggttcctgtcttatgtgtcattgaagttttttaatgttgtgtcccaacctcttt

SEQ ID NO: 228131 - DNA, 775 bp, Homo sapiens
tattattaaattatcagaagaagtattaagcaagacaaagcatgatgttttgtaatgataaaagtgtaaaccacaatgaaaccctagctatatatctagttacaaatagatatatagtaaattataatagtgataaattcataagacataaactacagaaattcaaagagaaatagaaaaatactaatcgtagaagattttaattcttttacctgagactttgacaggtacaaaaaaataagaatattgaagactaaaataatgtaatttaaaagatagactttatgaacatatattcaaatgctatatcagaatatatcttctttaaagtactcatgcaataatcacaaaatgttactcttacattagattgaaataatgcttcactaatttgcaaaatggagaaatagtgcaggtaaaactctcagacagcatttccacaaaatggaaattagtttttaaataattttaaatctaaaaaccttatcatttagagcatttaaactcttcattaactttctgatcaaataggaaatttaaaagtataggaaatctacaaagtaacagcaacacatatataatcagaatctatgggatattgctaaatcgataaacaagaaagaaaataaatgaagtatccagttctagaagtttaaaagaacaataacactaaggcaaacagatggaaagaatactaactaaaaaaaaatcaatccaataactgattctttaggggaaaaataaaaaactatgtagatgttaattaatctaatca

SEQ ID NO: 228132 - DNA, 539 bp, Homo sapiens
ctgcgttccgctggttgtgggcttcctgtggccgctgagggcgcgtctcccctccgccatggcatcagttttgaatgtcaaggaatccaaagctcctgaaagaacggttgtagttgctggtcttccagttgacctttttagtgatcaattattggccgtattagtgaagagccacttccaagacattaagaatgagggcggagatgttgaagatgtgatatatccgacaagaaccaagggagttgcatatgtaatattcaaagaaaaaaaagttgcagagaatgtcatcagacaaaagaaacactggctagcaaggaagactagacatgctgaactcacagtctctctcagagtctctcattttggtgacaagatcttcagctctgtaaatgccatccttgatctttctgtttttggaaaagaagttactctagaaactctggtaaaagacctgaaaaaaaaatcccgagtttaagcttcagtcctttgaaacccaatggaagaatctccgtggaaggatcatttctggctgtcaagag

SEQ ID NO: 228133 - DNA, 644 bp, Homo sapiens
ctgcgttccgctggttgtgggcttcctgtggccgctgagggcgcgtctcccctccgccatggcatcagttttgaatgtcaaggaatccaaagctcctgaaagaacggttgtagttgctggtcttccagttgacctttttagtgatcaattattggccgtattagtgaagagccacttccaagacattaagaatgagggcggagatgttgaagatgtgatatatccgacaagaaccaagggagttgcatatgtaatattcaaagaaaaaaaagttgcagagaatgtcatcagacaaaagaaacactggctagcaaggaagactagacatgctgaactcacagtctctctcagagtctctcattttggtgacaaggtcttcggataaactcaaccaactgtcaactagaaaatgtttaaatttacctatagcctggaaaccaccactttgagctgtcctgcctttctgaaccaaaccaatgtatttcgtaaatgtatttgattgatgtctcatgccttcctaaaatatgtaaaactaaactgtaccccgaccaccttgggcacatgttctcaggacctcctgagggctgtgtcacgggccatggtcactcatattaggctccgaataaatctcttcaaatatttca

SEQ ID NO: 228134 - DNA, 503 bp, Homo sapiens
atatagaactgaaaataaagacttacttgcatggtcagattatgctattatttccaaatctagatggggagtatactattgaaagagtagaataaagtagctacaactagttaaactcacaaaggattctttcacaggtattgggctaaaaacacagtattttcagcagttttgatgaggaaatcagaacatgggcagtcattctgaaataagaggctcagatatagataatttgagaacctactaaaattgtgtgcaaaattgcatatatatgtacattactctgagtacagggttgtcatattcttaaaggggcaagaatgacctaaaaggggtaagaatgattataattaagactcagcgccagacgcagtggctcacacctataatctcagaactttgggagtccatgacatgaggggtctcttgaggccatgagttagagaacagcctaggcaacacagcaagactctgtctctattttaactaactaaattaattta

SEQ ID NO: 228135 - DNA, 378 bp, Homo sapiens
tgtgggattacaggtgtgagccagcacacccagcctgccattaaaggagctgttcagctcctttaatgggcagtcattctgaaataagaggctcagatatagataatttgagaacctactaaaattgtgtgcaaaattgcatatatatgtacattactctgagtacagggttgtcatattcttaaaggggcaagaatgacctaaaaggggtaagaatgattataattaagactcagcgccagacgcagtggctcacacctataatctcagaactttgggagtccatgacatgaggggtctcttgaggccatgagttagagaacagcctaggcaacacagcaagactctgtctctattttaactaactaaattaattta

SEQ ID NO: 228136 - DNA, 326 bp, Homo sapiens
aaaatgtcataagtcaagaacttggattttaaggcatacctaggaatgaagcaccttagtcctgggcctggtacagacagataatcctgtgtgaagctggaactctcaaagagtggcaccctcagtgaaaggacacatagcaaaaaatctactcaccagcccagagaggtgacaagaaaatacatattttcttgtctatctgtgtgtatgcatgtatgcacatatgtatgtatgtatgtatttcttgtctgtctttatatatgcagaagaaagagttagaaaaaagaatttctgcagagtcattaaaaacccagacctgcttttca

SEQ ID NO: 228137 - DNA, 451 bp, Homo sapiens
atcatccgcttgcctttttgtggcccaaaccagctggacaacttcttctgtgatgtccgacaggtcatcaagctggcttgcaccgacatgtttgtggtggagcttctgatggtcttcaatagtggcctgatgacactcatgtgctttctgggacttctggcctcctatgcagtcattctttgtcgcatacgagcgtcttcttctgaggcaaaaaacaaggccatgtccacatgcaccacccatatcattgttatattcttcatgtttggacctggcatcttcatctacacgtgccccttcagggctttcccagccgacaaggtggtttctctcttccacacagtgattcttcctttgttgaatcctgtcatttatacccttcataaccaggaagtgaaagcttccatgaaaaaggtgtttaataaacacatagcctgaaaaagggcaaaaa

SEQ ID NO: 228138 - DNA, 483 bp, Homo sapiens
tgttttatttcatccatcatttattgagaaggcctggaaaggagaaatgattcatgtgaagataaccagacaggctttattttagattccatgaaaacagtgaaactttacattaaaacattgcacatctgagtgagtgtttcacctttatcttgagtgactttttttagcacatcattttcatattttaacatgactagaagcataatccagaaatttgttgttagcagtaatgcatattgcttcaagatatgctttagaatctcaacttacctttcttacatttttttaaaaaacatccgtttgaatgaaacatgtttgatcttgaagcacattaattcttttctcattcatttagccatccagtcatcatagaacaagatactgttttaatcaaccttttattgtgggtactgcacctttaatgaaacttgggttttgttttcttttccatgtgtgtattttctaggtattgttaaaatg

SEQ ID NO: 228139 - DNA, 330 bp, Homo sapiens
ttgcgtcccttacaatcctgtcttctctgactttccctctgcgttcatcctccagttccttcactcctccccgcccccaccccgcaattccatccccatcccacctcgtccccagttccaatagtctcatccagggagttctttgttttctcattcaagggaaattctttcccctcaagtccaacgcctacttcgatccacctgtcgtccccctctagtccctttcgccacccgggttcttcacccttgagctccatctcctccttagtttccatctttcccctttgaatcccatactcctccagctctattctccctccggcgtctctc

SEQ ID NO: 228140 - DNA, 168 bp, Homo sapiens
tagggcatgcagctgatgggagcagaattggagaacttcttgggatggagaaaaagccccacacatttgctgtcagaagtattgtgtgagcgaagagaaacagtctgttttctccagatggattgcctaattctttccggccatataataaagagttattgctggtca

SEQ ID NO: 228141 - DNA, 465 bp, Homo sapiens
atttgggtaaggtgcacatttgtgtgtggttttgcatgcttgtgcctattggcctggggtcagagagtaagggctaatgttgcctaagttctatttcccacttactgctttaggccactggccagctgttccttctgggctgttgccactacatgtaggtaagagtgtggttacattatagagcagggcttcttgagtttgacaaagcacgaatcccaaaatggggcataggctgtaattctgatttttttccacattcaagttatggcttttctacagttgataaaacatttttttttaaattgccaaacatggatattttgataggttgcacagctccagtttgcataattctgaattatgttagtgtttcctatttggcttactgttaagcttacaaataataattagaaattaattagaaataattttaaatttctaaataaaatgttttagtttgagtca

SEQ ID NO: 228142 - DNA, 691 bp, Homo sapiens
gagagcagcttctaggaaaacaaaattaagcatcttctctcaccaactttaatgcatcatttttacatactatatttaaatgtttgtatatttatgctgaccttgatactagaaagatttagtgacttagaaaaatgctgcgcaagttagaatttttaaatggagagaaaaatgagagtaataaacataagcttaagctataaggaagactaaaatatatgctgtaacacgccaggtgtgttggctccctcctataatcccagtgctttgaaggccgaggcaggaggattacttgaggccaggagtttgaggccagcctgggcaatacagcaagatctcatctttacaaaaaaatagaaaaaaaaatggccaggattggtggtgtgcatctgtagtcccagctctttgacaggctgacgtggaaggatctcttgagcctgggaggctgaggctgcaatgaaccatgatcacaccgttacattctagcctagacggcagaccaagaccctatctttaaaaaaacaaacaaaaaacacaagtagaaaagttggattttcatagcagcagggatattttttctgttgcaacaggaatgaaagcagagggtatagtaaattctagaagctgattatagactaattctacattttccttctattaaaaaaggcttaaagaaaaaaacggatagtga

SEQ ID NO: 228143 - DNA, 584 bp, Homo sapiens
ggcatgaacccaggaggcggagcttgcagtgagccgagatcatgccactgcactccagcctgggcgacaaagcgagactctgtctcaaaaaaaaaaaaaaagtcaacaggcctttggcataattttaacatgatttcctctttattgagcacagaacaagattcaaactgtcttacatttgaacttgtcaagcttaacaaaaatataagtacattacggagagcttgctatgtgaggcacgagggcacagttctgaccggctctcagctgagtctcacagtgacctctgaaacttatttcttctacaaggttttcttttctaaactttaaaaagttttcctttcaggctggccatggtggctcacgctgtaatcccagcaccttgggaggccaaggcgggaggatcacttgagcctaggagtttgagaccagcctgggcaacatagtgagactccgtctctacaaaagaatcttaaaaattagccgggtgtggtgtcacccgtctgcagtcccagctactcaagaggctgaggtgggaggatcgatgagcccagctgagatcatgccactgtactccagcctgt

SEQ ID NO: 228144 - DNA, 283 bp, Homo sapiens
aaaagcaaaatgttatttatcattaaatattaacaatataatcacattttcttgcatctctggcaagtttcttggtacaacaattttaaggaacagactcttagttttttttttgagatagagtctagctctgtcgcccaggctggagtgcagtggcacgatttcggctcactgcaacctccgcctcccgggttcatgccattctcctgcctcagcctccagagtagctgaggcaggagaatcacttgaacccaggaggcagaggttgtggtgagccaagatc

SEQ ID NO: 228145 - DNA, 352 bp, Homo sapiens
cgtctcttcaggaagctctcacagaggaccgcaagaggcacagtatggatgctggtcacaatattaattgttgggggcaggaattggaagtctgtatggggaaggtaagtaaaatgtgaaaatgtgtagtgattcaaagtaatggattatatgttcacatagcaatagggaacttatcatttatatcagttaaaatacatgcacactaacaatatatgccggtcaagaacacatacaaggctggatgtgatggcattacaggcatgagccaccatgcccattctgttcagacaatttataaaattatacttatttactacaaaagttaataaatataaaaagagagaccaaa

SEQ ID NO: 228146 - DNA, 355 bp, Homo sapiens
atcctcttcttgtcctttatggacagagcagagatggtgtgccatgcacttttcatatggacatctcatccttcccttggagttttgggttcttgcatttgaatttgacatatatgtatccaacatttcatttacagctcatgagaaaggcactgtatttagatgtattggtctgaattgtctgaatgatttaagaccataatacttcatctatgataggtgtttaatcagtaactgatgatgcgttaaggttttctgaaaagataagttcagaatgtctgctctttgttgcaggtttcctggttttaagtcaattttattttattttttgattttggataccaatttaacaaaa

SEQ ID NO: 228147 - DNA, 346 bp, Homo sapiens
gatatgactgctactggacataagatttcttttgaaaatgatgaaaatgttctgaaattagtggtgctagtttcataacttgatgaatatactaaaaaccactgaattgtacactttaaaatgatgactttttggtttgtaaattatatttcaataaagctgttattttagaatatttaattatgtttttactagctctggttcatttacgcctcactgaggtggtactccagaagaagaaatctaatggagcaatgaatgatagccaagatggggtggggtgtccgagtggttacccccgggtacagacgataaaggagtacactgtctatacgattgccattta

SEQ ID NO: 228148 - DNA, 215 bp, Homo sapiens
gcccttttcatggaccccaggccctttcctgtttctcccagaggaggaagtccaaggcagggtctgcatctccctcgtctttgcaagccccacaacagctctcctggacagtgtctaaactaaaacttcttggctgtttagtctggttatacgtgttacaaattccccatttcctgtggggttcacagagagctacaaaattatagtaatacttc

SEQ ID NO: 228149 - DNA, 373 bp, Homo sapiens
gggcaaagaggagcatgttgggttccttcctctgttggtgtgatttcattgtatttcagagcagaagcactaagctgtggtcaaaaagcaactattgctcaggaaataatacactccatattttgatcatgcaggctgtttgtattatagttatttttgttattctttgcatacctttatccacctgtgcttaaggaaggatcctcatatgttcatactgagctgttggaaatctatgcaagacatttatttgtacaagtctcttcaggtaaaataatatatttattgataacattttctggcgatctgtttattttaatggtatgctttcacaactatcttaataaagtttgcaagctgtgtactttaataa

SEQ ID NO: 228150 - DNA, 442 bp, Homo sapiens
ttccctataggaggcagattcggaagtctggcctacgactcttttggaagctgaaactaattaaaatattcatttttcgcctctgtagctaagacccggcaggggagatagcatttgttttatgaaggtgtaactatatccactaacctcttgtgtgccacattcggcatctgccccaaggctgccacacctgctcaaacacctgcccagtatgtgagtatttggtagaacagtttttaatggcttacctaagggcacctagggtcacccacctttacctgaggacaatagagtcttgttccacatatttattacctatacactcacctctgagtgaagtactttcctggtttcaccttcagtgagatctgaaaagctatgcaaaagacaaatagaaaaagagaaagagaaagagaagttaaaaaatagttgtgtgtcatta

SEQ ID NO: 228151 - DNA, 602 bp, Homo sapiens
ataatcattagacttttttagatctgttggtgtgatcagttgtattagcagttttcctaacagtgaatcatccatgtctgtatgtatagaatagtcactcgcttgcttactatgtgtgaagtttttaacgtgctgctggatctttggggtgtgtgtcgtggcacacacatgagtgcacacatgaggctggtttgaaggtttcccttttgcacatacgctgtcttcatcctgtttatatgccaatgttatgtttgtctcataataggaacttagaactttccttcttgtgctgtgatctagagctgtgctgtgtagtaatgtagcctctaaccacgtgtgattattaaaatttaagtgaactaaaattacatgcaataaaaaaactgttcagtcaccagtagcctcatttaaaggacagacgtggctagtgcaggtctagaacgtgtccatcactgcggaacgtactgagacttcctgcgtcggtggaaacattccgtcatctacaccggccagtcctgtagcaacggcctaggtggtttttgaacgtgtgtgtgtaggtgtgcccacacgcataggcatgtggtgagtgtgtggggtgcgtt

SEQ ID NO: 228152 - DNA, 201 bp, Homo sapiens
aaagtgcttgcaaaacctggtggaattcgctaaggcctctggtttagttggtttagttaacctcactgtaccaatgtccacctcctggtgccaaccagtgaaccatggaaaggtggatgctgtcattgagggaagctctgcaacccccacgtgagtctaaaattatttcaaaaaagtttagaaagtgtgaacaattgtatt

SEQ ID NO: 228153 - DNA, 242 bp, Homo sapiens
tgaatttctaatatgaattctagaagttggaaaattggaagagcctttgaaattgttcagtccaactcctatttccagaacccaataaggacaataaaaggaacatggaattttgagatcgtaagatttttattacttaatcctgtgcctagaacatttcaataaatgtaaattaatctaataagaaaatataccaaaatgtatatttaaattacctttaaagtttctttacacatacctta

SEQ ID NO: 228154 - DNA, 401 bp, Homo sapiens
catttcttccttccttccttccatccgttcctccatctgtccatcggtccaccttctttcaatggtctcgctctgttgccctggctggagtgcggtggcgcaatctcggctcactgcaccttacacctcctgggttcaagtgatcttaccacgtcagcctcccgggtagttgggactacaggtgtgtgccaccaccctgggctaattttttgtacttttttatagagacggagttttaccatgttgtccatactgatagtaggacatttcttaagttaattttctaaatcactactttgttgtgtatttctctacttaattctatttggtaattttagtagtttttctcctccccccaagcatttgttctctgctattttattcagagctctttgctctta

SEQ ID NO: 228155 - DNA, 674 bp, Homo sapiens
gcaggagagagggattccaaaagggcatcaggaaacttctaagagtgatgaatatgttcattaacttcattatataggtggtttcatgattatataaatatatcagaacttatcaaagtatacacttttatgtagtttattgtatgtgaattataagtcagtaaagctgttttcaattttttagagaaaaggaattattaaactataagagagtaacactgagggagacattacaaagggacaaacttggaagagagcctgaggctgaaattcagttttcactggagcaggtgtggttgcagcacaccaggtaacagagaatctcactgggttgaccagaccagagctggtccaaggttgcccggtaaacaataaacagcccactggggtgctgatgggtaggtgtgcagaggcagtcagggcacagctgcaggcaccaggcctggaatgtacaacatctgcatcaagagggttgctggaggcggggcatggtggctcatacctgtaatcccaacactccgggaggccgaggcaggcggatcacctgaggtcaggagtttgagaccagcctggacaacatggtgaaaccctgtctctactaaaaatacaaaaattagccaggcgtggtggtgcctgtaatcccggctacttaggaggctgaatcacttgagccc

SEQ ID NO: 228156 - DNA, 895 bp, Homo sapiens
  misc_feature (811)..(811): n is a, c, g, or t
  misc_feature (853)..(853): n is a, c, g, or t
agcggggagctcgccgcggactcaagatggcggcgtgtggacgtgtacggaggatgttccgcttgtcggcggcgctgcatctgctgctgctattcgcggccggggccgagaaactccccggccagggcgtccacagccagggccagggtcccggggccaactttgtgtccttcgtagggcaggccggaggcggcggcccggcgggtcagcagctgccccagctgcctcagtcatcgcagcttcagcagcaacagcagcagcagcaacagcaacagcagcctcagccgccgcagccgcctttcccggcgggtgggcctccggcccggcggggaggagcgggggctggtgggggctggaagctggcggaggaagagtcctgcagggaggacgtgacccgcgtgtgccctaagcacacctggagcaacaacctggcggtgctcgagtgcctgcaggatgtgagggagcctgaaaatgaaatttcttcagactgcaatcatttgttgtggaattataagctgaacctaactacagatcccaaatttgaatctgtggccagagaggtttgcaaatctactataacagagattaaagaatgtgctgatgaaccggttggaaaaggttacatggtttcctgcttggtggatcaccgaggcaacatcactgagtatcagtgtcaccagtacattaccaagatgacggccatcatttttagtgattaccgtttaatctgtggcttcatggatgactgcaaaaatgacatcaacattctgaaatgtggcagtattcggcttggagaaaaggatgcacattnacaaggtgaggtggtatcatgcttggagaaaggcctggtganagaagcagaagaaagagaacccaagattcaagtttctgaact

SEQ ID NO: 228157 - DNA, 511 bp, Homo sapiens
ccattatatagttaaacagtggattccatggagttatgaaaaagaagcaagggttttctgcccctttggaagaacagaatatctgctagatagcctctcaagatgagaagtgaacctggagattgctcaccagctgctttcttgaagccaaagctatattaattacagtattttctcatgtcatctttggcctatgagcttgggtatctagttcatctaaataatccaaccaagagttgtttccttacgcattacttggagttaatttgagaaccagtatacaatacttgagtttgatagaatttcccagtctaattttttttcttccctctcattccaataatagaggaattatatcattctcacaggcccagtgaaaaaatgaatgacacacagcgtttattgctttctaggtcttgttgactttaagagagagaataaggatgtgcaccttttccctggtcacttgataaaatgcagtgacattgaggtattgacttttttttccaaa

SEQ ID NO: 228158 - DNA, 358 bp, Homo sapiens
ttttggggggaattaggtcatgaaggcagagtcctcatgaataggatcagtacccttataaaagagaccccagactgggcgtggtggctcacgcctgtaattccaacactttgggaggctgaggcaggcagatcacgaggtcaggagatcgagaccatcctggccaacatggtgaaaccccatttctactaaaatataaaaaattagtcaagcgtggtggtgcgcacctgtagtcccagctactggggaggctgaggcaggggaatcgcttgaacccgggaggcagaggttgcagtgagccgagatcatgccactgcaccagcctggtgacacagcaagcaagactccgtctcaaaaa

SEQ ID NO: 228159 - DNA, 549 bp, Homo sapiens
tggcaaagagactggggaccctatgatgccacccctgagccatgtgaatgctggctttggaagtgggacttattctgggtcttgaagaaggggcaggatctggggaggagaagcgacttcaggaatgctggggaagcagtgtgactccaggtgtggaggcttggaggaaagcagacctcagaagcctggaggaaagagagaagctgcctaaaccttggccaagccaaagcagacggcctcacaagatcaagatcctctcttgcttctctagagaatgtgctccatcaaaaagagagaataaaccaagaagaggaagacagaggatccggaaacagggatgatggtgcacggaagtcccaggatgacagctgtgcatcaggccttcagcagccaggatgggagcagaaggatggggagctctgggagtgtctccaagaaagaaaaagaaactgatcaaatatctaatttttaaaacatattgaggggaaatttatacttctgcaataaattttaggatatcgtaatagaaactaagaaaataacaaataa

SEQ ID NO: 228160 - DNA, 379 bp, Homo sapiens
ggcgttaagaaaccagcttgaacaacatagtaagacctcatctctacaaaaaatacaaaaattaggcctcacaagatcaagatcctctcttgcttctctagagaatgtgctccatcaaaaagagagaataaaccaagaagaggaagacagaggatccggaaacagggatgatggtgcacggaagtcccaggatgacagctgtgcatcaggccttcagcagccaggatgggagcagaaggatggggagctctgggagtgtctccaagaaagaaaaagaaactgatcaaatatctaatttttaaaacatattgaggggaaatttatacttctgcaataaattttaggatatcgtaatagaaactaagaaaataacaaataa

SEQ ID NO: 228161 - DNA, 428 bp, Homo sapiens
caacatatgtgaaaaacaaagagttaatatcctcagaaaatgcactcacaaataaatatgaaaaatatcaacatttcaatcaaaactggggaaaagatatgaatagacatttcacaaagaatgaaaataaattgccaagaaatatataaaaatatgtccactttcacttattagtgttataaaacacagaaaatacccagagctagtgagaaagtgtgtgcaggaataggcatttttgtacactgctggtagatgcataaattgatacaaaaaagatacatttctttatccatgaaataaagagggtagattaagtaatctctaagattctttcaagatctaaacttctaaggatctgtatttctctgagttgtgtcaatgatgtattaaaggatgtagcaatcaataaaatatgtttttgtagaaat

SEQ ID NO: 228162 - DNA, 363 bp, Homo sapiens
actgccactgaggctgaatgcaccctcattcccggggaacatgggcagagggccagtcggttgtctgtttcatgacagaacaatgttcctatgtactggagctttggacaaaaagaaaccatcatgggtactcaatgtctgaccctcattatgtagccattgagaccctctgcccacctacaaaaacaaattcttaagagtaaatgtaaaagaaataatatacgtatgtataatggaaggcatacacacaaatgtaaatacataatggataatggatatcctattggataatagacatgttcaggtaatccctaaatttaatcgatagttttaactttttttcacccattgataacaaaacaa

SEQ ID NO: 228163 - DNA, 717 bp, Homo sapiens
ggtggtctcgaactcctgacctcaggtgatccacccaccttggccttccaaagtgctgggattacaggcgtgagccaccactcccggcctgaatctttcttgatcagatgtcttctgtctatccactctggctctgtctactcccttcccaacacatgccctattttaggtaaccatggtagttttgttttgttttgttttgcttttgtttttggagatggagttacactcttgcattccagcctgggcgacagagccagactccatgtcaaaaaaaaaaaaaaaaaacctgggatccctccacccccctctcctttaaatgtctgtcttggctactttcttctaagtcactaggagatggtaaaagcaataccatgagacttccgaggctagggcacgaaaggatggcttctgcgtggtgctccctctctcccagatcccttgctctgtaggaaaccaacccccaaggcctgaagacacccaagcagccccatggagaggcccatatggagaggaactgaggcatcccacccccaaccggcagctcggggctttgaaaacagatccttccgccccaggcaagccttccaatggattgcagccccagccaatgccttgaactgccaagttcagccacacctaaattcctaacccataggaactgtgagagataataaaagtttgttgttgtttcaagccactaagatctggggtaat

SEQ ID NO: 228164 - DNA, 308 bp, Homo sapiens
ggtggtctcgaactcctgacctcaggtgatccacccaccttggccttccaaagtgctgggattacaggcgtgagccaccactcccggcctgaatctttcttgatcagatgtcttctgtctatccactctggctctgtctactcccttcccaacacatgccctattttaggtaaccatggtagttttgttttgttttgttttgcttttgtttttggagatggagttacactctgttgcccaggatggagtgcagtggcacgatctcggctcactgcaacctctgcctcctgggttgaagtgatgctcct

SEQ ID NO: 228165 - DNA, 402 bp, Homo sapiens
gtcaagttcccatcacattcgcccatgaggctatcagtcaagttcccatcacaaagccatcacttacagagccttatgggctagaaggtggagctcacctgctccctccaactgggacttcaaaaatagtcatctgtgagaacgcaaatggacagccacttgggaggacagtctgcggtttgttttcatactgaacatactcttaccatatgatctggcaatcatgctccttggtattcacccaaatgagttgaaaatttatgtccacacaaaacatctgcacacagatgtttacagcaactttatgcataattgccaaaacttggaagcaatcagatgtccttcaataagtgagtggataaagtatggtatatccagacaacataatactattcagcacta

SEQ ID NO: 228166 - DNA, 576 bp, Homo sapiens
  misc_feature (3)..(3): n is a, c, g, or t
  misc_feature (39)..(39): n is a, c, g, or t
  misc_feature (79)..(79): n is a, c, g, or t
ccnaggttaagggattcccggctaagcttccccagtagntgggactacaaaagttgccaccatgcccgggtaatttttngtatttttagtagagcggggtttcaccatgttggcaggatggtcttgatctcttgacctcgcgagccaccgcacccagccatattggaacactttaatcacctcccaaagcaatgccatactcattagttgtcgcccctaacctcccctctccgtgtcctaggaaacctccttttcttccaaaaattttagcacgtattttcatatgttagtgtgtagatcaattcaaataatagatacaacaaatactgtaatatgttgtgtaccttgtaattattccagctgtatcgcagaaatattttataaatttaatagggctgggcagttttttttggaaatgcttgatcatttgcaagtactacatgctcttgaataatatattttcatttttagaaacatttagaatatttagtgtacaacccctgtctcccagtaattctgctgcccaaggaaatcagttactttattttttcttttcatttcttagctatagtcttt

SEQ ID NO: 228167 - DNA, 251 bp, Homo sapiens
acagttttttttttctcctgaggacagtctcactctattgcccagactggagtgcagtggcatgttctcagctcactgtagccttgacctcccaggctcaagcgatcctcccacctcagcctctcaagtagctgggactataggcacgcgccaccatgcccagctagtagttcacgttttaacagagtacattaaaaactgaatttccccttcataatttccttttttgtactaacaataagattgtaaat

SEQ ID NO: 228168 - DNA, 455 bp, Homo sapiens
gttggtgaggctggtctcaaactcctgacctcgaaagatctgctcaccttggcctcccaaagtgctgggattccaggtgtgagccaccgctcccggcctattccctgcttcctttattgagccatgccaccttcctcagttggattttggtatcaataaggatatgaaggttttggtgacatatttctaaataagaggctgtttccctaggatgcagaggttggtgacaaatgtcagcttttcagttctttcactcaagaaggatctgcaacttgaattcagcaggtttggtcttcagtggggcctggaagtggaagggatgtggtggtgtccacttggtttctgatcaccttggctctttcacggcctgactctcctcttccagtgaaaacctgctatgccttgagcttcagaggacagaggtccaggtggttgtttggtttggtctttttaac

SEQ ID NO: 228169 - DNA, 399 bp, Homo sapiens
tcacatctggctctggagtgctcagtggggctggtgaagtatagaccaaaatatccattttttcaagttccattcagaaatattttctgggccacatgcagtgcctcatgcctgtaatctcagcacttttgggaggccaaggtgggaggatcacttgagcccaggagtttgagactagcctgggcaacatagggagaccccatctttacaaaaataattaaaaatattagcccagcatggtggctcatgcctgtggtcccagctatttgggaggctgaagtggaaggatctcctgagcctgggagggtgaggctgtagtgagctgtaatcataccactgcactccaacctgggtgtcagagcaagactgtctcaaaaaaataaaaacaagaaaaatatt

SEQ ID NO: 228170 - DNA, 328 bp, Homo sapiens
tggcctagtactcttatgtgaagtctaccaagcttgtgctcaagggaaccaaggcgaagaatttgcctgaggttgactgtacatacaaatattgagcatttcctcctggtctccgtgataaacagaggttttgatattgttaggcgagatggaaagaaagtatcaaggagtgagctgaagccactgcccttgagaaccctctcgaggagtctggcctcatgaagatgccagaataaatggcaggtatatcctgaatgaatgtgagatttttactctgtgaatttcctgtgaggagtgtaagaagaaaaagaggaaagataagaagaga

SEQ ID NO: 228171 - DNA, 4395 bp, Homo sapiens
  misc_feature (153)..(153): n is a, c, g, or t
  misc_feature (319)..(319): n is a, c, g, or t
  misc_feature (1472)..(1472): n is a, c, g, or t
  misc_feature (1712)..(1712): n is a, c, g, or t
  misc_feature (1714)..(1714): n is a, c, g, or t
  misc_feature (2206)..(2206): n is a, c, g, or t
  misc_feature (2952)..(2952): n is a, c, g, or t
  misc_feature (3147)..(3147): n is a, c, g, or t
  misc_feature (4210)..(4210): n is a, c, g, or t
  misc_feature (4266)..(4266): n is a, c, g, or t
acaaggcggaggaactcccaggcagccaggctggcttcggcgtgtggaggcgggaggggcacagccaggtgcgagggaaggctggcatctggcgcccactgcctgcccacccgcccgcccgcccgcccaagtaggtctgggcttccctgcctntaataaccatccccaccgcagaggaacggaagctagaaacacaccggctttggcatttcaggcgagtcgagggtggattatcagggcatttagaagaaggggaagggaagaaaaagagcgctggagaccgggagaccacacagggagacagtgcacagagctgccncagccatctgccgcgacttcatatgccgccccggaaactgacagacactgcttcagcaaggcccagcccgtcagatgagtcaatcaatcaaaaaaattcttatgaaacttaatcatagagggtcatgttagggagtggggaacagattaaattaccacagtattagatacgggaaatgatttctgtcaaaaccatctttactgcaattataatatgttaattatgtatttcattaagtaagtggattagagtctgcacagatgaaatcatgtggaggctttgaatcattcgccgagcacggtgggaggacttctgtgaatggatctcgtttaatttggaaaacttttgcatgcaaaatgtgatttttttccccttcttttgtgaccctggccctcagcctcagtggagaaaacgcccgggttgctgagaggagaatctgctgactgcctcctccatgctctgaagtcagcccgtgaggcccgtgtgctgggagccagtcccgggctctttctgtcttgcttctttcagcttgcagtgggcaaagcgatgctgatggcctgcaagggggatgggcacctctgggtgcctgctcatcttctagcacaattaggcaaagtcttcatgaggttcaaaaccaaaggacaaccagtgcatcaagaagacagccagggtaccatatcctggtgcatccacgtgtcttctggccacatcgcatgacatgcatctgcccttttcatttggcctttggggataccctgcccactgggaagacagctttaagaagctcagtggagtcccttgcaagggagatggctgccccactacgggcaggatggcccacagcgcacggggcagacacaatcagattttttgcagcacatatttcaggccagctcttcaatcctctctgccattgggccctgctgtttggtaaaagggctatttagccacctggtttccaggtatctttttttgtagttctgaagcaaggaatgggcgttgggcacacctgtaccaccgaagtccccttgggccaccatggtgtggtctgtccctccatagatggaccctagtatcttgtccctgctcatcctcagaatctaagctggacatcaggagcctgcccatctcagcttcagttcaaggcaacagnggccaccaaggagaagaccttccatatctctgcaactcttctattcttcttggcttctgaagatcttctgggatgtaaggggcagttgagtcataaacgaaataagagttaatagttattcttcagaaagaggaggtatccagtgcacatacatttcctgggtccctaagtattccattatcagtaataaccacagggaagttttgacgaagaggagaaaagagaggaggcaggcggacngngcctgcttggagtgcatggcagtgtaagtgacgggaaaaggttggctgatttgatgaaaaccccatcagcctctctagggagatattactttcctcattattccactgattggccttatttcatctgaagaatgctgtacattctttacaggcctggcaagcttctttaacaatatccagaaaaaaaaatctatcacctccttaatagaaacaacaaagaaattaacatgagccatcttcttccagggatcagtagagagacctggcctgatcccctttcttctgacctagccacccagtcttcaacccccaaaattatcaaagaaattgtttaaacgttgtacacataggatggttgagggaggagcttcttctactatatgacagcagctgaggatgtttcataaattccataaggagaacaaaggctcaagtctggatcccagcatccccctttgcacagaaacaaaatctcgatgtgattggatggtncaggaagaactcagttttcagggagagtctgtctcgatgcaagagaatcagtttcgtccctgatgaaacatagggcttctcttcctagcacaacaacagagagggaagaacaaaaatacactcgtgaaattcaggctgagactggcgttatcaatggcctggagcttgcaataactattaattaagtgcattttttcattattctttagcaaagaggtaagatttaatgatgtaagctaacaatggatgataatttaaagtggtgacaatagtttaattattcacacacacacaaaagttaactccataacttatttctttgtgagaacaagttcatttaaaatattttgaactgtgcatacaattatcacttaaactctttccttcatggctttgtagagacaaagagtcaattctccctgtaaatttctcactagacagttctacagatgaagaattctgcttaaaaaaaaaagaaaaagaaaagaaaaaaaatcgcaccattgggttttgcctagaatgtcctaggtctcaggaatgggatggatggttccatattactgtgtctttccattccaataagcaggaaccaaactcatgcaataacatgtgtatatgtgagcgtgtgtgtgtgtgtgtgtgtgtgcatgtttatgtggaaggtgcttctgttttttgtcagcccatcccagaaagctcgtttttccttttcgctgactattcagagttggagatgctatatgtgnaaggggtgaggtgggaggattgccgcttcaggggtgattagaaaagaaaggaagaagaataaataaatactgtaagtggaagacatcctcttgagttcacagccttttcatggctttgagacaatataattgtaacatgactgagtattcaagcagctggacctcaccaaggatgttcaggagtgccagagctcnagggccctgggaagagccagtgtcattgcagggagctagagttcctgattagggatggagtagaaccttcacgattatcctgtcatggaaaaatgcagaatttaaccatgtccagtgcccagtccattcctgatcctaacttcctctgtgcttccttgctgtgaaacacctccactgttaacagcagctccagggaccttacagaacccaatggagaggcatctgaggcaccatcaccagacccatgccttgaatggaagcaactcaaagtcccaatggacccaaagtcatgaagccatgattaggaccacacagtgcaagtattcagatggatattttataatatcaaatatataaatggatttgtcaagccaacaaatacttgaatattgttaagcatttgaataatccaatataacaacttcatttaggctgtcttttagatgactcatttctcagtgtaattatctcactggatggtttcatggatcaggaactctggttagaatcatactaatcctgccattggagttcagctgtttactacggttgggtgttgcataaagttgatgataccgtgtgacataagatactgatgtataaaggccagttttctaccatgattactgttcgtcaaaaagatgtttaggaaaaaatataacatggcactcaggattcctactaaaaaatgtacattctagactataagtcttctaaactctggtgaaacattctacaaaagagaaagactatgtgtaaaattaattccctctccttcatcttacttatagagaaaggagtggaaggacagtcatttaagctgagaataaaatggattgcagttttggcagaataagaaactctatgatcatcagatggtgatgtctgattggtgtttgataaatatcatccatagtttgttgaacagacatgttctcactatttaaaggtactccacataccacgtagttgctatcacttgacttcttgttttattttgtattatcataaattaaactttttgttgttgttaacttatttattgtcttccagagcaagagcnttgtccttcttgtttgctatggtaatgcgggcctaaaacagtgcctggctcagagngagtatctaataaatatttgttgagtaaatgactaaatatgtgcttaatatggttgttgactgttaggtaattttccctcccttagtctagtaagtgtgttgacataattcatttaataaagagattac

SEQ ID NO: 228172 - DNA, 505 bp, Homo sapiens
tgtgaatcttatactctagtatgggatgaggggacagataatacacaaagtatacaaattagatgtgtgtgttagaaagcaagtcctatggcaaaatagagctgcatacgtgagattgggattgtagggacaggggaattttaagtagggtggacagagcagggtaggccttactgaggagtcttttgaatgaagacctgatggaagcaagaaagagagtcccacggaaaatgaggggaaaagcattctagtccgagggagatgcagtgcaaaggctctgaggtacacacctacaaaagaaagcaaggaaggctgggctcagtgtctcacacctgtaattccagcactttgggaggccaaggtgggcggatcacttgaggtcaggagtttaagaccagcctggccaacatggtgaaaccctgtctctactaaaattacaaaatttagctgggcgtgttgggaggcaccagtaatcccagctattcagtctcaaaaaaaaaaaaaa

SEQ ID NO: 228173 - DNA, 370 bp, Homo sapiens
tttggctttactggctaaaatagccagttcctgcttattaatactcaaacacatcaattattcatctgcacttgggtatattacacacgccgaatcatccatcctcctgccctctttgttaaaggaggctttgaggccagcagccccacggggaaggcgtatagttgggactcagggctgactcagagggccagccctggccagctcatgtctgaggtcacatccgagggagaggaggcagcagagctgagtgaacagaatcttgttctaacaacttcccaggctccacactgccttgccatgctgagctgtccatgtgaggtcagggatttgtcaagatgaagggctagacctttgagggttttgctct

SEQ ID NO: 228174 - DNA, 560 bp, Homo sapiens
actagaagcccagggagatctgaggaaagggagggcttttctgatctctcccaattagaggattaggcaattggcagcgcagggcggtaactctgggcggggctgggcgccagggctggacagcacagtccctctgagctgcacggagacctcgcaggcccccggaactgtcgcccttccaggatgtggctccctgctcttgtcctggccactctcgctgcttccgcggcttgggggcatccgtcctcgccacctgtggtggacaccgtgcatggcaaagtgctggggaagttcgtcagcttagaaggatttgcacagcctgtggccattttcctgggaatcccttttgccaagccgcctcttggacccctgaggtttactccaccgcagcctgcagaaccatggagctttgtgaagaatgccacctcgtaccctcctatgtgcacccaagatcccaaggcggggcagttactctcagagctatttacaaaccgaaaggagaacattcctctcaagctttctgaagactgtctttacctcaatatttacactcctgctga

SEQ ID NO: 228175 - DNA, 357 bp, Homo sapiens
gtgagagattggtaacatggagacaatttatgaggctctcttgggaacccaagtgaaagctgttgggggtcaagggggaacaggaatagagagaaagggaaggatatcagacggtgttgagatgtgattatgggacttggaaactccctgtcctgcacagaaacttctccacgttcttacccttttcaccctccttagccccacctgtctttaactaaacttggctttcccttgacatgcatgacatgcattctgtgtttgagcagtggctgcctgctctttctttttttttttttttttttgagatggagtctcacggttatttggtcccgggtttcggacctcaatttcgtattt

SEQ ID NO: 228176 - DNA, 752 bp, Homo sapiens
gtgagagattggtaacatggagacaatttatgaggctctcttgggaacccaagtgaaagctgttgggggtcaagggggaacaggaatagagagaaagggaaggatatcagacggtgttgagatgtgattatgggacttggaaactccctgtcctgcacagaaacttctccacgttcttacccttttcaccctccttagccccacctgtctttaactaaacttggctttcccttgacatgcatgacatgcattctgtgtttgagcagtggctgcctgctctttctttttttttttttttttttgagatggagtctcactctgtcacccagactggagtgcaatagtgcaatctcagctcactgcaacctccgcctcctgggttcaagcgattctcctgcctcagcctcccgagtagctgggattacaggcacatgtcaccatgcccggctaatttttgtatttttagtagagatgggatttcatcatattggtcaggctggtcttgaactcctgacctcatgatctgcccacctcgacctcccaaagtgctgggattacaggcgtgagccaccacgcccggcctggctgcctgctccttctgcacatgcttccctgaaatattttgggggccagggttgctactcttctatatctccaataatgtttcccattcattgtttctcatgcctgcttctgaagttctagacatgtgctttcaggctcacatctaactataatgcactgttatcctc

SEQ ID NO: 228177 - DNA, 509 bp, Homo sapiens
cagttaactcatctgtaaaatgagatgatcactcctcagaagtcatacgcaccaaaagagacatggtttgctgtggtaaatgtgtaagtcatttctatgtacaacataccttatccttattcctgaccccatttcattttcctttcctaaatttctatcttttcttattcagcttttaatctagttgtaactaaacatatattatgtatccctgcaatctacctgaagtcctttctgaaaccgcagaaggccatcaaatcaacaggggaaatgacacatcatatagatcgtgtaccatcacatccatagccagcctgctgtgaggtgccctataaatattatttttcccttcaggcaccgtgtttattttgatacctgggccagtcactgagctccagttctgttcttcgagcatcacagctgcctttatggaataataggctctctaagtcccacggttttatggtttatctaacaacaaaataaatgataaaaatattgtaactagt

SEQ ID NO: 228178 - DNA, 182 bp, Homo sapiens
gcctctcccatatagctccatctggccaactctctctgtctgagtgactttcactgactctctttctctcgctatctcactgtcttttctatcttgctgtctcttgtggtctctgcttctctctatgatgatctgtctctggctctgtatgtatctccctcacttctttctctgtcccttgc

SEQ ID NO: 228179 - DNA, 208 bp, Homo sapiens
tactcaaccccagggggccttggcttgtaggatttgtacattcgctgaggcaaaaatgggactgtcgctgcagggagctggtggccagggccttcaaagcacctttggcccactgtgccctgcagccactatgttgtgccctgttgatctttaaatttctctaaatgttggaatttaattaaagtccacaaatatttgtaagtatcca

SEQ ID NO: 228180 - DNA, 233 bp, Homo sapiens
cagagagaaatacaagcgtgccataaaaatgccagaaaaatttaaaaccagagtaaaagtcacactgagagatactttggtaagtctgaaaagaaataaacaacactgggctgggcatggtggctcatgcctgtaatcccagcactttgagaggctgaggcaggtggatcacctgaggtcaggagttcaaggccagcctgagcaacatggtgaaaccctgtctctactaaaaa

SEQ ID NO: 228181 - DNA, 993 bp, Homo sapiens
ctcatcctcactaacttatcttttaagattaaaaataatgtaaccaagtgggaagaaaaagagcaaatatgaacaaattgtcattgttttagaatctgcttcttttcctttccggtatttctgtgcaaggagagaatgatctctgaccttgtgaaaggcaaataccatgtgtattcatggttgttattcatttggcaacgacttgaaactcatgacactccctgctgaagatcctccacctattcttaacagctgggctccccagctcctggatcaccaaccagtaccagtctgtggcctgttaggaactgggcttgtacagcaggagctgagcagctggagagtgagcaaagtttcatctgtattgacagctgctccccatcgctcacatacattaccacctgagctcaacctcctgtcagatcagcagtggcattagattctcataggagcaagaaccctattgtgaactgcatgtgtgagggatctaggttgcgcactccttatgagaatctaatgcctgatgatcggtcactgtctcccatcacccccacatgggactgtctagttgcgggaaaacaagctcagggctcccactgattctaccttataatgaattgtataatccttttgttatatattacaatgtaataataatagaaataaagtgcacaataaatgtaatgcgcttgaatcatcccaaaaccatcccctgcttcactggtccatgtcttccacaaaaccggtccctggtgccaaaaaggttggggaccactgtttaccaggatgcatagcatgggtttatgaattccctatctttgcagcacatcctttatttctggcttgcatgggacttgaaagcctaaaacaactaaatgctaagaaaaattatttttaaaatgatgacaaaaatattttctatttcagatgtatagatctgcaatccagaaactatgaatttttttcagttgagtagtctgtttgccaaaaaat

SEQ ID NO: 228182 - DNA, 135 bp, Homo sapiens
atggtatgcttgtagcttttccttagatgaaaatttcagagtttgttcagtctgataacactcaagcataactgaacacctcatttagttataacctcaaatacttctttatcttgaagatgatcaagggcaaat

SEQ ID NO: 228183 - DNA, 563 bp, Homo sapiens
ataattatccttgttcagtttcattgagatgatttcggtgcctcataccaattttccaagctcagaagaatcccagaagcatttctcagtctcaggcttcctggggcaaggcagatattcctttgggggttacaacagcagcacagtactgacgtttcaccaagttctctttcaagtagtccccctggaaggctgtaatataaacttactcaaacaattaaggcatagttcatgactattttgcttcttgtctttatattttcttcactacctccatatatcattgcacctccttgaaaagcatgttctgtggctgtccaattatcactgaattttactcatatttacaattcgtatgcctggaaatgtaattttccgtaaacatttatgttcgttatggtttttatgccgcaggttttggaccagacagtaaacattaaaacagttgattttataacagatatggaaactgtcaagctgtttttcatttgtttattttttgagatggagtttcccttgtcacccaggctggagtgcagtggcacaatatcagctcattgcaa

SEQ ID NO: 228184 - DNA, 375 bp, Homo sapiens
cactagggtgctctgtttatttgttcaaattctagttgagttcttgactgatgtcttatgatcatgagtcaagaaatgaagaaattccacattctcatgttcatattatttgtttataaagttgaagttggaatgtaggctttatagttaaactgctataaagtttatatagttaaatacacaattagatttatatagtttatatagttgaacctacctccaactgagtgacttgcaaagtacttaagtcttctgtgattaagatttaccaaatttgtaaaacaagaataacagtagtatatacctactttataaatgagttaatactttctagaacatagtatttgccagaatgttacctgtatacagcacatg

SEQ ID NO: 228185 - DNA, 514 bp, Homo sapiens
ataatagtagtcatttattgaatattatgtgccaggcacttgatataggtgctttccttttatcaatcacttaattcttcaaaacgaccttatgagataaggttgatgattcttgtcctccattatggcataaggaagttaaacaacataccccaagttaaacagatgtaaagtgatataccatactgtgataaagacacaggcaggttggtgtcagagatcatcttcttaatcacggtgatacactaacaagttataaactaacaagttaacttaaagtggtgataatactgaactgctgtgaggagaactatgatgacactgttacctataacctgtgatggtttgtacttgactagggttttgtcttatagcaagacctccattctttccgtaagtggtgatgtctcttaaatgggcctgccacggccttccttggtcctccctgtggaaattctccccttttcccctctccttcccttctgctgacctgttctcagtggtgtgctggtta

SEQ ID NO: 228186 - DNA, 372 bp, Homo sapiens
acataagattttatgagactaaggggaagcaaaccaaaaaattgtttatctccagagaggtactattttaaagaaattaaaaatgagggccaggtgcagtggctcatgcctgatatccagcactttgggaggccaaggcaggtggatcacccgaggtcaggagttcaagaccagcctggccaacgtggtgaaacctcatctctactaaaaataaaaaaaaattagctaggcgtggtggcaggtgcctgtaatccaagccactcaagaggctgaggtgagaggatcacttgaacccggggggcacaggttgtagtgcaccgagatgatggcattgcattccagcctgggcgacagagtaactccatctcaaaa

SEQ ID NO: 228187 - DNA, 444 bp, Homo sapiens
ccaacgtcaatatgggagggaactagcaagagcacggatgctggaaagtctgacttactgggacattaatggaaacatctatcacacatgactttatgattccactgctaattttgatgttggttattggtttagaggagggattctttatcatgccacgtgagtactttcttgtttaactcaggaatgaaaacgtggttaccatctttacctgtaattctgtgaaaacactgactacctcagtattaaaatgactgttaatctaggtgtgtttatgaatttcctttgtccatgcttgccagcagttattacaatgtctgagtttccctgtgggaggactgcctggggccaggagtttgaaaccagcccgggcaacatggtgagacctcatctctacagcaaataaaaataaaataaataaaatgtctgagtttccacattgcc

SEQ ID NO: 228188 - DNA, 2507 bp, Homo sapiens
  misc_feature (1051)..(1051): n is a, c, g, or t
  misc_feature (1415)..(1415): n is a, c, g, or t
cttataatgagtttatcaggacataaccccatcatcagtcaaggtgctcccatagtatggaatggctggaagtggggggtagttaaaaagagccatgtgggctgggcgcgatggctcacgcctataatcccagcactttgggaggccgaggtgggcggatcatctgaggtcgggagttcgagaccaggctcaccaacatggagaaaccccgtctctactaaaaatacaaaaaaaaaaaaaattagctgggcatggtggcgcatgcctgtaattccagctacccagctacccagctacccggctgaggcaggagaactgcttgaacctgggaggcagaggctgcggtgagccaagatcgcgccattgcactccagcctgggcaacgagcaaaactccgtctgaaaaaaaaaaaaaaaaaaaagaaaaaaaaagccatgtgtgcgaagctaaaggagttgggctttatctagagtgcagtgggtgaaggtttgtttgtttgaggcagggtcttgctctgttgcctaggctagaatgcagtggcatgattatggctcactgcagccttgatcttctgggcttaaacaattctcccacctcagcctcctgagtagctgggactacaggtgtgcgccatcatgcctggctaattttttgatttgtcgtagagatgaggtctccctatgttgcccaggctggtctcgaactcctgagcttaagcaatcctcccaccttggcctcctaaagtgctgggattacagatgtgagccacagcacctgactgccctgaaggttttaagcaggaaaataatgtgatcaaatttggcatctagagagatcactgtgtctgcaggatggagtatgtcctggaatgaagaggtcagaagcggggagactagttggactagtctgcacaagaaatttggtgagatgcgacagtggcttggaccaaggaatgacaaaagagtatgaggacaggagaacagaaggagagggggaacaagctaatgctaaaatttatatagaagggggcagccaagatggctgaataganacagctccactctgcagctcccaccaagaaggatgaaaatggcaagaattctgcatcttcaattgaagtaccaagattctctcattgggactgacgaggcagttggcatgacccatggagagtggggaaaagcagggtggagtgagggtctacctgggagctgcatagggcaaagggagctccctcccccaggcaagggaggcagtgagggactatgctactcctccctgaaaaccatgcttttcccacagatccttgtaacctgtggataaggaggtcccctcatgagcccacgccaccagggccttgggtgccaagcacagagctgtgcagaatcatggcagctgctcaggtgggcggctgntcgagtaggcactgagacacgggagtttttgcatactgtggctctgggaactcaagtgaggcaggagatccatccactccatgggaagggggctgaagccagggaccaaagtggccgccctcagtgggccccaactccctataagctaaaatgactggcttggaatacccaccagttcagcaggctggagactgccctaaagaccaagttccgggcggagaggggtgaccaccatcactgtggctccagtcagctgttttcccctgctgcaggtgccagtaagactgggcattttggacagggagcaattccccacagtgcagcacagtggctgggatagtttgtggccagactgcttctttaagcaggaccccaatccactcctcctcaccaggcaaggcctccctgtgggaattgcagcatccccagccaggtgtttatggacagaactctgatatccctgagaggagcccctaggaggaggggtgcctgcagtatggtggatcagcagtcttaatgttttctgcctgctggctctggtgagtcagggcagcccggatgagggggattccccctaatgtagcacacctgctctgccaaggggcagccagactgcttatttaagcaagaccctgatcccgttcctcctgactgagtgagatgtcccaatagagttcgccagacacctcatacaggagtgttccagctggcatcaggttggtgcccctctgggtcagagctcccagaggaaggagcaggctgccatctttgttgttcggcagcgtccactggtgataattccaggagtgggaaggacccagggaaatagcgtctggagtagatccccagcaaatggcagcagccctacagaagagggacctgactgtgaaaagacaaatagaaagcaagagcaacaacaacatcaatgaaaaagaccccacaaaaaccccatttaaaggtcagcagcaggctgggcacggtggcttacacctataatcccagccagcactttgggaggccgaggcaggcggatcacctgcggtcaggagttcgagaccagcctggccaatatggtgaaaccctgtctctatt

SEQ ID NO: 228189 - DNA, 517 bp, Homo sapiens
aaaggcctagaaagaattagataaaaatgatagcaggagttctttaaagatatcagaattcttggtaatttttcaaagctttcaagaaagtccttcccacctttttcacacggagaagaaaaaaaaaatcagtaaaaatataacaaacctctcatacatcattggtcataagccagaagcgattctttaaattggattcagccaatgctgagtttataatcctagaaaatgtttgactctctttctccatccaacagatatgatttaaaataacagtttcagcaactcttctcatcacgcctcttaagacaatttctcccaaacttgatccagggagacctcctctggagatgagagagaagttcagtttggagttcaaaccttaagcagtgtctgaacgactccaataaagaaaaactgtcttttaaaataccttagttagcgtatctctttgcatctagcttacgccagccaagctagaggcaacataatcagctacactttatgaaataatgag

SEQ ID NO: 228190 - DNA, 299 bp, Homo sapiens
cagaatgaataccagagccctttaagtaaaaacttcctttaatctgttctctgcagcccctatttggtataccaagtgttctagatacctgaaatacacctgtacgtggctacttaaggtaaatttctttctaccgtagaacagagggcgagtcagctttaggcttcatcagcccagccctttcatttctctaaggaaaggtatcaaggtgggagctgacagtctaatgttacttcctaaatcagaattcagtttgtatcctttaataaacagcttgtcttgctgcatctcctcaatga

SEQ ID NO: 228191 - DNA, 250 bp, Homo sapiens
aacagcctctcccagaccaggaagctgtttttattttaacttcatgcaaatgttgctaatacaagatatattcatttttttaacttacccttttttacaaaaaagatggttctgaaattgaactgtatttaatgtctttaatggtgaaaaaaggaaaagtcatagatgacatgtcattattttgtaaaataataagatcatggtctggtactcactttggcagcacatataataaaattggaaagatcat

SEQ ID NO: 228192 - DNA, 361 bp, Homo sapiens
tggcacctggtatggcagtgagaatgctgcacacacgtgcacaccaggcctgtctcctttccctgtggtgcttggctggcgtacatatctctccttcccctgcactgggcaggtgggtgggcatggcgtggatctcccagccctggggcgttggctgtgatggactctaggttgccctacttgaccttctatgctcttgttcttgccttgatagctgggcagagaccccaaggcccatggggatgatggaagctgttgggtaaaagggaagtgaatcacaatgactgtttggaaaaagccttcctttgatccacattggattgtgatgtgaggaagaaataaacctttattatattccact

SEQ ID NO: 228193 - DNA, 414 bp, Homo sapiens
ggttatataaatctttacgtaacaattgctagaaccacatgaaactgccgaaattcagttggcccacaagaaagagcaatttcataaggttttcagggtgatgaggtaggaagaattataataaactaagcacactggctcacacctgtaatcccggtactttgggagaccaaggcaggaggatcatttgagcccaggagttggagaccagcctgggcaacatagcgagaccctatgtctaaaagaaaattttttttaattagctgggtgaggtttgtgcacctgtagtccccgctatttgggaggctgaggtgaaagatagatcacttgagcccagtaggttgaggctacagtgagctgtgatcacaccactgcactgtagtcttgggccacagagtgagaccctgtctcaaa

SEQ ID NO: 228194 - DNA, 456 bp, Homo sapiens
caggccagcccttgcctatcaactaagaaccaaaaatgagcttgtgctcacacacaggcatgctcccagctttagagagaaagactggttctcaggggtcataaactcagatggctgcagggccaggcttctaatgtaatgaatgaagtggctagaagggagcttggaggaatcagagagctagaatcttgccctggggcagtagacacttggctaaggggactgctgccaggctggaatgtgaaaattgcccccatcatctgcaggggagcattaagacatgtaaaagaactcagaaatctagttgagtcctgacactttacttccaaatggaatttgaccgggagaagctcaagatgtgctccagatcaccctgggggtgagggaggcagataagtcagcagagacaaagctaaaaccacccctctatgcccccacttttttccatccagtgac

SEQ ID NO: 228195 - DNA, 423 bp, Homo sapiens
agaccttctcagagcacaagaaaaagttttcagataaaagacccttctcctcacaaacaagcatccagaaaaatgaatgaaaattactccaaaaagctacattgttaggacatttcagaacagtggatacaaaaagaggattctattaacttgggccaggaaggagatgttctacaggtagtttgaaatcagaatagcattggacttcttttttaaattgcattatttatttattttttatttgtttgttttctgagacagagttttgctctgtaacccaggctggagtgcagtggtgagatcttgacttactgcatcctcccccctcccaggttctagcagttctcctgcctcagcctactgagtagctgagactacaggcatgtgccaccacacctggctattttttttttcttgtatttt

SEQ ID NO: 228196 - DNA, 441 bp, Homo sapiens
ccaaaggtataagcaacccaagtgtccatttatagacaaataaataaaccaaatgtggtctatacatacaatggagtattattcacccttaaaaaggaaggaaattttgacacatgctacagcatacataaaccttgaggatattatattatgctacatgaaagaagccaatcacaaagacaaatactatatgagtccacttatgtgaaatatctagaatagtcacattcatagaaacctaaagttagaaagtagaatggtggttgtcaggggctagaaggaggggaatacggagagttttgtaataggtatagagttgtagttttgtaagatgaaaacttctgtaggttggttgcacaagaatgtgaccacacttaacatcactgaaatgtacacttaaagatgataaattttaccttatgtgtattttaccacaactaa

SEQ ID NO: 228197 - DNA, 479 bp, Homo sapiens
tgtaatgggaactggactgtgggggtaggtgtggagctccccgcttggggctcagctggttcccaggagagctagcgtgggaagcggcctggaaacgggtttccccaggtgtcagcgccagagctggtttcccatgacctcacctggtgggtggagcccctcccctccacccctcctttctagagcaccatgctcagcactggagctcaaggtcagtccccagccttctaacttttctgctctgttccttctggcagttcacagggccctggggctcaggttaggggaccatccccccctccgacctctattcacagcctgaacataaagggaacccatacagcctaaacctcaatcactggccaaagttcttagacttgggttggacccagtcttcagccttggcacctaaggagctagtgaaggtcagggtgctgcttgtgaacaatttaaatagaggtttatccccaagtatcctg

SEQ ID NO: 228198 - DNA, 469 bp, Homo sapiens
tgagggctgcagcatccctgcgggggctcagaccggctggaccgtagcgtagtttctggccccggctagctggcgaccgtgggcctcagtaccctgtctgcggggtggggcgatgcgaacctacaccctgggatgggggtgcccgcccagggcagtgctgtctgtgatcttgccatgcccagggcacccactccatgacgctggctgtcggtgctttccaggggcacagtggagtgtgtgaggaaagacccctgcagacggcctccggcgggcttcgggcagctctccctggttggggtcccagggtcttcagggaagccccaagtcctggtcctgttcatctttgtgtctctagtggacaacatgtaagaaatgctacttaagctgacctgttagcatatgtaacataatgccgggaaaagagctgtggctgaattgaatgatttcttaaattgattttatattgtgt

SEQ ID NO: 228199 - DNA, 332 bp, Homo sapiens
actgttattattctgaccttaaagataatgaaactgaggctcaaaatgatttagcaacttgcctaatgtcacacagccagcaaaggacagctggaatccatgctactggctgcagagtttatgtttttaacctccatgctgttctgaatatctcttagcaaagctggaaagaatgaagcccaggaatgtaaactgactatataaatcacacaaggccaggcacagtggctcacacctataatcccgacactttgggaggcagaggcaggtggaccactttagcccaggagttcgagaccagcctgggcaacacagtgagaccctgtctccac

SEQ ID NO: 228200 - DNA, 325 bp, Homo sapiens
ccagccagcagacatttgtttttatctggtactaggaacttgactccagggaactatcccatgccccacaactaaatggttctgggagagctaccaatcaccatgtccatttgtggtcatgaggaatggcccaggatgaccatgccaggtttgtccgagctctttactaggactgggcatggtattaaaaaggtgaagaccggccgggcgcagtggcgcatgcctgtaatcccagcactctgggaggccaaggcgggcggatcacgaggtcaggagatcgagaccatcctggctaacacagttaacacagcgaaaccctgtctct

SEQ ID NO: 228201 - DNA, 601 bp, Homo sapiens
ggttttgttttatttctttgaagaatgtcattagtattttgatagagattgcattgaatctgtagattactttgtttaatatggatattttaacagtattgattttccaatccataaacatagaatatccttccatttttttatattctcttcaatttcttttatcagtgatttatagtttttattatagagatctttcaccacttttgtaaaatttatttctaggtatttaattttgtatgtttctattgtaaatgggattacttttttgaattcatgttcagattgttcactgttggcatatagatatgctactgatattgattgattgcttgagatgggatctcactttgtcacccaggctgggttgcagtgacagtcatggctcactgcagccttgagcttctgggctcagtctgcccacctcagtatcctgagtagctgtcactacaggcatgtgccactatgtccggctaatttttgtgttttttatagaggcagggttttaccatgttgcccagctggtctcgaactcctgggttcaagcagtccacctccttatcttcacaaagtgctgggattatagacatgagccatcatg

SEQ ID NO: 228202 - DNA, 492 bp, Homo sapiens
agtagagacaggatttcaccgtgtcggccaggatggtctccatctcctgacctcgtgattcgcccgtctcggcctcccaaagtgctgggactacaggcatgagccaccgcgcctgggcagaaggtagcattctttccagccattctatgcagctctcccttggtttcccctgccaagtgcaaagagacacaggatctccatgcatgaggaaaaccccaggcccttgtttgctctgttctgcttcctgagctggcatttctcagtctgttcttttttactcatcaacaaaagtattcgagccaaattctcttgtaatttcagcccaggtgtgatcaacatcaagttacctttccatttggcccaagaagaagttataacttccttgcataagctcatctgttatcttaatcctttctggaacagggaaaatgtaaataagtattactctatccctctcttaagtttttcaaattacagcaggtggttgggaaa

SEQ ID NO: 228203 - DNA, 414 bp, Homo sapiens
ctcactggggccttcttctgcctcactggctcctgcaggatggcccatctgccagcttggtgagcccacttggagttagaggccgagtgtatgttgaggcctgctttccaggtgatggtgccctcatctgcatgctcatttttgacctgggcccaaatagacaaaccctgagcattgcagaggaatccctgggctggcacttggtggcctgggctctgggctctgctgggccctggtcacctgcaggtttggtccctggaaggtttggccccatctccagtatgtagacctgtcctggggtctgccctaactccgtgggctcctctctgcacatgcttggggtctggagagaggttgggcaggagtttggagctggccaagtactcacgtcaccatagcccactgccttcagag

SEQ ID NO: 228204 - DNA, 606 bp, Homo sapiens
ttgtaaatatactctttatattcttcctctcctggagcagctcaataatttggtgaaagttatggggaaagtttgataattgccagagccctcaggggaagtcccacctattagactgagttttgaattttttggagacaagcaggtaatatgcaggaatgtatctatggcacataacaaaccactccaaaacctagtggcttaaaacaacaacagtcctttatttttgcttaggaatctgttatttggggaggtcttaaaaaggaatcacatctctgttccacattttattgtcaggaatggcttgcctgggcctgggggatccactttcaaaatgtctcattcacatgacggcaccttggggctggctgtaggccaggagctcagctggggatgtgagccttgggcctcagtttctggctgtgtggacttctccatgggctgcagtcttctttacagcgtggtggtcggatttcaatattaaatattccaagagaactgtacgtatattgcattaccttttaggacctagcctcaaaagccatatagcattattttcattgtagtcacaattctgcccagcatcaaagggaggaaacatgggct

SEQ ID NO: 228205 - DNA, 367 bp, Homo sapiens
agctagatgaaaaagacataatatagaggaacaaagataaaaattacagcagttttttttttcagaaactttctaggaaaagtacattttctatgattccatttatataaaatactaggaaaaacaaactaatgtgggatgacaaaagaagctgtagttgcctggaggtaggacttacagagaggaacaaaagggaaatattgcaaaggtacacaaggaaacttttagaggtgatggatatattcctgatcttgaatgtggtgataattcaatgggtgtattcctatggtaaaacttataaaattgcatttaagagtgtgcagcttattgtattatggttatttctaaataaagcttttaaaaaata

SEQ ID NO: 228206 - DNA, 409 bp, Homo sapiens
ccaaataagaacactgtgtccaagtccacagttggcattccagaattctttaccataaagcactgatggagtgattttgacatagaaaatatcgacattaggagttaccaacattctgccttatgatattaactaaacaaacttaaggatacccagtttttaaaatttagtatagtatcttcaaaggtgaataggctgtgttgaagatataatttgctgaccacatatttctacgtagagccagttctgcgtgttttctttttatgtatgattttatagctttgctttccttttcatgaagaagatatcgaagcaagtcaagtaaaaagaaaatggctttacttctatcttaataaatagcattataattagtaacaaaaattttcttaaaaattgattttctagcacc

SEQ ID NO: 228207 - DNA, 360 bp, Homo sapiens
  misc_feature (262)..(262): n is a, c, g, or t
  misc_feature (326)..(326): n is a, c, g, or t
tcttgtaccagacctcaatattcacatatatacgtgcatagcaaaaacaaaaatttcaagaaacaatgcttgtccatactatgtgatactctctattctacccctttttcccccaaagtgctgttggagacctaccaaattggtttcatgacccattcgtggtcatgatctgcagtttaaaaaacaatggactaaagcatgcagtaaagaatgtggctttgcaattagacaggcccaataccaccttcctgctcatggccgnctccatctatctccacgaccagaacccggatgccggcctgcgtgcgctgcaccagggggacagnctggagtgcacagccatgacagtgcagatcctgc

SEQ ID NO: 228208 - DNA, 504 bp, Homo sapiens
  misc_feature (387)..(387): n is a, c, g, or t
ggcatctttcatctgtttgatgtttcatgcttttaaaaatttaaatcacatcttattaaacactttgagactaagcttttgtattcgttcccaaagcttctcaacatcaaactgattggcaaataagcctttggtcctctcctctaatctcgtttctgttacagcctttgtcacccttgaagacatttcagtttctttaagtttaaattgcctcatctttgaaatgaggttgataacatttacccagcttcccttaccagggtaattgggaagattaaattagaaatgtattttataatattttatgaactaggaatcactacataggaccgtatagcatttagtttttatgacttatattttaagcacatattgtggtgctatttngaagttttctttttttaaaagttgatttttagttccttgaagatctatatctttgtttctgccatatacatgtatatatgtctagcacatttctgcatcataagccatcggatattt

SEQ ID NO: 228209 - DNA, 291 bp, Homo sapiens
caggcacctgtaatcccagctacttgggaggctgaggcaggagaattgcttgaacctgggaggcggaggttgcagtgagccgagatcacgccattgccctccagcctgggtgacaaaataaatgaatgaatgaataaataaataaatacataaataatatatttgagtatactcttgttttcggtgcctagcctgtattgggtgctttgcttcaattgtagaatgaattctaccctgccttagtttcccaaaccagactctgagacaagcattggggtgcaagtagtttac

SEQ ID NO: 228210 - DNA, 601 bp, Homo sapiens
ggcgcagtctcggctcactgcaaccttcgcctcctaggttcacgccattctcctgtctcagcctcccgtctcagctgggactacaggtgcctgccaccatgcccggctgattttttatatctttagtagagacagggtttcaccgtgttagccaggatggtctcgatctcctgacttcgtgatccgcctgccttggcctcccaaagtgctgggattacgggtttgagccactgcgcccggcctgtttttgtttttcatgcaattgaattcatattgcttatactgtttccttttttctacctagtttatttgcaccacttcccatgttgttttttggaagcacttttaattgctacatcatgggacatcacagggatgtaccatagtttactgatcccgtccctcggggctgcacacctgggcgacagagcgagactcatctcaaaaaaaaaaaaaaaaaaaaaatcagccgggtatggtggcaggtgcctgtaatcccagctacttgggaggctgaggcaggagaattgcttgaacccgggaggcagaggttgcagtgagccgagatcacgccactgcactccagcctgggggacaagag

SEQ ID NO: 228211 - DNA, 286 bp, Homo sapiens
tgcagatgtgtcatctttgaaaagcatctggtcaaatggtccctcacaagacagggccatggagctctgagtcttttgggaaaagcacttcaccctagaaaaagtgacagtgatctccaggactcatcagtagtggctatgagctcaggctgggtttggctcagccatcctgttacttttctaggcctctgtgaagttatttaatctccccaagcctcagtttcttgttccaccacatgtgaataataatagttcttacctcactgggatgttgggaggattgaaa

SEQ ID NO: 228212 - DNA, 294 bp, Homo sapiens
attttgttgtgtgagtaatgaggagagagttgtgatttgtatttagtgaataataacaaacaaaaggcatttagctttctggaacatggtatgtagtagaacctcatgaaaatactagctgttgataaaactagactgaaaaaagctttcaaagtcaacaacagtatgaggcagtgaaggacgtagaggagaagctgctgctgcagcctgtagctcctggaagcccgttttgtccatgatttagcaggaactcattacctttccatgaggacactgcccacagaaaccaaggcc

SEQ ID NO: 228213 - DNA, 421 bp, Homo sapiens
acaaaagaaagagatcattacattcttaggctcttcagggatttaaatctggagcctcctgcagctttctgacatttgagccttactctagggtgatttccacggttcccacgtccctttcaagagaacagctatcacttatattcctcagtgtttcttctttgctccagactggttgtgaagccgtaaaaagggtaacgctggagcccagaaatcagctggtgaataccgcgccaggtgccaggtccatcgcggcgaggctgcaggagccctggaggggagcaaaaggagccccgcgcgcaccggacaggctgtgctctttgttaaagaaacaaatacagaaaacgccgcggcggggaatggtggtggtgaagaaatagactgaggcgtttgtatgcattaactgtgcctacaaagccca

SEQ ID NO: 228214 - DNA, 470 bp, Homo sapiens
atcagtaacagtgtagtattatgtaattttattttctgttctgcagtatcactcaaaaaagaaacttgttgattattgagggctgaaataaactcatagaacttccttcggtttttaattgcttgcaatgtactgatgcatttgaaagattagatctcttgagagaactgtgctttttttttttttctttcttcaggctttattcattaaggatactaattttttaaatgtttagaaataagtagattggaatttgtggcaaagtcacaaaatcagcttttattcaacagttttattcaacacattaatttatgtaattaaaagtaacaggcctcacattttttgctcaaattgtcataaaactggctttcataataatacatgcaggattaactaatagagggaaaaaatgcagttaatgttaaatacttatctgaaaataaaagtttcttacctgaaaataaaagtaa

SEQ ID NO: 228215 - DNA, 394 bp, Homo sapiens
gattgtcctcagcattcagctgaggaaaccaggcccacagatgtcatgtagtttgaaggtgatggaaccggagccactgttagcccagtgtgtacattttccagcacaccccattgcctgctgttaataaaagaaatggaaaaaattccacacagatgcatgactagctagagtcattaaagatactgcagagtgtttgctgggatgactgtgggcagtaaagctattggggagtagtcaggataatgttcttttcttggaaggagagtcctgtctttatttacctgacacgtatcttctgttgttgctggctgttctttgttgaatacttcccctatgcagaatactttaattgtagcagctaatttttattgagtatttgctgtatgtcagg

SEQ ID NO: 228216 - DNA, 332 bp, Homo sapiens
atcctgagtttttaaaggtgctaatgtgtggtctacacaatcttggagactgcatttgagcaattcagagatcctgtataggataatcaactcttaaaccccactaacctttcatcagacattcaagcttgagttcttcagatatttctattcacgtaagcgggaaatgtgatattgcagaattcaccttaattttgacttttccaattttaaataacaagtttattaaaaaaaaattatatgaaattcctgggcattcatgatataaataatttactagttttttttgagtccattaaagactgagactgtggaactcaagctatctcccc

SEQ ID NO: 228217 - DNA, 500 bp, Homo sapiens
gaaataaagtgaaacatcctttgctgctctgtagaattgagtgacagcttggttctgtatcactgagcctgctccttgtctctttcccatccacctttgataacctgggactagaccatgatgtctcagcagtcagtctgctgagcactttatggagagtacttcttattaaccactgggatttaattgttggcacctgctaatgggccttctctgagaaggagaggatagatacttctgtcagcagcaccttttaggggtgatctccagccctgaaaacctcaatatatcctgcttctgaggttcaggatgatgaactcagggcctgagaccagccagccatgtgatatatttggaccagggtggtccagaaaggggaacttccttgtctgtgcacaacatctgagcttgttcagggaagttggtttggaccaggccctttttgaatgtcccttggaagtttttgattcagcttgcagagtgggactcttttctatatc

SEQ ID NO: 228218 - DNA, 428 bp, Homo sapiens
ataggagaaaatatttgctaatcatatatctgacagtgggttaatgtctagaatgtaagaagaacttctacaactcaacaacaaaaatcaaataaatgattaaaaaatgagcaaaggggctaggcatggtggctcacacctgtaatcccagcattttgggaagctgaggcgggcagatcacttgaggtcaggagttcgagaccagcctggccaacatggtgaaatcccatctctacaaaaatacaaaaaattagccaggcgtggtggtgggcacctgtaatcccagctactcagaaggctgaggcaggagaattgcttgaacctgggaggcggaggttgcagtgagccgagattgagccattgcactccagcccgggcaaccatgtgagactctgtctcaaaaaaacaaaaaacaaaacaaaacaaaa

SEQ ID NO: 228219 - DNA, 476 bp, Homo sapiens
cagaataaataataactactaaataagctcacaatttaaaaatgtcaaaccacccaagaaaatgagggaaagttaggagacataacgggcaaaatgagtattccaagaatccaagatagcagacaatttgaaagagactagaaaatgattaaagagatgaaaaagactagaaaccattataaaagaataaaatgccatgacaaaagaaggaacagactagaaagagaatcaaataaattttctagaaataaaaattatgatgtgagaattaattaaaaattcaactgatggattaaataccagataagacatagctgaatagaaaattactgatttgggaggagacaaagctgaggaaattctcaggaacatagcatagaaagctaaagagttgggaaatatgaaagaaaaaggtaagagataaaacaaaatatcatgagaaagtccaacatacaccaaatagttggcatggaaaa

SEQ ID NO: 228220 - DNA, 155 bp, Homo sapiens
aattcctttgaagaaatctccgtttgggagtttgcttgattctgcccaagagatgccctaagaaccaattactcaggccaagaagatgcctgggatgtgctggaggcttgattagaagcctcggccatggcttccagctctaagactctatcaaa

SEQ ID NO: 228221 - DNA, 304 bp, Homo sapiens
ttgccaggggctctctggcctttggccagaccaaaggctgcactgtcagcttccctacttttgaggatttgagactcagactgagccactactggctcccttcagcttgcagatggcctatcgtgggacttcaccttgtgatcgtgagtcagttctccttaatacactccctttcatatatacatctatcctattagttttgtccctctacaaaactctaatacatttcttactttaaaaagatgatttctatacttttgtttctgaacaaattaatgttaataaaaatccccatcatcaaaaa

SEQ ID NO: 228222 - DNA, 190 bp, Homo sapiens
accctattggctatctcttctgttccaaaacactggacaaagtttcacatgatctttttgaaatattgtgatgatggctgggcgcagtggctcacatctgtaatcccagcattttgggaggctgaggcaggcagatcacctgaggtcaggagttcaagaccagcctgggcaacatgacaaaaccctgtct

SEQ ID NO: 228223 - DNA, 476 bp, Homo sapiens
agccaacatatcactgttgttactgataaggctggttgaagggcatggctcagtgcaagagccaaatgggtttcctcatatggaacccaagaattagaagcattcacctacctggtcaccggggactccccttctcttcttccccagaaagaggagaaggggaggagcagaactgagcaagccccgctgattgtccccaaatttactaaatttactatttttttttttagccagaaggattgcttgagctcaggagtttaagaccagcctgggcaacatagtgagaccctgtctacaaaaaaaaaaaaaaaaaaacccaggtgtagtgactcatacctgtaatgccaactactcaggaggctgagatgagaggatcacttgagcccaggggttggagattgcactgagccatgatcgcaccattgtactccagtgtgggcaaacagagcaagatcccatctcttttaaaaaaaaaa

SEQ ID NO: 228224 - DNA, 4457 bp, Homo sapiens
  misc_feature (2062)..(2062): n is a, c, g, or t
  misc_feature (3153)..(3153): n is a, c, g, or t
  misc_feature (4055)..(4055): n is a, c, g, or t
  misc_feature (4131)..(4131): n is a, c, g, or t
cagcaccaggctgtggcaggttgggttttgctctgtgctgtgatttctgttggagttggaaagttggctgtgagtcggcccagatgtgaagcggaaacggggaggagggaggtgagtgggcctggctgggtggatggggatctgctcgcctgcacggtttcctctttggtaaagtggggcctgcactcgccccatctagacaggcatgtggggactgaggtgattgattcccagcgtggaggagcatctcgctcagtgccaggcggaccatggcctggaggtggccggcattttcccttctcctgaggggatttattgatcttgtgctgcaggtggtgtggcctgagggcaggtgtggcttgcagagctcatcactggggcaggtgcagggctctggggtgctgagctgtcactggcgaagggcctcaggtcccccccaacagctcccacctgctcagccacagcgtggatgcgtcccgggctccccggccccgggggataccataagcacagaggtggcctctttaatcaggggcttcccagggagggtctgaggctgggctgcgggattactccttccttgggaagcaggcaggggtggccaggcacagtggctcacgccagtgatctcagccccttgagaggctaaggcggatggatcgcttgagtccaggagttcaagaccagcctaggcaacatagtgagctcccgtctctacaaaaaatacaacaacaacaaccaaaaattaactggtggtgaaaaaattataaaaaattatggcagtgagtgcccgtggtcccagctactcaggaggctgaggcaggaggatcccttgagctaggaggtcgaggctgaagtgtgagccatgatcctgccactgcactctagcctgagcagcagagcgagaacctgtctctaaaaatggaagagaagcaagcggggggacctgtgtggtgaccctggggttgtgccccgccgagcaaaaccaagatgggtcagcagtccctggacttggagcatccacgtggctctgctaggcagtggaggggccccgtggtggagcagcgctggcccgggaagcgtgtgtcactaggcttgtgatcagacggctgcctgcatccctgagagttgctgaatttagggagttgtggggcagaaagagcggtggcttcacccacagagtccagggttcgagacccggccgatccacccacagagtccagggttcgagccccagccgatccacccactagctctgtggcgtgagacactgctgtagaatcagtcataatcatctgagccacgatctcacccagggcgatctaatcttaacccaaagggacactgggtgatgtctgggcacatctgtggttgtcataacttgggggagctcctggcagggaggggcggcggccagggatgccgctcagcaccttgcagtgcccctgacggccccaccccagagaacgatccaaccccgatgtccacagagccaggggttagaggcctggttttctgggccctggttttctcatctgtaaagtggagacagggtttttgtcccaggcagatgaaaagttcaagttcctagttgggtgttaaccctggtggcaggaagtgacgatggtggctaagggccccaggatgggctggggaagttcaggcctttctggtcactgcagcgtgggtgggactcaagtcctcctgccacctgtgcccaggctgccctgagcagtgtcccccagccggtcctcaccaggggctcccttgtgacaaaccattgaccctggaccttcttatggtgcagactctgtcgtcactgcgttcacagtgggcaccgtgttgtgttgtgttgtgtttttgagacggagtcttgctctctcacccaggctggagtacagaggcccgaccttggctcactgcaacctctgcctcccaggttcaagcgattctcctgcctcagcctcccaagtagccggaatttcaggcatgcaccatcacgcctgtaatcccaacactttgggaggccaaggtgggcggatcacgaggtcaggagatcganaccatcctgactaacacggtgaaaccccgtctctactaaaaattcaaaaattagctgagcacggttgcaggcagctgtaatcccagctactcgggaggctgaggcaggagaatggcgtgaacccagtaggcggaggttgcagtgagacgagatcgcgccactgcactccagcctgggcaacagagcgagactccgtcttaaaaaaaaaaataacgtatttgtatcattgctatgtttaatgtcgtatttcattgaccataagtcccacagggaaggaggaagttgttacttcctgtgtggggctggggccagggtctccccctgggtattgagtcattctctggggtggagtgtcctgggcactgcagggtgctgagtagcgttcctggcctccacccactccatgccaggagttcccccaaaacctgacaaccacagatgtccccagacatcgtccggtgttgaggggcagaatcttcaccgtgttcaggcctgtgggggcagggggcagggtggtctatccctgactcagcccgccaacatcctctgggccacgaggcaaatgagaagaaaaaggaagtggtcgggggtgtgagccactccaagcacagacaattcccaccggggacaaagggatgggctgagctgggacacctgggtggggagtcgcaccctacgtgccctggagaaccaaggcagcctgagtcaccatgccagctctgccgggctgcagatgctggtttcagaagcgcctggcagctgcggagctctggggatgcggacttggctgggctaagatggatcgggtatcggggcccccagaatcccctcagtggagtccctggtagattagatcagaggggaagctgccaatctagctgaggtcttgccccagggcagttttgcccccaggggacttggaaatacggggcagtgcggggggtgcatttgtgtttgtcacaactagaggaggggctgcccctggcatggagtgggtggaggccagggacattgctcagcacctgcagtgcccaggacaaactcacccagagaaggatccagccctgaatgccaagtgggggactgcattngttatttgggaaaaaaaaatcaagtctgctccctgctcacaccagacaccagaataaactcccaatatggcagacggtgtaaaccaggggacctcagctcctgggattctcttcctctccccctctgtggatttcaatgtgtgtagcctcctgggacctcagcagagcagaggatcatgggccacggagtctcttgggggtccgtggaatcccctaacccaagaggtgtcaattgagggtaattctgcccccaggggacactgggccaagtctgggacatttgtgtttttctcatgactgggggtgctcctggcatggagtgggtggaggccagggacgctgctcagcaccctgcagtgcccaggatggcccctccccagagagtgacccacgccgatgtccacagtgcagagagtggaaacgctgccctagtggcagacgcagcagattcagaattgaaggatctgagttcaagcccagacttgtaccttttacctcccaccctcaggcgaggcaactggcctcagcttctggacgtgcagcacgggtgagcccctcccgccagccaggaaatgatgagtttcacgagagcaggtcctccagggccccagcaaatgccaggcctgtttactaatgacagcaaaggtccaccatcacttagcaggaatgagagcattcgctttcagcctgccctgccagcctcacagggctgcggcatgaacccctgtagggttagtttatgagtgcgtagggaagtgctccccagaaagcaggagaaacacggatggccagatacacgtttgagcctctgacaactacagtcactgtgtactaactagtggtgaggttggcaatttgtaaaaattactcattaaagagggagacagagccaggctccgtgnctcatgtctataatcccagcactttgggaggccaaggtgggaggactgctcgaggtcaggagtttaagaccagccnggacaacatagcaagacccccgtctctacaaaaaatacaaaaattgccgggtgtggtggctcatgcctgtaatcccagcactttgggaggtcgaggcgggcggatcatgaggtcaggagttggagaccagcctggccaatatggtgaaaccctgtctctactaaaaatacaaaaaaaattagctgggtgtggtggtgcgcacctgtagtcccagctactcaggaggctgaggcagaagaatccttgaacccgtgaggcggaggttgcagtgagccaagatcgcaccactgcactccaacctgggcaacacagcgggaccccatctc

SEQ ID NO: 228225 - DNA, 485 bp, Homo sapiens
aagttgtgagcatgttgacagcagggatgtgtccactatgttccatggtaatgcttggcattgttccctacccagagtgggtactccatcagggcttcttactagtggatctgttatgctcaataggagatgctgttcagagaaatgatcctagagcccagttgcaaaagaaaaggaactgtatactaaagcaaaaaaccttcccacaactccccactttacctagtcttcacacaaaacctcaatgattttctagctgttactaagagaaaggaggctttcctttgaatatggaaggaaccttatggattatctattccaaactcctcactacacagacagaagactgagacctagaaaagatgggatctgaacccagatcccctcactccccactcagaccagttctctttccacatcaccatgctggctatgtaagtggccataaccaaacaaggtagagagagaaaaaaaatgagcgaccg

SEQ ID NO: 228226 - DNA, 690 bp, Homo sapiens
  misc_feature (1)..(1): n is a, c, g, or t
ngccagaatcagtgggatggaagttttgctacatgttatccaccccaggccaggtggaagtaactgaattattttttaaattaagcagttctactcgatcaccaagatgcttctgaaaatggcattttattaccatttcaaactattttttaaaaataaatacagttaacatagagtggtttcttcattcatgtgaaaattattagccagcaccagatgcatgagctaattatctctttgagtccttgcttctgtttgctcacagtaaactcattgtttaaaagcttcaagaacattcaagctgttggtgtgttaaaaaatgcattgtattgattttactggtagtttaagagagcattaaataggctttttattggtctgcacatctccacaaacagcaataagctctacatctggcagatggatgtgacaaataagattatgtaattaaaattttttttccaaccagttgtgatttcagagcctttctccctacatcattccatctctccattctattaggtctagcaataacgtaacttcttggataccaagtaaatcagttactttttattttttggagggggttgtttcttctgacttgtttactatttgcctcttctgtgttaatcacctaattatgtttaccacaattcttttcattaaactatgttgccttacaaatagtgc

SEQ ID NO: 228227 - DNA, 487 bp, Homo sapiens
atatatgcatagttttatgttagaagttgaaggacattaaactacttaaagaatctcttgctacctttaacatatatccagtagactaaccaaagaaccatttcccaaatgatcatgaatctacaatcttttaggtctcaaggaagctgggtcaataattcataacccgttaagtctcaaggcagctgacttcctctactttctaaaactttcaggttacccagttggtaacatgttgaataataagtcttctctcagctattccttgtttatcatgtggatcagcaacttctctaacatttccgtggaattctattatttggacctagccttctaccaagaatttgaatttgagtttatagaccaagctcaaaccccttccttctggaaccatttgaacgtctactacaactgcttccaggaatcacttcttccatttttggaaaacctgtgtcatcaataaacttgctttttcactaggcacagt

SEQ ID NO: 228228 - DNA, 551 bp, Homo sapiens
gctcaggtggccccagaggcccaaacccactgctcccactttctgagacctgggaccctcacctccccaactcccaccatagggcgacactgaaaagtgtccccttcccccccccgtttccaagtcaccagcttgaggatgcccaaggctcaaaggctcctccgagtggcaccccgcatcgggctgcagaggtcggagaggggaggggatggtgggtgcaaagggtggcttcttcaggaaagggaagcctgtccctggctcccagcacctgtcacccctggcgatctcaccccgcggccatcattcccgtcctcacggcccatttcagggacactgaggctcaaagagccacgtgatttattcaaagcagctcgagccaccacttggagccacaagaaagccctggtccgtgcctcctcgccttggtccctggcccttcactcttcgtccaggctctctgacctctttccctctgcgcccctgcctcttccccaggcctgggtccccaaggcactcggccacgcgctgggtccggggaagaggcgcggccg

SEQ ID NO: 228229 - DNA, 467 bp, Homo sapiens
aaagaaccaagttaatacattgaattgagcagtctgataagaaggtagtgtgggggggtctccgggtccacagaatttccttgagtgtggattgctgtgtaggaaaagctctctaaattttttctgctggctgaatgtagagtaatgtgaccctgttgctctccgtggtgagctttccataattgagatattcctggattcattgccaggagtggacttcctttacctctgccctgccacagggtggctgctgcctttctcctttaataaggtatgttcagtttcccccactcaaagaccatttcatcccttagacattctacccaggacattgaaaatagaaacaaggccaggcacagtggctcacgcctgtaatctcagcactttgggaggccaagatgggcggatcacctgaggtcaggagttcaagaccagcctggccaacatggtgaaaccccgtctctatt

SEQ ID NO: 228230 - DNA, 476 bp, Homo sapiens
ggaaaaatgttcaggtttttattatggtgaatgatgaatttttaacataccccaaagtagatagaactttaccatgaaattccacatacccatcacacacatgtaacaaccatctagggcccatctgccctgtctataccccctgcacttcttccttcccagcttggcagtgtcaaaaatcaaaccccattggtctgcctccaaaaccctccaccaagctggtccttgctttgtcctagcactgggctttattataacattcctaaggtccacttaaaattatcatttcctggcacatttctctttttttaaaaagtcattgtcaaaatgaataaatttgatagaacattcaaatggactatagagaacatttcagggcttatcctcagatttccatttgccaggcaaagttcgaaggtgccattattaaactaccttggtgattgttgagacgatgttaaaatgggatagaattc

SEQ ID NO: 228231 - DNA, 122 bp, Homo sapiens
aggaatcactagaacaaggatctgcaaactacagcttgtgggccagatctgacttgctgcctgtatttgtaaataaagttttattgggccgagtgcagtggctcatgcctgtaatctcagca

SEQ ID NO: 228232 - DNA, 434 bp, Homo sapiens
ctaggtctacagagtctaaaaacttcccttaggacctcctcgcctgttagaaacagagcaaagagtaaaacacaggtctcagccaggcatggtggctcacgcctataattccagaacttttggaggccaaggtggagtagatcgcttcagtccaggaattcaagaccagcctgcgtgacacagggagaccccgtctctatgaaaaatacaaaaatgagccaagcgtgatgagacatgttctcagtgatacctgggctgcggtacagtggcaagatgatagttcaaggcagcctggaacttgggctcaaatgatcctcctgcttcagacttctgcctcaatgctgattataataaacatattctatttcatagagcagactgacattttcttagcagctaatttcctgataaaaacattttgttcttggctgagc

SEQ ID NO: 228233 - DNA, 395 bp, Homo sapiens
aaatatggtttgatagaagaaataagacctagcagtagattagtagggtgactatagtttacagtaatctattgtatatttcaaaatggctagaagagaagcattagaatggtgctagcataaagaaaggacacatatttcaggtgatggatattccaagtacactgatttgatttttacaaattacataaatgtattaaattatcataaaaataagaaacaaaacaataaactgagaaaaaaatttaaatgacctacaacctaatttttaatgcctgcatggtattcttgtgtattaatgtgttatttttacttaaccaatttcttactattgaaggcctgtttactgtttttcactcttctaaaccacaatgcaataaaaaccagagaaaaat

SEQ ID NO: 228234 - DNA, 350 bp, Homo sapiens
agcaggggtgagtggagcttgaggtgaacctggaggagtggtagatggctgaggtttctcttagtgaaagagggaaggtggaaggatcatagggatgcattcaggtgggagtgctagcaaaggagcatatgtaggaaggacaagctttggtcagaggataaggaggacacacacctatgtggctggagccgaacttcccctccttctgagaagcttgattagaaggatagatgggaagaagaggatgccagactgacaaattcaaattttgagcaaagagtagcatgtgaaagtggagttttgcaagattaacccagtgccactgaattaactaactcagacaaaacgag

SEQ ID NO: 228235 - DNA, 467 bp, Homo sapiens
caatgcctgggctccagtcatgtctccattgctaagtagaatgagctgcagaggaggttccagtcactgttccatataatctgttgcttaaaccctgatattttttccttatctgtttttaattttagaaaaaaagttttaacatggagattatggcttccactgaactgggatttagtatttcgaaacatataaaaaggatttctaaaatcaaaagatctatacttttttctctttccatctggagtcaactgaatattcaacttttccattgaacaaacaaacaaacaattgtgctcctgactttttccaggcattaaacaatataataacaaaaatgaaatgcaaataaatgtacttttaaaactttaatcctacagcaaaagattctactggctaataatgctacctgcctgaaactttatattctgatatttttccttaataaaaaagtattttttaaagtt

SEQ ID NO: 228236 - DNA, 394 bp, Homo sapiens
cctcaaacttcactttcagtggagtttggtagcacttccggtctcagactccacacttgtgaagtttgcgagttacataaaaaattaaattcctggccgggcgcggtggctcacgcctgtaatcccagcactttgggaggccgaggcgggtggatcaggaggtcaggagatcgagaccatcctggctaacaaggtgaaaccccgtctctactaaaaatacaaaaaattagccgggcgcggtggcgggcgcctgtagtcccagctactcgggaggctgaggcaggagaatggcgtgaacccgggaagcggagcttgcagtgagccgagattgcgccactgcagtccgcagtccggcctgggcgacagagcgagactccgtctcaaaaaaaaaaaa

SEQ ID NO: 228237 - DNA, 389 bp, Homo sapiens
aagtgctggaattacaggcgtgagccactgtgcgaggcctaatttttaaaatttttgtatacagatggggtcttactgtgttccccaggctggtctcacactcctgtgctcaagcgctcatcttgcctcatcttcccaaagcgctaggattataggcttgagccactgtactatcctgcagaacaaaggacagggagattagactaaaggatggaggcttgagacatcataccacaagcaaggatgtgtatcataacagaaattaattgcggccaggcattgtggctcactcctgtaatcctagcactttgggaggccaaggtggccggatcgcttgagcccaggagttccagaccagcctgggcaacgtggcaaaactctgtctctac

SEQ ID NO: 228238 - DNA, 375 bp, Homo sapiens
atagatgaaagcttccatgcaaccctggaatatgggcttccgcccacagctggttggagcgtgacaatcaaatgtgttaccatgtttctcacagactcccacaacatcaaggaaatatttctgactcctggcatgaaacttgaagaaagagaatgtagcagccactaatacaatggaaagcgcaacattgacacgtctatctagaaaattttaattgtctaagttgtgtgactcagatatctttgcatttctgcaaaagatcaaggtctactctaattcttaattaaattaagaattcctttttattacttgttagcaaataaatggcttgtctctaacagaatttttccactggtagaatttttctttagtaaa

SEQ ID NO: 228239 - DNA, 499 bp, Homo sapiens
cacgcccagccgggagagcagcccctccctgcccaggctgcctctcctggagctggactccaccctctgtgggggtcttccctgcccagagcccaggcactccctccacaagaaggaaagaggaactggtttcctgggggtcctcaagcagggtatctgctcccctccctgagcctgacttgtagggagaagacgtaaggtgagttaaccttgagtctttgataacagaggagggttaaggaggagggaggactccagaccccagcactcattttttgctatgggggtcaacactcgctgcctctactctgctgatcattggctgctcccaggacacaccacagcccatcgcctgggcgccctgtttcctcattcttgaatgacctccttcctttggggagaactctggcgcttcagagactagttcaaatgtcacctccggggcagagcttctcctcaccctccagactcccctgacctttcagaactctgggtcagc

SEQ ID NO: 228240 - DNA, 402 bp, Homo sapiens
ctgagcagggtttcccctgcatggtagcttttcctaaacaaatctgaaaatcaatgattcccttcagttctctgggtcaacacagactacagccagaggttctgagctggaggtgtttgtgtcgtgagctctggatacaaatggaggtcagtggctagaaatggctagaagctttgggaggcagttttcttccttagctgtcttttggcctggtgaccttcggctttggttttcctctccttacaaaacccactcttccttttaaataagcttaagacaacccaggtgcttcttaaatattgtttcacagaaaagaagcatttttctatttataggaagagaaaaggtgttgtgaaaggactgaacagcttccagctgctgttgaggaagggaggcaaggtg

SEQ ID NO: 228241 - DNA, 882 bp, Homo sapiens
agttggagtgcactggcacaatctcagctcactgcagccttcacctcccaggctcaagtgatcttcatgcctcagcccccacaagtagctgggactacaggctcttgccatcatgcccagctaatttttgtattttttgtagagttggggtttccccttgttgcccaggctggttttgaactcctgagctcaagcaatccatccaccttggcctcccaaactgttaggattacaggcgttttgagcctctgtgccaggcctagaaaaaacgccttttaaaatattattccccattgaaaaaaaattcagtgtccaaaggaaacagctatttctaaaatagttgctgctatctctagaaataaaactagaacatcccttttttcttcttgatttgcatcccttttgatgtatattccagtactacattggtagagggaagcttttcaggactgtcagctaatggtacagaaataattgatttttgttatctgaatgcatttcccttgagaaaggctgtaggaggtattcagatacctgttgaataagtgaatacaggaatgaatgagtgagagaccttgtctattgtacttatgctgactcatctaagttttatgacttttagcaagttactttacatactgacggctctatttccttgtctgtaaggtggagtttataatacctattgcatatttagtaaacttttgttgaatatttcacataagcactagatcaaactcagatctactgagtcgttttttggggtgtgggttatagatctttgttctcttaatagatctttgtcctcttaataggatctactcaaggttctcatgcacccaaagtttgaaaattactcatttaaactctactatttattgg

SEQ ID NO: 228242 - DNA, 731 bp, Homo sapiens
gcacggggaacagcgtgtgtgagggtcccgccatgtctcagccctttcctggcccccgcacttagccttcggtgcccatcttcagggtcaggggaagcccaggccaaagcgggccgggaaggggccctgtggataaggccgagagcctgtcccaaaatagggccggcaggatttcccacccataaaaggctcttggaatctggaccccggggaccccaggcagccaggcccagctaaaactcagctgccaccactgccccagcactctgcccacagcagccctggtgtcaccaccctgcagaatcctgtcagacaaccacccgacatgacaaagggttcttcaactgcgatggtttcctggcactaatgggagtttaccatgagaaggcccagaaccaggagagcgagctgagggcggcattccgtgtctttgacaaagagggcaagggctacattgactggaacacactcaagtacgtgctaatgaacgcaggggagcccctcaacgaggtggaggcggagcagatgatgaaggaggccgacaaggatggggacaggaccatcgactatgaggagtttgtggccatgatgacgggggagtccttcaagctgatccagtaggtgcagctgccgcagccgggggaggcctgcccgggaaggctgctgcccctgccccctggcccccactcccccggctccgtgtaaaataaatgttccagcccgaacctgtg

SEQ ID NO: 228243 - DNA, 520 bp, Homo sapiens
tgaacatcagaaacactgatgttcaagaactttgattaccctcatttatctgggagctgtgtgacatctgaggcacagttctaagtagaagtatcattcagaaccaggagcaagaatcagatactcgtgagtaaaggtccaaaactgagtggcaatgtaatacttttggttttcaaataaagagattcataagatttatctaatcaatctactaatgcatggctctatataagtttgctagcataatagattaatcatggtaaatctatttctaatctattccttataacttactatttctccttctactatgacatcttcattttttgtctttaatgctcatccattttttcttctctgtacgtgaatcttagagcccacaggtaactgacacagaatgttgagaatagtaggatacaaaaagtagtggcattttggagatctggtagtcccttagacaatattccttacatttgtctatttggtttgctctcctgcattttgtagactcattcctagc

SEQ ID NO: 228244 - DNA, 833 bp, Homo sapiens
ttcttgtcggaacagctttgtccttgggttacctgggttccatctcctggggaattgggaacaaggggtctgagggaggcacctcctgggagactttagaaggacccagtgccctcggggctgatgctcgggaatcacagagctgggacccagagccaggatccagacccagaatgaggtaggaggtggaggggctgccctgggcgtctgggggctgccagggactgagccctgagccagcctgagactcaggaaaccccgtcaggagggagaagggagaagcagactctggacaccagaaagccaggggaagggtcacaaaaggagtggatgtgacggaagggcgggctcctgggtctcttcagaacatatcccctgtgcccagggggatcagaggggcagagtccactgcgtgaaagccccactgctatgaccaggtagccgggacgtggggtggatgccagaaaagactccacggaataagagagagcccaggacagcaggcaggctctccgatccccccaggcccttgccccatacacgggctccagaacacacatttggctggaacagcctgagggaccaaaaggccccagtatcccacagagctgaggagccaggccagaaaagtaaccccagagttcgctgtgcaggggagacacagagctctctttatctgtcaggatggcaggaggggacagggtcagggcgctgagggtcagatgtcggtgttgggggccaaggccccgagagatctcaggacaggtggtcaggtgtctaaggtaaaacagctccccgtgcagatcagggcatagtggaaaacaccctgaccc

SEQ ID NO: 228245 - DNA, 1050 bp, Homo sapiens
tacctaacttcaggccttattagtctcttgcgtcctgcttggtttctgtcctagcactgctccacctggtcatcccagatgccagcttccagtctctattccaagtaaaagccccgtatagctgcctttaggttcggagccaaactccctagcaaagctaccttgctgcacaactccaaaggacatacctacatagaatttggtagttttgcaatctggtaaccctgcatccctagatcaaccttcaaagctcttcccagtttgccatcagctctacctcctgccgctcactcacccacccaccgaactagtcatccaaagttatttctggttcatctaacacacatgcctgactttcctgcctagcaaatgtcctgtcatccatggttctaatatgacattattcctttatgaacccttgcctgttttccccaaggattttcttgtctctgctctggatgactgcgatgtttcctcattagtgtttctgcgaccatacacacacatttctgggtttattagccaaacagaaacctgatcatgtcatttttccactgaaaactctggaatgcctttccaaaacacttaagataaaacccaaagttcttaccatggtcttcaaggccctgcaagaccttacccttgcctaactaatcatctagccacgcaactatcctccagccaggttggcctttctgatccacatatacctaacaccaaccttatttaccacctcagggcttttgcactctgtctccctccttatacactacagaaaataagctatactagagtaggaactctggctagctccaggacccacagcagtatctatctatcctacagtagatactcatcagtaagtatttagtgactgacttaacattgaagccacaccataatttttacttttgtctgtctaccctgtaaactatggggtccttgaactagggctggatattatctctgtatcactagtattagtacttagtatatagctggtactaataaccatttgctgaacaaatggtgaatgtgcttttgctcaag

SEQ ID NO: 228246 - DNA, 1129 bp, Homo sapiens
ctgactttgtcactgttttattttaagctctcttaaacctgggtgcagtggctctgcctgtagtcccagcactttgaggaggccaagataggaagagcacttgaggccaggagttcgagactagcttgggcaacatagcaagacccagtctctacaaaaacaattaaaaatgagccgggcatcttggcatggacctgtattcctggctgcttgggaagctgaggcaggaggatccctttagcccaggggatcaaggttgcagtgagccgtgatcgtgccactgcactccagcctgggcaacagagtgagaccctgtctcaaaaaaaaaaaaaaaaaaaaaaatagaatctacctcatggatatgttggtaagattaagtttggtgcctgacatataagtatttaataaatgttagttgttatgattatttttctcttccttttctttttcaccagccctcattattaaaaagtaagctttgggaggaaggaccactattacgcttttgtattatgcttaataggaaaattataagcattcatccaagtgtgttgagtactttgtacttgtcttgaggaacagtagggataagagagacctgctgtcatagagtttacaggccaggagaatgcagacatttatagattttttaaaaccctacctataataaattgtatagcattactcaaaggggaaattgtaaggcatcaacctaaggtgagtatataccaggagaacccaataaaacttagtggattgttaaagcctctttgaaacctggaagcggggtaagagttagtagggagatgtcatcagtaaattttattaggaaaaagggcagaatttcaaatcccacaaggtctgaaggaactgggcacttttgaagaacagaaaaaaggccagtgaagaacaggaaagagagaagggcctagttctgtagaggaaaatggaaactagatcaggtagggcctttgtaagctgcataaaggattttggattttatcctaaactcagtgagaaagcatttttgaagggttttggtggggtaggatcagtgtacatgacctatcagatttgcctactttttaaaggcttttatgagccatataaaaccattgtagcttttaaa

SEQ ID NO: 228247 - DNA, 824 bp, Homo sapiens
aactcctgacttcaaatgatccaccttcctcggcctcccaaagtgctgggaatacaggcgtggaccaccgtgtccggccataatctagcaatactgataatgtggtgatgtctgtgactttatcttacctgaaataacaaagaaagcaaaacaaatcccatataatcatcttcacttttagttgaaagaaacatttagcccttcaatcagttaatccaacaaatacttgttttgtggcttgtcatgtgtaaggcactatgtttaatctactttccggaaactacagcctagtaggctagacaaaattgaacacagtaagacaaaattgaagctttgtaacagaactataagcaaagtgctatggattatagggaaataaaagaacatgcctacctagaaaatattcggatttctgaagaggtctcaagaaaagcattcctcatccttgcagaatttctagacaaatggagaaaacaggagtggcagctggagaccaaaattattaaaagaaaccaggttggaagatctggttttcagtatgtgagccaaattgtatctgttaactgaagtctatcagatagacatccccagcccgcagttctaagcagtcctataccaaatcaagcttctcaacgcaggagagagcctggccctgaagaaatggagaacacttgttcagaaagggtagaaacacagaactctgagccaagttgcacttcattcttccatgatttgccagtcaaataagattaaaagactaggtaacagctatgctcattattaaagattcgctggccgtcgttgtacactcaggaaacggctat

SEQ ID NO: 228248 - DNA, 1001 bp, Homo sapiens
aactcctgacttcaaatgatccaccttcctcggcctcccaaagtgctgggaatacaggcgtggaccaccgtgtccggccataatctagcaatactgataatgtggtgatgtctgtgactttatcttacctgaaataacaaagaaagcaaaacaaatcccatataatcatcttcacttttagttgaaagaaacatttagcccttcaatcagttaatccaacaaatacttgttttgtggcttgtcatgtgtaaggcactatgtttaatctactttccggaaactacagcctagtaggctagacaaaattgaacacagtaagacaaaattgaagctttgtaacagaactataagcaaagtgctatggattatagggaaataaaagaacatgcctacctagaaaatattcggatttctgaagaggtctcaagaaaagcattcctcatccttgcagaatttctagacaaatggagaaaacaggagtggcagctggagaccaaaattattaaaagaaaccaggttggaagatctggttttcagtatgtgagccaaattgtatctgttaactgaagtctatcagatagacatccccagcccgcagttctaagcagtcctataccaaatcaagcttctcaacgcaggagagagcctggccctgaagaaatggagaacacttgttcagaaagggtagaaacacagaactctgagccaagttgcacttcattcttccatgatttgccagtcaaataagattaaaagataagttatacttaatctctttaaagaagtacagaggagccaggagtgtgtttagagaaagtttttccttgtgtaaaccaggagtggggaagaggcattcctctctacaaagggggtcagaaaaggtttcatggaggttatgccttgagctgagcattaaaaatgggtaggtttctatatagacgttgagaagccacagagatgagacagtataagctatgtttgaaaaacaagtagtctgatta

SEQ ID NO: 228249 - DNA, 538 bp, Homo sapiens
acttcatacccaggcttgtcccacaacggcgagcatcttctaggcacccacttagagcccctcaacagacatgtgtccattcggtcctcgaccctaacaacctagtgttcaccccacactgtacagatgagcgaacagggaatggacgttgagaagcttaagcttctcaacgcaggagagagcctggccctgaagaaatggagaacacttgttcagaaagggtagaaacacagaactctgagccaagttgcacttcattcttccatgatttgccagtcaaataagattaaaagataagttatacttaatctctttaaagaagtacagaggagccaggagtgtgtttagagaaagtttttccttgtgtaaaccaggagtggggaagaggcattcctctctacaaagggggtcagaaaaggtttcatggaggttatgccttgagctgagcattaaaaatgggtaggtttctatatagacgttgagaagccacagagatgagacagtataagctatgtttgaaaaacaagtagtctgatta

SEQ ID NO: 228250 - DNA, 707 bp, Homo sapiens
gcatgcctgactagctacccactgtaacattttcccactcaagagtccaagaccccaaatcttcggaagaaaatggatgaagggtatgagagtcatttgtggcataacttcaacagacatgacagggctgactttgagttgaattataaaatttccaaatgaggatgtccaggaaccagatagacacgtgagttagaagctcagaaagcaggtcaccatcacctcttatctgatcattgcaacacttgcttacttgtcctcctatcaccagatctggctcctgacaattcaccttgcgtaatgagagggataaaaaccttatatatgaaactttcactaataacctgaaacatcaccacagagacagttgggttatcctgtttgtttggacatccacttattcacttgaaatgcaggaaatctatttgaaaaaaacaaaacaaaacatgatcagttacttgatacaatcatgagatgtgatcgagaaaaacttattaaggaattattttgtcagagtcagtctctctcaacaaggtaagctactttttcaatgtttctgattagagtagatccttgatgtttattatcagtgtcatcatcattaatgaaaatagtacgagaatatacaaagatgcataagtgagtaatggtgtaacattctaacatttctaagatgtgaatttggatcttgccatgcaagatcgaaa

SEQ ID NO: 228251 - DNA, 816 bp, Homo sapiens
gcatgcctgactagctacccactgtaacattttcccactcaagagtccaagaccccaaatcttcggaagaaaatggatgaagggtatgagagtcatttgtggcataacttcaacagacatgacagggctgactttgagttgaattataaaatttccaaatgaggatgtccaggaaccagatagacacgtgagttagaagctcagaaagcaggtcaccatcacctcttatctgatcattgcaacacttgcttacttgtcctcctatcaccagatctggctcctgacaattcaccttgcgtaatgagagggataaaaaccttatatatgaaactttcactaataacctgaaacatcaccacagagacagttgggttatcctgtttgtttggacatccacttattcacttgaaatgcaggaaatctatttgaaaaaaacaaaacaaaacatgatcagttacttgatacaatcatgagatgtgatcgagaaaaacttattaaggaattattttgtcagagtcagtctctctcaacaagatttacaggccagttgttgacattgtagtatcctctctttgaacactggaattgagcaacttcaaagagtcattggaccaaggtcttcatgcttcaaataaacctgcatcaaagaaacctggctagaagacaaagatcatgctttattcccccacaaaaggattatgtttagatttaatgttgatgcctcagttaagtgctcactttgaaaatcaatacaacattgtgtgcttggttggctcaatacctctcagtcaatattaataaaaaaacagcaacaaa

SEQ ID NO: 228252 - DNA, 230 bp, Homo sapiens
ctgtgcccggtttcctcatttgtaaaacaaggacaataacgtcctttccacaagagcgtttgtgaagttgaaggagatccaacttgtaaagcacgtaggacaggccagacccagtgaatttgtgactgtggagtgctggtggcttctcagctactcagggtgagataggaggttgagactgcagtgagctgtgatcacaccactgcactcaagctttctcaaaaaaaaaa

SEQ ID NO: 228253 - DNA, 462 bp, Homo sapiens
aaaccagcagttggagctgaacaccaagaagtgggaattcctggctcagagatggagaggtgtctgtctcgaagtttcacaggtggcaggtgacaatattcttggtagagaccctggttaaagggttgaagttctctctgggggtgctctttggtatgtagagcagcttcctgagctcttgcaaaatagtcggtgcatctcaagttctccgactctgactttatgtttgcacaggcaggcttgaggcccgccacgtcacctgtgatctgaccacagcactgctcaaatctgcggtgtaaatcgcagctttatccactcgctcacagaactgtaaattaattcttgtcctctttcctgatttcctaattgtccttgtttataaacgtgctttatggtaaaggccattagtttatctcacaagttaaaattaagaagaacaaaggctagtctaaaatagagcag

SEQ ID NO: 228254 - DNA, 330 bp, Homo sapiens
ggaggctgaggcagggtaatcgcttgaacccaggaggcggaggttgcagtgagctgagactgcaccattgcactccagcctgggcaacaagaaccaaactctgtctcaaaaaaataagcactgattttgatgtatacccagattatatgagcatacaaggtagagtcaaaatagcctggcatatgagactgctcagacctggatcctaattacttctcaaggtacattccccttctggaaccctattctgtattcaaatagaaatactgaatatcatattctctcaagccggcaagcctcatattgttcctcctgcctaaaccacccaat

SEQ ID NO: 228255 - DNA, 580 bp, Homo sapiens
tctgtcagttttggggtccaggtgcctcagtgctaggggagaattatttggagtgaaagttcctatattagtttcctgggacagccatagcaaagtaccccagccagggtggcataaactacagacatttattgtctcgcagtcccggaggctagaggtccgagaagaaagtgatggaggggctggtttcccctgaggcctcttttccggctcagagatgctgccttccccatgtcctcacgtggtctgtcctctgtacatgaccgtgtcctcatctcctgttataagcacaccagtcacgtaggattagggcccatcctaatggcttcactttaactttatcacctctttaaaggccctgtctccaaatactgtcacattctgaggtactaggggttagggcttcaacatatgaattggggggaacatggtttagtccatatcagtgcctcacgtctcaatacatattcagggaaagatgtttgcatgggctgaaactcctctgaccccagggtagatcttcacattcatctcttatccaaaccccctccagtaatccctaaccttcttgccctgcctg

SEQ ID NO: 228256 - DNA, 538 bp, Homo sapiens
ggagggacctcattcagcctatggcacaagtcattccagcctttagaagcatcagtttgaggctgggggtgctagcttagtgcccctcattttatgggtgagatcagtgttcacactggaaggcactgattgagaatcacacctttcaaagggaggagctgcctgcaagtcaaccacctggaccttcagtggagcagcatactcaccctcatgaatctattcagtctcttcaccacctccagcctggatgtccccttatccaccagtgggaataatatgaatgcctgtctcctagcttttctgtaaggattatgtgacagggctcatgtgaagtgcctgggatacatttggatgtcttagaacattagctacaatcactgcttttcttgttggctaagttcccttggaacttaagggtctatgagatgaatccgtgcttttcaaaggcttcctaagtactcactaattactcagcagtatccctggcaggccaatggctcaggagtgagtgaaaataaaaggcaagagaaacttcctt

SEQ ID NO: 228257 - DNA, 541 bp, Homo sapiens
ctttgagaccagcctgggcaacatagggaggactttatctctcaaaaaaaaaaaaaaaaattagccaagtttggtggtgcacacctgtggtcccaacctccggttgaggctgaggtgggaggatcacttaggctggggaggtcaaggctttaatgaggcactgcactccagcctaggtaacagaatgagaccctgtctaaaaaaaaagaaaaaaaaaagaaagaaaaaaataagaaataagaaagaaataaaatttaattttgtattcacgcaaggttcatttgcgtcagcaggatgagtgaggtggtctgattcacagtgatttaggaccccagtagcttttcattgactaacccaacattgtaggaagtcttttgatgttctctatgcatttggtaaatgagggagagagcgtggatgatcttttaggagattttgcgggccagctccagaagtggtccacatcacttcccttcacactccactgagaacaccttttcatggccacatctaactacaaaataaataaacaaacaaacaa

SEQ ID NO: 228258 - DNA, 543 bp, Homo sapiens
ctttgagaccagcctgggcaacatagggaggactttatctctcaaaaaaaaaaaaaaaaattagccaagtttggtggtgcacacctgtggtcccaacctccggttgaggctgaggtgggaggatcacttaggctggggaggtcaaggctttaatgaggcactgcactccagcctaggtaacagaatgagaccctgtctaaaaaaaaagaaaaaaaaaagaaagaaaaaaataagaaataagaaagaaataaaatttaattttgtattcacgcaaggttcatttgcgtcagcaggatgagtgaggtggtctgattcacagtgatttaggaccccagtagcttttcattgactaacccaacattgtaggaagtcttttgatgttctctatgcatttggtaaatgagggagagagcgtggatgatcttttaggagattttgcgggccagctccagaagtggtccacatcacttcccttcacactccactgagaacaccttttcatggcgtctcaccctaagatgttgatcaacgttccggtcagga

SEQ ID NO: 228259 - DNA, 560 bp, Homo sapiens
tgcatcaatgccgattttctctgcagatgcagatctccccaccaaagatagcttttcagctattatttccagcccttctgtatagccatcttgaaatatgtcagagaagtctattttggggcaaaatattttggtttccttgagaataaaattacacatctggatgggttggttccattgtaaattcctagcttccaacttcaactctgtctgcatcatgcctagatgcttgctagctttttcaccttagctcaatcctccacttgccacagggctgctgggcctgcactcttgtcagcttctccttcctttagtctttgtctcagccaatcagatcagctcttgctcagagaaaaaagaagctaatgggaacttcctcctctttctcctgccagatctagaaatctgcccgtgcttgcctcctcccctgccttttcccccatgaggtggaagccgtcctgctaaggccagttttgtggtgggacccatgccctccagccttctcaggaaccgtatgcagagtatcacctctttcccatacacccgtctctcctgccgcg

SEQ ID NO: 228260 - DNA, 336 bp, Homo sapiens
cagtagccaaggatgtagttggaacttttctccccctcgggtttgatcccttcttatcctgattttgtcttatttaacacaatgttcaattgctgccgctttcacctgggaatggcatgcttctagaggaattgttttcctcccaggctgctggattgtgtcatctttgaaagtgaaggatcttgctaagttcacctgctcagttgtcaggcccagggatgctatgtaaacagtttttccctttattaggcattaagtaaaactaggccggccacagtgcatttttttaggaattaataaacatatagcaagggccagcagcccccgaaggatcgc

SEQ ID NO: 228261 - DNA, 412 bp, Homo sapiens
ttacacacagaatttaagataaaaaatgaccatgtgaagacacaatagtatagtccagggattggcaaaattttgggtaaggaatcagatagcacgtattttaagccatgagatctatgtcttggccaggtgccgtggctcaggtctttaatcccagcactttgagagcccgaggctggtggatcacttgagcccaggggtttgagaccagcctgggccacagggtgaaaccctgtgtctacaaacaacgcaaaaattagccgggtatggtagcatgcacgtgtattgccagctacccaggaggctgaggtaggaggatggcttgagccatacagctcactgcagaggttgcagtgagccgagatcgagccactgcactccagcctgggtggcagagtgataccctgtctaa

SEQ ID NO: 228262 - DNA, 254 bp, Homo sapiens
tgggtaatatgagggtaaattctgtgagtgccaacctgaaggagcccttaagtcctccctgaggagtatgttaaagttgctctggtaatacagaacgtgtttcagagccttggactggagtgagaggacagaaattacaaaagacactgaaacctgaataggattgaagcacaaaagccaggagaagggaggcagaaggatgtgggcagtaggaaaggtctaagtagtgaaaaacagtgttgcatgggtacaga

SEQ ID NO: 228263 - DNA, 342 bp, Homo sapiens
cttcccctacaccccactctccaaaggaaggtactttcaactctttcacactctcttcttggttttgctttcttatttctaaataatgtacttgtactgacatgactcgatttgcttgcaattctagaagctgtctcttaacttcctcctgtgggaaatgattagttctttcattgtccgcccacacacatgctcaggcactcacacttctttctctgtgctaccaacagagttaaactacaattgttagttatcactcattgttttcattttgaccatgttagccaggatggattttcccctttgtctattataattcttgccctaaattactaccaaact

SEQ ID NO: 228264 - DNA, 416 bp, Homo sapiens
acttttccagcattcattttgattttaatttcaatgaattaattggtatcataagtccaaagacattatcaatatggatctaccttattagttgctttactgaaaaagcttggttaaatagttcttgaataattttgtcattggtctgtagggcagtgtgagatgagtgaccccaggtcataaatttatagggtcagatattgcctttattttaaatcatgatacgtattttgttcatcgtgggttttttgcattattgtgatttttcaaaatactagattgaaatattatttaccttgcttactgagatgtttggcaccctgttaaattttgcatctggggcaagcctcccacttgcctcagcctagtccctgtcctgtatgatcctacatggaccgcatccacagcttatcctt

SEQ ID NO: 228265 - DNA, 415 bp, Homo sapiens
caggcggatcacgaggtcaggagatcgagaccatcctggctaacatggtgaaaccccgtctctactaaaaatacaaaaaattagccgagcgtggtggcgggcgcctgtagtcccagctactcaggaggctgaggcaggagaatggcgtgaacccgggaggcggagcttgcagtgagtgagccgagatcgcacccctgcactccagcctgggcgacagagcgagactccgtaaaaaaacaaaaaaaaaaccttgcccttcattccccatttctatcataatctacacagagttttgaacaggcattttaaaatcaacaatatattatttacaattttgttagtatacataactctaactcactgttaaaaatcacctgtctttatatccattaaatgacacttgcatatgctccaa

SEQ ID NO: 228266 - DNA, 1032 bp, Homo sapiens
acgtgatcttggtgcactgcaacctccgcctcctgggttcaagtgattctcctgcctcagcctcccaggtagctgggattacaggcacgagcctccacacctggctagtttttgtatttttagtagacacggggtttcacaacgttggccaggctggtctcgaactcctgatctcaggtgatccacccacctcagcctcccaaagcgctgggattacaggcacaagccaccgtgtctggcctcatttatatatatttattctgatccctgattgtttcctcaggatgaattattaacactagaattactttgtcaaagattatgaacctaaggcttttgaatatatattccctgccaaactgcattccagcaggattataccaagttatcttctcacagtatgtgagattgcccacattttgtattcttgcaattatttattataatttaaaaacagccttttgtttttcaaaacaaatttattcctttattatctctttggaaactagtgaggtttttcactttcacttttatgtagttttcttttgtaaatattctgtcagcttgtatttttatcttgtttgcttacagatacatatgaccctttaaatatatgttagggaatgagtgctatacaatattcgtcacagtatattatttgcccactttgttaatactttctagaccttgtagattcagttccaagataattgagacctttttttgaagactttttcttaagattgagctccacgtacctctttctgcattagcagatgttaaacttaattgttttccttgtgtatctccatctctggactctgagctccttgagggcaaggagagttgatgccttatccttttctccccactgccttctccagtgattgacagtcttaagttcaataaatgctttttgaatgaacacatgaaaatccttgacataacaattgtaggaagtaggaagtaagagcagtaaagaattaacatttggaagggtatatctaattgtgacgtggagaaaaaatgtca

SEQ ID NO: 228267 - DNA, 391 bp, Homo sapiens
gcttcttcccaacacacttgactgaagtcaggtatttaagtttctatatctaagctgaagtcaacagtatttccataagtaggatcttgtcacaacagaaaaaatgaattataagcaatgaatagaggtgaaatatattcattcagagtcagtgtgaatacattccatctttcttcacttcctttaacctctcattttctccaggctgcttacaaatgtattcaatgtgttaacaaaaaaatttaataaagacattgccagaatatcagcattgggaacaaagaaaaatactttctatttggtgttagcataactgtgcattttaactaggtgtatatctctctgtgtataattaacatgctatttgtaaataaagtcaaatattaaatat

SEQ ID NO: 228268 - DNA, 136 bp, Homo sapiens
gaactttattgttatccttttgggtggtgatggtaattattcttcacagcaaccgtataagttaagtactattattatccattttacatatgggtaaactggatgccagaggtgatcttctggaggtgatcttctg

SEQ ID NO: 228269 - DNA, 607 bp, Homo sapiens
ccacagacagtacctatgtataatggactgacttgccagccctctcaaatggccaccatcagagcaaagacatgtcaccagggctcatccaccaattaaaggtgaaggggaagaaactgtaaaatgtggcaggaagcagttgggcacctacagaccattgaattgccacatgatggcatctacttcacatactggccaggccaagaggccaggtgaaaataacaactacaggagccattaggatgtatggcctgtcccccacccaagcaccaggtaattgagcagccaggtcattgaaccttacagcctttgggcaatggatgtgtgatatgcttgttcccgtgcaaacatctaggccattctgaatctttgtgaccattcctgacccagagtgggacctagcaatcgcaaggcacaaatctgaaatctaagattaacacagagataataactgtcctattacatgttgtctgcaaaaaacgacacatacttaaaagcatcttattggaaatgaagagattctagcagaagaggaatgataaatagaaattaattggaccattcccactgttgtgaatttaaaatgtgtaaaatattacaaataaaa

SEQ ID NO: 228270 - DNA, 440 bp, Homo sapiens
taaattattgaataaatgatgaattataggcagaacattcatctgtgcattcaataatggattgagggtcaggccctttgatgggtcctgggataaaagaagaagaagatgtagtgccacccttgaagaaatccgtcttatgggaaagatagacttgtaaataaaaaaattacataatcccagtacttcgggaggctaaggcaggcagatcacgaggtcaggagttcaagaccagcctgaccagcctgaccaacatggtgaaaccctgtccctactaaaaatacaaaaattagctcagcatggtggcacgcacctataatcccagctactcaggaggctgaggcaggagaattccttgaacccagcaggcggaggttgcagtgagccgagatcctgcctctgcactccggcctaggcgacagagtgagactccatctcca

SEQ ID NO: 228271 - DNA, 254 bp, Homo sapiens
gctggacatttttgatcctgtgttttgtctccagctgcacccaggctgtgagccagggaggctttagagttttagtggggaccatggagctgtggagagcattccttggccgaagtggagattgtatagactagctaataagacatctgtgcaaactgtttttttttttttaattgaggttatattcacataatatgaaattcaccattttacaagtgaacagttcagtggcatttaatacatttgcaatgctg

SEQ ID NO: 228272 - DNA, 416 bp, Homo sapiens
catgaggtaaaaatgaaaaactaagctacaggcaatagtgatattaaaaagaaaaagctgcctagcacatagcgtatactcagtaacttttttttgaagagttaagatacatttgggtttctcattaaaagcaaaggtaaaaatataaagtaggattttgggtatcaatgtttccagaaggggagcaatgtcacggaccatgtataaagtttattggagaattaacttggcaggaaaaaatgtaaacaagacaaagagaaaacaatcacaatttgagaaaaatgaataggtttgaaaaatgatacataaacaacattgggaatttggctggtttgttgtttgttgttagatttataaataataatgtaactatcttttataacaaagagctggtaggaataaacaagtcaaaacat

SEQ ID NO: 228273 - DNA, 499 bp, Homo sapiens
ggctttacagtctgggctcgtgatactcatggtgatgggttattgttgcttgtgccactgttaaaccaagtactgctttgaaaacaattcaaggccattttagaggaacccaaatgtcaggtctgtctgattatagtacacgcagttgtcaagctagaaaaaccagcatccgttggtgagctttgctgtccatgagctgtgaggagtcagtcaggttcctagggaacagccctccactgtatttaagacatagggctcactcccagatcgagctgctccaaattgccattttactcaagatcaagcatatcagaagtcatgttgtaagcagtaggggaactattaaattgagctgaaatagaacagctagaaagaagaaaataaatgtgtacttaaaagatgcaaggaggctgggcctattcaccagggtcctcctgtgcagaggtagtagctttttgtttgccctggactagtttaagaatcctctgccacgaagatt

SEQ ID NO: 228274 - DNA, 143 bp, Homo sapiens
gctcggtacctgcagaaatcacctctgcagaaatcacctcctccctaccagccaatactcaaacaagctttgatgagcatctgcaaagtaccagatcctgtggaaaataagaaaccattcgcccggcatggtggttcacacct

SEQ ID NO: 228275 - DNA, 453 bp, Homo sapiens
cctatcaaatgatatctaggttgtttccattaatatttttaaaattctgacctggtaccagcagcatgatgggctgagctaatgcaatctcttcccaagacataaggctcatagaaatactaggtgtaaaagaaaatatgtgtacttaaaaaaatttaggccgagtgcggtgactcacgcctgtaatcccagcattttgggaggccgaggtgggtagatcacctgaggtcaggagttcgaggcaagcctggccagcatggcgaaaccccatctctactaaataaataaatatatatatatgaattagccaggtgtggtggtgggcacttgtaatcccagctacttgggaggccaaggcaggagaatcatttgaacccgggaggcagaggttgcagtgagccgagatcgtgccactgcactccagcctggtcaacaagagcaaaactccatctc

SEQ ID NO: 228276 - DNA, 455 bp, Homo sapiens
caaacagggtgggctctagcgtcctccgtggaccctggacacacctgcctgaccaggctgggtgccgagcctgtggcaccctgggagggaagatggccgcagcacccacatctctgagagtcttggcagaagggcctggtttggaagttaaaaataggccccctcccaaggccaggcgcggtggttcacgcctgtaatcccagcactttgggaggccaagggcgggcagatcacctgaggtcagcagttcaagaccagtctgcccaacatagtgaaaccccgtccctacttaaactacaaaaattagctgggtgtggtggtgcttgcctgtaatcccagctactcgggaggctgaggcaggagaattgcttgaaccccggaggtggaggttgcagtgagccgagatcatgccatcgcactccaggctgggggacaagagtgagacttcatctcaa

SEQ ID NO: 228277 - DNA, 187 bp, Homo sapiens
gagattcagaggcactttattttgtagcatggacaggaaggcagctgggttgtctgtgttgtggggaagtggctctgctgttacttttccaaggagagggcaggatttctatgccaacagcagcctctgtgagggcaaagctggctgtgggtcaaactcagagctggccgctggcatctccacatcc

SEQ ID NO: 228278 - DNA, 464 bp, Homo sapiens
aatatctctaagattttggaaataaaaggaagtagttgcatggtttttcagccttttacataccctgtgtgaaaagcctcaagcagaaaatttatgttttaattgtcccaggaagcagaggtaaatggagctcctctttgcagcaatatatcttcaattgctgggccttaaagttcccacagaggccgggtgtggtggctcacccctgtaatcccagcacactgggaggccggggcagatggatcatgaggtcaagagatcgagaccatcctggccaatacgatgaaatcccgtctctactaaaaatacaaaatcagctgggcgtggtggcgggcgcctgtaatcccagctactagggaggctgaggctggagaattgcttgaatctgggaggcggaggctgcagtgttccgaggtggtgccactgcactccagcctgccaatagagtgagactccatctcaaa

SEQ ID NO: 228279 - DNA, 399 bp, Homo sapiens
caggtctaattcaagaatgaaactcttattagaactgattattattgccctctgctatagtttaaatgtgtccctccaaaattcatgtgttggaaacttaattgctgttggaacaatgttaagagatggggcctttaagaggtgattaggccatgagggctctgctctcatgaagggattaatgctattattgtgagagtaggttagttatctcaggagtgggctcctgataataagataagtcctgcttccattttctctttgtctcacatacatactcgcttgcacttcatgtgatgtcttccatcatgggatgacccttcccagatgcaggcatcatgctcttggactttacagcccccaaaactgaaagccaaataaacttttgttctttaaaaa

SEQ ID NO: 228280 - DNA, 534 bp, Homo sapiens
ctacacatgaacaagaagttctagaaacagttcgttttatctgaagtgctttctcttcctgcccactccgtccagcctcaggcccgctttctctgcatctccgcagagctgtctctaatccttcaggagctccctctgaatactgggagtctggttcttctctcactccacaacttgaaactaataaggagctgtcttacgtgacctgagatgtgtactctatttcctggctatttcctcaaatcctttcctgcagagacccctctctgccataagtaagagcccacctcgtgtttatgcccatgggagcccacagttggtattgtgtaatcacttttcggagttttattgactgcttatttccgaaaaagccacacctaccctagccactagtcaatgaacagcaaaatggaaaaacaggccagcaagctcaaatccctgttcagagaaaaccagctgccttgacagataacgtcaaggctgaaattcaatgtctggggcactcaagtcaataaaatatttattgagcacatg

SEQ ID NO: 228281 - DNA, 652 bp, Homo sapiens
ccaccaccattgcaactaatgtgtgtatgtgtgtttacatcatattatggatattgcttttttttttttcttactgtttttaattttttgtagagacagagtctcactgtgttgcccgggctggtcttgaactcttgggcttaagcaatcctcctgccttggcctcccaaagtgctggaattataggcatgagccaccgtgcccagctgtattctttaatttgcatttttactcagtagtgtcttgaatatctttctcttaacaaatatacattattattattattattattactatttttattttttaagatggggatcttccaagcaatcctccagtcacagcctcttgagtagctgggaggtacaggcacgtaccactgtgccctgctgatttatcccttttaaacaattctgtcataatgtccatgagatgactgaattctaataatttttttatttgagacagagtctcgctacaggttaatttttgtattttcttttttgtagagacagggttttgccatgttggccaggctggtttcaaactcctggcctaaagtgatctgcctgccttggcctcccaaagtgctgggattacaggcgtgagccaccatgcccagcctctaatcctttttttttaagtttttttt

SEQ ID NO: 228282 - DNA, 235 bp, Homo sapiens
aaccctcacccgcaccagcccactcctgaagaaggcctttgaatgactattccacagaccaaagcattttagtcagaggcaacatttccacaaatagtgtttttaaaaaaattacatgctactgaatatcattggcagtgttatctaaaatacatatacacagatatatatacacataatatacatgtaagtatatattaacacatgtgtattaacgtgtatgtatgtgtatttg

SEQ ID NO: 228283 - DNA, 239 bp, Homo sapiens
attatcaagggatctaaatatcaacgttagctctaataatcgatattagcatctcattttttgatccaactcaaaaaagagtaataaggatgtagaataaccaaaggtaattatgtccatttagaacaagtactttaaaaaagaaattcaaggaagttttttataacccaaggcataactactactgtgttaactcgttaggtcattagggtataagaagtatacatttaattaattag

SEQ ID NO: 228284 - DNA, 596 bp, Homo sapiens
aaaataatttaatactgaaatgactctgtcaaccttacattttctgttttaaaacaccacaagatcaccgtgttgagtttttgttggacaaaggagctgtttatgttatgctttctccttatttttttcaaatgataatctctatctctctagattttctttcctttttttttttaagaaaaatagaggccaggtgcggtggctcacacctgcaatcccagcactttgggaggccaaggtgggcagatcacctgaggtcaggagttcgagaccagcctggccaacatggtgaaagcctgtctctactaaaaatgcaaaaattagccgggcatggtggtgggcacctgtaatcccagctactcaggaggctgaggcaggagaattgcttgaacctgggaggcggtggttgcagtgagccgagatcatgccactgtactccagcctggcaatagagctagattctgtctcagaaaaaaaaaaaagaaaagaaaaatagaggccaggtgtggtggctcacaccttaatcctagcactttgggaggccaaggcgggcggatcccttgagttcaggagctcgtgaccagcctcgccaacat

SEQ ID NO: 228285 - DNA, 586 bp, Homo sapiens
  misc_feature (29)..(29): n is a, c, g, or t
gtctcaaaaaaaaaaattgtcagctgagnccaagagttcaaaaccaggttggggcacatagcaagactgtctctttttttaaaataaataaataaattctgagtatcaggttcttctggacaataagaataatggctcctgccattttctttcctttttttttttaagaaaaatagaggccaggtgcggtggctcacacctgcaatcccagcactttgggaggccaaggtgggcagatcacctgaggtcaggagttcgagaccagcctggccaacatggtgaaagcctgtctctactaaaaatgcaaaaattagccgggcatggtggtgggcacctgtaatcccagctactcaggaggctgaggcaggagaattgcttgaacctgggaggcggtggttgcagtgagccgagatcatgccactgtactccagcctggcaatagagctagattctgtctcagaaaaaaaaaaaagaaaagaaaaatagaggccaggtgtggtggctcacaccttaatcctagcactttgggaggccaaggcgggcggatcccttgagttcaggagctcgtgaccagcctcgccaacat

SEQ ID NO: 228286 - DNA, 268 bp, Homo sapiens
atccaagaagtttacatccatgcacctccctaaaaaggataaaacttagcctaatgtccaaattaaaacagctattcttgcatgcagtcattcaaccaacactaagtgagcactgacacaacagtgttagccacagtacatgcagggcaaatgatgtgtctctgctgcatcccagaggactcaggtcagtaaatgactgcaacaggaactgatgtgggttactaacggagacatttcccacagcttaggaaatggaggggatcaaggg

SEQ ID NO: 228287 - DNA, 280 bp, Homo sapiens
acaggatttggagttgaggaatttgccattgtctgaaagttatttgagtagtaactcagatggttctaacaaaatctagcttgttgacaagcagatgctcagttttggctttcaccacagggagagttttcttggattattaatgaggtttagcttattttctcacctttacttaatggttctagttcatatttagtgaatagtcctccattcatgttctttgcccttttatctataacggtgttatgtttttcttattgatttatctatgttattaacc

SEQ ID NO: 228288 - DNA, 428 bp, Homo sapiens
agtccagatgtaggtgatggcccaggctatggcccatctggggaaaggtctccttccaagcttatgtaactgttcttaggattaacctctctgacctcatcaagaagaattcattagtgaattattggaatcacttaaacaattaatactaatttattacaaattattcccataatgtggagaaggcatgatttcccattgtatactgatttagtttactctgataccacaactagacaaagacatttcaaatatggaaaatgaagagcaatataccttatgaatacaggggcaaaaatcatcaaggaaatattagtaaaacaaaccagaaacatgtaaaaagtattatacactatgtcaagggtatttacctcagaaaagcaaaatttagttcaacatacaatacaattagtgctatgcactatatt

SEQ ID NO: 228289 - DNA, 487 bp, Homo sapiens
cggcacgaggattattagcacaaattttgacttaggctataagcttcacctgtgaaccttttcttttcccctcgttttactcttaccccagtatcctattatctcatacctaaggcagtgatggtttctcagacctcttagattgagaagatgtggcatgggtgtaaggtccctcaggtaattctgagggttgggtaggtctggtatctactcttttacttaattgacttcctccagcctggtggacagagcagactctgtctccatcatcatcatcatcatcatcatcatcatcatcatctctcaagcatcagtaagaccttattctataatgatgatggtcacacaactctgaatagactaaagactagtgaattgtgcacttcacataggtgaaatgtatagtatgttaattatatccaagaaagctgtttatttctaaagggatttatcattctaataacaaaaataaatgataatagtgtga

SEQ ID NO: 228290 - DNA, 388 bp, Homo sapiens
gctggggctggccggaggaaggggccctgggtggccttcagctgctagagagcaaaccccacaaacctaccgaggatgaagttgagggacccacggttaatcctacgtggcctgccagtgagtcccgggctccccagggaggctctgccccttgcaagcctgagacttggccaagtcactgtagcgagctaaacctcagcttcatcgtctgtgaactgggaatgccagaaaggatagaaccagggagactgtaagaaaatgccttgaggctgggcgcggtgactcacgcttgaaatcccagcactttgggaggccgaggcgggcagatcacctaaggttgggagctcaagactagcctgaccaacttggagaaacactttctctactg

SEQ ID NO: 228291 - DNA, 280 bp, Homo sapiens
aaaaaaaaattctgaacatattttgaaggtaaaatcaataagctttactgatagatttggatttggcatataatataaaaagaagagaaagacaagaatgactccaaggattttagctgtaacaattagaaggagaaaagttgacagttattgagatgtagaaggctgtggaagtcaggcacggtggcccacacctaaaatcccagcactttgggaggccaaactgggaggattacttgagttcaggtgttcaagaacagcctaggtaacacactaatac

SEQ ID NO: 228292 - DNA, 574 bp, Homo sapiens
gtggaatcattaaagtaataataattattaataacagtaatggtagccgagtggcacgcgggggcgtgtgctctgcgggacagtcccccacggccagcgacgtccaggtcaccaatgggattctttttgctcttgtcttgagaattttttcagtcctatttagctggtgaaatccctagcttgttcttgatacacgaacctatttattctcgtggttttaagtcctccctgccctctctcctctcccctgcagcagggcagggacccctctcccctgagacctggagggcagctggagccacaggagaggccgtctccaggagccctgaccttggagagggacacagcgacccggcagggaggagctgctgctgtacactgacctcacccctcctgaccgcttggcttgtctaccggctacgcattggctgaactaggtggaggccagggagcaacgaggccccatggatcctgtacctacagtcagcttcccggggcacagagcaggggctggcatggggcaatgggaagatgtccagcacctgttttgaagtgtgaataaaagcatcgtaga

SEQ ID NO: 228293 - DNA, 356 bp, Homo sapiens
tttaaaaatagagaaaagagtttatctttaaaaattaaataactatatttaaaatactttttttttccaaaataaaataacaatctggaagacaatggaattatattatcaaaataacttaagaaaatatctgctaatctagaattctgtacagcaggataccctcaagaatgacaattggcattatctgtcaaatttaaaaatatgaaaactttattccaagtagctttatacctaaggtctacccaaggtaagaaatgtgcacacatgtacacctagggacatgtatcactatgctcactacagcattattcttgttaaccataacttgaaaacaacccaaatgtccatcaaca

SEQ ID NO: 228294 - DNA, 479 bp, Homo sapiens
gtggggctgctttgccttctagaggagatgcagttattttcccctagatggtttgtctctacatgcccattaagacgtcactctactataggcagttaagaactgacaatagctttccattctgtgttgttgatgaaaatttttattttcacaaaggcttcctgggtgggtaaatcacttcattcctcttcaggaagtgaatcagtccatagaatagcgctgatgctgcaaagccatctacaatctcctctaggatttcaaccctagcccatgtgctcgcagctccctgtacagaagagttgggagggcaaggcttatttattcatccccttgagcatctaagagcctaggttctttgatgaaggcaaaagttttaaataaattgatcatacaatttaagagataacacataaaccctcacagacagcaaagaataattccaagactacttataaataaatgcacatggtatacattaa

SEQ ID NO: 228295 - DNA, 335 bp, Homo sapiens
ataaatttacacacgaataaattgacactgtagcactgtatattgatgttcatcatactgttgaaagtctgactaattactcaatttttggagatagcattatttaaacagttcactataaaatgatatttaagttctcaattttttatattgtaaatggcaagtgaatatttttatatgtgtctgcacagtgtgcttctgtaaaacactcctaaaagtagaattggggagtatattttaaaatggttattttaaactggaatgaggtaatctgtgagtttcaggttgatagatgaaaatacatgcttcttgttagacaataaatttctcttaaa

SEQ ID NO: 228296 - DNA, 406 bp, Homo sapiens
tgcaagcaattgcttattatatgttcaaaccctttttatgggtcaaataatgtcacagtaatgttatttaaattgtgttttgctctgctacctcatagatacattgagtcagttgataaatatttgtcttgcatattaataataaatgtcaagcaatcctatgaaacatgaagaaagaatatgaacagccacttaacatgagaagtaatagaaataatcaataaacactttaagaatgcttacagtttgaataagaaggaaaattaaaatgaggccttgataaatgtatcatattgctgctgcagtgttggatcctgtagtccccgttatttgagaggctgaggtgggaggatcacttgagctcaggagtttgaagccagcctaagcaacacagcaagactctgtc

SEQ ID NO: 228297 - DNA, 506 bp, Homo sapiens
atagtcatgctatagtgctgtagaacattagaactcattctttctatctagctttgttcttgtatccgttagccaacctgtggcagtccctcttctgctacattttatgacaatttgttgtatagttcaagatccttctttcagattttatttttaaatggcaggggaataggtacactcaagtacgtctacattgttagtaggcctgatatagatttggggcaagtggacatcaatagtccttcctcagccaggcaaggtggctcatacctataataccaatactttgggaagccaaggcgggtggatcactttaacccaggagtttgagaccagcctgggcaaatggcaaaaccccatccctacaaaaaatacaaaaattagttgggtgttgtggcacgtgcctgtggtcccagccacttgggttgggggtgctgaagtgggatccgcttgagccataggaggcagaggttgcagcaagccaagatcatgaccctgtctttaaa

SEQ ID NO: 228298 - DNA, 318 bp, Homo sapiens
ctagctaaccataccaagtgaagcttaaataaagaagctctatgtctggtgtttatcttgtgctcaggggtaggtgtaatcacttggcacactgtgtaaagaaaataggctttcccaaaacctcgctatagagtagggaggttccaccagacatctcacagtcttagagctcagagtagctaaacatgcaagtggtcagtgtaggcaaaaagcgacagacagacgttcacaagatcacagtgaaagttctgtctaaatactaggttaagggatagttatcaatccctagttataatgttagtagacacatttggagca

SEQ ID NO: 228299 - DNA, 477 bp, Homo sapiens
agccagagtcaataattattagttctttatcttgagacaaagggaagtgttaaaatatttttatatcaaggaatctcctacaaacactgtcctccccactgcccactgccagtatttacatgaattaattttctccttatcttcttactctcgcccacccgcttccctttccttccgttccaaagttatactacacttattcaggatagaaatttcctttataaaaagttgtaaaaacttcaaagtgcctgttgtagtatatatctttaataaatactcccctgctatatttgttaaactataattatgagcatacatttcataaaaataaagcccatttactcataaactgtatgtttacatgaaaaaatacacattttataacccactccagacctactaaatctgggcgttagaatctcaatcttgggttttccaacctggctcctttttcgaaataacctggaacacttaaaa

SEQ ID NO: 228300 - DNA, 479 bp, Homo sapiens
gctccggcctgacctctccacggggtccacaggaacgtctccggctgccaggagtcgcaaggggccgagcaggatgaggaaaccacaggcggagtccgggggaagcagcgtggcatcccagcctcaggcctgccaggacggtgttcgggggtggagccaaccaaagtcaaagaagattgttgtatcttttcacagctcttctctgagaacgaagccacacaacgatagaatcttgaagaagaagctaggaatgggagatggcaacaatccctgtcactggaacactggtctctctggacaagtcaccagtttggcacccctccccttatgcctgtaccgatggcatggtgctatatcctgcctgggctctggcctctgctctgtcctccctcttgctctgtctcccctgtttctgaggggccttgatgtttcttgatctgtctgaatgtcttcaacaaagaccacttcccagtcctcca

SEQ ID NO: 228301 - DNA, 437 bp, Homo sapiens
gcctagcagtttgagatcagcctggacaacatggtgaaacccgtctctactaaaaatagaaaaatgagccaagtgtggtggtacatgcctgtagtcccagctacttgggaggctgaagtgggaggactgcctgagcccaggaggcagagaatgtagtgaactaagatctcaccactgcactctagcctgggtaacagagagagaccctgtctcaaaaaaaaaaaaaaaaaagggaaaaaaaaaatcactggaagatctgaaaaagcttttattatatgggttatatctactgatacttattgatatggtctggatctgtgtcctcaaccaaatctcaggtcaaagtgtaattcccattgttggaggtggggcctgcctggaggtgactggattatctgggcaatttctaatggttcagcaccatccctttggtgctg

SEQ ID NO: 228302 - DNA, 1080 bp, Homo sapiens
cttgagcccttcatgggctagcacaccaacaccatccccccagatgcttcagttgttggcttcgaatggcttactatttccatttctacggagaactgccatctcaggaatcacctcaccctggagtttattcccctcacccacagggtggctggcagccaacagctgactcgtacagagagtggcacaatgaagatttgaacccacgtatgtctcactggacgtatgcccaggaactggtaagctataaaaagacctcctttattgtctggagacatagaattagtccaaacggtgtcacctccaggaagccttactgtcacttccatggaggacagtggcctgggcccacaccaccctcctgcctgtcttcagcctttgctagtggatccttttcccacttcgaagactccccttacatcctcctccatgttgtcctccaaatgtgctggctgagagcccagcgcctgaatcagagggacctgggtttgaatcccacctctgccattgaacaccagctgtctgaccttgactgcgttcctttgcttctctgggcttcagattccccatctgaataataatagaagctaccttgggattgcctcaaggatcaaatgcgagagagttcaccttaaacaatgagtggagggcctggtgtgtaataaagcactcaataaatgttaactattattgatcttcaaaaaggacgaaaaaaactaaaacacaacagacaccgacaaaagaaacaagacaaaaaagagggggggcgccactaaaatgtcaaccagagagaggccaccagcaatacgagaacgcacacgaaatgtgtgtgacaaggggcccccaaaggggagctgacaaaacacagaggagacccacacgcgagagcgggaaatacaagaagcgcgggcgaggcacaaagtaagcacaacaggaaccatccgtggatgagacccaccacactacgcgcggacccaccaagtgacgaacccctccagaggaagagaagaacagagaacaacatagacggaagctggagaaggtgcaacacacacaagatggagcggacaaaatgacaca

SEQ ID NO: 228303 - DNA, 430 bp, Homo sapiens
cttgagcccttcatgggctagcacaccaacaccatccccccagatgcttcagttgttggcttcgaatggcttactatttccatttctacggagaactgccatctcaggaatcacctcaccctggagtttattcccctcacccacagggtggctggcagccaacagctgactcgtacagagagtggcacaatgaagatttgaacccacgtatgtctcactggacgtatgcccaggaactgattgggaaagtgaggcccaggggtgcaaaccagtccaatattagcggcagagctcttccctagacccgtcttgaagctgctgccccatcatttcctccaggtagctggtggatactgtttatctggtgctcactatgccctaggtaacactgtaagtgattttcattaaatttaatctcattcaatcttag

SEQ ID NO: 228304 - DNA, 523 bp, Homo sapiens
agtgagtcatcatctgtttcatttatctggcattcctaagctacctttgtcgggctgcaggaattaatggaacacaccagtttctaagcaaactttttggattttaggcttcctgatgcttcaagcagggtcaccaggaccgctcagggagagagaacccagaaacctagcatgccagcaaaaggatggatcagagggcccctgaatcatccagaaaagagtgtattttcacaggtaaagaaagctttttatggtttaaatcttctggaaacattagagaaagactgtcattgctatccacactacaacaaaacttcatccacactacagcaagactttgggctttggattcatggcctcaaaactgagaagggtccctccacatttttggaactgtgcacccattggaacccttgagggaaagctaaccagggaaatttgaagaggatgccatccttgatgggaacagcttttcccaaggtcacagattaagacttatattgtcatgaaaatcttacctttg

SEQ ID NO: 228305 - DNA, 1233 bp, Homo sapiens
tagatatttggtgtcagggttgcccaagacataacctagaggaagatgggtcagagaatgcttctcagagctgagtcttcaaggttgtgtagaagttctccagaggacaaggtggtagaaaggagtctaaacaaaggaaggaacttgtacaaagacccagggcgagcaccactcatttggagagtcgggagagatccggctgaaggggctagcagggttcttgaaaaccacaccaagaggtttaggctttatcctgtaggtggtgaagaatcaatgaaaggttttaagcaggaaagagaacgtgatgtgcttcaatacattctctgatagcatgtgaggaagtaattctcagtgggagagacagctgtgattgcttgattccacctctcccttgccccaagctaataatcatcagatcccctgtgctttgctggaccctatcccagacttacagagtcagtctccaggtctggatcccaggtatctattgttgaattgttcccaagtgactctgacatgtgactgggtctgggagctgctgaattgagggtgccagggggatctttgaggagacctagggtattcttcaaacagtgggtttcccagggaggagcttttccataaacaagaacagaaacaaccttagtttaaaacagaacaaaaaaccttcccccagttctgatctattaatgatatttgccaacttccattgtgtataatcttccattgtgtatccaaacacttacctgtgcctactctgtgctacagcttctgctgaatgactgcaatacagtgacttgtgggacacaggctctgcccttgaaaagctcacagtattgtggaaaggacagatttcaaccactagaatatatatgataagctctattctagagatacgtttttaaacaaaagagtgttaggatatcctagagcaaagccaagttcattcttcctgtggacttaacaggatgtaacacccagatcgagcctaaaaaaaagagaagaaaaaggcagaaggaacagcatatgggaaggtgtgactactttatgtatttggtccttcttggcaggatgtgcagaagcagagaaggactgaggagaggcatgctatgtcttgggaagggccctgtgtgtgtgccttcggttctgtgcctgtgagcctgccttcatccttcagactctgggtggctcccagcacagcagctgcatggttgtgcagcctgtgggccaaca

SEQ ID NO: 228306 - DNA, 664 bp, Homo sapiens
tgaaacaacagcagcatttggtttgctctacacccctgccacccctcgcccgcaagcccagggagtggtcagcagtggggctttgtgacgtcgaagccaccctagggctgccattggctgggacactgcctgtatgatcaaacaaagctcaagggtgtggctttgccttgtcaccaggagggtatatacagggagggcaagagctccgggccactgcgaagattcaaaacctacaaaagcctgccgctgacattgaagaaccaatatatacaatggacaaacaatccagtgccggcggggtgaagaggagcgtcccctgtgattccaacgaggccaacgagatgatgccggagacctcgagtgggtactcagacccgcaacctgctccgaaaaaactaaaaacatctgagtcctcgaccatactagtggttcgctacaggaggaactttaaaagaacatctccagaggaactggtgaatgaccacgcccgaaagaacagaatcaaccccctccaaatggaggaggaggaattcatggaaataatggttgaaatacctgcaaagtagcaagaagctacatctctcaaccttgggcaatgacaataaagcgcgatgcggccgaaagtcccttacctctgtcagcatagatagtatgaggaggtaaa

SEQ ID NO: 228307 - DNA, 620 bp, Homo sapiens
tgaaacaacagcagcatttggtttgctctacacccctgccacccctcgcccgcaagcccagggagtggtcagcagtggggctttgtgacgtcgaagccaccctagggctgccattggctgggacactgcctgtatgatcaaacaaagctcaagggtgtggctttgccttgtcaccaggagggtatatacagggagggcaagagctccgggccactgcgaagattcaaaacctacaaaagcctgccgctgacattgaagaaccaatatatacaatggacaaacaatccagtgccggcggggtgaagaggagcgtcccctgtgattccaacgaggccaacgagatgatgccggagacctcgagtgggtactcagacccgcaacctgctccgaaaaaactaaaaacatctgagtcctcgaccatactagtggttcgctacaggaggaactttaaaagaacatctccagaggaactggtgaatgaccacgcccgaaagaacagaatcaaccccctccaaatggaggaggaggaattcatggaaataatggttgaaatacctgcaaagtagcaagaagctacatctctcaaccttgggcaatgacaataaagtttgagaagctga

SEQ ID NO: 228308 - DNA, 316 bp, Homo sapiens
tcctggcctctccctgttttcttaacagatgccggagacctcgagtgggtactcagacccgcaacctgctccgaaaaaactaaaaacatctgagtcctcgaccatactagtggttcgctacaggaggaactttaaaagaacatctccagaggaactggtgaatgaccacgcccgaaagaacagaatcaaccccctccaaatggaggaggaggaattcatggaaataatggttgaaatacctgcaaagtagcaagaagctacatctctcaaccttgggcaatgacaataaagtttgagaagctgatggctgtgtata

SEQ ID NO: 228309 - DNA, 1162 bp, Homo sapiens
cagggggcagtgagatagtgttggcaatcaactgtaggcattagggagcaattggtaaagtagcagatccagggtactattaacaatcccattacaaaggctaaacatttatttatttacacaaaatcctgtaatgaacaattagaacatgaatatcagctaagccaggacaaatggtgcaaaacactgcccgcagaatgcaatgtattaatttatgaagtaggctataatagcctttatcatgcaaaccttgtatttataaaaagttaaattagtcttaccatgatggagtaacttgagactagcccttccaccaaaactactaaaaaactggacaagatacatgaaacagctattcttggatgctgaacaatagcaccgaactgtgatccctgagagaagacaagcaaattacctgtgccttatgattgtcaaagctttgtattttgaggcagtttccagaccccagccagaaagggagaaactgagaatctagggagggtggaaacccaatcagaaacttaaatgtgtctccgaaggctgaagcagctgtaatttgtgaggcactactacatctttactaaattagctgcacatgtattaggtgagatttcacgagggtaggcaaagaacaaccactgggtaacaagcaactacttgggaactataaacacaactaccagagtttacacaggcattctccttctgactgattaaagagaccttactaaactcaggccattcagctgaaacctttataaacacagctcaactagcccgagggcaaaggctcctctacaggcccagatgaacaaagctttaaataaaaacaagcctaacgttgaattatggattttctaacatatccaaaagtaaactgtatgacaatagcaaaaagaacagaagataggaaaatggagacataacgccataggattcttatacattaagtggtatataatttgaaggcagaatgtcgtaagttaaaggtatctactatagagcagccacagagaaaaatagaacaaataagtatatctccactaaaagaggggataagatgaaatattacaaaatctttcattcaaaaaatgacagaaaagaatagacgggatgaatagaaaacaaatggcaaaatggtagactgaaacctaaccatatg

SEQ ID NO: 228310 - DNA, 229 bp, Homo sapiens
tgggatgggggacagggtctcactctgtcacccaggctggtgtgcagtggtgcaatctcggctcactgcaacctctgtttcccaggctcaagtgatcttcccaggtactttaaaagatagaaagatgctcatcctagtgacagaccaagagacaatacaacccaaattggacaattaaggtgccgtgattccctacaagtattgctttattcccttctgtcgtcttctc

SEQ ID NO: 228311 - DNA, 358 bp, Homo sapiens
ggggtttggggcggtgtcctcagtgcgcagagcggcttaaatcagaggctgagcccggcgcttccatatcacgctgtactctagctaaggactgggaagcaagtctatccaaggctccttcatgtaaccacgcggcagttggcaggcactagtcctagacaactgagttctccctgaagaagagttaaagcaaaataaaaactcacaaaaaggaaaacaacacgaataaaaagaactagcatgggacctaaaggacgttgctgaacaaggaaaagagcccatcaggtagaagacccagaggaacaccaggcctctgaaaactatttctgaacctaaaataaagatatttagaaaactg

SEQ ID NO: 228312 - DNA, 463 bp, Homo sapiens
agtgcccatgagggaagcctgcaagttgctgatagggcagcatgagtttgtcagtaaatatcagaagaattacggaaatagttgatgttctcatttaatcttactcctttaatcttcaggatttaatctctcttttaaggttttagagatacgacttttgaaattatcttggatcaaacaaatcggtacattaaataaatatattaaagtcacatgtgtaacagtgtatcaggaaagcaatcatgtgattcaggggcattcttactggcattttatttaaaacgttttttcctttcatgttagatctaccatttattgcattctttgaagaatacaaaagaacagattagatttgagatttgaacagatgagatcccttgtcctaattcatgccagaatataattgaacttgacttcagattacgtttatccttgacacttgaagtggaaaaaaacccataaa

SEQ ID NO: 228313 - DNA, 377 bp, Homo sapiens
gaaaggagatcctacaggggcccagagccgagagacttgaaagaaggcaaaagaaacatcagcaaagtatgctattgatctgtgacccagtgaaggacagactccttcactccggggtcaccctttctcccttcaggggcaaagaggaagtcataagattccatttcatttcattctagttttatttgtagaaataatcccccatacttctagaaaagattcatggaagattacagttaaaggcagggtaaacaagagcagaagaactaatgttaaataaagaaaatgaaacaataggcacaccagaaacccaggccaagaatagctacaacaattgatgataaaagttagttctgagcttctttgtcttgagaatt

SEQ ID NO: 228314 - DNA, 529 bp, Homo sapiens
accaaggggactctgcatgggcacatcccggccctcctccctgcatgttctccaagccaggtctttgaaacctccagtgatgggaatgacagaatctgggatgattttcttctgtttcttatctaaaaaaacaacaaaaagctcagcatacacggactcacacaaaccttttgctagaggcagctctgtagacttaagacgctgtcatttttcagaagaacccagcttgctttggaactacagtcagccctgcaacccaccctcaccttggaccctgctgctgctgtctgtaaagacaatgctgcgatgaatacacctgtgcattcttttttagaacaagtgtaagaattcctatgtggtaagtctgtttaaagagaatttcagattcacgtgtagatgtgttaagtttgagcgatgttgccaaactctcttgaacttataccctctgtaataatatattgggatatttgtttccttttgttcttgtcagttttcatactataaaacttaaacatgtttgacaatctga

SEQ ID NO: 228315 - DNA, 254 bp, Homo sapiens
acctgcatcctccagaacttgcttaatcatctgtaagttcttcatttccactgaatccttctcttctgcctacatataggctcagttctccataaaaataccattaacaacaactgaagagaattttgatcaatcccaacacccctttcaaggtatcttgaatgttcctttgttcccttcttctataatgacataagagcgccacctgccctcacttccccaccaagaccacattctagtgacctctgtcatcg

SEQ ID NO: 228316 - DNA, 507 bp, Homo sapiens
gagtgctcattaattaaatttgtttggctttatatgtaaaatgaacattgatgaaattttaggtctagtatttttctgcaacagaagaatatgatttctgtcatttgggctagattaggtctggtaggaatgacttttggcatatatgcaaattttatagatagcttctcctgtgtggccctatgtatgctttaaatgccatgaaattgtcgatgattgtaatcagatacgatcccagagctgcctttttcctttagtaagggactgttctctaaggttaattttgtcaggctttgaactttggtaggggagtcatatagtagaaggctaaagaaccacagaagattagcctagtgattttcaaactctaacccaaggcaccctacaagttgttcagaaattcttcagtgccactgcaggagagttggaaagatgaaaaggcagaattctcatctccatatctcactttaggaggagcatcttttatctcttttatattgagttttc

SEQ ID NO: 228317 - DNA, 326 bp, Homo sapiens
gtaaatctattctgttccacagtgaagggtcagagttggctactttctcccaatgggtcagaagtgagactgcacaggtttcattcagcctctacctcctgctgtgccaccttaatcaaatgcttatcctctccaggacctcaacagattcgtgttactaaaatacctacaaaaatgcttgtgtttatgtttaaagaacaccttccaggccaaggtcagcccccgtggaagactccccaacagtcgtggatgggctggaggagagaagtcacaacatgtttcctgttaaaagaaactttaaaccgtaaatcactttctcacaagga

SEQ ID NO: 228318 - DNA, 484 bp, Homo sapiens
taaaccccaagggcccattatatgccagcacggtcctagagattccacactcattcagttccttttcatcataggaagtgggcattataatatcaggtccactgtaagaggtggagcctgggcatggtggctcatgcctataatcccagcactttgggaggcctacctgtgcagatcgcgggagcccaggagtttgagaccagcctgggcaacacggtgaaactctgcctttacaacacatataaaacgttagctgggcttggtggcatgtccctgtagtcctagctattcgggaggctgagatgggaggatcgcttgagcctgggaggtcaaggctgcagtgagcccagattgcacaactatactccagcttaggccacagagcaagaccttgtctcaaaaaatacagtaaaataataaaaagaaagaaagagaaaggaacagatcaataggtacaataaagtaacgtttgtataaaaaaagc

SEQ ID NO: 228319 - DNA, 672 bp, Homo sapiens
gttcctataagatcagtgccagaagttctctctgcaaagggaaacaaggtcaaagttccagattcgatgaccacattggtgtaccctgcccatgcatcccctcaattgcatccagcttgggcctgtcttgaagacagatgggaaagatggagagaaatgcctgctctagatcctggcacccaaacctcatgctgttccagggactgtctcaaagtgccacagacttgggactgggaggatcctgtggaggacaccgagtctcctacctcaaataaagaggcttcatctttcctcaggaaccctcagcagaggtgatgcacagttctcccagaagtctagcccaaatcactctccttgctgcaagttctgcccactctcttttccatccttcaagtggacagaatgaactggatccaacatgacaaatcttcacacatgaagctacagaaggctttatccactaaaacaattccgctgtggattccccatcacagggtttcagtatgagccaaggatgcattcaggaaataccaaaggacagacatttagagacacatatgcatgctgcccctgtccaacctcaactgtcctaaaggaatacccccagaaaaagcctaaaccatcatggctaaatccgctgtaaataaagataaaccattatttcctccttca

SEQ ID NO: 228320 - DNA, 603 bp, Homo sapiens
gtgctgttctcagatatcctctgaagtgtgtaggtgtgaagggccatgatatttgtactttctctcaaaggcatcagcaatcatcataacaataatatacacatgtagaaagagacagaaagaaatgtgacaaaatgctaacaattgttgaatctaggtaattgtagctgggcattcattgtactatccttgcaacttcagatagacttgaaatttttccccaaaaaaatatatttttaaactaaaagtgctatctgccttctgtcctgcttatgctttgtgtgtgtatgtgtgtgtttgtgagtgtgtgtatatgagtgtgtgtgagtgttgtgcccaccacccagttggtgacttgggctgggtagccctcatcttccagcctcccctttgaaaactggctcatcctgtacaggttggccctagacagttctcagtgatgtgaccaccagctcagaccttgtcacttgtcacagactcctgctcccatgaaactgctcatggaactgctctgggtgcagggccatgtcttttccttcccacttcccaccagttttttcaaacctggggctatctttcccctccttgaatcttcaagggaga

SEQ ID NO: 228321 - DNA, 499 bp, Homo sapiens
aatcacctcacccctctgggctctgctgccttcacgagtaaatgaagtaggctaatccaaggggccccccagcccaagtgactcgcactcttcaactctaccaatcttccatgctatgcagaagagccaggtctaaaactcaggcataaacccgtgctggactatcaggccagtgctctttccacttcccctgccatgccacttctaataaaaggcagtagaaaagcccccaaagcagctcttcaacaaatcactccctcagcagctaggacttggcctctgggtacctcttcccccaacttcctgccccatccccagggcaagttacccagggagctaatgggttgtcctatcttccaggaagggagtggaggacagcaggtgtcgaaaggagaagtgaggccattgcatccagggggccagcccggaaccacaggggagagatgtataacagagagataaatgtacacttttggttctcactccctagtttcctcct

SEQ ID NO: 228322 - DNA, 356 bp, Homo sapiens
aaccacgagatagtggggattgcagagccctgcgcaagagaaggaaaattaagacgcagcggagcccaggaggtgcccgcacgcgggaaggactggcgtgcagacgaggcagggggaggtttgcactcggcgtggcgcgggtgagccgcgtgctctcgggcacccggccgccagttcggatgcttccgatcctcggggagccggggcgctgcgccggagtcacttcagcccatgttgttcaggtgacacccggggaagagcagactccagtgtgcaaaacgtttcggggtttccgggccagcggttccgggcgcgcctcgcgggcggcggcgcagaactacaacccccaggctccc

SEQ ID NO: 228323 - DNA, 414 bp, Homo sapiens
ggatttgcatatgttaatatggagaactgcaactatttaatgagaagcagtgggccacgtggcctcccttgacagggcagctttagtgtccgtgcttcccagaaccagtgctgcatgctcacctgctggactcccccaggatgtatagacatctcataagagtgggggctgcctctgggaagggactggaaaaaggctaaggggaaggagctcgggggctggcaagcccggatgcgacaaagcaccgaggtgggcttgaatatggatttttctccccagaacatccctgggaatcatttctgtcagatgcttcactggatgtcccttggtctttacagccatctatcctccttctccaacccccacctcgaattgcaacttgctattttaattatagtttctcttgccacactt

SEQ ID NO: 228324 - DNA, 470 bp, Homo sapiens
catagaatccgggccttgatgcccaggcctcgccatgcatacctgctggccggcatctccctgagacccgtctggcacaggcaacggcagggcccggcccttggagcacagggatggcagagcagggtcatcgaagcaggtggcgtgcagacagtggcttctccgcaagagctcctggctctcagggagctgagggctcctcaatggggaattctggctgagctccaggggaaagcgggttggaggcctggctcctccgcccccatctcctctgccccaaccctggaagggggtcagatatcaatgctaacatttgtgctgactcaattaattcaaacgattcacaaaaacaaacttgcttaaagtattaatttcctaaaaagaactaaaatgagttcaaataattcacataattaaattattttaattgttaatttaattaaaacatctcagttttcaaagcaaaaaaa

SEQ ID NO: 228325 - DNA, 568 bp, Homo sapiens
agataaaaaacaaatataacagcatttaagatgtatgtagaatcattgaaattgtacaatttgtatttcacagtacacgcatgcatatgtattttgttcttactaaaacagtggaaatgcggcatgaaactaaatcaatttttaaaaattttatttcttgatatgtgcatattccaccaatactctacttttggcctgctgatgaagagtaaggaaggactgaaaggaggagaaactatgggttgccttttccttctgtcatctgttcagcgtaagtggttggcagctttaaaaaaccatttactttgtactctcattggtcttctggaattcactactcatagatgtattgaaaacactatatatgaatggggcctcaaggaacagcagcagacatgtgtctgtaagtgctgatgtataaagatttccaagataccatattaataaaaaaagtgtatggaacagtgtatgggtaattgagtgtaaataaaaaggaatatgtgttatatatatatgtaagtactttgtatatgcataacttgtaaaataaaaataattttaagaaact

SEQ ID NO: 228326 - DNA, 206 bp, Homo sapiens
tataaactgaaatcatgttgagatttaccatcatacaattctgatttaccatcacacatctcacagctctgtcatataaaatcaagatttaaaaaagtaaatgctatttttgtaacataaaatacaaattgacttttaaaccaaaagtattcataatatttgatgaagattaattatttttaatttttaaaaagttttataataga

SEQ ID NO: 228327 - DNA, 457 bp, Homo sapiens
caatagtagatgcaaatcaatggaaagacagtccttgttcttggaagactcaacaaccaagaaagacgggtgccagacatgacgtgagagtatgtgaggatgaccctagatagcctgacaagggtatcgcctgagaatgtgtgaagatgaccccagagagccttacaaggctatcttgtaaaggatgttcagatttacctattcaaggcccatcttgagctctccctgccacagccctgggatcagccatttctcccaggagccctggtccgtattcatgggggatggtatttaggagcagtgttctgggtgccaggagtgctcagtgccactgggatgtcattgcatccaagtcctttcagcatttctgtattagtcagtattcacactgctattcagacatacctgagactggtaatttataaataaaaagaagttgaatggactcacagttcca

SEQ ID NO: 228328 - DNA, 382 bp, Homo sapiens
gtatccaaaaatcggaggtcagtgatgttgagcggtttgctcaggatggtagaggcggctctggaggtggccccacatctgctgacttccatgttcaggttcagagttgtgggttcagatttcagaatgcggatccatcagagaatctgtctggtcactcactttcctttgcacttttcaagaatttgatcctttttctttttaagagggagaacagagccctcttggctggcaggtgtaaatcttcactttggggtttgtttgtaccagggtatgttctttctcacacacccacatacttaccctcgcccccacttgcataggtaaacagcttttaaatgtgtattttctttcaaaataaagccacttaagctttaccaaa

SEQ ID NO: 228329 - DNA, 1965 bp, Homo sapiens
accagacttctgcttccaggaatgactggatgtggtttttctaggtggacataatacaaaatgcagctacctgaaaacaatggaaagtggacagagcaggcagattctggtgggaagtccacgcaataaagaaaagatgttacaggaagtgagcgcccatttttgctgtttttagcttggaggcaggtgcagccattgtgcaaaccaggtgtggtgctggtggaaaaacagccatctttttggactatgaaaatggaaggttgagttcagggcaactataactgccaaaagagagaagaaagagttctggaagagaaagagccaaagagggaattcccaaattctttctgctcctgtctgtggctgatcccaaaccacggacacacacagcaaaaacaaaagcatctcagccagagacaaaagagtctaaaagagactggacctgccacctgagaaacagagtttgaagttagagttcaatcacaaaaaaatgcctgctaaaacaaaataaacaaaacctattagagaaaaggtgttctcttatcagaatgtagggcctccacaacttaacgtttataatgtgtacaatccaaacttattcgacatatgaagaactggaaaagtgggacccattctcaagggaaaagatagcggagattcactccaagatgacccagatgttggaattatccaccaaggattttaaagctactattataactgttctcatgctataaaatccactatttagatcatacttaattgtgaagaaatgaattctttcctcctaagattagaaacaaggacggcatgaatacccactttcactactaacactgaattttgtacgaaggtcccagtcagttcaatatttttaaaaagattttaaaaaaagcaataaaaggcatacatattggaaagggaaaagtaaactgtctaaatttgcagatgacaaggtcatataatggtttaaaaaaagctactagaacaatatgtgagtttaccaaggttaaaggatacaaggtcaatatgccaaagtcaagtgaatttctatatatttgcaatgaacaattcaaaatggagttttaaaacatttttatttatgatagtctccaaaatactttttaagaaagaaaatgacagaagcaacccaagtgtctactgatggataaataaagtatagtatataaatacaatggggccgggtgcagtggttcatgcctgtaaacccagcactttgggaggctggtctcaaacttctggactcaagcaatcctccctcctcggcctgtaattatttcttaaacagggcacaaaaagcacaaatcacataagaaaaaaagataaaacagacttcatcaagatttaaagcttttcctcctcagataacgagttgagaaaacaaagacaagccacagattgggagaaaacattggcaaaacagctattaaaaaagccttctatccagattatataaagaacccttaaaactcagtaataaaaagacatacatagtaagtaatgggcaaatgatttgaacaatcactttataaaagaagataaatgaatagccaacaaacacataaaaagatgctgaacatcacaagtcattcaaggaagtgcaaattaaaataataataaaatactattaaatgtccactagagtggccaaatttaaaaaaaatgaaaatcaccaggtattgtggctcacacctgtaatcccagcactttgggaggctgagatgggccaatcacttgagcccaggagttcaagactggcctgggcaacatggcaaaaccctgtctttacacaaaatacaaaaattagcctggagcatatctatagttccagctactcagggggctgaggtgggaggatcgcttgaaccctgggaggccagtctgcagtgagtttagatcatgccactgtactccagcctgggtgacagagcaagacactgtctc

SEQ ID NO: 228330 - DNA, 2241 bp, Homo sapiens
accagacttctgcttccaggaatgactggatgtggtttttctaggtggacataatacaaaatgcagctacctgaaaacaatggaaagtggacagagcaggcagattctggtgggaagtccacgcaataaagaaaagatgttacaggaagtgagcgcccatttttgctgtttttagcttggaggcaggtgcagccattgtgcaaaccaggtgtggtgctggtggaaaaacagccatctttttggactatgaaaatggaaggttgagttcagggcaactataactgccaaaagagagaagaaagagttctggaagagaaagagccaaagagggaattcccaaattctttctgctcctgtctgtggctgatcccaaaccacggacacacacagcaaaaacaaaagcatctcagccagagacaaaagagtctaaaagagactggacctgccacctgagaaacagagtttgaagttagagttcaatcacaaaaaaatgcctgctaaaacaaaataaacaaaacctattagagaaaaggtgttctcttatcagaatgtagggcctccacaacttaacgtttataatgtgtacaatccaaacttattcgacatatgaagaactggaaaagtgggacccattctcaagggaaaagatagcggagattcactccaagatgacccagatgttggaattatccaccaaggattttaaagctactattataactgttctcatgctataaaatccactatttagatcatacttaattgtgaagaaatgaattctttcctcctaagattagaaacaaggacggcatgaatacccactttcactactaacactgaattttgtacgaaggtcccagtcagttcaatatttttaaaaagattttaaaaaaagcaataaaaggcatacatattggaaagggaaaagtaaactgtctaaatttgcagatgacaaggtcatataatggtttaaaaaaagctactagaacaatatgtgagtttaccaaggttaaaggatacaaggtcaatatgccaaagtcaagtgaatttctatatatttgcaatgaacaattcaaaatggagttttaaaacatttttatttatgatagtctccaaaatactttttaagaaagaaaatgacagaagcaacccaagtgtctactgatggataaataaagtatagtatataaatacaatggggccgggtgcagtggttcatgcctgtaaacccagcactttgggaggctgaggtgggaggatcactcgagcccaggagttcaagaccagcctgggcaacatggtgaaacctcatctctagaaaaagtacaacaattagctgagcatggtggtgcacacctatggtcctagctactaggaggctgaggtgggagatcaccggagcacaggaggttgaggctgcagtgagctgtgattgtgccactgcactccagcctgggtgacagagcaagaccctgtctcaaacacatatatacatacatatgtggaatacaatggaatatttacttaaaaaagaaagaaaattccgacaacatggatggaccttgaagatattatgttgagtgaactagtcacaaaaggacaaatactgcataattgtacttttatgaggcacttagagtaatcaaactcagagacagaaagtagaatgctggttgccaggggctggtagaatggaaagttattgtttaatgtttataaagttttagttttgcaagataaaaagatttctgtggatggatggtggtgatggttgcacaatgtgaatgtacttaatgccacttaaaaatggtcaagatggtaaattttatgttatgtgtattgtaccacaattttctttacaaggtctcaagttggacattaaaatgccaggcaattaaaagtatttatgtttaaaacttaatttaaaaaataattgacaagtatattctaaaatttgttcgagaaggcaaaggacctagaatagcaagaatactcttaagaaaggaaaacaagtttggaaggacttaaactacctgaattcaagacttatcattaagatacagtaatcacaacagtgtgttactggcataaagatagaccatatgagatcaatggaacaaaataaaagctttaaaatgcaccaatacttatatggtcaattgattttcaacaatggtgccaaagtaatttaatggggaaaagatagtcttttcaaaaaatggtgttagaacaactggatat

SEQ ID NO: 228331 - DNA, 1921 bp, Homo sapiens
accagacttctgcttccaggaatgactggatgtggtttttctaggtggacataatacaaaatgcagctacctgaaaacaatggaaagtggacagagcaggcagattctggtgggaagtccacgcaataaagaaaagatgttacaggaagtgagcgcccatttttgctgtttttagcttggaggcaggtgcagccattgtgcaaaccaggtgtggtgctggtggaaaaacagccatctttttggactatgaaaatggaaggttgagttcagggcaactataactgccaaaagagagaagaaagagttctggaagagaaagagccaaagagggaattcccaaattctttctgctcctgtctgtggctgatcccaaaccacggacacacacagcaaaaacaaaagcatctcagccagagacaaaagagtctaaaagagactggacctgccacctgagaaacagagtttgaagttagagttcaatcacaaaaaaatgcctgctaaaacaaaataaacaaaacctattagagaaaaggtgttctcttatcagaatgtagggcctccacaacttaacgtttataatgtgtacaatccaaacttattcgacatatgaagaactggaaaagtgggacccattctcaagggaaaagatagcggagattcactccaagatgacccagatgttggaattatccaccaaggattttaaagctactattataactgttctcatgctataaaatccactatttagatcatacttaattgtgaagaaatgaattctttcctcctaagattagaaacaaggacggcatgaatacccactttcactactaacactgaattttgtacgaaggtcccagtcagttcaatatttttaaaaagattttaaaaaaagcaataaaaggcatacatattggaaagggaaaagtaaactgtctaaatttgcagatgacaaggtcatataatggtttaaaaaaagctactagaacaatatgtgagtttaccaaggttaaaggatacaaggtcaatatgccaaagtcaagtgaatttctatatatttgcaatgaacaattcaaaatggagttttaaaacatttttatttatgatagtctccaaaatactttttaagaaagaaaatgacagagcaagaccctgtctcaaacacatatatacatacatatgtggaatacaatggaatatttacttaaaaaagaaagaaaattccgacaacatggatggaccttgaagatattatgttgagtgaactagtcacaaaaggacaaatactgcataattgtacttttatgaggcacttagagtaatcaaactcagagacagaaagtagaatgctggttgccaggggctggtagaatggaaagttattgtttaatgtttataaagttttagttttgcaagataaaaagatttctgtggatggatggtggtgatggttgcacaatgtgaatgtacttaatgccacttaaaaatggtcaagatggtaaattttatgttatgtgtattgtaccacaattttctttacaaggtctcaagttggacattaaaatgccaggcaattaaaagtatttatgtttaaaacttaatttaaaaaataattgacaagtatattctaaaatttgttcgagaaggcaaaggacctagaatagcaagaatactcttaagaaaggaaaacaagtttggaaggacttaaactacctgaattcaagacttatcattaagatacagtaatcacaacagtgtgttactggcataaagatagaccatatgagatcaatggaacaaaataaaagctttaaaatgcaccaatacttatatggtcaattgattttcaacaatggtgccaaagtaatttaatggggaaaagatagtcttttcaaaaaatggtgttagaacaactggatat

SEQ ID NO: 228332 - DNA, 750 bp, Homo sapiens
tagagacaaggtttcattatgttacccaggctggtctcaaacttctggactcaagcaatcctccctcctcggcctgtaattatttcttaaacagggcacaaaaagcacaaatcacataagaaaaaaagataaaacagacttcatcaagatttaaagcttttcctcctcagataacgagttgagaaaacaaagacaagccacagattgggagaaaacattggcaaaacagctattaaaaaagccttctatccagattatataaagaacccttaaaactcagtaataaaaagacatacatagtaagtaatgggcaaatgatttgaacaatcactttataaaagaagataaatgaatagccaacaaacacataaaaagatgctgaacatcacaagtcattcaaggaagtgcaaattaaaataataataaaatactattaaatgtccactagagtggccaaatttaaaaaaaatgaaaatcaccaggtattgtggctcacacctgtaatcccagcactttgggaggctgagatgggccaatcacttgagcccaggagttcaagactggcctgggcaacatggcaaaaccctgtctttacacaaaatacaaaaattagcctggagcatatctatagttccagctactcagggggctgaggtgggaggatcgcttgaaccctgggaggccagtctgcagtgagtttagatcatgccactgtactccagcctgggtgacagagcaagacactgtctc

SEQ ID NO: 228333 - DNA, 230 bp, Homo sapiens
gttacagcaaaaaatatacaagtttctatttacatatgagatttctttggatgcaagtattttttctgtttaatgagcctattccgatagaccatgttttgttcactaatttgaataaataatttttgaaacgaagcaaaatgttctcatttttttctacataatgattcttttttttcctcattttttaagtaaacactaaagtttttctgaaggttactagaagataa

SEQ ID NO: 228334 - DNA, 412 bp, Homo sapiens
agggtggcacaaagcactgtctccagtcacttttttgtccattctcccattcatttgtctgataatccagtggtgtactggtaaatatttaacaaccagtgctgcaggagaaagagccctgatttgtagcttttgctgattcctacagtgtaaactctgtcaccatggctgatttcaagctaccaatgtgacaacactgaaagaggagttgggaagagacatgcagcacaggctgttatgtagtatctccaccatacagtagatgtagtaaaaggtagtaaaatggctgggcaaggtggcttatgcctgtaatcccagcactttgggaggtcaagatgggtggagcacttaaggtcaggagttcaagaccagcctggctaacattgtgaaaccctgtctccactacaaaaaa

SEQ ID NO: 228335 - DNA, 313 bp, Homo sapiens
actgatgtaagcaggtcagaaaatgactccagttggatggatgaatactatcagtgcacctatgctttcaggactatgtgcgttgtttaagtgaaaccagttatccttgtgctgtctccacagttagttgataagtgacagaattttgacttagctgaaaactgcatgcggcctgttcatgattctgccatttaatgtggagatcagtggtttccaggcctgggtttgtggcactcacagacccaattatagcattcatggctatccaattagctttaggatgtgccaagaaatgatcaaaaaagttctcaga

SEQ ID NO: 228336 - DNA, 461 bp, Homo sapiens
taattacaaaggctgttgtcttgcagtctcatagtaacaagatctcacagtctcacagccttccggtcttgaaatcccacaccttgtaatatggaaatctcagcctgttaaacagatggtctcagaatctcaggatctcacaagttcaaggtctaacaggctcaaggtcaagcagttttgagatctagcaatatcatagtgtctggttctaggactctcctgaaggaagagcctaaattcactatcataatgctttgggagctattgtgaccaaatcctgacacaatccaacttacgatatagtcaaaaccatcagccctctggcagcatagaaaatggagactgggctgacaaatacaatgtcttaggcagctactatgaaacatatttcacagaatagcaggaaaatcagtaaacttaaatataggttaatagaagtcaaaactgtagtatagaaagaa

SEQ ID NO: 228337 - DNA, 350 bp, Homo sapiens
caaattggttctaaagtttatgtgaagaggaaaaagacccaggagagtaaattcaatattgaaagaaaagagcaaagttagaggactgacaccactcaatttcaaaacctaccataaacttacagtaatcaagacactatagcattagtgaaaaaacagacaaatagatcaatggaccagaatatgagctgagaaatcgactcacctaagtataatccattgatttttgacaaacgggcaaaggcaataaaatggagcagtctcttttcaacaaatggtgctaagacaactggacattcacatccacacccctaacattaatctagacacagaccttgaacctttcacaa

SEQ ID NO: 228338 - DNA, 367 bp, Homo sapiens
catcagcatgcgatttgatttctgtaggccctccatggaaaaaccattaaaaattctgttttcttttccatggggatgttgagatctggttattatatcttacaaatatcaccatgttatgggtttgcctaaagaatattgagttctagtcatagagtgaatcttttaatattatggatcttatctttctataacaaatcacgataaaaccaaccctttcatttacaaggaactacatgtgtggcaaaagaagaaaaagaaaagaaacataccaaccccttcacaataaaaagcattcatagactcaactattagcctgtttattttcaagacagaagaatctggataatctctttggccatcacac

SEQ ID NO: 228339 - DNA, 486 bp, Homo sapiens
gtgcaatggtgccatcatggctcactacagccttgaactcctgggctcaagggatcctctcacctcagcctgcccagtggttcagactacaggtgcatgccaccacacccagctaatttttttcattgtttctttttttgtttagcaatggggtcttgctatgttacccaggctggcctcaagcaatcctcccacctcagcctcctgtaatcccagcactttgggaggccgaggcagggggatcacaaggtcaacgagatcgagaccatcctggccaacatggtgaaaccctgtctgtaccaaaaatacaaaaattaattgggcatggtggtggacacctgtaatcccagctactagggaggctgaggcaggagaattgcttgaacctgggaggcggaggttgcagtgagccactgcactccagcctgatgacagagccaggctcagtttcaaaaattaattaaaattattaaacctccaaaaaaa

SEQ ID NO: 228340 - DNA, 301 bp, Homo sapiens
ctatatcggtaggactatatatatattatcatttgtgacagaataatgtgaagttaagtaattactaaactctaaatggaaatagtattcaagaaactcaagcactgaacttgaatataagagtattgttgctttaatccagtgtatttgtttatggaaagaaaaacacaaaggcagactcgaataaaaaggaacattaaaatattctttaaaactctgtattactactattttggaatttacccgtttataggctccaaaaataaattttcaaataaaatatttttatgaagaaaaaagt

SEQ ID NO: 228341 - DNA, 315 bp, Homo sapiens
tgatcaccttatgtttgcacagtttattctctttgagttagttaaatttcagaataatatgacaatttaaaaacagtattttaggcagcaatcatacctttatctcaaatgaaatttctaatcagaattgctatcaaagaggaacattaatttccattcccctgctgcctgtcccacccatgctcatagaagaagtaatgaccaaggagctagtcagaaaacagtagcaagaaaacaaaacaaaaagctggacaattcacaggccaaagaggtaatcctaaatatacaaagattgattatattgtgggtctttaa

SEQ ID NO: 228342 - DNA, 356 bp, Homo sapiens
tgaacctggaaggcggaggttgcagtgagctaagatggcaccactgcactccagcctgggccaaagagcaagactccatctcggggggaaaaaaaggtctttagtgcagaagaaactggacctgttatcccttgactccatgagtggcacagtgatcacttatataactggccatttacccagtgacttgtagcttgtttgaagttaatttctgattaaggcaagtggggattcagtagcttgtatgtatagatttaaggtagagaatctattttactacaagacaccccaaaaaaaacttagcttagaaggaatattttgcctaggttgtgtatctactagcccaatttaagaaa

SEQ ID NO: 228343 - DNA, 382 bp, Homo sapiens
ccaacatattagttgctgaagttacaaatcagtgcatttccaaagagacatgaatgtagtgctccagcaaaatttttttaacttaagatataaatggccgggtgtggtggctcacgcttgtaatctcagcactttgggaggctgaggtgggcaaatcgcgaggtcaggagtttgagaccagcctggacaacacagtgaaaccccatgtctatgaaaaatacaaaaattagccaggcgtagtggcgggtgcctgtaatcccagctacttgggaggctgaagcaggagaattgtttgaacctgggaggcggaggttgcagtgagccaagatcgcaccactgcactccagcctgggcgacagagctagacttcgtctcaaaaaaa

SEQ ID NO: 228344 - DNA, 430 bp, Homo sapiens
cagctacacgggaggctgaggcaggagaatcacttgaactaaggaggtggaggttgtagtgagctgagattgtgtcactgcactccagacagggcgacagagcaagaccctgtttcaaaaaaaaagaaaagaaaaagaagaaaactgtcaaccataactatacctacatgtaaagcccttggcattgggcctggcatataataaatgcacagtaaggagttataatattgtttcccaaacctcagtcattccccacatgaccttcatctttctacaacctgttctgctatttatctaatatttttcttgaaaattggtttaatatttaataatataataacaaatgtattttaagaagaaaggttaccttgccaccagaaaccagtattgcttgccagaaatagaagacaatagtaaaaataaacacaaa

SEQ ID NO: 228345 - DNA, 98 bp, Homo sapiens
gctaatttgtgctactaaaacatacattctttgagagaaaggcattttctgttttgttactttattccctgagccaagaacaaaatgtggcacagagc

SEQ ID NO: 228346 - DNA, 414 bp, Homo sapiens
gtcatcaggctggagtgcagtggtgtgatctcagctcactgcaacctcctcctcccgggttcaagcaattcttctgcctcagcctcctgagtagctgggactacaggcgcgcgccaccacgctaggctaatttttgtattttcagtagagatggggtttcaccatataggccaggatggtctcgattacttgacctcataatctgcctgcctcagcctcccaaagtgctgggattataggtgtgagccaccatgtccggccctttctttctttctacaggcagggtctcaccctgtcacccaggcatagtggtgcctcatggttcactgcagccttgacctcctaggctcaagtgatcctcctacctcagcatcccaagtagctgggactactggcacatgccaccacgcccag

SEQ ID NO: 228347 - DNA, 490 bp, Homo sapiens
cttctactcctgagcccaagcaatccaccgtactaggcctctccaagtgctaggattacaggtgtaagccactgcacccaccctgtctgggattctatgtcccctggacttctatgtccctctctctaggtctctatcttccctctgtctgggtctgtgtccatttatttcacggtctttggccttctctatctctactctgtctcacaaataaaaaatcaaaaaaaaagagggatgcaggaaggtctgattcatggaagatgtgaggatggacatagaggtcagagaagagaggatgccatggtgctggctttgaagtttgaagacggaggaacggccatgagccaaggaatgggggcggcttcccgaagcttgaaaaggcaaggaaacagactctcccctagagcctccagaggaaacagagccctgttttcgacgtctaacctctagaattgcattctaataaacttgtgttgttttaagccactaa

SEQ ID NO: 228348 - DNA, 500 bp, Homo sapiens
gcttgcttgtctttgataaaaagggagatccagtgttggagaggtaataaagacatattagcaccaatatttgtctttctccttgatatagcataaggtttgaaagagaatcgaaaagggaagtgctgtttttactttgcgagtcagtgttagttaaatgccatgtctgtgaaccacctcaaatgctgtcagtcagcttcccttgatttgagaaaattgtcttgaccagactaggcaggctgttctggagaagacgcctgtactctccaagcatcatccaagaccttcccagtaccctcttatatctatagagcacaaaatcccagaatcacaggacgacactgcagtgaatcaactaagaaacagcaggagctgagaagccaagacgagaagccccacatccctattcccttgcctacctcatgcattccctgctcggcacccagacttttgcccccattcctgctacttgtgaacaaataaagattcatatactcaca

SEQ ID NO: 228349 - DNA, 535 bp, Homo sapiens
caaccagaatgagcatgaaagtggattagtccttggaacttccagataagagcccagccagctatacttggatttcagcctgtgagattctcagcagagaacccagtcaagtgtgtccagacgtccaacctacagaactgatgcttttgtacaattcacacatgctttccacattgttctggaacatctgagaaagacacatcattgaaacaacttccatccattgcatgggtagaaattactctggctgctatgaagagaaagaatattcactgaaaatattttggatgtcactggatgcccctgttggatgctgccctgtggaaggagcactgtgtttcaaagctgggtgtagttgtagatggtaattaaaggcacaaaagagataaagctctgaaggacaaatgaattgaagaagatgcagtgattatgacaaaagtactggatgcccaattctatgcttcaacaagttcacaattctacttctcaagatgataatagagggcaatttaattaaaagataatggaataagaa

SEQ ID NO: 228350 - DNA, 277 bp, Homo sapiens
gcagggcagcctctggttgcagagagcagcacccggtttgacagctagcaatgcaattgtgacctcagacctacaatgtcaaggaattggcttctgccaacaaccagaatgagcatgaaagtggattagtccttggaacttccagataagagcccagccagctatacttggatttcagcctgtgagattctcagcagagaacccagtcaagtgtgtccagacgtccaacctacagaactgtgagataataaatagatacttattttaaactactcaa

SEQ ID NO: 228351 - DNA, 368 bp, Homo sapiens
aggacataaggacctcaacacttagaagaaaaaataagagattttattatattagggtaagaaataatttctcaagatttttttaatagcacagaccataaaactttgataatttgaccttattaatatttaaagccttgaataacaaaagacaccaaaagcaaagttaaaagacaagcacaatttctcttggaacacatgaagctgcaaaagacaaatttaaaaaaaacccaaaacataaaaacacatcatccgctagggcctccagaaagaacacagccctacggacaccttgattttagcccagtgagccctgggtcaggcttctaacctacagaagataataaatttgtttgttttaaggcaca

SEQ ID NO: 228352 - DNA, 408 bp, Homo sapiens
atgaatatacttattaaagactcagaaaatgtcttctgaaatatgtactctcaatgtacattttataataatttttatcctaggccatatagtatatagttgttttggctttttttcatgattctttcttgtagtgttttggaaagcacatgtattgaatcttattcatagttatgtaggaaaacccagttttatgaacaatgatttatagttgcctatgaagtcagactgattttttggatggaatgagctgcatgccaagggatgtgagacaccactacatgcaactctatgactggttctctatccagccccactgttatgtgtctaagccaaagggttggagagtctggtggtgagaactgaaggactccgttggatgacttttccattgaataataaagcgtg

SEQ ID NO: 228353 - DNA, 416 bp, Homo sapiens
tcttccttcaccccttccccttagcttcaggcacttacccacagaggaaacatgtgttctggggaaaatgataatcacggcccttatcttaaccttgtagatcctgtggactttctacacagccctagcattttcccatgagcatctcttttgattctaacaacatccccatgaaggccagtttgtttccattgagaaacccaaatctggcagcaaatgcatgagcttagaaagtaggccctcattcctagtccactgctaggagggatgaggacttgttcttaactcagccaggtggccgggtgtgatggctcacgcctgtaatcccagcactctgggaggctgaggcaggtggatcacctgaggtcaggagtgaaagactagcctggccaacatggtgaaaccccatctctact

SEQ ID NO: 228354 - DNA, 460 bp, Homo sapiens
aaaatgggtgctggatggggcaaaaaatcaggtgtcattcaaagttcactaggcttagggagctgggctcagaggccagaggcctgatcttgatcttgtcatcacttagcaaatctcctggccattcaggccttcacacttcctgtctgtaaatgggtttatcaccactcattcaagtcctaattattaccagcgctgagaaaccaatactttctttttccatctcgcttgtgtaatttcttcggagaagcatttggatggtctgaaccatttttaccctgagaaatgggacttaggaaattatgcagccacattttatatccattctggtcatttcagtaattggttctgagacactatttccccgagcaccatcccaagtataaactactatttccatctgtgttactggaggaaactggggaaagacatttgtgggttttttcccccccaggccaaa

SEQ ID NO: 228355 - DNA, 353 bp, Homo sapiens
gactacgtttctcattgtattaatttatgtataagttttcccaagaatggagtgctagaatattctgatatgagatataatccataaagtgatagtctaataatccagttgatttagttatgatatattaaaaattgtattgttacaaaagactgacaaaaatgttataataattcaccaaattacttttaaatcagattattggagatgattattttggtcaattaattgaaaatctgaattttaaacattttaattaaaaatcacttaatattttagtaaataatgtacaatgtaattggaaactctgctgggtatattttaataaatattttcaatttgcagtgcataca

SEQ ID NO: 228356 - DNA, 629 bp, Homo sapiens
agatggactgtggaacaaaggaaaccagagtatgcactttccagaccctgagagcttcctgcacggggctgtgaggacaaaatttggagagtgtaatcccttctctgactctgcatgctgccccagcagttgctgcaaccaaacccaggtgggcaagcctgagagctgactgtctgggattgggggccgcaactctcccacaactggcagagtggcctctgtactcaggcttgtacacagagtgggaccccttctctgtacaccactgcagccacaggcactgttgctgccactgggaattgggacaggcaagccagtgggttgcttgtctgaggctgtgagtgactactgcacccctcactggtggtgtggccccaactctcaggctcacatatggaaggaggaatccgttcccctctctgcatggctctatggtcactgctgccgccaagagcaggcaagcctgagagctgcatgtctggggctatgagtggcaaccccaaccctgctggccgcaaggtctctgtgctaaggcccacacacagaggttgcggtccctccccaactctacacaacactgcagtcactgctgtagccaggagccaaagcaaatgctacccagaaactga

SEQ ID NO: 228357 - DNA, 328 bp, Homo sapiens
ataggcctcttcaaagatggccaaggaagtgcccacaggtggatggatggctcagcccccacctacataaactgggactccaggaaattggatgataatggaaccaccccagcctgtgtgatgatgctctaccagggacactggagcaactcctcttgcaaatcagagtctcctgtttacatctgtgagaagaggcagagctgctgacctaggcccctaccccataagattggtgtaaacctcttgttgtgcatcctcaacctccatccctgccctctctgggctctgaatccccagaggcaacaataaaggacgtttctccaaagcc

SEQ ID NO: 228358 - DNA, 196 bp, Homo sapiens
tgtgaggttgtggaggagttgctggcagggggcctgtgtacttgctgtagatgaaaatggtattggaattagcagctcatgcctatttctcagaagtaagcagccatactgattatcattagctaactcttattagttttgattttgcagccccatgtatcctagcatgtaccctgctgtgtcccccacctgactc

SEQ ID NO: 228359 - DNA, 355 bp, Homo sapiens
gcatcatgtgagtgggcctcgttccccccggagaatcccagcgggcctcagagatgcatctgggagaggtggggaagatggcaggcaagggtacccttggccaggactctggtgcccaccctgccacccccgcgctccacctgcagtgtttctgccctgtaaataggaccagtcttacactcgctgtagttcaagtatgcaacataaatcctgttccttccagctgtgtctgcctcctctgcagtgcaaggggcctggtcagccaggtgtgggggtgttcttggggtctcctttggtctccttcccacctttgtaaatataatgcaaataaataaatatttaggtttttaaaaac

SEQ ID NO: 228360 - DNA, 521 bp, Homo sapiens
aaactcatttaaaaaatccaaactatttattgaaaagctctactaaacaaaattagttcagacaaagcaataagatgacgaatcaagctctctccagagatgaaagaaaagccagtctcaaagatgactataactaacgctgttgctggaaagacaagggcaccgagccagccctgggagaggctccacttcttcaaagacaaaacgattccaaacgtggcaggacacagtgctcaccctacagtgaacctctgggaatatgttattttttaaattcagttaatctttcttctttttttttttgagacagagtctcctgtcgcccaggctggagtgcaggggtgcgatctcagctcactgcaacctccacctcccgggttcaaatgattctcgggcctcagcctcacaagtagctggaattacaggcatgcgccaccatacccagctaatttttgtatttttagtagagatagggtttcattatgttgtccaggctgggagacagagcaagaccccaactc

SEQ ID NO: 228361 - DNA, 544 bp, Homo sapiens
atttctaaaaatcaccataccatgcagaatcattactaaagaccccaggaagcttatgggaaaaataggtttagaagtacaacaataaaaagaaattgtttagtgaaacattaagaaaaaaaagaacctaataaaaatgatagaacagttgtacatgcattatgttataaagaaattcataaatactacaataaatatggtactttgccttgaaaaaactgaagtatgcttgtggaagttaatattgaaagggttgcagcttctgagttattgtaaaatggtatagggaaggttgctgaagtgggatataaagttgtaacaccatctattagtaggtatggcttataacacaaagggaactgaaatagctggaagatatttaagatgtgaggcctgttggcgcatattttaaatatttctactgggcttggtcagctagatgtagttttctgcctgcacctggtgtttctcacagtgatattcacgttatgctcaaattgcttccaaatacatcaaatgcacaggaacgaattttggttttctg

SEQ ID NO: 228362 - DNA, 339 bp, Homo sapiens
ggtcgatcctagaggtccccgaacaccctcctctttccagatccagggtacagtccaggaccaacgtccaaactactctgtcatcatcaccctcaattcatttgcatcccaatcactcgctctgctttatctatcccagcaaaactctaaccctagagcagtacagtcattcttccctgttcctccactggtaaaggaaaaacaaacaaacaaacaaacaaaaaaatagtagagaaaggggaggaagagaaagagaagaagaggaacaaagaaggaaaggctggaatgagggaaaatggtgggagaagggataagaagaggaaagagaggaagaagagg

SEQ ID NO: 228363 - DNA, 437 bp, Homo sapiens
ctgttggaatcccagtggaagaaaattctcttcttgatcattctactgcctgttaaccacacatgcaagctttctttccagtcatctttccaatatggttgtgccaaaatttttctcagtaggctgaggcaggaggattgcttgagtccaagagtttgaggctatggattgccctatttgaatagccactgcattccagcctgggcaacatagctagaccccatctcttacacaatattttttagttagttcagtattcagtataaatattatcattactttctaaatgatatttaaggttaagtcacataggcttctatgttgacatttccttttttccccctacctattttccttggagttaaaacagtctgtttttgtttatttgcttaatttcctatggatttataattaaataatcttctaattctttattt

SEQ ID NO: 228364 - DNA, 173 bp, Homo sapiens
ggtagtgaaagggagattatttattatatgcctttttatactttctattttttgaatcatgtaaatattctctattcaaaagcttagaattttttataaaaggaaaaatgcaattattacacatatatagaagctacagagctgtaaacacacgcatagatttatcaaaatga

SEQ ID NO: 228365 - DNA, 453 bp, Homo sapiens
gccccaggtgccttccgttctgtgcagctgacaccccgtgcagacctggcacagcattggtgatcacaagtttggcccgtgaatgaacacacaggtagataaagtgatgacctcttaggcttcttgaacttccagaagcatagtacaggtgttaaaagcatggaccctggagccacattgcctggattcacaatcctggcagccccctaccagctgtgtgttcttgagtgagttacttcattcttctgtcctccagttttctcatctgtaatatggggttatagtagtgcctgcctcataaggttgataggaaaatccaatgagtagtcagtattcataacaccttaaaacatttcctggcacaattaattgctggcacaagataagtgtcaataagtgtttgttaaaatctctcttacatatttatttaagaatttataactcaactctata

SEQ ID NO: 228366 - DNA, 723 bp, Homo sapiens
atgtaactggtttttgttagatttctgcaactcaagacccaatcctgggcaactgttggacacttaaacatccttcatcactagctgcgttcatcactaggaaaaagtaagagaaatctgatggtatgggattgtaagtgggtattagatccaacagctgaaacttaagatgtgaagatgtatattgacacacatgtgcgtacaaaatgtttatagcagctttattgataatagccaaaaaccaggaacaacccggatgtccttcaacaagggaagggtgacccagcccgtgatgcatccgtcacactgtggattgctgctcagcaacgaggaggcacagactcgatacgggagccagcctgggtgacgctccagagaactaccctgagtggagaagggcagtcccaccgtgtgattccattattatcacattcttgaaatgacagaattatagaaaggagaacagaggagtggctgccagagtttaaggagggaatggggaaagggggaagagcagcatgcgggatccttgtgacggaagcgttttgtgtcgtgtgggtgtctgtcagtttcctagctgtgatactgtaccattgtcttgtaagatgctgccatcggtggaaactgggtaaagcatataggggacctctctgtatgatttcttacaactgcatgtgaatttacagtggtctcaaaataaagcatttaattaaacaaaaaacc

SEQ ID NO: 228367 - DNA, 404 bp, Homo sapiens
catgttggtcaggctggtcccaaactcctgacctcagatgatccgcccaccccggcctcccaaagtgctgggattacaggagtgcgccactgcgcctggcctaagttgtgactattcagatatcagtttccctcctatctgtaaataagtttgtttcaattaataatgcatcctaaactcactgcagaaaatttagaatatgcataaggatatgcaaataaatttacccgaaatactatatgaaaattttgtttcatattctggattttttcttatgcacagatgtatattatttgaaataatagcactgactgaacaccctgtactggcactgtggtatatactgaaatttcattatctgatttgtacatttaattctcatgacaactttacattaactatgc

SEQ ID NO: 228368 - DNA, 592 bp, Homo sapiens
gggttctctagcctttgtacaaatagtttgaaaatgtcacaaatggatggctgcagctggaaacaagcaaaatctcccagagtgagagaataagatttctagaggtaccacattacaatactcagaaagttctgactacaacaaaaaattacaaagcactcaaagaaacagcaaagtatggcccatttacaggagaaaaaaaaaaaaaaagaattaccagaaagcatacctgagaaagcccagatattggaattattagtcaaaaacgttaaatgaattctctttatatagccaattagctaaagggaacaatggacaaaaactaaagaaaaacaggaaaatgatgtatgaatgtaagattatcaacaaaaagataaactggactttttcaaaatgccaatgttttgtgcatcaaaggacactaccaagaaagtaaaaagacaacccacagaatatgagaaagtaagtatttgcaaatcatatctattaagatatgaatcctgaatttctaaaaatgttcctacaactcaatcaaaaaaaaaaaatcaccaataaacacatgaagaaatgctcaacatcactaatcattagg

SEQ ID NO: 228369 - DNA, 468 bp, Homo sapiens
tcctagaactgttgcgtttttgatcttcctcttcgcagcatggacagtggatccccttgatctgcaagccctgccctgcctctctctgcacgctgggggttcagggaggctacacccttggggggcactgggagctgctggagatgtgcacagcgagcagtggagagcagtcgtctcttctgatctacatgcaggggaactggtgagagttgccgtaggacctctggtgaaattaccttggctactgactagtaaagagatgagaaaggagaggtactatagattttctttaagaaataaatattgtctcctctttctctcttttctctggtaaacagtgcccaaatttggaaatatcacgtgtaatttattgtcccactttaaatgtttcttgtaaccatgaattactattcttggatcagattccattataataaactcccacttggactccaaattcttttacaa

SEQ ID NO: 228370 - DNA, 513 bp, Homo sapiens
gattgtatgaaatggggcaaactttgagaaaattattaagccaatactggaattggttggcatatgcctttatgatttatttagtttgttttctactttgccctaccagggaagaatttaattcttcccatttcctgaaagtcaaaggattggaggacactaaagcaaaataaaccttaatttcaccccaaaagtagcttaggtaatgtcaggaagggctttgatgaaaccactgtccctgcttatagatcttattttccaagcctttcaatattttatttgcccttttctgaactctacaatttccctctcttgtagctggttcgatgcccagaactgaatgctgtgctccagctgtggcctcaccggtgctgaatagagaggaagagccaccttcatagcttacatgtgattcctctgcttatacaacccaatactggatttacttactttggcaagatagctgcattgtgcactgtatttaatgttacgtgtactgtaaccctgggtctt

SEQ ID NO: 228371 - DNA, 399 bp, Homo sapiens
aatatactgctcaggacctaactattatttttctagtagttttcacacatttttttccggcaaatgttatgttacggagtgattattttgtgttactttgtacacttaaggagcaatccatttttagcagttgagccctcattttgtaaaactaagctgttggcaatttgctagtttctttaaattctagaaaccactaagttttaccttttcatttatttccaaacaaagaagatgttagaaagttctgtaacttatctcttgaaataatattttctggccgggtgtggtggctcatgcctataatcccagcactttgggaggctgaggcaggcagattgcttgagcccaggagtctgagaccagcctgggcaacatggcaagacctcgtctctacca

SEQ ID NO: 228372 - DNA, 743 bp, Homo sapiens
aattttattctttatatttgaggtttataacatgatgttataggatacatagatatatatagatcaactttcttatttcagaatggtcaaaagcaagattcagagatttgtttcaaaaaatatttgcttcaaagtagttcagtgagtggtagataaagtgagggtataaatgaaatgagactggtaatgaattaattgttgaagctagacagtggatatatgggggcatcattatgctattatctccacttgtggatatgttttaaattatccataattaaaactttaaaaaaagaaagaaaagtttttttttttaaatttcaaacaagattcagagatgttgagtggctttcccaagatacattgatatccttgctaatccttaaattctaggaaggattaaaagaaaggaggacaagtgggcacagtggctcacacctgtaaccctagcaccttgggaagtcaaggtgggaggattgcttgatcccaggagttggagaccagccttggtaacagcaagacttcatctctacaaaaaaaaatggaaaaaaaaaaaaaaaataggagccgggctaggtggctcacacctgtaatcccagcattttgggaggccgaggtgggcggatcacgaggttgggagtttgagaccaccctggctaacatggtgaaaccccatctctactaaaaatacaaaaaatcaacagggtatggcggcgggcacctgtaatcccagctactgggga

SEQ ID NO: 228373 - DNA, 217 bp, Homo sapiens
agactttgggcattattggagcacttgtcagttgcatgtgaatagcacttactgagctgtttatggtagtggtaaatggtggctgaaccaataatggcttccactgctagaaaccaagtaacatcaccgtcaagcagcttaatgtcaccaaattaattctctcaaagaccactgcatggaaatccaagttgagagacaagcagacatccagaaaagt

SEQ ID NO: 228374 - DNA, 5443 bp, Homo sapiens
  misc_feature (5189)..(5189): n is a, c, g, or t
  misc_feature (5195)..(5195): n is a, c, g, or t
  misc_feature (5288)..(5288): n is a, c, g, or t
  misc_feature (5368)..(5368): n is a, c, g, or t
caattaaatctatgtctgaggatgaaagtgaaatgattacgactgttagtgaaattgagagtaaagcaccaacggttgagtcaggaacaattgccagcaaagagagaacgttatcctctgggcaggaacaagttgttgaaagtgatacactaacaattgagtctggaccacttgctagtgaagataaaccactttcgtgtggtacaaactctggaaaagaacaagaaataaatgagactctgcctatcacaactgtagctcagagttcagttctacttcatcctcaagaagaagcagccaggattagaatgtcagcaaggcagaaacagataatggaaatagaagagcagaagcaaaagcaattggaattacttgaacaaattgaacagcagaaattaagattagaaactgactgcttcagggctcagctggaagaagaaaaaagaaaaaaaactcaaccgactggggtaggatgcagaaaatctcatcactacataaatcatttggttggcattgctccagcatcatgccctgtaatttctgatgaagatagtcataggcagatgattcgtaactatcaacatcagcttttacaacaaaacaggttacacaggcagtctgttgaaacagccaggaaacaattacttgaatatcaaactatgttaaaaggaaggtgcccatcggtgtcagctccatcattgataactgattctgttatatcagtgccatcatggaaatctgagagaccgactgctatatcagagcattgggatcaaggtcagagactcaagttgagtcctaacaaataccaacccatacaacctatacagacctccaaattagaacaagatcattttcaggtagcgagacaaaatcactttccacaaagacaggtggaaacaacagaaacattacgcgcttcagatattttaaccaatcaagctttagaatcacaagaacatctaaggcaattctctcagactgaaacacaacagagagactataaattggtccccaaagattctgagacactttcaagggctttgtcacatgacaggcagctaatatcacaggatgctagaaaaatatctgaaacatttggggcaacaacttttcaaagtttagaatcccaacaattgttctcagagaatagtgaaaatatatcttaccatttaactgaaccttcttcatttgtaccactggtacctcagcattcttttagttctctgcctgttaaagttgagtcaggaaaaattcaagaacccttttcagccatgagcaaaagtacagtttccacaagccattctataatcagccaaatgcatgataggcctttgctgccgtcagagaatatcacagcccagcaaggtaatatgaaggccctccaagaacagttagacctacagaagaaagttcttcaggcaactcaggaagctcaggaacagttgcttttgtgcaaacagaaagaagtggaacagcaaacgggcctctcggtattccttcccttggtaactccagattcatctgctttattgccttctgccaaagcagatttggggagaatccaggaatcttcaccaaccaagaataatattgcagtttcctcagaccatcatgtgatctcacaacttcaggataagcgtttgagtctttcacagcctatcctatcacagcaaaataattttaaatttctccaagagcagttgaatattcagaaggatagccttcaggctaggcgagaagcccaggaagtattgtatgtacataaacagagtgaattggatagaagagtatgttccgaacaggctgagccctctttcccatttcaggtagctcagcatacatttacttcactaccatctgctgatacaaaatctggaaaaatacaggagcaacattcatctaagagcgagaaaggacttgtttcatgccaatctgacatccccatatctcaggatgggtctttgagtttcctacagcagttcctacctctacatgatagtttgaagttgctccaagaacagttgactaaacagagggatactcttcaggctaggcatgaagctcaggtggaattacttttacatagacaaagagatttgggggacagtaagtctgggctggtgagctcttcatcctcaccagtggttgttcagcattcagttgcttcacaagcttctgctaaagctgagcctaggagaattcaggagctttatttatctgagaaggagaatgtaggtccctcctgtcatttgataatcccaacatttcaggataagtctcttagttttccacagcatagcctggcacagcaagaaaatttgacaatactccaagaacagtcacaaatacaaagggtaatacttggtgctaaagaaggaactcaggaatttgtacacacagaaagtgaattggagaaaagaatttcttctgaacagactggcacctcctcatccctttcccaggtggatgaatctgagagattccaggaatgtatatcaatcaagagtgacagtaccattcccttaagccatcctaagatcccaagatgtcaggaaagacttttgagagtttcacaacatatgctacctctacaagataatttggaggaacaccaagcatggctagacactgagaaagaagcctttcatttcagccagaaaacccaagaaaatacatcttctgaacaaactggttcatcttcattcataccccagttggtacagctttcatttacttcgttagcttcagctgagtctggcacaatcctggaacctctttttacagagagtgaaagtaaaattttttcaagccaccttcagatcccacaattgcaggataggcttttgaggatatcgcaacttatccagcctcaacaagataatttgaaggcacttcaagaacagttagctacacagagagaagccatcattctagctagacaagaagctcgggaagaattacttttacatcagagtgaatgggagggaagaatatctcccgagcaggttgacacctcttccttacccctagtaccacagcattcattcgcctcattacctcttaatgaatctgaaagaaaccaagaaccatgttcaattaacagtgataatatagtatcctcaggtcactcagagataccaacattgcctgatgggctgttgggtttatcacatcttgttttacctcaacaagataatttgattgcacttgaagaacacttgcatgcacagacagatttccttccttctattgagaaaacccagaaagaattggttttgtcaaaaccatgtaaatttgaggaaaaggtatcttctgagcattttatccagtctcaccatggtgatttgcaggcacttcaacagcagttagatacacagaagaaagccattcgatctatacaggaagtccaagaagaattgcttttgcaaagattaagtgaattggagaaaagggtatcatctgaacaagtttgctcctcttcatttgtatcccaggtgcctgttgctgactctgaaagaacccagaagtctttcccaaccaaaagtaatgatactcttccctcaagtcatcgtgagattccaagattacaggatagacttttgagtttatcaaagcctattctgcctcagcaagataatatgacagcacaattggatgcacaaagggaagtgatgtattcttatgagaaaccccaggaagaactgtctttaaacaaacaaagaaagttgaacaaaagtgaatctgctgagcatactatcccctctttgtttctacccaaggaaacagagcattcgtttattccactaccttttgcagaagctaaacctaaaagcacttgtgaattgtattcatcccagaatgaacatgcagcccccccaagtaatcctgtgatcccagggtttcaagatagacttttgagtttttcacagtctgtcttaactcagcaagataacttgggacttcagaaacagttggatctacaaagagaagttctgcattatagccagaaagcccaggaaaaattgcttgtacagagacaaacagcattgcagcagcagatacagaaacatgaagagactttgaaggatttctttaaagacagtcagataagtaagcccacagttgaaaatgatttaaaaacccagaagatggggcagctcagagactggtttcctaatacacaagacctagcaggaaatgatcaagaaaatattaggcatgcagataggaacaactctgatgataatcatttggcttcagaagatactagtgccaagcaaagtggtgagcatctggagaaagatctggggagaagatcctcaaagccacctgtagcaaaagtcaaatgtggtttggacttaaaccagcatgaacttagtgctatacaagaagtagagtcaccagcaattggcagaacttctatactaggtaaaccaggtatttatgaagacagagaccccctgcgagtctcaataagccgagaacaaagtttctttgggagcccactggcccatgatccgtttagttgtcttcaactggttggccaagagaatgtctgtggtgatgactatgatgaagcaggtgagaaataaatggaaagtggaattgtatgcacaaggatatgtggacaaaagatatttattattttgttatttgtaatggtgaaaaatggtaaataaacttagttactgctgttaatggaatcgttatgatgcagttaactatattgttctatgcagttgttaaatgagtaattttgcttttaaattgttttattaaatgccagtaagaagtttatcaaggtaggagttttatacaattggcagcatccataaattttatgtttaagcctatttgtaacaatccatatctaattaaatactgttaaatattttaaaaattctatctgtgggcattctaaataagctgttttatgtttatttttaaatatttggaaaaataaagataattagaaggaaaaatatttaaatcacttaatcctaacacccaaagacagccaatgttaatcttctcgcttctgaatttatatatgtatatatatatagcacaggatattttatatataatttgtgtactgatcctacaaagtatagttgtagtactattttattagttgtaaggcatcttttaagaagttacattttggccgggtgcagtggctcacntctgtnatcctagcactttgggaggccaagactggcagatcatgaggtcagaagattgagaccacggctaacaccgtgaaaccctgtctatactaaaantacaaaaaattggccgggtgtagtggtggtcacctgtagtcctgtagggaggcaggagaatggcgtgaacctgggaggtngagcttgcagtgagccgagatcaagccactgcactccagcctgggcgacagagcgagactccgagactccatctg

SEQ ID NO: 228375 - DNA, 4590 bp, Homo sapiens
caattaaatctatgtctgaggatgaaagtgaaatgattacgactgttagtgaaattgagagtaaagcaccaacggttgagtcaggaacaattgccagcaaagagagaacgttatcctctgggcaggaacaagttgttgaaagtgatacactaacaattgagtctggaccacttgctagtgaagataaaccactttcgtgtggtacaaactctggaaaagaacaagaaataaatgagactctgcctatcacaactgtagctcagagttcagttctacttcatcctcaagaagaagcagccaggattagaatgtcagcaaggcagaaacagataatggaaatagaagagcagaagcaaaagcaattggaattacttgaacaaattgaacagcagaaattaagattagaaactgactgcttcagggctcagctggaagaagaaaaaagaaaaaaaactcaaccgactggggtaggatgcagaaaatctcatcactacataaatcatttggttggcattgctccagcatcatgccctgtaatttctgatgaagatagtcataggcagatgattcgtaactatcaacatcagcttttacaacaaaacaggttacacaggcagtctgttgaaacagccaggaaacaattacttgaatatcaaactatgttaaaaggaaggtgcccatcggtgtcagctccatcattgataactgattctgttatatcagtgccatcatggaaatctgagagaccgactgctatatcagagcattgggatcaaggtcagagactcaagttgagtcctaacaaataccaacccatacaacctatacagacctccaaattagaacaagatcattttcaggtagcgagacaaaatcactttccacaaagacaggtggaaacaacagaaacattacgcgcttcagatattttaaccaatcaagctttagaatcacaagaacatctaaggcaattctctcagactgaaacacaacagagagactataaattggtccccaaagattctgagacactttcaagggctttgtcacatgacaggcagctaatatcacaggatgctagaaaaatatctgaaacatttggggcaacaacttttcaaagtttagaatcccaacaattgttctcagagaatagtgaaaatatatcttaccatttaactgaaccttcttcatttgtaccactggtacctcagcattcttttagttctctgcctgttaaagttgagtcaggaaaaattcaagaacccttttcagccatgagcaaaagtacagtttccacaagccattctataatcagccaaatgcatgataggcctttgctgccgtcagagaatatcacagcccagcaaggtaatatgaaggccctccaagaacagttagacctacagaagaaagttcttcaggcaactcaggaagctcaggaacagttgcttttgtgcaaacagaaagaagtggaacagcaaacgggcctctcggtattccttcccttggtaactccagattcatctgctttattgccttctgccaaagcagatttggggagaatccaggaatcttcaccaaccaagaataatattgcagtttcctcagaccatcatgtgatctcacaacttcaggataagcgtttgagtctttcacagcctatcctatcacagcaaaataattttaaatttctccaagagcagttgaatattcagaaggatagccttcaggctaggcgagaagcccaggaagtattgtatgtacataaacagagtgaattggatagaagagtatgttccgaacaggctgagccctctttcccatttcaggtagctcagcatacatttacttcactaccatctgctgatacaaaatctggaaaaatacaggagcaacattcatctaagagcgagaaaggacttgtttcatgccaatctgacatccccatatctcaggatgggtctttgagtttcctacagcagttcctacctctacatgatagtttgaagttgctccaagaacagttgactaaacagagggatactcttcaggctaggcatgaagctcaggtggaattacttttacatagacaaagagatttgggggacagtaagtctgggctggtgagctcttcatcctcaccagtggttgttcagcattcagttgcttcacaagcttctgctaaagctgagcctaggagaattcaggagctttatttatctgagaaggagaatgtaggtccctcctgtcatttgataatcccaacatttcaggataagtctcttagttttccacagcatagcctggcacagcaagaaaatttgacaatactccaagaacagtcacaaatacaaagggtaatacttggtgctaaagaaggaactcaggaatttgtacacacagaaagtgaattggagaaaagaatttcttctgaacagactggcacctcctcatccctttcccaggtggatgaatctgagagattccaggaatgtatatcaatcaagagtgacagtaccattcccttaagccatcctaagatcccaagatgtcaggaaagacttttgagagtttcacaacatatgctacctctacaagataatttggaggaacaccaagcatggctagacactgagaaagaagcctttcatttcagccagaaaacccaagaaaatacatcttctgaacaaactggttcatcttcattcataccccagttggtacagctttcatttacttcgttagcttcagctgagtctggcacaatcctggaacctctttttacagagagtgaaagtaaaattttttcaagccaccttcagatcccacaattgcaggataggcttttgaggatatcgcaacttatccagcctcaacaagataatttgaaggcacttcaagaacagttagctacacagagagaagccatcattctagctagacaagaagctcgggaagaattacttttacatcagagtgaatgggagggaagaatatctcccgagcaggttgacacctcttccttacccctagtaccacagcattcattcgcctcattacctcttaatgaatctgaaagaaaccaagaaccatgttcaattaacagtgataatatagtatcctcaggtcactcagagataccaacattgcctgatgggctgttgggtttatcacatcttgttttacctcaacaagataatttgattgcacttgaagaacacttgcatgcacagacagatttccttccttctattgagaaaacccagaaagaattggttttgtcaaaaccatgtaaatttgaggaaaaggtatcttctgagcattttatccagtctcaccatggtgatttgcaggcacttcaacagcagttagatacacagaagaaagccattcgatctatacaggaagtccaagaagaattgcttttgcaaagattaagtgaattggagaaaagggtatcatctgaacaagtttgctcctcttcatttgtatcccaggtgcctgttgctgactctgaaagaacccagaagtctttcccaaccaaaagtaatgatactcttccctcaagtcatcgtgagattccaagattacaggatagacttttgagtttatcaaagcctattctgcctcagcaagataatatgacagcacaattggatgcacaaagggaagtgatgtattcttatgagaaaccccaggaagaactgtctttaaacaaacaaagaaagttgaacaaaagtgaatctgctgagcatactatcccctctttgtttctacccaaggaaacagagcattcgtttattccactaccttttgcagaagctaaacctaaaagcacttgtgaattgtattcatcccagaatgaacatgcagcccccccaagtaatcctgtgatcccagggtttcaagatagacttttgagtttttcacagtctgtcttaactcagcaagataacttgggacttcagaaacagttggatctacaaagagaagttctgcattatagccagaaagcccaggaaaaattgcttgtacagagacaaacagcattgcagcagcagatacagaaacatgaagagactttgaaggatttctttaaagacagtcagataagtaagcccacagttgaaaatgatttaaaaacccagaagatggggcagctcagagactggtttcctaatacacaagacctagcaggaaatgatcaagaaaatattaggcatgcagataggaacaactctgatgataatcatttggcttcagaagatactagtgccaagcaaagtggtaaaccaggtatttatgaagacagagaccccctgcgagtctcaataagccgagaacaaagtttctttgggagcccactggcccatgatccgtttagttgtcttcaactggttggccaagagaatgtctgtggtgatgactatgatgaagcagttaagctgaaggaatctgtgttgaaaatcatgcagtgttaagttatgctgtggaggaagaacatgcatatttgggtccaactgtgaagccagatgataagagtcattttcagagcacatggatgatagcaagcaagaatctaccaccagt

SEQ ID NO: 228376 - DNA, 200 bp, Homo sapiens
agtagagatggggtttcataatgtttgccaggctggtctctgaactcctgaccttaggtgatgcacccatctcagcctcccaaagtgctggagattacaggcgtgagccaccgcactcggccctgtttgtagttttaatgtgttagccaacttgtataaagggtcagccagtaaatattcagctttgcaggccacaaata

SEQ ID NO: 228377 - DNA, 672 bp, Homo sapiens
gaagacactgaaaaatattttattgatttttactttgtaactatcattaaattttttcaaataaaaatgtaaataaaataatacagtacaaaaaaggaaacaaattaatacttttccattacatgaatgtgtttttttgaaaaaaattaaaggttcagggagacatgtgaaaataagagaaagggaactctgcctatatgtctcagaaaatggtgtgtatatattatacaataacagaactgaagttattcaatttgttttgacacctttacaatcacggcgctatcgtgtattatgaatctgctatttaaagctaggatttctatagtgccaaaggttggagataagagctgtgcacaaaacaagctgaaacaatttagaactgttaagaatgtacttttcaataccaacacacatataaagccgagtccttgtatgttggggacccagttgtataatcaagagttctttgaattaacttccccagagtataattaaaagataagcaataacaatgtgctaatttgaggcttacacgttactaaaattcaatagacaatcacagcatttatttagaacttaaatcaatggttctcaaccttggctgttttgcctttcgggacatttggcaatgtctggagacacttttggctgttaccattgtggggagtg

SEQ ID NO: 228378 - DNA, 357 bp, Homo sapiens
aaacctaatttttctggcagggactcccaatagtatattgaatagaagtgatgagaatggacatctttgtcttgtgcttaattttagaggaaaaagtcttagcattttactgttcaatatgaagttatatgttggcttgtaatatgtgacttttattatgttgaggtatatttcttctatacttaatttattcagtgtttttgttatgaaattatgttgaattttttaatgctctatctgcatctattgagatgattacattgttttgtcctctattctgttaatgtggtgtgtcacatttatgtattttcatatattgaaccatccttgcatctctgggataaataacctttgatc

SEQ ID NO: 228379 - DNA, 432 bp, Homo sapiens
gaaaaattatatctaatcagtggctagttacaatacatgttaaatttattacaaatgttaaaaggaaaatgttttgatttgtagtctaacttttgtttagacacctcttatggttggtctttgctcactcagggaagagatcatcaaacgttttaaagtgtatttgctagatgtttaaacataactaagacacagagcacatatcatccccaggaagataatgaggctgtcacagcacaaaatgttctttgtttttacgggttctattagttaatgtattagcaattttctaaatgccacttttgcttattaagaggttttgagagcacatgaaaacatacattttattcttgaatgcagcatttctgagattattagcaagtgtgattctgaaggaatattttcaaatactctgaaggagcatttggggta

SEQ ID NO: 228380 - DNA, 518 bp, Homo sapiens
tgctatttgccatgtatttagctgtatacttatttatgtctgtcttctctcagaccagaatagaagctcagtataagaacaggggccttgcctgtctcgtcctttcctcttgcctcagaaatgagaatggtgcctggcacatagtaggtattaaatatagatgtatgctgaatgaaagaataaatgagtacatattttgtgtcactacgaattttataaacatgtttttaatatttttcaggcctttgacatccattcagtctctcttggctttcatcaggaattaaaaacaattttactctttttcagacatcatctggataccctctaaggtctctcttactaatgaccttttctcctttttcacagagaaaatagaggccaccagaagttactcttttagcttcctgtacacatctatgtaattgtctcactccttactaatctttccttccacctttcctgtttcagagaaacaggttttattcttcttacttgagggtattatcaagcttgta

SEQ ID NO: 228381 - DNA, 609 bp, Homo sapiens
ttagcccaggagcctgcatagggaagaaaggacagacagggcctccttactggttgacactcaggaggggctggggcaagagagcagagggagcgcagggccaggcaggggctgctgaggatccatgggagctcagggtgcacaagggggctgcccttcctgggctgcaggcagcatcccctatgggagctgagaaagtccaatcctgagatgggacagtgctgcccaggggtgtgtggctgggccctgacaacagtctccccaaaagtgaccacatcaccaggctcagttccaggaaggctgagaagtgcccagtacactgaggatgcacctcagttacataaaataaatgaaactggagtactaacgtacagtttaaaggttatagttactatttttatatgatatactagtaatttttgaatagggtaaactttaggtgttttgacaccaaaagaaaactacatgagttcatgcatgtgttaaattgctttactgtagtaatcatttacatgtatatgtatatatgaatataattatgggctcattaaatttaaatattataaataggtgacaaagaataaagttaactggaaaactgtgtcatta

SEQ ID NO: 228382 - DNA, 501 bp, Homo sapiens
atggtggggatttgtctggtgatttgggggagggttcgaggtaacggtattctctggattggatggtgtcaggaaggaggtgggacaaatctatgacttatgggcatcttaatcgtacctagaacgctgaagaaatgaagcaggcccaaagtttgactggaaaagagcagcagtcactcatattagccaggataaggaggtatttggtaatttttgtcatttggacaaagttcctatttttttctaccttcagacatgattacagagtggttttgttgttttcttgacccattatgatcacagagtaaccctatctaatgttgaatgttgatgttctgtaaaacagtttatgttcagcatgacttcaaggcctagtgagtgccaggccgttgttttgctactaatttttccactagtaaaccaggttcattgctgtaaaactacaagttagtaaacatacctaagtcaaaagaaaaaaggttaaattacttatggagaaac

SEQ ID NO: 228383 - DNA, 407 bp, Homo sapiens
gaccttgctcagatagcccaaaagagggcagtagaagggaagccgcaacaacaacaaccagaagaaacaaaacaaatattaaaatagcagacctgcctgggcgcgggggcacacacctggaatcccagcactttgggaggccgaggtgacaggatcgcttcagcccaggagttcaagaccagcctggaagacatagggagaccccgtctctacaaaaaaaaaaaaaaattacctgggtgtagtgaaatgtgccagtgttcccagctactagggagactgaggcaggaggatcactggagcccaggaattggaggctgcaatgagccatgatcacactactacactccaacctgagcgacagagtagaccctgtctcaaaaaagaaaaataaattctccaaatactgt

SEQ ID NO: 228384 - DNA, 188 bp, Homo sapiens
aaggataatgataatatattggataaaaattcgaattcaaaaatgttcaaaatttgtatggcatttacaaaataatgtaacaattggatgaaatcatgttaaaactaatgttagtacaacaactcataaaaagtttgccaagcttcaaccaatgtgccattaagtaatattagatataattttaacat

SEQ ID NO: 228385 - DNA, 440 bp, Homo sapiens
caggttatctctctcctactgttttgcttgctatacgtttaattaataataatatcaacattgtttccgcatcccaggcatttaagctaactcactgagcctcttaatattgccatgatgtaggtgcttgatactgtttggatctgtgtccctagccaaatgtcatctctaattgtaatccccacatgtcgagggaggtcctagtggaaggtgattggatcatgggggtggtttcctccatgctgttcttgtgatagtgagggagttctcatgagatctgatggttataaagtgtggcacttccttgctatctctctctcctgccaccatgtaagacgtgccttcctgctgcttcaccttctgccatgattgtaagtttcatgaggcctcccagccatgtggaactgtgagtcaattaaacctctttcatttataaatta

SEQ ID NO: 228386 - DNA, 517 bp, Homo sapiens
tgagacggagtctcgctctgtcaaccaggctggagtgcagtggcgcaatctcggctcactgcaagctccgcctcccgggttcacgccattctcctgcctgcctcagccccctccgtagctgggactacaggcgcccgccaccacgcccggctaatttttttgtattttttagtagagacggggcttcactgtgttagccaggatggtctcgatctcctaacctcgtgatctgcccgcctcggcctcccaaagtgctgggattacaggcgtgagccaccgcgcccggccacagtaattttttaaataaaaacttgatagcccatggaaagagaagatgagtgggcaataaatctcagaacacatgtattggaggaaatgaatctgatgattaaactcagttcttagggcagtattgttgctgtcacaaatccccttcctggtgaaaaattgatgtggtaatcagtttcaggtcatagtaagtcagaaaaaaatacagaatttatttaggtaaaatgtt

SEQ ID NO: 228387 - DNA, 822 bp, Homo sapiens
cagcagacagatgatatcagctgtctttcagcctgataatgagtgattgattacacaactctttaagacctttgtcatctttgtggtttttataaaagagcacatatagggctgtaagaccaagctaatgaattagttgtaacatttatttcttattactatttataatggtaatttatgttgattattgaaacatttgcaaaatttaaatgtgcttagagaaaacagaaaccacttttgactttgtgcatgctatttagcagttctacatttcaagtgattgttattagacattatgactcactccatcttaaataaccaattaatccattgattcaacgttttattttatgcttgccatgtatgcaccaggccctgttctaggcatttgagatacagatctgtctcctgctctcatgtactgtagtggagaaaactgaaaataagccagtaaacaaataaatatacactttgtgatagctgataattcctatttttgtatttcataccagcacttttttccttatgcataagtagatgtaaaaagtatctggactttatggcatttttctagcctatttaatatgtatgaatgtaatgccagggggatagaatgacaatggcaatacagtggctaagagatatgtttgacaaagaaaaaggagatgacactttgggaggccaatgcgggcgggtcacttgaggccgggagttcgagaccagcctggccaacgtgaagaaaaatacaaattaatatacacaggagttgcttggaccccggagccggggttgcagtgagccggggtcgcgcactgactccgc

SEQ ID NO: 228388 - DNA, 723 bp, Homo sapiens
ttgcaaaatttaaatgtgcttagagaaaacagaaaccacttttgactttgtgcatgctatttagcagttctacatttcaagtgattgttattagacattatgactcactccatcttaaataaccaattaatccattgattcaacgttttattttatgcttgccatgtatgcaccaggccctgttctaggcatttgagatacagatctgtctcctgctctcatgtactgtagtggagaaaactgaaaataagccagtaaacaaataaatatacactttgtgatagctgataattcctatttttgtatttcataccagcacttttttccttatgcataagtagatgtaaaaagtatctggactttatggcatttttctagcctatttaatatgtatgaatgtaatgccagggggatagaatgacaatggcaatacagtggctaagagatatgtttgacaaagaaaaaggagatgacactttgggaggccaatgcgggcgggtcacttgaggccgggagttcgagaccagcctggccaacgtgaagaaaaatacaaaaaattaataaaaatacaaaaattagccaggcatggtagcacctgtaatccaagctactggagaggctgaggcaggagaattgcttgaacccgggaggcggaggttgcagtgagccaagatcgcaccactgcactccagcctaggcgacagatcaaattagtatttgatt

SEQ ID NO: 228389 - DNA, 789 bp, Homo sapiens
agcggaagtccagacacctcccctgtacctctcgtaccacagaggacaggtctcctccagctgtgcccccactcccctaaaagccttgtattcccccctgcaggttccctctggccccaccaggagaagaagatggcctatgaaaaatcaactgatatctctgatgtctccaggtcaatgttcctgtacccatggctggaatatccagacaagaccaaagaactcagaaaagccatggctcctgttcatctgcccttgtcctgctaccagatgccaaaggaagagtttcccccaagtccagagtgctggaggcagcatccgagcaagccaaactcagtcccgtactgctacttcaagaaacctgagatctacacgcactggcacgacctgtatgatcagcgagaggaaagggaggctgagaagatgttgaggaaaatgagagatgactgtaggtacatcaaagaggtacatcaaacccacatcaaaatgttccatctcccaatgagcaagctgactataaaatctgagatgcgatccaggcccttagagcctacccaggaccccctgaagtggcaaagattaagggaactcacaaaaagcctggaatctcccagagaggatgagcagttctatgcagcacaggctctgggatgcttacgcatcagtgacaagtttgtcatggaggcactacagcaggtggcccaaactggtccagagaaagtgaagtacgaggcctaccgaaccctggccatcctgggttgcctgaataagcatgtgatccgggctctc

SEQ ID NO: 228390 - DNA, 905 bp, Homo sapiens
agcggaagtccagacacctcccctgtacctctcgtaccacagaggacaggtctcctccagctgtgcccccactcccctaaaagccttgtattcccccctgcaggttccctctggccccaccaggagaagaagatggcctatgaaaaatcaactgatatctctgatgtctccaggtcaatgttcctgtacccatggctggaatatccagacaagaccaaagaactcagaaaagccatggctcctgttcatctgcccttgtcctgctaccagatgccaaaggaagagtttcccccaagtccagagtgctggaggcagcatccgagcaagccaaactcagtcccgtactgctacttcaagaaacctgagatctacacgcactggcacgacctgtatgatcagcgagaggaaagggaggctgagaagatgttgaggaaaatgagagatgactgtaggtacatcaaagaggtacatcaaacccacatcaaaatgttccatctcccaatgagcaagctgactataaaatctgagatgcgatccaggcccttagagcctacccaggaccccctgaagtggcaaagattaagggaactcacaaaaagcctggaatctcccagagaggatgagcagttctatgcagcacaggctctgggatgcttacgcatcagtgacaagtttgtcatggaggcactacagcaggtggtgagtctgagaactgctggagttcaggaaagaaggaaacagggtctgagatgtgtggcatgtgggcacagacgaggctccccggggtgctaggatggcgggtcagatccagtaaggacacagccaccactgtgcagcatgacccatcccatgtccttggcctcttcgaagagcagctggatctaaaagatagggaaggaagaatc

SEQ ID NO: 228391 - DNA, 466 bp, Homo sapiens
tagtttgaaattctttatttttctctgtcttcctttccactggctgccttggatgggcaggaactcacaaaaagcctggaatctcccagagaggatgagcagttctatgcagcacaggtgagaagaggcaaggatagaggagggtggttacagccaggagttggccaagctggaaagtaaaaagctgcttgacgtgatggtggttgtggggatggtattccaagcacaaactccagctgtatccagagaatggtaactcctggggatgatgtccaagtttccttctctttcctccatccctcttcctgcaggctctgggatgcttacgcatcagtgacaagtttgtcatggaggcactacagcaggtggtgagtctgagaactgctggagttcaggaaagaaggaaacagggtctgagatgtgtggcatgtgggcacagacgaggctccccggggtgctaggatgg

SEQ ID NO: 228392 - DNA, 657 bp, Homo sapiens
gacttattgaattgtccacttaaaattggtccattttcttccatataaattacacctcagaaaagttaatttcttaaagcaaaaaatacgaaattaaacaaagaaaaagaaactattgtaattaatcctggattacacactttactaaagtacagtgctcaaattgataagatgcagccaaatttctactcactttgtgctgtgtagaccctgctagtttcctgtgcctattctagaagctgtggtagaaatatggccattagagaggaaaggcccgggtttcccttctggaaccatcatctaccaccagatgggcatatggcatgttagttgcctccaaatctcccctgcttcaagagtcctccacctccacctccaacgagtaccttctctgagcatctctggagcttcttcttcaatctgattctatctgtttttccttgctaggattcctcacagtttatggtccatgggaagattcctagtctagtctctgaatacatacatgtgtatatatatgtatgaacatgtgtgtgcatatatgtatatgtatgtatgcacacgtatgtgtgtgtttctatcatttctaatgacctggaacaggggaacactgtgtgtgcttagtccaccttcttgtaactctcagagcttagtttc

SEQ ID NO: 228393 - DNA, 603 bp, Homo sapiens
gacttattgaattgtccacttaaaattggtccattttcttccatataaattacacctcagaaaagttaatttcttaaagcaaaaaatacgaaattaaacaaagatcaaattgataagatgcagccaaatttctactcactttgtgctgtgtagaccctgctagtttcctgtgcctattctagaagctgtggtagaaatatggccattagagaggaaaggcccgggtttcccttctggaaccatcatctaccaccagatgggcatatggcatgttagttgcctccaaatctcccctgcttcaagagtcctccacctccacctccaacgagtaccttctctgagcatctctggagcttcttcttcaatctgattctatctgtttttccttgctaggattcctcacagtttatggtccatgggaagattcctagtctagtctctgaatacatacatgtgtatatatatgtatgaacatgtgtgtgcatatatgtatatgtatgtatgcacacgtatgtgtgtgtttctatcatttctaatgacctggaacaggggaacactgtgtgtgcttagtccaccttcttgtaactctcagagcttagtttc

SEQ ID NO: 228394 - DNA, 752 bp, Homo sapiens
aacgcactctctactgattaaaaaaaaaaaaaaacccagacatcagaacatgctctatggccaaactgtcatcatagtgaaaagtctgcgcagtacattattctataaaatgttgtttaactattttaatggctccttatgaagtcctaaagaatgaagataattacaaacctgtaattttatggctgccttgttgaaaagggcagaccaaggtgcctatatcaggatgaaagacctgaaaatctaaatagcctagcatattatatataaaacttttagtcattaattatgagattagctcagattagtgaaatatagcaagttttgcattgtcatctaaacttgaaattttaacgtgaacgctagttgaacaaagttggcagtgagaattgtgaattacaattagcactctacagaatggtgagacatactggaagtaaagctgaggatgactgctttttggtttgtttgtttgagacagggtctcattctgtcgcccacgctggagtgcagtggcacgatcgtggctcactgcagcttcaacctccctgagctcaggtgatcctcccacctcagcctccggggtttcaccatgttgctcaggctggtctcaaactcctaaggctcaaacaggcctccagccttggcttccaaagtgctgggattataggagtgagccacggcacccagccgagtgactatttaatgtttacatttttgtcaccaaggaagcaaaagagttttagcaattt

SEQ ID NO: 228395 - DNA, 698 bp, Homo sapiens
aacgcactctctactgattaaaaaaaaaaaaaaacccagacatcagaacatgctctatggccaaactgtcatcatagtgaaaagtctgcgcagtacattattctataaaatgttgtttaactattttaatggctccttatgaagtcctaaagaatgaagataattacaaacctgtaattttatggctgccttgttgaaaagggcagaccaaggtgcctatatcaggatgaaagacctgaaaatctaaatagcctagcatattatatatttttgcattgtcatctaaacttgaaattttaacgtgaacgctagttgaacaaagttggcagtgagaattgtgaattacaattagcactctacagaatggtgagacatactggaagtaaagctgaggatgactgctttttggtttgtttgtttgagacagggtctcattctgtcgcccacgctggagtgcagtggcacgatcgtggctcactgcagcttcaacctccctgagctcaggtgatcctcccacctcagcctccggggtttcaccatgttgctcaggctggtctcaaactcctaaggctcaaacaggcctccagccttggcttccaaagtgctgggattataggagtgagccacggcacccagccgagtgactatttaatgtttacatttttgtcaccaaggaagcaaaagagttttagcaattt

SEQ ID NO: 228396 - DNA, 687 bp, Homo sapiens
ggggaaagtttgtctcccctctgaaggatgcccgtgagtgtgtgctgctgagaggatggcagaatggcaaggtgggagcattctgcaagcatcatgacatcattgagctactgaatcaaccttccctagaactggcttccaggactttgggtcatatgagtcatgtgagaaaaatattctcctctacctttttctgagttaggcctcatgctgcttgaagctgaaaacatcctgttacacctcggttttaagcaccctcccctggcctctgagataagcctctcaggaacctgtggctctctaacccagtttgaaacgttttgctctccatagaattgtgtaccaggagagttatattgattaaattaggtcttacattttatgttatatattcagagacatatatttgtagtctgcatttcaggtaaagcgttttccatgttggaggtcaaatcccacgaggttcacgtatctattgctgctgctttaccctgttctggaaaagaaagttatttgcctgccgaacgcacagacatgagattagaaagtgatgacaagcgttaatgcttggctctttttatcatagactatactcttttctactctattatttcatctgtgtttgtgtaacatgtatctcacaatgcagaaatcttttttttctttttgttatgaaaaatttccaaa

SEQ ID NO: 228397 - DNA, 526 bp, Homo sapiens
agtgctccaggaagcttttgtgtcctcggatgaacacggactgccccaggaacaccttcaagggttttgtgggactcaagggagaagatgaagccctcccagaaggccctgtcactacaagctgaggacctccttgggcaaagaccaactctgactccagctctgaattccattgcagccaaatggatatttctcgtccctcggcccttggttgtttttcctaacattttttatttccaacctacccctaggttttcagtggcttccttagaatcagtaagaagccctgccagtgcagagcacgtgcctttgcttctgccccagtgccttcctaacagtccagagacagccacaccccaccaagccaaagccaggacaccctctgggttcctcatgctctgcccaagaacactgtgccacagtgagtgccagcctcaccaatttctccaggtaaacaaacactcctaaaattattggaaaattgttcctcacaccttttatattttcagtaaaaatgtaatagaaa

SEQ ID NO: 228398 - DNA, 563 bp, Homo sapiens
tagggagttaccaaaaatagtttctcagactgattcctttggttagtagctatagaatttttccccatggactttgagttccaaataacagacccttaagagaatcatgtaattagtggatgatagagctacgttaatatttactccctgatttcctagcctaaagtagattggaagaaggaagttggatgtaatagagaggttggtgataagggaaagactactgcagaaggcagacatattaatgacgagaaaaagtaactgctgacagccaaagaggagaccgagaagcaaaacacagaaactcagcagagtagtttggtctcaattaaagagggccattaacccctaatatctcaggaaccttcaaagggacatctctttaccacaccacagaataattgtatctagaataatgaccctgagtcatcaagaaaattttaaaatacgctctgtatatgggaagtccccaacttacgaatggtttgtggtccaaagttaattttcaaaacatttttttggaacgcaaaatatttttctttctttctttttttttttttttt

SEQ ID NO: 228399 - DNA, 516 bp, Homo sapiens
cagcattggctaatctgagcttgattcctccagacagggttggtgacagagtaacacactccagtctctgaccctctgtttctagactccagtactcactcattcatgcattctttttttcaacaaatatttaatgtcctcctgccatgcaagctctttcttggccccaaaagatgggaagagcacaggggactgaccctcagagtttattgcacagagaaggcaggtggtagctggatgctggaggagtgtagacagccattttctggccaccttgtctttgtatgtcacagccattttctgaaggaaatgaactgaaagagactgtcgtccttttttaatgacacagttcagatatattcaaattcatttgggttagaatacaagctgtggggggttttattggcatcatgctaaaaatatattcctgtctcttgaatttttaaaatttcattttattgtgatatgaacacataacatgagattgaccctcttaaattttaaaatgtacaatgc

SEQ ID NO: 228400 - DNA, 310 bp, Homo sapiens
ggttggggggtagttagggtcttgctctgtctcctaggttagagtgctatggtacaatcatagctcactgtaaccttgaactcttgggctcaagtgatctcccacctcagctgggattacatgcgtgcaccaccacatctggctaagttttaaaattttttgtagagattgggtctctctatgttgcccaaattggtcttaaactcctggcctcaagcgattctcctgcctcagcctcccaaaatgctgggattgcaggggtgagccaccacgccaggcctgaaacttaaattcttgttgtgaaaagtca

SEQ ID NO: 228401 - DNA, 785 bp, Homo sapiens
gagcaagacatctgcttattcctagcagtccactaaaatacaaggtcttcagcgcgaagatacttgtctgacttattcattgctgtatcccttgcgcttgcaacagtgcctggcgcgcagtaggtgctcgataaatatttgctgattgaatggaccctcagattatggaaagagggagaattctaactaatagttaaaggcttgataattgatagcaaaatcactatcctatctttcagttttaatcatttaacaaatatttatcaagtgcccactgcataccaggtactgagaattcagtggggaacaagacggacatggtccttacccctatggagcttatactcgaatagaggagacaaaataattaattaagaaaataggtgaggtattttggaatactgataaatactattttgaaaataaaacagcaagatgtgataaagagggcttgaggactgctttccatggtcaggaaagtaatcttttccaagaggaaaagtaatcaggtggtcaggaaagtaatcttttccaagagggtgacacttgagctgaatactgaaaggcaagaactatccaccatatggagtttcagaagagagttcttggtgggagaatccatgcatttgaccagagctgttttcaagctaattcactgccccaacgtctttggtttggaatctgtaaaggcctgtttttcctaacacctttcttctttcatttgctacagtatagagtagtgttcttttggcatttagtaggctggtgaactttgcacttccctg

SEQ ID NO: 228402 - DNA, 838 bp, Homo sapiens
gagcaagacatctgcttattcctagcagtccactaaaatacaaggtcttcagcgcgaagatacttgtctgacttattcattgctgtatcccttgcgcttgcaacagtgcctggcgcgcagtaggtgctcgataaatatttgctgattgaatggaccctcagattatggaaagagggagaattctaactaatagttaaaggcttgataattgatagcaaaatcactatcctatctttcagttttaatcatttaacaaatatttatcaagtgcccactgcataccaggtactgagaattcagtggggaacaagacggacatggtccttacccctatggagcttatactcgaatagaggagacaaaataattaattaagaaaataggtgaggtattttggaatactgataaatactattttgaaaataaaacagcaagatgtgataaagagggcttgaggactgctttccatggtcaggaaagtaatcttttccaagaggaaaagtaatcaggtggtcaggaaagtaatcttttccaagagggtgacacttgagctgaatactgaaaggcaagaactatccaccatatggagtttcagaagagagttcttggtgggagaatccatgcatttgaccagagctgttttcaagctaattcactgccccaacgtctttggtttggaatctgtaaaggcctgtttttcctaacacaatgagcaaatggaaagtttgatttttagtcacatagtttgagattgttatccctttcttctttcatttgctacagtatagagtagtgttcttttggcatttagtaggctggtgaactttgcacttccctg

SEQ ID NO: 228403 - DNA, 376 bp, Homo sapiens
gatgatacacggacacacagagagagtatgtataggcacacatataatatactgcctagagaaaccactgaaagacctatacaaggagatacactcaaaaacactttagattaatcaaaatgaaattgtaaaaaagtaacccacaggaaggcatgacaagaaaacagaaatgacagattgaacaaacaaaaacaataacatggggaattaagctctaacatatataattatcttaaatgtaaatgatcttaatacaccaattaaatgaaaaaaattagcagagtggataaaaaatatatgctgtctacaataattgcacttcaattataatgaaatagacaagttgaaagtaaaaaaaaaaggatggaaagagaag

SEQ ID NO: 228404 - DNA, 879 bp, Homo sapiens
tctaaaaaaatatatttttaattagctgagtgtggtggtatatgcctctagtcccagctactgggggtggtgaggggctgaggcagaggaattgagcccagaagttcaaggttgcattgagttatgatcatacgactgcattccagcctaagccacagagtgtgacatttctctgtggccaataagcacatgaaatgatgctccatatcattagccatcaggaaaatgcaaattgaaaccacaatgagataattcgcactcactaaaatggagaaattggaatcctcatacactgctaatgcaaatataaagtggtgcattcacttgaaaagtgtagcagttcctaaaaaaggttcaacgtagagtttaaaaataaaaaaatataggccaggagctatgactcactcctgtaatcccagcactttgggaggccaaggtgggtggatcatctgagctcaggagtttgagactagccgggacaacaaggagaaacaccgtctctgcaaaaaatacaaaaattagccaggcgtgttctcacacatctgtagtcccagctacttgggaggctgaggtaggaggatcacgtgaagctgggaagtggaggttgcagtaagccaagatggcgccactgcactccagcctgggcaacagagtcagaccctttttcaaaaaaaaaattttttgccaggcatggtggcactcacctatggtcccagctacttaggaggctgaggcaggaagatcgcttgagtccaggagttgaaggctgcagtgagccgtaattgcaccactgcactccagcctgggtgacagagtgagaccccatcttgaaataaacaagaattaaaaaatgaagagaagtagtatgggtgtagttgc

SEQ ID NO: 228405 - DNA, 495 bp, Homo sapiens
tgattagcaaatttcctttgctaaaaatgagttatatgccaattcctaaactagtcactgttagggtgtagaatcactgtgattggattagaaaagctctgcctcctggaactaggaatgatgttgtttgccctgaagcacatggatctgtggtcaggaagaggggtcttgcgggaaatatatatactgagtaagcagtgtctgatacaaagacgaaaaatatttcttttgacaggaagatttggtaaaatataaagtagtagaattatttcccattatttaatctgtttaatgtttcataaaaattagcaaacgtaatgaggaaacgtatctgtaagaatccactatgcatttgctgtttgctctgaaatcaacaggacccagtgctttcattactagaaagaagaaaattaggtaggttaataaaacaaacatctggaaagtatcaacactcataaaaataaatggaatcatcctgtgtatacactaaagcca

SEQ ID NO: 228406 - DNA, 264 bp, Homo sapiens
ccagaatttttaaatgctgcagtaacttacgcatttcctactatcacatacgtctgagaacggaagaaactgtgttgcccgaagctatttcagaaagggctagagacaagaacttgctggctcctccaaaaattctatcttactccaaaaatactctctcatctgagctgtgtaaagtatgtaaagagtttaaatgtacacacatgaacagtgttttttaaattaaattcatataaaggcacgaagaaccttcattgggtaaaa

SEQ ID NO: 228407 - DNA, 484 bp, Homo sapiens
ctgctttagctatatttcacaggctttgttatataaggtttttgttttttttagtaagtgtcttctaatttctattgtgatttttttttcagtgactcctgagttttttagaagtgtttttgccccaagcctgtgaggatatctttttttattattgatttctatgtacatttaatggcattgtggtcatggaatgtggactgtatgaagaccttgttacttaattagtagaaagattataattcttagaaacccatactgcaatactagaataaattttttccaattttaaattcaatgtgctagaaaatcccacaacaatatgctttagggtttgtaatttaaccaaatgaatttgcagtactctcattacttaggtttcttcctttgaatctgagatcttaaagtttagcagctgcatgaagagcatgtccacaaaattcttttcttagttaaaaaaaataaagttagattctaaaaactt

SEQ ID NO: 228408 - DNA, 430 bp, Homo sapiens
ctgctttagctatatttcacaggctttgttatataaggtttttgttttttttagtaagtgtcttctaatttctattgtgatttttttttcagtgactcctgagttttttagaagtgtttttgccccaagcctgtgaggatatctttttttattattgatttctatgtacatttaatggcattgtggtcatggaatgtggactgtatgaagaccttgttacttaattagtagaaagattataattcttagaaacccatactgcaatactagaataaattttttccaattttaaattcaatgtgctagatactctcattacttaggtttcttcctttgaatctgagatcttaaagtttagcagctgcatgaagagcatgtccacaaaattcttttcttagttaaaaaaaataaagttagattctaaaaactt

SEQ ID NO: 228409 - DNA, 424 bp, Homo sapiens
cagattgtgctgtcaagcttttgaacttttgccaagattatatatgagaaatagtatctcagtgtagctttaattctcatttatcttattatgaatgaaattgaacatcttttcatacactgaagggccattagctgttctgcttctgtgaactgtctgttcttttgtgctcctttttttattgggtttcaggatgtattttcaaattagagccaactgggttttctaacagattgaatgtgatgtttgagaaaatagataaatcgagtataatcaacgtctttgtattccgcaactggaaagattaagctacctttaagtgggatgaggaaaggtgtggttaaggcagctttcagattatcagatcaagggatcaagagttcaggtttggacattgttgagttaatgctgtctattaaatatc

SEQ ID NO: 228410 - DNA, 421 bp, Homo sapiens
agcctggcatggtggcaggtgcctgtaggaggctgaggcaagagaattgcttgagccccggaggcagaggttgcagtgagccgagaccacaccactgcactccagcctgggcaacagagcgagagtctgtctcaaaaaggaaacaaaaaaaaaagtacctccaaattatggtagggtgtccatattaagaaggtagaaaaaggtcgggggaagtggatgcctgtaatcccagaactttgggaggctgaggcgggtggatcacctgaggtcaggagttcaagaacagcctggccaaaagggtatggtgaaaccccatctctactagaactacaaaattagccgggcgtggtggtacatgcctgtaatcccagctacacaggagtctgaggcaggagaatcacaggaaaccggcaggcagagg

SEQ ID NO: 228411 - DNA, 490 bp, Homo sapiens
gcattgctttgcttcttatcaaaggaattttaaggaggatgaggcatgtatgaaatagcaactccaacagttgctatcaaaacaataagaaattattgttgtatcattattctggcttgtcatggaatttttaatgtttaagaattttgattttacaagcttatggcatggaaaccatggttaatatattaaaataaaggtggccgggagtggtggctcacgcctgtaatcaatcccagcactttgggaggtcgaggtgggtggatcacctgaggtcaggagttcgtaaccagcctggccaacatggtgaaacctcgtctctactaaaaatataaaaattagccggggatggtggcaggtgcctgtaatctcagctactcaggaggctgaggcgagagaatcgcttgaacccgggaggcagaggttgcagtgagctgagattgcgtcattgcactccagcctgagaaacaagagcaaaactccatattta

SEQ ID NO: 228412 - DNA, 440 bp, Homo sapiens
gacaagcaggcagctgcacacctgaccccaggccaccaggacctgcctttctcctccacatgctgccctgaaggggcctcaacagccacagcagtcctgcttctgtgccaggcaccacccaagtgctgttccatgtcacttccaacagccctaggagggaaactgaggcagagcactaggaggggagggtctgcacccaggcagacagctccaggtatgaaccacaggccccatgaagggtcacaccttgggtggggagaggacatgtggtcaggggtacaggggcccggcctcccctgatccctccttgccagcagttgcccctggaggttctctctcactctccaggttacgactcatccacgacggctgaggaacagccatgagccgggatgccctgagatggcagaggggagaactccaccatttctgactcaggg

SEQ ID NO: 228413 - DNA, 417 bp, Homo sapiens
aatcattttgttttcaaaaattttattttggaaaaaagttctcctacataactaatatcacatagctttattaattttgaatttaacccagattgttgtccaatatacttttttttcacagttgttactaagtttctgttttatcacagccagtcttaagtaaggaaattagatttatttaataattaaacctctatgacaatggcccagggccaactgaattcagcacagcaacttagaataagattctactggactttctatacttttcagccacaactgagcacaccgttgttctatgatagcattattgtcattaatgaaatgtataaatggaatgcaactaaatagtgcctggttaaatagttcctggggcttggtaacaaaacaaataaatacacaaccatactctgaaga

SEQ ID NO: 228414 - DNA, 478 bp, Homo sapiens
ttaattaggagacagtgttttatggggagattgtgacatgagatttctttaaatactattgctttcagagcatttatatgttgtgtatctcagaattcttatttttctaacttcaggaacaaatctattgggtaaagcagtggttcccaagctagattatcaccagaatcaactgagaatattttcccccaactattagaaaaattttaatcatactgagaatttgaaagagtaacaaattgaacacccaaatacccaccaactaaattaaacaattgttaacattttgtcttatttctcatgtttgtgtgtatgtgtatatatacatatatatatatacacatacatacatatgcatatatacatatatgctggaccatttgaaagttgcaaatgttataacacttcacctgaaactctcatttcagcatgtgtattctaagaataaagacatttgatacaacataaaattgtatct

SEQ ID NO: 228415 - DNA, 477 bp, Homo sapiens
gaacagggccctccttggttagaaactctctgatggtcgccccaggaggattttagatagacacacaaagaaaaggctgagaaatgctccctggggaaggtagggaggagaaggtgcaagaaaaggattttatatgctcttggctcctgactttggggaagcccaaattattacaaatcaatgtggtctcaattccagaggttaaaaaaatttttaagtccggctgggcatggtggcttatgtctgtaatcccagcactttgggaggccgaggcaggcggatcacttgaggtcgggggttcaagaccagcctggtcaacatggtgaaaccccgtctctactaaaaatacaaaaattagccaggtgcagttgtgcatgcctgtaatcccagctactcgagaggctgagtcaggagaattgcctgaacccaggaggtggaggctgcagtgagccgagatcatgccattgcactccagcc

SEQ ID NO: 228416 - DNA, 314 bp, Homo sapiens
gaagtacagcctggtgaaatgcccagttaatgctggtggggctggtggcctgttcacttactctaactttgttcctgctagataccagtgtgatgagcaatcattcagggtcagtttgtttaggaagggcctacaaaattctggctttttccatggttccttttgtttgtttcaaggtctattgtgataccatggctgttagcagtttcttgtgataaaacatgggcttgagacctcttcaactgtccttgtaactttcaactaatcatatccatggtgcagcatgcagtgacgaataaaagcaaatgacaaat

SEQ ID NO: 228417 - DNA, 654 bp, Homo sapiens
caagttctacatgcctactctggcacacactcctgacagataatagacagccggcagcactgtgctcaagtgcctggcccatcagccagcaggtgtgccaaggccggcagggtggctgcagcaggcggatgagtactttgcatgtgacacttgcaggggagggaaccttgggtagtgccctgtgtcagaacagggtctcacccttaaaaggcggagcaaagcctgtcttatcacacagtcctccatgtagtcacaatacataccagccagagtgatgtgtgtaatggaacgttacctgcaagaaacagggcacaaaatttcctgtgtgcacgtggttgacgcgtgaagatagcatctaggaaggcgcagagaacagaaaacaggccatgcggcacctccctttcctaaagaccgtttacaaaggtgctggcattgcgagttcctgcgttcatcattcatgtaataccaattagtgcctcccacactacagttcacaaaaggctgccaagcccggtgcttgctaccatgcagacctgcagccagtggtcccggccatggccctgacaggcttccagaactctgcagccgactcccggcctggaaatcttaccctaggaactgccacaaagtgaaaatttcgtggaactgaataga

SEQ ID NO: 228418 - DNA, 837 bp, Homo sapiens
atcaacacacagcaaaacaaggcatatgcagtgacatacataaatacaagccttgacatcacacacaaactgcacaatactggcgtattaacagatcaagtgcaataagttcaaagttcaggaaaagaaagaatgtgccatctcttgtttgaaacataatcaaacactggctatcaaatatttatagctatctaattcaggatgtcaagcagacagacgttagcaagaacatgttaaagtaggcggacagtcgtggctcatgcctgtaatctcagcattctgggaggccaaggcaagtggatcacccgaggtcaggagttccagaccatcctgacgtcaagcattccactggccttggtctcccaaagtgctgggattacaggcctaagtcactgtacctagacagactaaacttttaaaatcaactagacactttattatttgttctaaatggtccaaataccaaacatcatcaatgtggtagtctgacatgtgtgctacacatacgtttttatttgttatagtttaggtctctgtttcttatctacactgcaagacccaatatccagatatcctcctcatccctacctgccaaagtgtcctccattctaatttattcatttttttagagacagggtcttgctctgtagcccaagctggagtgcactggcacagtcatagctcatcacagccttaagcccctgggctcaaatgatacttctgcctcaacctcctgggtagctgggaccacaggtgagagccactgcatccagaccctcctccactctagtggcttaatcctagcattcaagaaaattggtagcaaagaagagcata

SEQ ID NO: 228419 - DNA, 706 bp, Homo sapiens
gaaaatctaccataaaattgggggcagggcggagggggggcacacaataaagactccaagagcatctgacccagtctttgtatttagaaatgacaaacttcatttcctggggctggacctgctggccaaaaggctttaaatgtcccagtgttggcccttgcttatctcctctagaatcactggcttgaaaacattcagcctccctttccaggagaaaagcaaaaacacacttaacccaattttccatagtcaacaaggcaatggaaggccagagagtgctacttctctctgggttcttagaagcagattatgaaaactataactaggtggaccatttagaattaaatgaaagaaactggataatttcctttggaaaatgtttgaattacaaattaaaaactgatttgaaaattatgttaactaaattattacaattgggaaatttccctatacatgtgtttattcattgtatcttggggtggggggaacattagagtggcaactcctgggaagacttttgatacttctaaatagaaatgctgggaataacagagctgggactcaagccctttgagactgagttcattaattgtagaaatcagattgctagatgtcagtagacctgatgtcataaaatcaaaccaacatttttgtcattcagaatagtcttctgagaatttagtgcattgatcaagaacctgtgtag

SEQ ID NO: 228420 - DNA, 424 bp, Homo sapiens
ataagctgagtctgaactgtggccagaaagatgtgaaactaagcagcaaggcagcccaaatatgaaatattgattgcaacccatgtggttagtgtatttatcgataccacagaagcagcagccaaaaggagagcggacatatattctctctctaaagaataaagttgacttaaaaacttttctctcagaactttactgaaatagcactggaacaagcagcgatagttaaccagggagtctggaactgccatagtattcactgaaagaaaagggaaactgaaattaatgaagcagacaaacctctccccaggtcatggtaccagaaatgttgatggctgatgtaataccttggttcttatcttcttagtttaaaagaatttaaacaagagacacacagcaaaagaagtacagcataatttattgc

SEQ ID NO: 228421 - DNA, 478 bp, Homo sapiens
gagaaaggacggcagaaggggtgtgaagagaaagtgaggggctcaggtgccaaggccttggaggtggtggggctgggggcaggcgctgcagttctcagcatgagacggggggcagcaaggaccccacctgcgctggcaggccctgctgcccctctagccaggaggagaatgctttttcatagggggaggaaggagaaaaatgacttcgggctcctggcaacttcagcaatcagctccttgtcaagcaaataaaatgcttttgaatgtccagattaatgattgatcagcacaacgcgagcctgttggaagcttccagttggcccacgtgggggtccccgctgcaggcgctggtaaagtgacaccccgttagtcacttctctgcgtgtgcttgggagaagcccacacacacatgctggtgcctgacgtggggttatttctgtgctgaggaggcaggaaacggcagaggaggcagcttcca

SEQ ID NO: 228422 - DNA, 258 bp, Homo sapiens
tgttggttggcgagtggtttccatcaagtcatcatgggaaaataatcaagttccatattcacaggttaggataggatgtaataattctcagaagaacccttctagtatgatatttgcttatcaaaatgtctcagaaacaaaatatttgaaaatactgtcacatttattgtatttctctctgttcttatgccgtgcatgtagaatgtacccaatgtttatgaattaatagataaataaggtctattgtcttttgaaaat

SEQ ID NO: 228423 - DNA, 589 bp, Homo sapiens
ataaattacttaatctttttgagtctattcactttaaaatgaaaataatgcaacttatttagtagagttaataaatagcacctggatcaaggttttgtccatatgtgacagatggcacactctctagaagatctctccatgcctctctgacaggaacagtgctgcagagaatttttattgttcattaacatcaagcagtaaatatggctgtatttgaagtgtggtgtagataaaatttgtatacatatatgtggaaattccacacacaagatttcactactatggaaatcccttcacagctcaacaaatcattcatagaagcaagttgctaaccactgggaaaaaaaatcctcataggatatgctgccaatttggcctagggtataaaatagtttttaattgcctagtagctatacccctttctaataagtatacatatatatttcagtagcctccttcttaaaatatacgtgtgtgtgtctgtgtatgtgtgtgtgcgcaagtatgtgtgtctgtgcatgtgtgcctataaatgtgtgtgtatgtatttctaaaaagaaataaatattactttgatacttccagttgg

SEQ ID NO: 228424 - DNA, 379 bp, Homo sapiens
aaacacctggcatgtccaaacgtgccagggattgccttgctttttcactctttatccttgtgggaacatgcaatcataatacgcttcacatttttgtagtgctgtgcccctttttcccaaacgtatctgggtaggtaggggagatgttattatccatgttttactgaggcccagatagatggaaagctgtgcttcagaccatcttggcacagtgctgggagtgtaattagtgttctgatgcccatctcagccatttgtcatggagtcatggctctaccatgtttgcattgctattcatattaatgccacaccatccctttgctaaccctctcaccaacatctgcaaaaattgcagcctacatttcagaattatatttac

SEQ ID NO: 228425 - DNA, 401 bp, Homo sapiens
agtgagcccagatcgcaccactgcactccagggagaccttatctcaaaaatacgtacatgaatttaaatataaaaatcaaatgtaaatacatgtatatgtcgcactgtaacaacttattgcttcttttcaagcagtaccaaaaagatactggtaaaagtgggattcacaaagtagtgagaccctttaaaaagcaggagagcggcagcggactggtttaggtgaacactggttaaattttcttgttttttaacgagaggtaagagctgcttatccagttaacactagaccaattgactccacctgtgcctcactttctcccacgtggccaggggagagtggagggtaagtcagtggccgctgactgcctgctaagcttcaagaaggcagtttagactgagca

SEQ ID NO: 228426 - DNA, 231 bp, Homo sapiens
caatggagtagtcacaaagtggcctttgacaagataaacagttacctcatggaggccagatactctctttcccgattccgtctgctgactggctccttagaagctgtgcaagttcaggtggacaatcttcagaatctccaagatgatctggaaaaacaggaaaggagcttacagaaatttggctctatcaccaaccaattattaaaagagtgtcacccacccgtgacagaa

SEQ ID NO: 228427 - DNA, 583 bp, Homo sapiens
aagaaaaaagcaaactttggagagataaaacagctcttcattctctagggatctgaatgtgcaggagctataccatgcttactgactgtcttatgagtgggcttttttgtgctgaccatttctttgaagcatgtgtaacaggatgtaaaaatgggatccttcaccgctcagttttggctgagcaacaagtgccagttactcctatatcataaagtaaggttcaagaccaccaaagcaggtcttgcaaagcaactgtctagaaaccagtgtatgactttcagtctacgaaaaaggttgagaggccagagagaattctagtaggatatgtggccacaattatcaatgtggtgtgggtctcaacccatctcaggtctaaggaaagttactttacctgggtccctgagagagcttggtatgcatccctctagatttaggacccagacaggcttctgtccaatccgttctgagaaatacaagggcttgtggctggatatctgctctaatagctgagcaaagacaaactgatgctttggggaggtctttcacacccacagtttttcaaaataaaaactgtccatttccc

SEQ ID NO: 228428 - DNA, 557 bp, Homo sapiens
cgggaggctgaggcaggagaatcacttgagcctgggaggcagaggttgctgtgagctgagattgcaccactgcactccagcctgggcaacagagtgagactctgtctcaaaaaaaaaaaagtcttcatttatggttacccatttcatcaatgctgccagctctagaacaaatagcagaaatgagaatgttgattcagagggtcagaaaatacttaaggcttctgtcacattttcttcacaattagacttgatctcctaaagattttaagaaatgccagctgggtgccgtggctcacgcctgtaatcccagcactttgggaggccgaggcgggcggattatgaggtcagaagattgagaccatcctggctaacacggtgaaaccccatctttactaaaaatacaaaaaattagctgggcgtggtggcgggcacctgtagtctcagctatccgggaggctgaggcaggagaatggcgtgaacctggaaggcagagcttgcagtgagtggagcttgcgccactgcactccagcctgggagacagagcaagactccatctc

SEQ ID NO: 228429 - DNA, 487 bp, Homo sapiens
tgctggtttttgctggtttcattgcagcatttcagctctcctgcaacaccactgacatttctctattgtttttctcctccacactgagacctattggctcagaagtccaccagcataaaacccagattttcatacttctaaattgttttcaacatagctcaaccaggaagattgttaggcattggaggccttcctggctttcataccctggtaaacctcaccccacatgtgctaaccatagataagatggagccttgtggttagaagacccccaagacactgtctagctgctgagaaacatcacttagactcataagctccttctccaatttccatctcccccagcagttctcttgccttcctccccatttgatggtgatcccacacccataaactctagacagtcttttactctgaggatgtccccgcttctgctaccctatccaagcaccacccaataaagttgtttgtgtggtactgccaatgg

SEQ ID NO: 228430 - DNA, 608 bp, Homo sapiens
tatattaaaagtcagtactacttggcctactatgttacatccttcattttttaattctttattttcctttcagtactttcataagcatactcttcatcctagtcataccttttgttattttctaaagatatcatttcacttccttattttagtagtattatttcctcttcttagaagccacactcacccaccattacattcacatagaaatctgttatactttctacaagatactgcttaaatatcacctattctgtgaagtggtcagcatcaagccccttgtctccaagcagtttacaattagttgttgcatttctcgttttcccatagcattttggagtttatggcttcattagcatttatctttggtattataattacgtgtttactcctttctgctctttgacctcatgagccacctcattcctcattttcccatagtattttggagtttatggcttcattagtgtttatctttggtattataattacatgtttactcctttctgctctttaacctcatgagctacctgaaggaagagactatatttacaccaagcatgtccaatatgctgcccatgggccacatacaacccagattgactttg

SEQ ID NO: 228431 - DNA, 131 bp, Homo sapiens
catggcagctatctgagatggtgataacagtgagctaaagtactggtcaacaagaactgaccaaaaacattaaaaggaaaagctggagaatgaggcatctataaagggctgtgaaaaggtctgacacattc

SEQ ID NO: 228432 - DNA, 603 bp, Homo sapiens
gcacgagattaaaagagagaagtctttttgtagatttgctgatttatttatgaaacacctctgaaatatttataaatgctttcctgatatttatctgaaaatacattttagggcttctttggtagaagagagggggagaataaaggatgatgagggtggaagaacaaggtgaattcagcaccatttctttcagtagcaaggaaagggatatcctagggtataggaacatgtcactagggggtgccccaagaaccaggccggctctaacctgctcagcacaggtgaccctacttgcttggatctcttaaacagaagcaatggcaatcacaagtgctctgtttaattttcctgacagaaccggggcagatacagacgctcttgagggctttatcacttccttcacttttagagctatttattaattgaaataatagttatgctaccccttgcctcagacctactttcatctgtttagcaactgctttctatgaaacacaaaagagctcagcaatgacactcgtgtcttaattaaccattgaataccttatagagcagctgtcacaactcttgtcacttgaaaggaagcacagtggtccctgttta

SEQ ID NO: 228433 - DNA, 481 bp, Homo sapiens
tatgactgactagaatagaatagctcttatgaaaggatgagaggttgaccaatcaggaccttgtttatatttacctttctgtggttaaaaataatcacttgttagtttaattaaaatatgatatgtgtcctggaagtattgtcagagactctgtagataagtgtaaaatatatacattatgagtccacttgagtaatgtagactttcaacttcatactttaggcaaaaaagaagtcaaaaactatcttccagaggcaaagattatattttacaatagaaatgcaaatgaacaataaaaatggttattttctatgttattagctgttgtagggagtcagctgtggaaagtgtaataaagagggcttatgattattattattattattgagtctcgctctgtcacccaggtaggagtgcagtgagccaagattgtgccactgcacgcactccagcctgggcaacagagagagacttcatctca

SEQ ID NO: 228434 - DNA, 585 bp, Homo sapiens
ctttggcccatgcggcgggtccaggcagctcctgcagctgtgctcatggctgctggcccagaacttctcatttttgccatgtggaagcagatttgctagtagaggaattttccaagtcaagggaagtgttgccaaacctcttgcctcgacctgtggggggccttctgctcttgttttctcattctctttggagtgggcacagaggggacaagtcggcccccagtgaggctcagggagtgcaggagaccagggagggaagcccagatgatggggaaacagagccaccttgagggggtgtcatggggtcagtgtcagggtgatctgacgggtcagttcatacttaagcaacattattctgttcgtttcttttgggtaaggaattcctcatgggaggtgtggtcatctggtcgtagaggtggacagaaacaccccctcgtcttcctgagccatttggaagccctttcctctagccctaggtactggtgacacaggcccctcggtctcaggatgtggacagggctgggaggtgcaggcttcttgtcccatccccactcagtatcatcgggtatctggtagtcaggggat

SEQ ID NO: 228435 - DNA, 359 bp, Homo sapiens
cccatctgttggaaagccaccacagtcgtggaacccaaggcaacctacataacctcctcaggcctccatttccttgtgggtaaaacctcatggagctgctgtgaggattcaaccagttaatgtccccaaagccctgagaactgggaatattcagcacctgttcccctactgttctattaatgattattaccatcttttcatctcagcccttgctatgaagtaaagtggccttcatccacccttagacaaatgagaagtttctgctccttggagaagattttaaggaagccatttctagaatgttccttattccctcctcccactgccttgtaagctcataactcctgggaacctctggc

SEQ ID NO: 228436 - DNA, 593 bp, Homo sapiens
gaaacagaagcattcgccttgttttcctagctccaacttgtaaacatgaagaaagtaagaagggaaaccctttggggattacaaagaatgatagagctaaaataaataaataaagcctaaatttatttttttaaaaacgatagaggcttgaggagatttacatgtcattttttggtgaactctgtggcagctgctgccgtgtgaactgccaacaggaggcacatgaggtctggttgtctcgctgtttgtcattgttggcctcctttgatgatcatttcccagacctactcattatgtcattccttctccatttttatctgaaatacctctctaaagagaaatttcttctcattagctatttggctatcctgaagtgtggatcatataagaaaggtaaaatacgtgcttgaaactttctctttattttctagttttcaaaataatgtggcagttccccagtatccacgaaaactgaccaatgagtcggtttctctttatttcatatatagatgaggaacatgcagcatgactacaatcaagaaaatccagactgtgggaagttctatgaaacaaataacctaatttcttcattt

SEQ ID NO: 228437 - DNA, 329 bp, Homo sapiens
ttgtttttaggaaattattcaaaagtttaagtgggttgtattatcaatgcatatatctgctttttaaattagttacttaaagtagagaaatttgtatttcataaactttaaggaactgctgtctcatttactatgctgggacatctgctgcccgttgatagtaatatacagtgactacccatttgttgtgtaaagtccaatagatctggattcaaggctctgctcatcttaggcaaatcacctgaacctctctgagtctcagcttttccaaatgtaaaatgggggtatggattgttgtgtgaattaaatgaaacaatacatttaaaaca

SEQ ID NO: 228438 - DNA, 372 bp, Homo sapiens
tgtttgttttttgcttgagttaatttaagttagtttctattacttgcaactaagaagttttaatgaattcacttgaaatactattgttaggaaggaaacaacttgcttgagaggtcaagcttaggctgaaagtcaacattggccaaggcacttagagagcaattaatcctcgtggcaaggcagggatggggtggaggggatagatgattcctaaggtcctttctaagaggataagagtgcttcccctggtcagtggttctggctagtctcctccctcccttcaaaatgcgaagcaaaaggcagggagaaggtctccttgcagatcttcagctctctcagggaaagagacccacgtcactcccagcagagtcc

SEQ ID NO: 228439 - DNA, 532 bp, Homo sapiens
  misc_feature (60)..(60): n is a, c, g, or t
ttccgacggagactctcgctgtccactggacgggggcccttccctgtttgccagccaagncggacagcgagaggagacagcttatgtcattatttctgtatttcagagacctttagtgcttccaccgtgcccagccggggaaaggtttctttttttaatattcagaaaataaaacataaagagccaacaatattctgaacaaaagtcataaaaagactgtaatcatccttcagcagtttactcagttgcatgcaggtactgaattcttgttctgcttgatcttgggctagcaggtacatgaacccatcttttctcaaccagtggagatcctggctcagtgcagtcatgtgatctcaaagttaagaaatgctgtcacgcccagaagtgttgggattacaggcgtgagtcaccgcgtccggccctaaataacattttttatttgacagcaccttgcatgaaattctgtagggtccagccctacagggtctgtgggtttttctccccgtgtgcagagatgagagatcgtagaaat

SEQ ID NO: 228440 - DNA, 898 bp, Homo sapiens
  misc_feature (60)..(60): n is a, c, g, or t
ttccgacggagactctcgctgtccactggacgggggcccttccctgtttgccagccaagncggacagcgagaggagacagcttatgtcattatttctgtatttcagagacctttagtgcttccaccgtgcccagccggggaaaggtttctttttttaatattcagaaaataaaacataaagagccaacaatattctgaacaaaagtcataaaaagactgtaatcatccttcagcagtttactcagttgcatgcaggtactgaattcttgttctgcttgatcttgggctagcaggtacatgaacccatcttttctcaaccagtggagatcctggctcagtgcagtcatgtgatctcaaagttaagaaatgctgtcacgcccaggtgcagtggctcaggcctgtaatcccaacactttgggaggccaaggtggctatatcacttgaagtcaggagttcgagaccagcttggccaacatggtgaaaccctgtctctaccaaaaaatacaaaaattagccagttgtggtagcagacgcctgtaatcccaactactcgggaggctgaagtgggagaatcgcttgaacccgggacatggaggttgcagtgagccgagatcacgccactgcactccagcctgggcaacacagtgagactccatctcaaaaaaagaaataaggaaatgctgtcagaagcctaccccacggtacctgtcatgggccttttcattggtccctttttgttgaagatgaagcactttgccctgtagctgattgcaagagatttcaggaaagcatcagagtaaaactctaatgacaaaagacttaaaatagtgtagttaaatatctaatgagagatcattacaaaatcaaacgatttacaaggaatgttggttgtttatga

SEQ ID NO: 228441 - DNA, 422 bp, Homo sapiens
tcttctagattggaaagtttaagcacatctacacattattttataacttgtgttattacataaaatagccgttatcatgaatgtagtaaccataaggatgcaattgttaagaggtgatatatttaacttgaataaaacttagattatcttagctgaaaatgtaaccattctcaaaaaatagccattatcttttgtttacttctgagtgtgtaacaaaagtgtttggtcttgcatttaaggacgattgcttttcacttatagttgtcaccttatagactcaaatttgctcaccattagaaaaaaatctgataaaactgtgtaacttaattatgtattattattctatttgacatttaaactaatttggagacatatccaccttttatattgttaacataaataaagtaaatatgtagcaattt

SEQ ID NO: 228442 - DNA, 833 bp, Homo sapiens
  misc_feature (68)..(68): n is a, c, g, or t
  misc_feature (174)..(174): n is a, c, g, or t
  misc_feature (280)..(280): n is a, c, g, or t
aaaagtccaatgttcaaatgtccaaagtgaggaaaaaggagggggggtcctgccccaatttttttttnttatttatatttcttaaaaacaggcttggggtttgggtccagggtggaagtcaaggcacatcttaggtttcaggcagccttttaatctggggcacacactcccccnccttcccaaaaagggctaagggatataggcgtaagccacagggccagggctggaagtatattcttgtaaatgaggcaccctgggcacagaggtagcatacagacanaatactgttccccacacaggtcctgcagttttactgaaaaagcctttgtgactgttgcaatagaacattggtctccaattcaatgaaagattaagcagtaaattaaactaccagttgataacaataccaatttaacttgaggttcaactgcggagagtgaccatcagagtcaacccagcctctgatgacgctgatctgaagtggcgactcctaagctacaccctgcctcttatcagttgttgcggacccatctttacaaagcattaagttgttcatgagaagcagggtgtgcttgcccacacctgtaatcccagcactctgggaggtcgaggcaggtggatcgcttgagttagagatcagtatgctcaacaaacatggtgaaaccctgtctctactaaaaatacaaaaattagctgcgtaacgcctgttaaccccagctagttgggaggctgaggcaggagaatcgcttgaacttgggaggcggaagttgcagtgagccaagattgcaccactgcactccagcctggtgacagagcgagactccaaaaaaaaa

SEQ ID NO: 228443 - DNA, 553 bp, Homo sapiens
tacatattggagtagaatgtggtgctaggttagtgaaatattggcttggaaaaagcataaattaagcacctgtacagcacacacccagcacattgccttcaacgggttctctgtaagttttagttgaattaaagagtaggctccagtagccgggcatcatcatatcagtaagccaaactatttaaagacttcatttagtactatagattttgacgtttaaacttagaatgtcacagttcagaatttaagattttgaaaaactaacatgtttacatgttaagagaaaaaagatgtttttaatcatatgtttaaggaactgtgagggatgtgacttttgtatgataattttctgttgaaattacatgaattattcagtaggcttccacaattattattgactactttcaaaggcatatgagcactctgacgtcttatatcctttttaacatagtagcagtaaaatagctagatgtatctccagtggctgatcctgcctagctttctcctagggggagtgctttatttaattgcaaaattaatacaggcagatgga

SEQ ID NO: 228444 - DNA, 449 bp, Homo sapiens
tcttcattggaaggtgagaaaaattgcctaaacaaagaatctgattaatttttaagtaaaaagtggaagacaaaaatagagtacagccaatgtctaaggggacttgaagctgggcagaagaccttactcaacacagcagatagacaacggagtgcttcagagcaggctgctgacgcagtgaggccaaaatataagaaaaaacagctggatgctggtgttgaagggacgtctggagacaatgaagagctctggcagcagagtgagtgtttcagaagacagttaaaggccttggtgacgaacaactgcggagaaggaaggtgttttcaaagtttgaacccaactgtgggggacggaagggagtgaattctgacaatttctgaaactgaattcacagcaagacatcaatggctaattttaattacgtaataaagaaaatttctggatataca

SEQ ID NO: 228445 - DNA, 539 bp, Homo sapiens
cagtactcttatcatttccaccatctctactactttctttcaatggggtggggtagagaaaacatgagctaatatgagaaaaatataggtgtatacaattaaatgccaaaccacatggttcagcctgggtatctaggaacctcttctagtgccttgcaatataggaaggactcagtgcaaatgtgttgaaggtgaaggggagaatagtcttagcctaggcactgcagcacgcgaacagacagccgtgcagaggcacagggctgctaaacgtgttctgcctcctcagaggctccaagggaattcagcacttagttacggatttcactgttacagtgctttgagaattgtttatcattacagcctgtcactgctgctaaggaataaatgtttaatttcctaattcagaggcactagaaatagtaatattagagtcattcatctaaacataaagatggcagcccttagtaataatagcaggagacactcagtttgtaatcagccactgctttgtaacaataaagatttccaaacaaaatgct

SEQ ID NO: 228446 - DNA, 397 bp, Homo sapiens
ctaaatgattaggctttagagttttcaggacccgagcttgaatctctaatccatcagagattaactgtgtgactctgggaaagttacttacgctctctgtttcctcatttgtcagttagtacctagcttcctagggtttttatgaggatgaattgtgatcatatatctaaataactctgcatgggaccaggcatatggcaaggctcaataaatgttacttcttgttaaattttacaaaacataagagcttgtaaacgtccctctctctgactcaagtattccccacagcaccttggggtccaggacagtaatacacctcctgctctgctgttttctacaaatctgccaataggaatccctttttacttaatcaaaaggctattctttcctaggcccg

SEQ ID NO: 228447 - DNA, 525 bp, Homo sapiens
cagagcctggaacatatgccctgggatcccaaagtaagaccagtagtgactggatgagcatccatagaccccattcatactagtcactgtgtgaagctggagaatgatcccaggaattcactacaagattcagtggcttctctagaaattcagaaatggaactactaaagcccattgatgctcagactcctgctgttgattgttgctgactcttggatccttatcaaacctatcactgcagttgataaactagtgtagtgaagatatgaaagttgtttggtatattcatttatgataatgagtagaatgaaagtggaacaagaaagatatacatctgaaatttactcattcatcaatgatgtgagaaaattgaataacagaataatactggaagaatacgtttttcggttttgcgtgttactgagagacatgacacacttttaagtttattctgcattattaatatcttctccatcagtttctcactctacacaatcaataaaataaaacaatcaaactctgagt

SEQ ID NO: 228448 - DNA, 496 bp, Homo sapiens
cagtaagtagccctcgaaattcattactgagctgttggcagctctaggaaaagtttaatggaggagactaaaatacagccacaatgaggtttgggatgggagagaacacgaaatcaaaaaattttagaaattatttatcttgctcccttactgcatagatgagaaaacagagcagtgattcaccacgatatagcagagccagggacagaacccaaggctcccgactcagtggacagtacacttgccactggaaatcatggtggcatggaaagaatgtgccctttggagtcaagcagctctggattcataactagcattgccacctattagctgtgtgatcttagaaaagttactttgggccaggcatggtggctcacacctataatttcagaactttgggaggctgaggcaggaggatcacttgagctcaggagtttgagaccagcctgggcaacatagtgagacccgtaacatagcaagaccccatctctacaaa

SEQ ID NO: 228449 - DNA, 276 bp, Homo sapiens
ttcatagtgggaagagctaaggaagcccacctaatcatccagtttgtgtgtaaaaacaagtgttccaaggctagaatatatgtggactcatgagttatggggagtgggtaggctggctaagtaggaatttggatataacaagactggggctgggtgcaatggctcatgcctgtaatcccagcactttgggaggccgaggtgggaggatcgcttgagatcaggagttcgagaccagcctggacaccatggtgaaaccccgtccctactaaaaataca

SEQ ID NO: 228450 - DNA, 445 bp, Homo sapiens
cagttactatgtcacatgcagtcatcagtttctctgcaaccctacaaccacaggggattccattgcttgctttgacttggacttctcataaaatgactttcgttggatttagtgtacaatttttaagttaattactgattttgtatatatgtggtattgtatctttgaaagctcatatgagtttattagggattttcagaattatcaactaaatctggctagaaaaaaaattatctgatgaaaaacctttctggtaacttaataaaaatggggtgatagcaagtgtaaatgccagttaaatcctgggtgctggtgtgtgtgaatacatgaatacatgtgtatggttgaaggaaataatttgtaaatcatagctttcctagtattacgtgtcccttcataaaatagctcagagttttctcatgaaaaataaattgacatttgagac

SEQ ID NO: 228451 - DNA, 478 bp, Homo sapiens
cagatggaactcctactattagcccaactcttgggttgaaacagtgtgtccaggaaaccctatgttaaaatgcaatgtgttggggatattgttcctctatttgcttgagttaattttcaaattagtgtactcttgcttagctgtgctctgagggaatgaacaaaagattggtaaactctgatggagaacactggtcaggcagggcacatagaatccctggggatggtggttcctgacaaatgggggaggaggacctgagccaggcttgggctgggctggaggaacatgaagatgggatctactcacaacccccagaactgaggggtcctgataacacattatttcaccctcagccatgcaaattcattatttttatggataaaatagctttaaaaaactaatttacattgaaatgttaaaatatttatatagagattattgggaatcccctcctaaagcccaaacataaaaactacca

SEQ ID NO: 228452 - DNA, 580 bp, Homo sapiens
tccatggaatacaaatgatgactttgatgcctcctgcctgtgaagtatcaaaagatacaggattttaaccccctttggaatcacttgggggaaataatgcatcttcttatttgagaaactctctaaaaataaggaaaaaaacccactcaatttcaaaacagcacattttcaaaatgtctgaagcatgacatgtctataaaggaattctacatataaaatagaaaatcttaagaaaaggagaaaatttatagtttttgatattttatacttaccaaaaattctgtcttttagcacaagtaaacctaggtagcagggaccaagactgaaaataataataaaccaacaagtaatggaaataagcaagtaaacaaaaatgaaaacattctgctaggtaataaacagattccacaaacacattatactgaaaagtaagtgtatcaaagagttagggagcaaagttaagttcctaataaaaggattgtgttgtcagctagaagctttaagcgttccatctccaggtttggtaggatgagaaggaaaataagatatatcatcgtgtgtccagcatagttccttgaac

SEQ ID NO: 228453 - DNA, 574 bp, Homo sapiens
tgagacggagtttcgctcgttgcccaggctggagtgcaatggcaccatctcggctcaccgcaacctctgcctcccgggttcaagcaattctcctgcctcagcctccctagtagctgggattacaggcatgtgccaccacgcctggctaattttgtatttttagtagagatggggtttctccatgttggtcaggctggtcttgaactgccgacctcaggtgatccgcctgcctcggcctcccaaagtgctgggattacaggcatgagccaccatgcccggcccaataagcacttttaactcttccttgaccaaatacgaatcggcacctctctaaacaccgtggacatctatgtggggcatggcagggccctgcctgcacaggcaggtgctgggggtggaggggacagcagagctgagcctgcagtgaggtggcctcaccagacaggagggggaggaggggatggagactgcagagccctcctggcagacagctgaggctgcgtgtggacctgggggtgatgtgctgggccacaccagaaccctcccagaggccggcccccgctacaagcaccgt

SEQ ID NO: 228454 - DNA, 304 bp, Homo sapiens
tcttagaaaacatgaactatacaagaaaaaaaaattggtaagttggacttcattaaaatttctcagctgggcatggtggctgacacctccaatcccatcaccttgggaggccaaaacagaaggattacttgaagccaggagttcaagaccaaccagggcaacatagcaagaccccatctctacaaaaaatttaaaaatcagccagcaacgcctgtagtcctagctacacaggaggctgagttgggaggattgcttgagcccaggactttgaggatgtaatgagctatgattgtgccactgcact

SEQ ID NO: 228455 - DNA, 355 bp, Homo sapiens
ctgcttatagtttctgctcccttttaacttctgtgtgcacatgacttggacttgttatggtactatgctctgtgctggaaacgtagcggtgagtaaggcagccctgacttctcagctctgcataggacccacagtagggtagggaataaacacacacacacacacacacacacacacacagttgtgatgtgctatgaaacaatttgtcagatacaatgaaagcttacattaagacagtgtaaactgtggatcatgatctatgagtgggtcatgaaatctatctagtggcttaagaccagtatttttaacaaactaaataataaaacatcctagtaaatcacagataataaggata

SEQ ID NO: 228456 - DNA, 1030 bp, Homo sapiens
gcattacttttatacatgctcatatagcaagtaaaaaaagacacaagcatgtatcaaatatgacccctattttatcaaataaaaaaatcatatacaaatgctcccccatcaagctatgattttttgaccttacagtggtttgaaagtgataagcattcagtagaaaccatacttcaaattagtaattgaaatgcattttcagcttacaatattttcaacttatgatgggtttatcgaggggcatctgcgaatacgtatgtgcaggaaaaaaactagaaggaaatataccaaaatgtattgcgttaatggttattatcagtgcttgataagattacaggctgctttcatgtatttttcattcttctctatattgttacagtttaaagaacatgtatatgtgaatcagggtttcttaattttggcaccactgacatttgcagccaagtaactctttgttgtgaggggccatcctgattatcgtcctgagtttccctgacctagatacacactagataacagaaacacctattcctccataggtgtgacaaccaaaaatgtctttggacattgcctaatgtctcttgggagggggaaaaatcagccctgtttgagaaccactgatataaattaaacaagtgtttctttagtaagaaactttcaagccatatagaaataaaactaaggcttaaataactacaaataaggtaagcaacaacatggctcccctacactactctcttctctttccattctcagaagaatgaaagtgtgggataatggcctggttgaagtttacagagttgtcaggcgatgaatgattttgataagcccccaattccctccccataaaataaatagactacataaaacaatatgggcatagagatttcttatatgtttaggcacacaattagcacttaatgtatgtttaataataagcaatgaaccccttaccaaattagtagtagaacttatggtccttctctactctaaactctcctccagatgctgggaagtgaaaaaaaaaaaa

SEQ ID NO: 228457 - DNA, 777 bp, Homo sapiens
agacggagtctcgctctgttgcccaggctgtagttcagtggtgcaatctcagctcactgcaagctctgcctcccgggttcatgccattcttctgcctcagcctcccgagtagctgggactacaagcgcctgctaccacgcctggctaattttttgtattttttagtagagacggagtttcaccatgttagccaggatggtctcgatctcctgaccttgtgatccacccatctcggcctcccaaagtgctaggattacaggcatgagccaccacgcccagccaacttataacttttatatcattagacacatggaatatgggcctccgtttgtactcttgcccttggccccacaaacgttagggagaggcctggctcctgcaatgtactatttacctgttgtaaagaatagcccttcaaaagtattattctaagtctgtttgacataataggtccaaattgtattacaacatggtaaaaaaacaacaatccattaacaatcctctttggatttctaaaaaagttttggtagcctaaactctttccccaatttttgatatcacttcatgtcattttagagagtaagttttcctgttttattaatgtttatatttaagctgaattttctaaaagaattgtgagtgtttttattctattgtgacattcaaggtacgcagctgacccttgagtataagtcccatcaactaagtaaacatcaaacatatcttcagtacatccccatgtgctacatcctccatgtgctgaggatcctctagagc

SEQ ID NO: 228458 - DNA, 789 bp, Homo sapiens
ggcggcaggtgcgtaccatggaatactgtatagccatgagagacagacctagaactatgaacagcaagcgggtggctcttaaaaatagtgttgaatactgaaagcaaggcatgagaattgccattatgttaatgtagggcatacggcactgtatgtcctatgaggatgtgcatattttgattcaaatacattaaaatggacgttatggggacacagattatttatgaaaggaggagaaaagataaaactgatttccttgttttagggtgacctcacatcccagtgagcccctcaattcagggccagggaggttgattggttaccccaccccaagccaacccaggctgttttcagcacagcggcctgataagctgtgattcagaccttgaagttgttaggcaaaagctctccactcggctctgtatttgactcaggaagaactgaagtctttataatggcctagaccagccttgcaccgtggcctcccactccacacctctctgaccgcagtcctcatttctccgagaatccgctccagccaccctggcctcagggccctctcaggactttccatccccctcaccctgcttcactttcccccatgatgcttatgaccttagatctagtacactctgttttcattacgttctatgtacgactctccctattaccctactagaacatgagccagggggcagggggcttttgtctgtgtgttttcatgttgtatccccaggcacaggatctgataggcggtagacattcaataaatatctgtggaatgaatga

SEQ ID NO: 228459 - DNA, 289 bp, Homo sapiens
gagactgatgaagagagggtactatagaatgaggagtattattaattcaacctcctgcatctttagtctaaaagaacaagaatagccagaatgtctggattaaaagtgcgaatcctctacccactaggtttttgtaagttagctaatctctctttccctcagctcatttaaaacagaggtaatattagtacctacctcatggaattgttgtgaaaacgaaatgagtcggaatgtgtaaagtgcttagaagagcacctgacactcaaccagtaactaccagtaataaaca

SEQ ID NO: 228460 - DNA, 424 bp, Homo sapiens
ccccagattgggtcaggtctgctgttttaaggttgggaagtcacaggtgttccttttcttcacagcacttcttacagttgttattctacctctgtctgtgacactggcttttccacaccgtgttgcactggtttgtaagctccagaagggtagggccatatctctttgcttagtatatatttcaagtgcccagcacacagcaggtcctcagtacatagacggctgaatgaaggcatggccctttcttctgttgttttctttttgtgtcccatagcaatccagtcgcacacgttgggaccaggagggtcacttcttttaatgctgacagcattgaattccagatcttggtctgaaaagtgcaaatttctttctttctttcttttttttttttgagacagagtctcgctctgtcacccaggctgga

SEQ ID NO: 228461 - DNA, 449 bp, Homo sapiens
gcgctcttgggcctcctctttttgtttgtcgtgttggtgtttatatcaaggctcttcggggactcagctttgggctgagcttggtgcaggtggcctgtacacccccagcctgcagcccagctcctttgaatccatgggagccccaggttgccattttcatctgccaggtgcagagcagtgagcctgggaatcccagcactttgggaggccgaagcaggtggatcacctaaggtcaggagttcgagaccagcctggccgacatggtgaaaccccgtctccactaaaaatacaaaattagctgggtgtggtggtgcgtgcctgtaatcccagttactcgggaggctgaggcaggagaatcacttgaacctgggaggcagaggttgttgcagtgagccgagattgcaccactgcactccagcctgggtgacagagtgagactccatctcaaa

SEQ ID NO: 228462 - DNA, 522 bp, Homo sapiens
agttgaacagtgagaacacatggacatggggggatgtgggggaggtgggcatcacgcagcggggcctcttgaggagggctagcattaggagaagtacctaatgtagatggcagattgatgggtgcagcaaaccaccatggcacgtgtatacctatgtaacaaaccggcacgttctgcacatgtaccccagagcttaaagtataataaagaaagagacaagagttaagtgtctgtagcatacagtacattatttcacttaagtcagtttccaagaacctattgagaacattgaggacatattgtagttctacatgctgcacaaactttacatattcttatgtattcaggaattacaactaggcaactgaattcatcctgaacactctttattcccaacagcatattcaagcaaagacacagagcaaaataaaggctgctcacataacacttaactaaatggaaacatgaatgaaaagccactgaaatatcggtctagcatgtcttcaccaagagggcatacta

SEQ ID NO: 228463 - DNA, 710 bp, Homo sapiens
  misc_feature (385)..(385): n is a, c, g, or t
  misc_feature (431)..(431): n is a, c, g, or t
ttgtttttctccctgtgccatttacccttccacctttccatcctgccttctaccacccttggatgaatggattttgtaattctagctgttgtattttgtgaatttgttaattttgttgtttttctgtgaaacacatacattggatatgggaggtaaaggagtgtcccagttgctcctggtcactccctttatagccattactgtcttgtttcttgtaactcaggttaggttttggtctctcttgctccactgcaaaaaaaaaaaaaaaaaaaaaaaaaaccctgaagagatgagataggaggaaagacctcacagccagatctgctgggttttgaggagtgattttctttcttccccttgaaggggaaaaagctattttcattgntacatttaaagtcccccaactatggggaggtaccaattctggacangtgccactacaacaacactaaacctgaacttttcaactccgttgggtggtggaaggcagcgggcagaaatttactgttggccactgccaggtctatttcatatttcaaaggaatattgggtgctgcatataggaactgaaggggtcaatgtattaaacctgtgattggttgttttcctgtcattttgagagactaaatgtggggggcagatgtcaaaatacctgtacaattttaaaatgtcccaattaaacatgagctggtttcccacaaaaaaaaaaa

SEQ ID NO: 228464 - DNA, 428 bp, Homo sapiens
gctcctctcctattttattgggtaatcctgatcttgaagggtagccggagtttaaagaaacagctctaagacacctgaagtcaaggacaacgaacacgcaaaaaacaacatttgcagtcaaggaaagagaagcagagaagctgagccactttagagcagactgaagctcatgactgcctttccttcttgttgctatatgggaaccgtatctatctgtctatttatctatctacctaccttattgtttatgtatcatctatttacagatagagacatctaatgttttggagtagggccctaaacccaagccaccagcatttcaattcctggtctctctgatcaactgtgtgatcagggacaaatgtgaacctgtcaacctcaatcctctgtgtataaaataggaataataaatggtaactaaatcggta

SEQ ID NO: 228465 - DNA, 1558 bp, Homo sapiens
  misc_feature (432)..(432): n is a, c, g, or t
  misc_feature (1399)..(1399): n is a, c, g, or t
  misc_feature (1460)..(1460): n is a, c, g, or t
aggcattttactaaccaatactcattaagcatagcgtggattcatatgacatcaaggagctattttatttggtaaaacgaaaaagcacaagaatgaacgaacgcaagaactgaaacagtggagacacctagaatgacttgtctaagatctaaatcattttgttgtcttcccagcgtacttattatcctgatcattgtcatcagcattgtttgggtccttttagcacagatttctcaaaatgggtaactccataacagttggaagcttacgaattcatataatttgtaagaggtcaatttggaagtacctatctattttaaaattccaataacctgggaatttcatcccatgtctagagtcttttatgtaaaatatttccacaattaggagaaatatgtgcatggggattttctatgtagcggtgttttgatngaatagaaaattgggataaaccaaatttccatcacgaaggaaatagtaatatgctgaataataatacagcgaatattatgcaggctttaaacatcaaaaaagagttcaacttctgacttccgatgatggtgttgaagcaggtcactgctggtttacatttgattttcatgtgggaactctggaagtccgccttagtgattttacatgtggctaaattgagctaatgacaagctgttcgaagtatggcaaaatggaactttaaaacagtatcttgtcaacaaccaagaggacctgtttcacataaagcccacgcattcatctgcctgtccatcattctgtctgtccacacgggcatcattcgttagtggaactgagtgcccgctgtcgagctgacaagcccataacctccctgttcctagtcacacattaattcttcaacaagtcccttttgatagattgtgattaagcttagctactatttccaattgcttccccaaacgtacttctcactgttctcccatcacacccttcagcccatccatgcggggttcctttgcttttcccaccttacaccaaactccctatttttactcccacttttacctcctctccaagacaaaacaaacaaaactagcattttaaaacttagttgtaatctttcttccttcatgaaaatttctccaacagccactcccacggtcctgtgtgttccggatattttaaaataatggctataaggttgagcacttcaggatacgctgttttgctgtgtgcagatggaggcagtggctggagtgaatgaacggcaacacttgctggcaaccggcagaagctgagagacagggaacaggctctcctccagagcctccaggagccaggcctttggacaccttgaatgtgggcttctgggagaccatgcgtttctgttataagcagcccagtctctggcagtttttacggctgcccnggaacactcatctatacctgtctgacaaggtcaagctccaaggaagggactctctacatanctacattgtttgcagattttacaataatcatttattcttgcatggctgatcattgttaaccaatacaaataaaataataaagaaatgacccacatttt

SEQ ID NO: 228466 - DNA, 504 bp, Homo sapiens
cagtttttattttcccctgagccactaacataataaatgaggaagtcaacagctttcatgatttgggagtagattcatggttgcattttgctggctgccgcttctcattcacaaggtggttgaaagccacttttccaatatcacatgcctggtttcaagtgttcaggtctagatttaaatctggagggattctgttgtcatagaccctcccagggagtgtgctatttgagaaatgtattgagaaaggtggggttgagagaatgaacagccctctccccagcttgtttttataatattgctaaaaataaatagacaaatcaattttcctctaacagctcaacactggacaagtaaaattctttgactaagatgcagaaaatattgctgtaaacccaacagcacaagctgagaggtaaacaggcctgctgtgctctccgtgtagatgctgcctttcccaaccaattgaaaccactgtttctctggttgtaacaccagacaaaaaaa

SEQ ID NO: 228467 - DNA, 929 bp, Homo sapiens
tcttgaactcctgacctcaagtgatccacctgcctcagcctctcaaagtgctaggattacaggcgtgagccaccacacccagcaagaacatgattttaaaaaacaaaacaaacactcaaactttcttaagttaccataagaggcctcacatacagcttccttaaaactgcctgcaatttggagagaagcagttaggtactggaactgcctgtgggtaattattgttttcaaacagtgacagatgcaaattctcttcttttgggggaaattgcctgtagctaaacaccggcgccatcactttaaacaaatctcctgatacatatggtatgccaggcgctgagcccaggaacgagggagagtcagcccccgccccccatccccgatggagctgatcccccatcgggaggcagcagggattgtacctaaacaacatgtgaataaagatgaggaagcacagcccatgaaggaggaggcttaacccaaacttggagagtcaggaaggattttcagaaagagtgcagtctgagctgaaatggggagcggggagggcaggtgcagccgccaccgccaaaggtcttcctggtggaggcaactgcctgtgcaaaggcctcaaggtgtaaaagagcttcgttaacacaggccaatactgagtgtagaaacgctgcactcagggcagatgctgaaggcagaggtggaaaaagtattttatatagtttcttcttaaaagtcattttgggattacaggcgtgagctactgcgcctggccaacctgatagtattcttaacacagattgttttcctgccatcatgaaaactagacttgctttaaagtctttagagtctcagttcatattccaggcattgttttacataaatatcatctgtttattttttctttaagcaaatttcacaaactccatctaaaaaaa

SEQ ID NO: 228468 - DNA, 333 bp, Homo sapiens
agtgtcccctaaatattaagtctaaacatttatattaataaaatacaacttttaggccaggtgcagtggcttgcacctgtaatcccagtactttgggaggccgaggtgagcagatcacctcttgacaagagtttgggaccaccctggccaacatggtgaaaccccgcctctactagaaatacaaaaattagccaggcgtggttgtgcatgcctgtaatcccagctactcgggaggctgaggcaggagaatcacttgaacacaggaggcggaggctgcaatgggcccagatcatgcactccagcttgggcgacagagcaagattccatcttcat

SEQ ID NO: 228469 - DNA, 698 bp, Homo sapiens
tgacagagtgagactccacctcgaaaaaaaaataaataaataaaagccagtgccagcttagaccatgactgagagctcttggtttatcttatccttgccgagctgggtgttacaacattgaagccttctgcagtgtcctccctccctttttctctctttctctctctctcctccctttcttccttttacttctcttaggataggctcgtctgtacttttttgatagaggtaaccatttgccacaccattttctgaagtgcctgctctcttccccattcatttgtgatggcacatttatcctaccctaagctttgataacgtgtcaggatctttctgtcctgtcctctcaaagaggttaaatatttttttataataacttataattgactgaagttataacagttttctcatgtcaagtataaaaacaggccaggcgaggtggctcacacctgtaatcccagcactttggtaggccaaggtgggtggaatgcttgagtccaggagtttaagaccagcctggacaacatgggacaaccccatttctacaaaaaaaaatacaaaaattatccaggcaaggtggtgcacgcgtgtagtcccagttactcgggaggctgaggtgggaggatggcttgaatctgggaggtgaagattgcagtgagctgagatcacaccactgcattcagtctggataatagaac

SEQ ID NO: 228470 - DNA, 210 bp, Homo sapiens
cctggtggccctgccatgtttctggtggtcactgactgagcatgtgctcaggacaaagcatctagtccctgctctgtgtgatagcaggatcaaattcacacataacaataataaccttaaatgtaaatgggttaaatgccccaattaaaagacacagactggcaaattggataaagagtcaagacccatcagtgtgctgtattcaggaga

SEQ ID NO: 228471 - DNA, 2678 bp, Homo sapiens
  misc_feature (1989)..(1989): n is a, c, g, or t
aacatttaagaaataattctttcaatccatgaacacaggataactttccatttatttgtgtcttcagtttctttcatcagtgttttatagttttcatcctagagatttttcaccatggttaagtttatttctagatatatatatatatatttttttttaattgtattgtaaatgggattttcttgatttctttttcatatagttcaccattaatgtatagaaatgatactggtttatggctgtaatcccagcactttgggaggccaaggcaggtgagttgcttgagctcgcgagtttgccaccagcctgagcaacatggcaaaaccctttctctacaaaaaatacaaaagttagccaggtgtggtggtcccaactacttgggaggctgaggtgggaggattggttgagcccagggagttgaggctgcagtgagctgtgattgcaacactgcacttcagcgtgggcaacagagtgagatcttgtctcaaaaaaaagaaataatactagtttttgtttgtagattttgtatcctgaaactttactgaatgttttttagttcgaacagtttttttggtggagtctttaggattttctctacttatgatcgtgtcatctgtaaacagagacagttaacttcctcctttccaatttagatgccttttctttctcttgcctaattgcctaattacagcatgttcctattctgtaaatgttcaatgaactagagaatgattcttgggtagttaatattgtcaatgttgatgaactcttttccttcgctgaaagcagctactttgttggaggtttcaattctgcgtggcaatttgcagcatttctagtggtactgctccacattttacagctttatgaagaaggtgtttactttttttgaaattaccttgagacatttcaaactgtgcagaagatatatgcacaaaagcaaatgtcttgcagtttgctatagccacttatacatcatctggctcttgaatagctttaattcagctgttgaatctcacttgaatttgagcaaaaccttcatctttatatgtatctggacaaattacttcaattgcttgacagtaatgaccaatcaatttatttaaaatagtatcatttagtaggacagtgtttttctctggtttgagcaacgaattcaaccagtcctctgggttgatcatcatcatcatcatcatttggttatcagttcctgagttatttttaccagggagttttatacctttagacagctattttgaattatctcaggaatgtcatatatctctgcctctttagagtcagtcactggcactttgtctgtttggtgacatcatgtttccctgactgttcttcatctttgtagttatacattgatatatgtgcattgaatatgtaggtatttataaacagtctttgcaatctggctttgtctgtgattgtccttgtatagtaggtctgtccagaaattgtaagcatactgtcttttttggtctttaagcccgtgaacgctacagcccgtgtagtgccaaatggtgccctaagcccaggttccctgcagtccactctgtgatttgtttgttgactgctgtgagccccacccccattctttgtttctaatttacacctagcaggctaaccctgctggcacctgcagtgcttccagggggaaaggaccatagtgtgcccctgtgaagagtctcagaatggtgcggaaggtgaatgcccacctcccgctctcttttcccactgtagaaactgattccagagaaattctccaagtgcggtgctatgtgggcttgcgggagaggtgttatgatcaaacagaaccattctctttaccctctgttcatggtttttcttggctctgtggtccagtgagttgtcacagcttcactcccaatttctgggatattcagggcaataatcttgccactgggtatttgctagttgaaattatgtggtagggagagaagccagtaagtttcactnctccgtttggctgatgtcactctcgaattctgtactttcatacggattgtaatagggagggtctaaaaggaagcttcagttttggatttttagagcttcttctaagtacaattgttgaatcaagaggtaaaaatggtatgttataactggaaatacgctgagattaaaaaggagataaattagccccattgggacagtgctattgggaatgtgaattgataccactttcctggagtctagtttagtatttattttatatgtaatgcctgaaaagatgtgtgtctcctttgactcaatacttataggaatttacacaaaggttataatcaaagattatagaactgttatactggaaaaacacgaaatattctaattatgaattaattggggattggttaaataaactatggtttgatatgctctaaaaataatgttacagaaaaaagtgtactgatatggcaaaatgtatgacttatagttaaaaaagcaggttagatgttgatagatacagtatgatagaaaaagatcaggaaggtatatgctgacatttaaatctggatatttatgagtgttttttttatttcaatctttgtacatgcatgtattttctagaaattgtattactatctttgtaataaagtaaattatttttaagggactaaataataaatatttgttacttgagtgcc

SEQ ID NO: 228472 - DNA, 544 bp, Homo sapiens
ataagaatagagaaaattctgcaaagttcacattggttgaagtccagtggtaaataatgtatctactctagactgatcattctaaggaggattttgtgctgctcttgttttgctgctgggcctatcctgtttccattcccaaatcaagtattcctggaatttaaggtatcactttaccagcctgaccacaagttccccattgtttcctctgctctgctcatgacctggaataatgcctctccctggatactaaatttactgaccctgcctaggaccgagaagattgatgagtcctcaacccgtgcatgtcttcaaaaagccaccaactgatagctacaaaactgcacttcctagagacatgttgagagaggttcaaggctcaacagaacttacccttttgctgtcagagctccaccaccagataagcacaactgagcgaatgacaccaaccagtgccaagagaagcaggactacccaactacactttgcctaaattcctgattcacagaattataagcaaataaaatgattgtttaaagcaaaa

SEQ ID NO: 228473 - DNA, 464 bp, Homo sapiens
tgtctgcgtgggtcctggagagaggaggatgcagagcacagcacttagccaacctgcaatggacacgtagaaaacctcaagaaaggctctggcctagacttgccccttgttcctgtcttctggctcttgactgacactggtgctttccccctgtggtcctgcatggtgtgtggtgactacctcattgggccctaaaacttctaaaatcatcaggagatatcactgaaaaggtttcaaaacaaagccataatctctagaaatgtgtccttgatgggttggtcttcatttgcctgaagaaattgaggctaagtgagccaaggaaaaagtcatccatcaagaacaaagcaagatttctcaaccatggcaggacgttaggatcatctgtagaactttaaaatattgtttaatttttttcatttggtttcctttatagttgattttgtttaactttgccagtgaaattt

SEQ ID NO: 228474 - DNA, 446 bp, Homo sapiens
tgtctgcgtgggtcctggagagaggaggatgcagagcacagcacttagccaacctgcaatggacacgtagaaaaacttctaaaatcatcaggagatatcactgaaaaggtttcaaaacaaagccataatctctagaaatgtgtccttgatgggttggtcttcatttgcctgaaggaccgagaagattgatgagtcctcaacccgtgcatgtcttcaaaaagccaccaactgatagctacaaaactgcacttcctagagacatgttgagagaggttcaaggctcaacagaacttacccttttgctgtcagagctccaccaccagataagcacaactgagcgaatgacaccaaccagtgccaagagaagcaggactacccaactacactttgcctaaattcctgattcacagaattataagcaaataaaatgattgtttaaagcaaaa

SEQ ID NO: 228475 - DNA, 378 bp, Homo sapiens
agatttaggaagagatagtagtaggaagaagagaggatgatttacaaaaggggtggggtaaatcacagaaaattgctagagaagaatagaacaatcaaggtcatagtacctaagaatgcctgtttcctaggtgaagagtttttaacacagagctattgccccatatgtactattgacttaatacgaaattaagaaatgttttactttcagaaattgaggctaagtgagccaaggaaaaagtcatccatcaagaacaaagcaagatttctcaaccatggcaggacgttaggatcatctgtagaactttaaaatattgtttaatttttttcatttggtttcctttatagttgattttgtttaactttgccagtgaaattt

SEQ ID NO: 228476 - DNA, 353 bp, Homo sapiens
gagaagtatcagcccatcggcctggcgctttaaggtgcagctgagtaggaaaagccaacccacatcatattcccagagccttgctgcgctttctgggttgtcttgttcaaaactagtgaaagggatgggaaacctgcccaacctcactttagccacgaaaataatgctcttggccagtggccttggacaaacagcctctggtgcaacaaaacaatcaataggaagaagaacttcattcccctcaccatcctccttccccaagttcctttgaccagcatacctcattcggcttaaaggagaaagaaaactatgtgtgacattccctcccagcctacctgcagccagcctcctca

SEQ ID NO: 228477 - DNA, 441 bp, Homo sapiens
cttcagagtactggtaggggacaggagtgcaggttgagaaactacctattggctactatgcttactacctgggtgttggaatccattcttcaaacctcagcatcacacaatatacccatgtgacaaacctacatatataccacctgtatctaaaataaaagatgaaatttacataagcaaataagtaaataaataaacaaaacacttgcacacagaaattctgaaaattggatgccacaccaaggaccttcctatgcacatatttaatttcaaattgttttcctaaagaattcttttcatccaggagtgtttccagctaagaagaacttaaaccactgggcagagtcacatctgcgtatgtatagtaaaagtgattgggagagtcagattctgtggctgaattagttgtgttttaataaagtaagagtggttcatatcatc

SEQ ID NO: 228478 - DNA, 391 bp, Homo sapiens
ttggatattacacataaattccaatatctgaattgacagaagtactctctccagggtagatatgctatcagagcttagatgtaaggatgttttaaaaatttcattcagagatcaggcacagtggctcatgcctataatcccagcactttgggagaccaaggcagtggatcacctgaggtcaggaattcgagaccagcctggccaacatggcaaaaccccatctctactaaaaatacaaaaattagcagggcatggtggcatgcacctgtaatcccagctgcttgggaggctgaggcaggagaatcgctcgaacctgggaggcagaggttgccatgagcccagatctcgccactgcactccagcctgggcaacagagcaagactccatctca

SEQ ID NO: 228479 - DNA, 829 bp, Homo sapiens
aatgtaggcggaggttcatgaacgttaattcttgactttggtgcatctgcaggcttaacaccacctagaacctgaaaggcttggaacttgcaccctctgaagccatggcctgaggtgtaccttggccccttttacctatggcaggagcagctgggatgcagggccccaagttcctaggctgcacacagcagggggttctggacccacaaaaccatttttccttctaagcctcctggcctgtgatgggagggtctgctgtgagggtctctaacatgccctggagacatttgccccattgtcttggtgattaacatttggctcctcattacttatgcaaatttctacaacccagtctcctgagaaaatagatttttcttttctgttgcatcatcaggctacaaattttctgaacttttatgctctgcttcttctcgaatgctttgctgcttagaaatttcttctgtcagataccttaaatcatctctctcaagttcaaagttccacagatctgtagggaactctagaaagaaattcttattttccctctttcccgcctatcttatgcccgtttctaatacaggtgcacaatgcctgcagtgtctttgcatagtaagagtgactttactccatttcccaacaaattcctcatctccctctgagaccacctccgcctggaccttgttgtccatatcactattaacattttggtcaaagccattcaacaagtctctaggaagttccaaactttcccacattttcctatcctcttctgagccttccaaactgttccagcctctccctgttacccatttccaaagttgcttccaca

SEQ ID NO: 228480 - DNA, 377 bp, Homo sapiens
catttactatttcaatatttctcagttttactttcatcacaatgttactgtgggtggtcccgtcccacagttcttctcacaattagaatttcctattctgccaccagcacagatgcaaataaagtcacttagtctcataattaagtctacttggcccggtgaactctcacataaatacaccagtcctagagaaaatttttgatgccactgcacaaaagtcaaatttttatgcatatcatattcctcagatttaaaattctactcagaatacattttcagtgccatttttcagtatgagagcgtttcagaaacattatttgtttgaaatgccagttctatgaattctccattaagtcaagaaagcccaaataacaggt

SEQ ID NO: 228481 - DNA, 404 bp, Homo sapiens
aatatccgattgtggttcataataataatatagtagtcatcccctagaggattcactcaagataaatagatactgcctctgctcttccttctgaagcttataaaatttacggtcaaggattggaaacagcaattccatgaatgacagggagagcacatgcagcataagaaagtgaaaagagaaaaatccccactacaaagagtctttgctcattctcttctctcacctgtggatggtaggttcatatgtcaatggggaagggaagttctcagggttgaaggccctccagtattgtaatctcataatgtccctttgagcagaaagtttgagtaggccttaccaccactccagaaggtgaggataaggtcagttatcctcaattatagattaagttatactgtgtc

SEQ ID NO: 228482 - DNA, 372 bp, Homo sapiens
caacgtgaagaccagtgatgaatgatatagtcacaagatgaatatgcctgcagcccacataagctgcaagaggcaaggaatggtttctctcctagatccttcggagggaaggagcacttgccaacatcttgatctcaacccagttatgattatttcaagcttctgtgaggaaattacttcgttgttttaagccatctaatttgtgataattaattacaacagccacagaaaactaatacaatttctcttccccttttcctcctaacacagacctggtcaccaagacctatctcaaatccatcccttcctttctccactgccactgcctctgcctctgccttggactactgaaacagcatcctgattgatctc

SEQ ID NO: 228483 - DNA, 318 bp, Homo sapiens
agcagccactggaagtcggtccccgaggacgcgaaaggagcctggcatctctgaggactccaccggggccccaccaagaccaggctccatttagcttgtccacccctcattctccaggctgggtcctgacggggtggacaagaggatccccaaagcctccaagaaccacagtctcaccgggcgcggtggctcacgcctgtcatctcagcactctggagggctgaggcagaaagaccacttgaggtcgggattttgacaccagcctggccaacatggtgaaaccccatctctactaaaaatacaaaaattaaccgggca

SEQ ID NO: 228484 - DNA, 401 bp, Homo sapiens
ccatgctgccttgattatgatagcttcataatatgtttcaaaatcaggaagtgtgaagcctccagttttgttcttctttctcaggattgttttggctctttagagtccttcaagattccaaggccaggcaccgtggctcacacctgtaatcccagcactttgggaggccgaggcagtctgatcacctgaggtcaggagttcaagaccagcctggccaacatggtgaagccctgtctctactaaaaatacaaaaattagccaggcatggtggcgggcccctgtaatcccagctactcaggaggccgaggcagaattgcttgaacccgggaggcagaagttgcagtgagccgagattgcaccactgcactctagcctgggcgacagagtgagactctatctca

SEQ ID NO: 228485 - DNA, 395 bp, Homo sapiens
actagcatctctgaagctcctttccctgtggctcccttactgccctctaagaagtaactactatccactcagttcattattcccttgtctttctagttttgccactaaacaaattcttgtttagtctgaacagcttttgacttttttttttttaacataacaggaattaatctgtatgtattctttcagttttctttatttgctcattatagtcatgaggttcatttgctgctgctatggctgtataatattccactatatgactagattacagttacttatccactctactgtccatggacatgccagctgtttccagttttactattatgaacagtgttgcaataaacatctctgtacaaataagcagaaatggctctaaggagcagtactgc

SEQ ID NO: 228486 - DNA, 294 bp, Homo sapiens
caggctggctcagtcctcgacccggggtgacggccaagccagccaagggcagcgggaaagtgacgctgggctggagaggtgtggtggcgagtgcggcccccggggagctaagagcagccgcagcaactgggtctcaggctgggcgaggcaagggctcgtaggctgggctcggaagactgaaaggggtgcccacctgactccaggacgcacggagggcgtggggcaggagctggacctgggccgcctcgggccgccccggggcttgcagtccagcccctctccgccctagggagg

SEQ ID NO: 228487 - DNA, 431 bp, Homo sapiens
gacaaagccagaacatgaacttctgttaactttaagacttttaatttcaaccccaactactctcttctaactactgcagtagtggaaatctgtactcagttgccagttgtgtaaaataagaagttcccccactgttctgaattggtaattagactgcatggaccaagagctcaatcaaagagataacacttgttgccatttgggagtaagagaagaagctgccaaaaagaggttcaggtggtttttactcccattgcagtagggcaggaagtctgaatttcagactgtaaaagtcggattcaaaaatcaccttgtgatgtcagtgaagattcctccaccccaattttttttagtatagtatctgctatatgggaaaagactataacccaaagggctgtgaatggagaataaaattatatatgtgtttcttt

SEQ ID NO: 228488 - DNA, 427 bp, Homo sapiens
aaaagtccaaggactttccatgctagaagactcccatatgccatcaaagaagctcaaattaacaatcagacaattccaaagagcaggccattctacaggtaaggggactgttctaaattaaaggagaccaacgtttcttggcttgaaatttctcaaaatcaaaagtttgtggggaaagaaaccgccaaaatttaaaatacactttgctgccaaagatgacttagcctcgaaaaaagaacaagcaacttctgagtcccagctccactaatctttcctagcagcagcaatttttttttttttttttttaagacaaagtctcactctgtagcccaggctggagtgcaatggtgtgatctcgactcactgcaacctccacctcccaggagaatggcatgaacctgggaagtggagcttgccgtgagccaag

SEQ ID NO: 228489 - DNA, 1271 bp, Homo sapiens
aggggttgggtagcatgagagatggaatattcattcagacaaatcagaaagggcacttgaaaataaattttgattctgagccaggagaaaaacttgaaatgttgacttaagtgagggggaaataaaacccagagagagagagagagcgagagagagagacatgttactatgaaagacttgtattttttattgtctctgaactttaatcctgtgaaaatgctcaaagttttggcgagagtgatataaaaaaactgactgtggctgaaagaattgcatttaaaaatatttatgtgcaccttgttactttctactctgcaatgatgtattaacaattcatggtatttatttgttattcttcaatgacccttccacatcaacagtatttatcatgtgttaaagtcatgggtcttatgtgcagatttttttaatgcctctaaaattgttttatagattacttatgctgtgtgccaagtgtttaaaggtttatttgccaacaagtatgaagagaaatattgatgtatctgagctgcttaggtttatgaaaggtcacctggatattttcagttgcatcatccctgtatttaaattgagctttaataaattgcttcagtccaaaaattacaggaaaggtgtattcttaattgatgaatgaattgatctcttttttgaaaggggactcctttacattccaaaagggaaaaacatcacagcaatagttgctatacgtaagaacatgctaagcaaatatttttccaggctgtgctgtgcatttttaaaaggtctaatttaattgcttttaatatatatgtacatatatgttattttaactgtggagaattatttaagttaaaagactggtttgatttgcctatggtgtgaaatcctttgttatttttctaaaaaaataaaatttaaaaagaaagaaaactaaggaagaacaagaagctatttacccaaagtgagctttcagttttagttttgcatggctgtttgactgcctttccgccctatgaaaatcaagaaaatcttttttaaaaatggagtcctgctattttccactccttgcagataatacaaattcagtttgtcaggttggatggtgagttgggagctgtgatggatctgttggcgggttttggatgtgtaaagaatgatatatatattaaataggtcaatcagactatgacagctatgtacgaccatttgtatgtgtatctatgtcagaaagaatctttattaaaatattttgatcaaacattttattatgctgt

SEQ ID NO: 228490 - DNA, 100 bp, Homo sapiens
atgtggaggtcagagtggaagcaggtgtgagagggtccagcagaagaaaacatggctgccaaagtgtttgtgtccattggcaagtttggcctggccttag

SEQ ID NO: 228491 - DNA, 476 bp, Homo sapiens
agaagatacggctacatactacaatatagtcaaacctcaaaaatattatgctaaatgctgaatgaaagatgatacatgcaaaaggccatgtgttctatgattctacttatataacatatatagaagtgacaaatctattgagacacgattaagttagcagttggctgtgaagtagccaatagacactgacctgaaaatcgggtgtgaacaatcttttgggggtgaaggagatattccaacattagattgtagtgatgtatacacaaattttagaatttactgaaaatttctgaactgtatacttaaaacaaatatttatgttatataaattatacctcaagtgtttagtcaaagccaggcatgatggctcacacctgtaatctcagcctctttgggaaggctgaggtgggagaattgattgagcccgagagttcgagaccaacctgtacaacataatgagaccccatttttacaaa

SEQ ID NO: 228492 - DNA, 2608 bp, Homo sapiens
  misc_feature (1229)..(1229): n is a, c, g, or t
  misc_feature (1470)..(1470): n is a, c, g, or t
  misc_feature (1613)..(1613): n is a, c, g, or t
ctaaaaatgctagattgtttaaaattttcaaagcactgaaaagctgagaatataagtcagcaatctaaggaaaagccagaacctagagcagtaaggtgagcatttaagcagcttttgcactgtaggataataccaagtcttcaagtgtactaacatccttatataaaaaagagcagagtgaatcaatccaacttcaattttagaaaattaagtatgcatattatagatttactaaaacaataaacaaagtacataaactccaaacagtgggaaaagaatagaaaaataaaaataattgctctaaaacacccaagaatatattaaaaataagtagagatgggtcaaaggaatcacaaaatgaaatgttatacttaaatacaaataaggtatatctgtaattacattaaatgaactaaaatgcttccactgaaagagtgaagtcagactacacttttttaaaaatgcaaatatatgctgcttataagtgacatacctcaaattagagaaaatgtgaaaataaaaggacagagaaaattttccttgtaaatattaaaaaagaaaaatatagttacagtaatatcaaaaaataaattttcagacaaaaagcattactagagattaaaaaaagagacaatgacaaaagaatcaattcatctggaagctcttaatttgtcttgatgtacctaatgacataaccttaaaatgtaaaaagcaaacattgacagaactacaaggagaaatagaaaatacaaaattataataggaaagtttaacatgctttttgtttttttaccaattgacagaacaagcaaacaaaaagtaggatatagacattttaaataaattgctgtacttgaccaaataatgccatgtgtgaaagtagtgagtacacacatgccctcacacagagtacctatcaatagcagaatacatattcttgtaagtgttcatgcaatatttattttaaaatgacgatctatggagccaagaggatttcaaaaggattgtaatcatagatagtgtgtccttagaccacaatgcaattatgttaggaatcaataataaaaactaatatctccctctccctctccgtctccccacggtctccctctccctctctttccacggtctccctctgatgccgagccgaagctggactgcaatgacgtgatctcggctagctacaacctccacctcccagccgcctgccttggcctcccaaagtgccnagattgcagcctctgcccggctgccaccccgtctgggaagtgaggagcgtctctgcctggccgcccatcatctgggatgtgagaagcccctctgcccagctgcccagtctgggaagtgagaagcgcctcttcccggccgccatcccgtctaggaagtgaggagcgtctctgcccggatgcccatcgtctgagatgtggggagcgcctctgccccaccgccccgtctgggatgtgaggagcncctctgcccggccgcgaccccatctgggaggtgaggagcgtctctgcccagccgccccgtctgagaagtgaggagcccctctgcccggcagccgccccgtctgagaagtgaggaccccctccgcccggcagccgccccgtccnggagggaggtggggggcagccccgcccggccagctgccccgtccgggagggaggtgggggccagcctctgcccggccgccgccccgtccgggaggtggggggcgcctctgcccggccgccctttctgggaagtgaggagcccctctgcccagccgccaccccgtctgggaggtgtacccaacagctcattgagaacgggccatgatgacgatggcagttttgtcgaatacaaaagggggaaatgtggggaaaagatagagaaatcagattgttgctgtgtctgtgtagaaagaagtagacataggagactccattttgttctgtactaagaaaaattcttctgccttgggatgctgttgatctgtgaccttacccccaacccggtgctctctgaaacatgtgctgtgtccactcggttaaatggattaagggtggtgcaagatgtgctttgttaaacagatgcttgaaggcagcatactcgttaagagtcatcaccactccctaatctcaagtacccaatgacacaaacactgcggaaggccgcagggtcctctgcctaggaaaaccagagacctttgttcacttgtttatctgctgaccttccctccactattgtcctatgaccctgccaaatccccctctgggagaaacacccaagaatgatcaataaaaacaaaaacaaaaacaaaaaaaactaatatatattttcccaaattttgaaattaagaaacattcttctaaataactcatgagtccaagaagaaataataatcaatgaagagttccttctcagtttctagcatatgatgattagaaaagagttcttaaaaaaatagtgaaaatgtcctagctttctttaaataataataatgaggggctgggcataatggctcacacctgtaatcccaacactttaagaggctgagatggaaggattccttcagcccaggagtttgaaaccagcctgggtaacatagggaaatcctatctctacc

SEQ ID NO: 228493 - DNA, 200 bp, Homo sapiens
tctggcttcctgtcgggttgggccatgagagggggagacaccgtcaggagatgagagctcagaggagaggtcatgtaaggacaaagcaactatctgcaagcctggaagagaaagctccccagaggctgagccctgctggaccttgattttggacttccagcctccggaaatgtgaacaaataaatttctgttgttgaagt

SEQ ID NO: 228494 - DNA, 372 bp, Homo sapiens
ttctggaggctagaagtcccagattagggcacagcatatttgactttggcgaagggctgtcttccagattgcagactactgacttccaaattctcacggggcatgaagagcatgagagagctctctgggatctattttataaaagcactactcccattcataagggcttcatcctcatgatctgattacttcccagtggcccggcctccaagtctccttacattggttattagcatttcaacacaaaaacttgggaaaacacaaacattcaatccattgaatatgccatcaaatggtaagttacatttgtaatttttttaagaaatttcaaaaattgagtatttttaaagacagtatgtacatagccatgct

SEQ ID NO: 228495 - DNA, 92 bp, Homo sapiens
tacaatgtagattttttttaatggaggcttttcataacagcacaaagtaagatttattgaaacacattaaataatcactgtaagacatggta

SEQ ID NO: 228496 - DNA, 371 bp, Homo sapiens
aatattttatttttatggctcctcatgttctcaactctcaaatgggagcaactctgctacctgccccggaagctgtgaggattgaaaaagttgctgtgagaaggagcgacaaagggcatggtgtgctcgtgtctacctgagagtggctcagcactcaggcaggctccatgcctgggcagggccaggcagagctgggctggcaccccagttctgtattagcagctctgaatttaagtctcttcaaaaacggatgaggacacctactaacacctacaacacagggcgatagtaaggattaaattaataccatgcatgtacagtggcccttcatgtccatggcttctgcattcatggattcatccaactgaaaa

SEQ ID NO: 228497 - DNA, 461 bp, Homo sapiens
cagctgcatcatttcacattcttagcagcagtgcacgagggttctagtttctccacattcttgtcaacacattatgtgtcattttgattggactaggttatcttttatgtaccttttaatccaggaagtatgattttgtgaaaaaaaatttgttttcgatatgtgatagaaatctgcaaaggaattaattaatatgtatgaaacagaaatgacaaatggctgttttaagtttattttcttcccactgtgttcttgggtcgttcatttttatgaagtaacaacaaactcctgttctgagcatacttgtgtattttttctgaaaacagatggtagccagaacacaactgggattccattaagaaaatcttatcagtttgtttatttgtaggcatttctctccccctctccccacaaaaatgattcttatcaagaggaggaaaggacaataaactgggaaatgg

SEQ ID NO: 228498 - DNA, 544 bp, Homo sapiens
aatcactgtcaatggtattgagaaattgttgtttgccatttagaacactttcttcatcttgccttctacctcacgggccactgcatctcaatgtcaatctctgaatgtcactcattttcctgactgtgtgtaaatgttgcagattcaactttttatcttttttttccccatcacttctcattcactaggtgacccatgtactctcaaggctttaaatcacatttattctctagaaactctacattttttttctgtagtgcagacctctccagaattggactccagaatcctaggcagagactttctcataatctccaggtggatatatgtactaggcatctaaatcttaatatgtccaaaacaaactcctgatttttaacttctaaaatctgtgattcttttcacagactccaaactttagtaaaaggctactccattcttcctgcttttcagtacaaaataattcttcactattcttttccttgtataccccacatacaatatcattagcaagtcctgaggctctactttcaaaatacccaaa

SEQ ID NO: 228499 - DNA, 413 bp, Homo sapiens
gcagcctttggctggagtattgccatgagtccatcagcaagagtccagtttcggctctcaggagtgtgttcacctgtttctttctgggctgtgtcgagtctggagacacagcaccaggccaggctcattcaggtacacgggaggccctctgagctctaatgtggagagttgtcggagcctgcagctggagtgcatatttctgaggataccatgcattaggactagtgcctgtgacctcctcttcactctgcaatctagggccttgcaggacgaactctgcagaggcctaaaggttttgaaattgagaaggaaaatcttctaccaataatttttttttatagaatgaaaacaaaacatgaatgattgctaaaatgattaaagagaggcgagaacagagccgatgaaagggaaag

SEQ ID NO: 228500 - DNA, 626 bp, Homo sapiens
cacagatcgatgaagtaatttcctaagtttatacagcttataagcgacagagccaggattcgaaccctggcaatctggctccagaacccctgcccttcattgctaccctctactggctagaacacaggtgctcacaacaccagcatgttaggaattcagttgtcggggatatgtaacatcatgtttgttcttgactagcagggatatttcctggacaattccatagagtcatgccaattcccctccatttttgagtagatagatgtggggcgagtgacttcaatcagcaaatacttatggagcatcttcagtgtagaaaacattgaggatgcagcagggaacaagaaacaaaatccctagtttcagagcacttacatttcagtgtgtgcaaaaacaggtatgtgtatgtcttacagtatagagatagcaaatggttttcaactcaaaaactgattttggttgatttgaatcgactgtatggactgttatgttttggttctattttgttttaacaagcatttagatagccaggcactgttctaagcattttaaatgttaactaattcattttcaaaacaagtccataaggtgagtaatattcctaacaccatccccattttatggat

SEQ ID NO: 228501 - DNA, 405 bp, Homo sapiens
ggaaagaagtggagggaagtcttcctccgagaagataagggaataaggctgatgggtgtgaaatttcagagaaactagttttgaggcgtttttatgatgtttaaagatgaaaaacgcagccaggcacggtggctcaggcctgtaatcccagcactttgggaggcagaggcgggtggatcacttgaggttaggagttcaagaacagcctggccaacatggtgaaaccctgtctctactaaaaatacaaaaattaactgggcatggtgccgggcgcctgtaatcccagctactccggaggctgaggcaggagaatcgcttgaacccgggaggcagatgttgcggtgagccgagatcgcgccattgcaccccagcctgggcaataagagcgaaactccgtctcaaaaa

SEQ ID NO: 228502 - DNA, 236 bp, Homo sapiens
atgttttagtttcttttttccatgaacttcctaaagtccccttatatacaatgatgaacctaagatgggttaagatgaaaatctaaatggtaaaatattaaatgtagtataaagtaaatactctgtgacagcaggataaagaggtattttaaaaaaaaactcaaaagtttaaacttatatggctaaaattgatggatgtgattacatggaaactaaatatttctgtttcattgaac

SEQ ID NO: 228503 - DNA, 412 bp, Homo sapiens
ggagacagagtctcgctctgtcgcccaggctggagtgcagtggtgcgatctcggctcactacaagctccgcctcccgggttcacgccattctcccgcctcagcctcctgagtagctgggactgcaggagcccaccaccacacccggctaattttttttttgtatttttcgtagagacggggtttcaccatgttagccaggatggtctcgatctgatggtctcgatctcctgacctcgtgatccacccgccttggcctcccaacgtgctgggattacaggcgtgagccaccgcgcccggctactattatttcttttaaggtggtagtttggtttcagggtcccccagcactgcaatggcagcctatcccttctgtcgtcttagttcatgctctgctcattgcacaggttagga

SEQ ID NO: 228504 - DNA, 1563 bp, Homo sapiens
  misc_feature (146)..(146): n is a, c, g, or t
  misc_feature (677)..(677): n is a, c, g, or t
  misc_feature (1113)..(1113): n is a, c, g, or t
gtgcttgggagacagtgagtacgtgaatctgcctgcagaagttgggagtggggggaatattattaggattattaggaagggcaaagttcagcatcatcctctctgctgaaataaccaacatggtgctcattaattggtcatgtgancactaaggataaccaccctcccctcctcaatcaggatcacaaatgctagctttcatatggatttcaagctgggtgaaatgactttttttgcttgtaaagaagaaatgatgatggaggtctcatcaggaagtgatgcagaagactgggacagacgggggtttcaccatgttggccaggatggtctcaaactcctaacctcgcgatccacccacctcggcctcccaaagtgctaggattacaggcgtgaggcactgcacccagcccatcataagtattttcatgtatcatcatgtattttagaaaatggtattattgactatatatcagttcattgtgtgcacacattttatttaattaatttgctcttttcagttatttagttttctttttttgttattataaatttcatagtaatatatgtccttatacataaatctgagtatgaatctaggattatttacttaaaatgaatttccagacacaaattgtggggttaaagtgggaggagcatttttaaagcttttgatatanaccgctaaattgtcttataggaatgtataaattatgaaacaaccagctgtccatgtgagaccatgcatttccttatccaaatgaagttaaagaaattatttgtcagcttttttggtggtatgtggtaactccttttcctgatttgaatgtttttctagtactagtgactttttacaggtttttcttatgtttgttggttgagtttttttttttaatgtctatgcctatcttagtatctatgcctattttaattttttaatgtctatgtactttcttttggagcatgttgtatgatattttataaataaaaggtgttaactctgtcattatagtgtaaatatatttcccaatatgtttttaaattttcatttatgatatatagaaattttaacttttatatattaaaaatatctatatttaaatgactttgtccagntgtagtgactcatgcctgtaatcacagaattttgagaggctatgtcaagaggattgcttgaggccaggagttcctggccagcctggacgacacagtgagacccctatctctaaaaaagttttttttcaaacaatcctgccacctcagcttcctaaagtgctgggattacaggcatgaaccattgagcccaggttctttgtaatatcttcctccacgtttttacgtatcaatcctgcattcaaacatttactcattctgaaacaaattttagtatatgttataaggtattgatccaaatttttacgtttataaatagttaacatctccaaaccatttattgatattaatttcaccttcatcatattgtaaattatagttttgattttcctttttgacaatgaattatctaagaggatactttagaattttcaaacttaataaaaaactttt

SEQ ID NO: 228505 - DNA, 473 bp, Homo sapiens
acagagtcttgctctgtcacccaggctggagtgcagtggcgcgatctcggctcactgcaacctccacctcccgggttcaagcgattctcctgcctcagtcttccgagtagctgggactacaggtgcctgccaccactcccggctaattttttttatgctttttttagtagagacggggtttcattgtgttagccaggatggtctcgatctcctgacctcgtgatccgcctgcctcggcctcccaaagtgctgggattacaggcgttagctaccgtgtctggcctacgtttttcttaaaggatcacaaatgctagctttcatatggatttcaagctgggtgaaatgactttttttgcttgtaaagaagaaatgatgatggaggtctcatcaggaagtgatgcagaagactgggacagcatatctcaaaaatcaagatgaatccttaagctttctacccagatgttgtgggaact

SEQ ID NO: 228506 - DNA, 466 bp, Homo sapiens
agattcctccaattcatgttaaaattaaaaaaccctagggaaatgtaaagagaaagcaacaccctattcctttaaaagccagggtaaatttaaaacctataattgaaggtcttctccatgatgagcttcttgaaccctgtatgtctccctataacactccaatactgcctgtaaagaagccagacaggtcataccagttagtgtaagaccttagagctattaatcagatagtccaaaccacccaccctgttgttactagtaactgtccccatcctagctttaccttcccctagaactgccttttcatctctttgtcaatgtaaacaaaacagtagccttaggagtactcactcaaaaacacgggggccaccggcagcccatagcctttttgtcaaaaattcttgaccctgtaatctgagggtggcctaaatgtattcaatctgtagcagcaacagccctattaaca

SEQ ID NO: 228507 - DNA, 499 bp, Homo sapiens
agtaaaagtctacaaaaatgctctttttttcttaatgacgaaaggacaaaaggcattgcatcttcacaattaaaggaaagcatgaacatcggcggttttccaaaattagcattcttagacaatatgaagacccgtatttttagatgattccttaatattagaaaatatatactgaaagggatcagagtatgccaccccaaaatatagcactttggcataaggattattttgagccgaaggcaactgagaaacagtaaacattgaaaagacttctaccctcctgtatttggctaaaatcaggtcataaatttcccttcgtgaaggtgccccaccttctcccttctcttgtgccaggaaagggagaatggtttgtaatcaccagagatgatctccaggggtgtccaatcttttggcttccctgggccacagtggaagaagaagaattgtcttgggccacacataaaatacactaacattaacactaacaatagctgatgag

SEQ ID NO: 228508 - DNA, 457 bp, Homo sapiens
aaaatgggttggaaggcattagggttaaaagatgagtctgggctgggtgtggtggctcacgtctgtaatctcagcactttgggaggccgaggctggtggatcacgaggtcagaagtttgagaccagcctgaccaacatggtgaaaccccatctctgctaaaaatacaaaaattcgctgggtgtggtggcatgtgcctgtaatatcagctactcaggaggctgaggcaggggaattgcttgaacctaggaggcggaggttgcagtgagccgagatcgtgccattgcactccagctctgggtgacagagcaagaatccgtctcggggagaaaaaaaaaaatgatgagtctgagaatggagtgggggagagaataggagtaggtagagtcatatggctcctctctactaaacatcccaaactgtaactgagcctccttcatcacctgccacatgaaaatg

SEQ ID NO: 228509 - DNA, 188 bp, Homo sapiens
cagattcaacaggatgaggaggaaattagcctacaacttctgatgcgagagtgtcacattaggaaggcatgtggaactggggatgctattgtggtcatctttggaaaatattatcttccatgccctccaagttgcctccagaaaccaaggttacctagagtgtgaacttgttccagatcctgcttccc

SEQ ID NO: 228510 - DNA, 500 bp, Homo sapiens
tccttctgccttggacacccaaaatgcagagattacaggtgtgagctaccacaccccaccaagggtctcttaagaagagctggccgggtgcggtggctcacgcctgtaatcctagcactttggtaggccgaggcgggcggatcacgaggtcaggagattgagaccatcctggctaacacggtgaaaacccatctctactaaaaatacaaaaaattagccgggtgtggtggcgggcgcctgtagtcccagctactcaggaggctgaggcaggagaatggcatgaacccgggaggcggaggttgcagtgagcagagatcgcaccactgcactccagcctgggcaacagagtgggactccgtctcaaaaaaaaaaaaaaaaaaaagagctatactgtgttgaaagagtcctgtataaaggaggatgtcttaaatttgccattttgactctgttttgaacaggtcaccaggaaaatgagacttggtagcctggcgaggtggctc

SEQ ID NO: 228511 - DNA, 342 bp, Homo sapiens
caggagatggcaatggaagcgacagctccccatcttccccggctgcatacgtgagggattctgctgcattcactgagtcaccaaaggacactggaaggccatcaggatttttgggtgaccaagacatggctcccctcttactgcctgtggggagacaggcatgtgaacacccaagtctaacccaagctgagttgactgagggccatttaaagattccacagaggctgagagcagtggctcatgcctgtaatcccagcactttgggaggccaaggcaggtggatcacttgaggtcaggagctcgagaccagcctggccaacatggtgaaaccccgtctctact

SEQ ID NO: 228512 - DNA, 458 bp, Homo sapiens
ggggcccccgctcccctcccgcagtgcgtctggggggccgaggccaaggattagaggggtgaccctcccggggcgcggggagagggagtgccgggcacggtgccctcaaggtcaccacgcgccgtggcgggggcgaccggtggcgggatgggctgtggcgcggccgaggcggcttcgtgaagccgaagacctgcgggtgtagaccagaagccccaacaagccccatccctcgggcccggagcagcgactcccagactgacccggcgctgaggtgcacggcgagaagcccgctcaccttcacaatctcccggcaagaggcaacctgcgaggggccccgaccgcccccgtcagcttctcccgaatccggcgcaacccgctgcgcacccagctatcaggatccccgccgcgacgcccgacctccgtgctccgcctggcctcccccgcaggtgacctgcccc

SEQ ID NO: 228513 - DNA, 601 bp, Homo sapiens
gtggtaaaatatacgtaacataacataaaattaaccattttaattatacaattaagtggcattaagtatattcagggtattatgcagttattaccaccatccatctccagaactttttcatcttctcctactgtgcctattaccaactccccattcccctttcccctggcccctggtgacctctaaatttctttctctgtgaatttgactactccagatacctcataaaagtgaaatcgtacagtgtttacccttttgcgactggcttatctcaattagtgtaatgtcctcaagattcatccacgctgcagcgtgtcagaatttccttccttctaaagtctgaataatattccattgtgtatgtaccccattttgctcacccttcatctgttgatggagattgggttgtttccaccttgtcctatttgacttttatcttcccactccccttggaagcaggtggagtcagattttcttgatgtcctgacctcctccattctgcttttctttcttgctcagttttgcctgactttccctgggtctctccggagcaccacttacccaaagtctccagctccggtgctggggcacatattgccag

SEQ ID NO: 228514 - DNA, 477 bp, Homo sapiens
acccaacacatacacacactctcaaaactgaaaaagaaatttcatgaaacagtacttaggtcttactacatagaatgcattctaatactttctattttatttcttaatgctttttatgaactactaaaatcagcatgcaatttgagagacactacaaggttacatgaatttataaacttagttagagtgagaatataccatacaaactttcatttttctatttaaaaaatattttttgtagagacggggtctcactatattgcccaggctggcctcaaactcctgggctcaagcgatcctcctgcctcagcatcccagaatgctgggattacaggcttgagccaccttgcccagctccaaactgttttataagtgagaaaactaaagctcagtgtagagatgagatgggagggactctggccataaattctggatttaaaccttggttgtgtgttgttgggcagggtgtttaatgcc

SEQ ID NO: 228515 - DNA, 402 bp, Homo sapiens
tctgtcgcttgtacttttttgtgagctccttgagagcaaagcacatcatgtttacttcttcgttttttgtttgtttgtttgttttggtagtccctggcacatggtggtacagtgggtatgcagtaagttctggagcagggacttaccttcctaccttcctttgccttccccacgctcttacctgctgagtgtagtcagcccgtcctgttttcccttccggcactctggccaccctcttctaatatcccacactgcccctgcagctcacagagacctgcacatactgttcctctcactggagttctcccctttctacatttggccaactcctactcacctttgagtttgatttaaatattatttatttaagataagtctttcatgatcccaactcaaatttaa

SEQ ID NO: 228516 - DNA, 410 bp, Homo sapiens
tccattttgtcacatagctttatgtactcagacattccaaaacccagttatataattcacctaaggtgttgcccatttgggacagttactgcccctctccccaatatactcagttgtttagccagtgattccgacatttaaaaaaaatttaaataatatttatgtgcagagtgctgggaatagaataatgaaagctattacccctgacctcaaggaagccactatcaagttggccttgttattgactgctgcataataaaccaccacaaaatttaaggtctcactacaagagaaaccagggtgacagtcttaattagttcaagctattaaataccagagactgagaggcttatacaacagacatttatttctcacagttctgaggctgagaagttcatggtgtcagcaga

SEQ ID NO: 228517 - DNA, 529 bp, Homo sapiens
gggtgaacagcctttctcagtcactcagtgccaatccattgaccgcctctacccttgtccacctcgacctctcagggaacgtccttcgtggagatgacctctcacacatgtataattttttggcccagccaaatgccattgttcatctggatttatccaatacagaatgttccctggacatggtctgtggagctcttctccgtggatgccttcaatatttagctgtgctcaacctctccagaactgtcttctctcaccggaaaggaaaagaagtacctccatctttcaagcaattttttagtagttctctggctttgatgcacatcaacctttcaggcacaaaactgtctcctgagcccttaaagtgagtggttaattcactttctccagagcttttaaagttcaacttatttttacgaatgtgcttgagggaagggagaaagatatataatccaaagacaaaaaccacagatgagaatgcctttttactctggggcagaaaaataaattaaaattttaaaaagtacat

SEQ ID NO: 228518 - DNA, 497 bp, Homo sapiens
aatacagaatatgaggtcccattccagccaatggaaactggacacagcagtagggtggatgcatcaggttataaatgaccctgtctcctttgtttggtgtactctcatggcagaactaatggcgagtgtaccctttctgcagaaagcataaaaatggccttgctgagaaaattaaatttacgttcaagtgctatttctttatggcaccaggaaacaagcatttcaaacattcccctgcctttctgattgtgggtcttaagaccctcccttgagaaggtcctgcctcatacgctgggggaaggaatgcttcaataagaacccaagaggattggctttggtgagctttcagatagctgaacacatgggggttcctggaggatggtatgcatggggagggcatggtagctctgtgctccttcccccataccatctcttcatctgtgtcctttgtaatgccctttataataaagtataatagtaaatgtaaaaaaaagctt

SEQ ID NO: 228519 - DNA, 434 bp, Homo sapiens
ccacaatagtgatgttaattaccattaacatagtaattaacataggaggagctggggaagttggagatcttgggacctctggaataatggctggtaattgtttaactgcacctacattttagtagaattcaggcccctctgattttcctaacctggtagcctttcattagttttacaagggtggtttcatttttgggaagagctattgtctcccaaagttagtctgacttatgcccaggaatgcttcaataagaacccaagaggattggctttggtgagctttcagatagctgaacacatgggggttcctggaggatggtatgcatggggagggcatggtagctctgtgctccttcccccataccatctcttcatctgtgtcctttgtaatgccctttataataaagtataatagtaaatgtaaaaaaaagctt

SEQ ID NO: 228520 - DNA, 505 bp, Homo sapiens
acacacacacacacagacaccctattagttctgcttttctagagaaccctaatacaaacatattgttcactgccaccacgcctggctgaccctcttcttaacaggactctttcagtagtctaagaaatgatcaaacatgaaagccataaaaatatatattataatttttaattttgtttatatcatgagatgtaaaaagagcactggaaaatagaatcaggccaggagcagtggctcatgcctataatcccagcactgcagaggcaggaggatcttgaggccaggagttagagaccagcctagtcagcacagcaagacccctctctcactgtaaacataaaaaattaactgggcatagtggtgtatgcctgtagtcctagcttcttgggaggctgaggcaggaaaatcattggagcccaggagttctaggttacattgtactatgactgcagcactgcactctagcctgggtgacagagtgagtgctgtctttaaaaaaaacaaa

SEQ ID NO: 228521 - DNA, 412 bp, Homo sapiens
ctgaggctggaagtccagaagtcggggtgctggcaggacgtgctcttctgaagcctccagggcagggccagccgcatgcccgtctcctcgcttgggcacctgccagcggtccccggcggtccccggctcattgctgcatggctccaacgtccgcctctcccaccatgtggcctcctcctggtgtctctgtgtccaaatctcccgctctgtctaaggataacagtcactggtcatgggacccatcctaatccagggtgacctcgtattaacctcatcacatctgcaaagactatttccaagtcaagccacactcccagctgctgggggcgggacttgaacatattttttgtggggacacaattcccctctcaggttttaagatttgtctttatcattaaagttttcaaaacta

SEQ ID NO: 228522 - DNA, 418 bp, Homo sapiens
gcaggctgcacaggtatctgcttggcttctggtgaggctgcagggagggagcaagagacgggaggaggcaccaggctctttaatgcaggagtccctgacctcaagacgggtccatggcctgttagaagtgggtcacacagcaggaggtgggtggcaggcgagtgagcgttaccgcctaagctccgcctcctgtcagatcagcggtggcattagattctcactggaccacgaaccccaccgtgaactgcatgcgagggatctaggttgcacgctccttatgagaatcaaatgcctgatgatctgaggtgggacagtttcatactcaaaccatccacaccactccctgtccacggaaaaaactggtcccaggtgccaagaaggttggggaccactgctttaaacaacaagctctccaaac

SEQ ID NO: 228523 - DNA, 449 bp, Homo sapiens
ggctggagtgggagcggttagaggtggagaagaggccagtgttgggggttggggggaggctcggattttgacctaacttctgtttatactgtggccacctgcccgtcacccccacctccaaccttctgaaggagcagagttcactccccgccaccctcattacagaatcttcctgtgatctcagaggatgatggaaattctctcctctgaatccttgggggcttagagcctcacaggtccagagaaaccccccacccccactgcagtctgccttcgttggcaagcggtgccacgtgcctggtgggcatgtggaccaggcccagaaggaacagcaggaatgggagtgggctgtgctgtgggggtggcagaggagcgttttactttcttctgtcaaaaatgtctatatatattttgttgaaaattaactttgcaattaaaaacttaaaaac

SEQ ID NO: 228524 - DNA, 210 bp, Homo sapiens
aaaccctgaggctcctctgcaatgacagttgtccagtgggctgctgctttttttcccctttaatgcataagtttgtgcttaaatattaaacactcctaggaggttaaggaaaggagtattagaagaaaaaaaatccttattcctttcatccttgacacgggccaagagtacatctttatacttcagaagcatgggaaattaccccaaatt

SEQ ID NO: 228525 - DNA, 722 bp, Homo sapiens
cgatggttctgggctcgtgtgggtcctgcgctgtgcggaaggagcggagagcccaattcaagtgttgaaaggggagaagagaggagggagtgggggaggaagggccatatcattcccgttaatggcggcgaccctcagacgtctgcatggttaggattggggatccagcatcctcatgggaagctcagtagagaagttgactcgctttgggccccttctctcggaaaggctctgcgattgatccctcctgcacacttgtgcacctagggcagggtaccattgcccttgcctgcaacaggaccaagagagaactcaacttggaatgaaaagctacctcttttagagtttattcaacatatatttatgaagggcctactaaatgccagtcactgttgctagttgttgccatggggataatgaaacagaactagagaagcttggtgaaaggaagaaacatcaggcctcctgactccaagcttagtactttttcttcccacaaatcttggaatatacaggaatcgaggtactgtgagtgtaaaccctgaggattctttgggtctttcctaaaatgtttaaagtgaaaaataatctgccaggctcggtggctcacgcctgtaatcccagcactttgggaggccgaggtgggcgaatcacgaggttaggagttcgagaccagcctaacatggtgaaaccccgcctctattaaaaatacaaaaattagc

SEQ ID NO: 228526 - DNA, 541 bp, Homo sapiens
cgatggttctgggctcgtgtgggtcctgcgctgtgcggaaggagcggagagcccaattcaagtgttgaaaggggagaagagaggagggagtgggggaggaagggccatatcattcccgttaatggcggcgaccctcagacgtctgcatggttaggattggggatccagcatcctcatgggaagctcagtagagaagttgactcgctttgggccccttctctcggaaaggctctgcgattgatccctcctgcacacttgtgcacctagggcagggtaccattgcccttgcctgcaacaggaccaagagagaactcaacttggaatgaaaagctacctcttttagagtttattcaacatatatttatgaagggcctactaaatgccagtcactgttgctagttgttgccatggggataatgaaacagaactagagaagcttggtgaaaggaagaaacatcaggcctcctgactccaagcttagtactttttcttcccacaaatcttggaatatacaggaataaaaagggtgcaaaaagaaaga

SEQ ID NO: 228527 - DNA, 238 bp, Homo sapiens
tatatatgtaaaattaaaatttatgacaataagaacacaaagaagagtgtgaatatagctaaattgttccaaggccttgcttgtctgataagtaaaaatattaatttacattagaatataataaaccaaagatgtgcattataatctctagagtaatggctgaagtaataaaaaagaagtaaaagcaaatgtggtaaaaatgtaacaaaaatatttaaataatccaaaagaaggtaaa

SEQ ID NO: 228528 - DNA, 195 bp, Homo sapiens
tcaaaaggcccagaaggaataggccacacagctacacaaggagctataacagaattctctctcagactcgtcttattctctgtgttaagttagagaacccattcattctgcccctgccccatcattgcctccccaggcccctgcttagcccacatgccccaaaacccggagcccaagccaagcccggagcagaag

SEQ ID NO: 228529 - DNA, 566 bp, Homo sapiens
gatagcaagcagcaaattggagggtaatggtaggtgcagggttaagaattcagttgtttagcagataatcacacaaattattgagaataacactgaagatggcaataaaggaaaggtatagggccccctgagaacatataacgggggtacctggccaggcccgatgagtgatgaaatctaagcttttgatcattatagtttacaagatggaagacaggcatgttttacatttatgaagggcccaaagaccctcattttttagttttaaaagtgtctacgttttccaaaaataggtgaatgaagtacaatgagagcagctatcagcttctttgggcagagaaatgtatgattaacctttttttttttgagaaaggtatttgtggagagaagtcacaaagggtgaggattccatttcagatttcaatcctagattgaagaggaatggggcttagggggagacagagaaagtactgtttatcttcttgccagagggaagaaccagacatgtgggaactaaatgcaatctagcttgagcagagtgtgaagagacttggggaatgaaaaaa

SEQ ID NO: 228530 - DNA, 468 bp, Homo sapiens
cagtggtaggtttgacatctcttgagcatctgctgtgtacaaggcacagtgctaggcacctaacttttcacctgtgatcctcacagtcatctcattaggtagagtaagtattaagttcattttacagatgaagaaaccaagactcagctggggtttgacgtgcccagatttcagccagggcatcttcctttaagtctagctctttccagtattctgcactgtattttagatgtatcagctcttacacgtgtgtgttaaatgagatactgtttgtggatatgccttgctgagtacacatatacacacatcttccccccgccccccacttctccccttcctattagaattgacctttgctgcaaaggaaacagatccttacattggtgaccagagattcttctagcttagcactagcaggcactttctgcacttagtgtgcttgtttcccatgagggttctggggccagt

SEQ ID NO: 228531 - DNA, 534 bp, Homo sapiens
gctctggaaggacagttatttcctcttcaattctgatgaaagctattcccccccacccccggttgtttctgccaagaaaagatttcctaccatggtggctggaagcagtaattagactcctccctcaggatgctgccctcttactcagctgccctctcttactcagcagcgaagtcaagtcccaaattaactgacaggaggagccagtggtctcttctggggtttgtcacaatgaaccaaccttagatccccattgtaaggatctcactcattagaaaatgtttgaactggtttctaacagctgataatgatttatagagtatgttctgatgactttaaaatatggctggatctaatgttgtatttttcaatacagatgaagtttaagcagttggtcattttaaaaagaccagatttgaggagttggatgtgcaaattaattgaattatacaatgtgtgcaatattattttgaatggaaagttggatgttataaaactgaaaataaagaaaaaatacaatctttttgtagcgga

SEQ ID NO: 228532 - DNA, 355 bp, Homo sapiens
aactgaccactgtcttcagtcaccataaaccccatttaaacaatagatcaaagacttcagcagaactgacagcaaccacagcaaagacgctgcattctcctttgactgattcggccagaaggaaaaggagaacctgcatcctctctctctgattgttcactttaacacagcggcacattcagaactcagtattagagtccagggtcacccctgtggtctgcagccaaaggaaaacacaaaggagcatggcttccttgcaagtgtcaggcccaagtgtcttaaagaacgaggagacacaacagactggaaaggagacccaggacgataaattctcaataaaatatattcttttaaa

SEQ ID NO: 228533 - DNA, 495 bp, Homo sapiens
ctccctaagcaacccagctaaggctaaaagaacaaatttcagctgccacccaagagacagagttggcagctggagtccaactgcttgtttgctaaagcaaacaaacaaaatcaacagtcatcagaagaatataacagaatccagagtctccacaccatcacagtcacaatgtccaggatacaattcaaaattaccacaaaaatgtcataaaaaatgttacccattttaaagaaaaatggcaatcaatgaagaccaatcccaagttacacagggtgctagaattaacaaacaagaatttccagataactattataactaaattcaatatctgtccaacctacctcacagagttgttaaaggtaaaatatgcaagcaaaaagtgctttggaaagtttcacatacactacctctaaaaaataaaaatagaagtggtctccactttttatatctgttcccaaaaaccacagaataaagcaaaccattttaatatgcatc

SEQ ID NO: 228534 - DNA, 90 bp, Homo sapiens
gatcttcgtggtttaaatacctttcaatttgggacgatttaaccattgcagcagttcaaaaaacaaaccctgagcattatctgtaaaacc

SEQ ID NO: 228535 - DNA, 164 bp, Homo sapiens
ccattctcactccatgggcaacaactatttctcattctcgacagaatcaccccactattatctctcccatcaaaacaaaacaaaatgaaaaatcctttcttaacctcaactcctattcctgctactatccaatttctctttttcctttagggcaaaatttctca

SEQ ID NO: 228536 - DNA, 471 bp, Homo sapiens
cttctgttgttgaaacagaggattttggcagcctggttcattttctcttgtatatcaggttctttgggttcactattttctttttaataagatcatgatatttcagtgtttacctatagctcacccaccatttaggttttatttccagtgctctcatgcttccctaaatcctgtacgaaagatgctatgtcaggaggcgcggtgactcaggcctgttgtcctggcacataagaaggcgaggtcaggtgtttgagactagactgagcaacataggaagctctcatctattaaaaaaacaacaaaaaaaccaaaaacaaaaaaacatgctatgtccttggctattcgagccacagctttgtgcattgacacacatccagcatcagcaagctttttctaaatgagaacaagcgtcattcctttgtccatttgtcagacttgtcacatatgtctctatgggattatagtttttta

SEQ ID NO: 228537 - DNA, 561 bp, Homo sapiens
gaaatgccattaccatgcttatattctagaacagaagttctctgccatgactgtacatgagaatcactgctctagaatatggcacaatacacattcatgcgcattattccttgtccagcaaatgcaagagtttctctagaggaggggcttatctcaatcctaggctcctgttagaatctcttcaggggttctttcacaaaagtaatacctaaacatccccctccaaatctgattaagttggcctggatggagtctgactgaggaagcctggatgcccattaagttcttccagggaactattgaaaatcttgacacccacgttgcaatccaatatctctggatttgagccccaagctttgtgtaaacaaattacaaccttgtgtgtaatagcaaaaatctggaagccacttagatgttcattgagaggagaatgcataaatacattgtagaatatacctataataaaatatatcctgctcttaaaatgaaacaaattttgccctcatctatcagcatgactgaaacttaaacatgacattttgtgcaaaaaaaggcaagcta

SEQ ID NO: 228538 - DNA, 491 bp, Homo sapiens
ctcaagataaaggtcagttccttcaaggagcttccagtctaggattggaggggacctaacatgagattgccatcaagtgtgagaaaagaaaagcagggtccttggaaacctcccctggcacagctgtgccacacagaaggtgttcagggggcacattcttcatggaaaatacaatattaatatgagattggaattttgtgtggagcgatattaacgtggtgaagaggattgagaagggtagtttggagaagatggagaaacaggtacgaacattaaaaggcttaaagcagcacactctggagaattacaagtcagttggcatgacttgaatgtgagtgttgaggaagagaggagtaatgaccagagatgagatgaagaagctcacgcaggacactatgccaaccaggaagtgggcatttatattgtaaagaaataggtcagatttaaagcagacactgacatgactagaattaggttttaggaaaaaaaaa

SEQ ID NO: 228539 - DNA, 497 bp, Homo sapiens
gaagctcgattacaatactgtatattgggaagtaaggggagggtaaggcagtgaaggagagacagcataggcaataagtgtggctgggaaagaatggccagatagggcagtagtggatgaggtcaaagagaagggaatttcaacatgggagaactgagcatgtttaaatacttaggcagaaaccagtaagatgggtgggtctaaagacataggtagaaaaatggctctctaaagataggattcagggctcaggtttggggctaactcttctctagaaatagaagggaagagagtgaagaagagtattttgcttgggcagtttgtgtgggttttgtggaagctgagggaatttcctgctgagggccgaaaccatcaaaatgactgatgacctaagtcagaggctaaagggaattcccttctcactccagtcaggccagtagaagcaaccagacaggttaatggcaacaagattgctaccaaaatcaacagatacattt

SEQ ID NO: 228540 - DNA, 400 bp, Homo sapiens
ttgttatttaaatgatgttttaggtattctcacttcttcgcctactttaccataagtccctcatctttgcccccaaaacactaatagcacttagagcaattacagcccttaaaacagtggcagactgcagtacatgcccattgaatgaatgcaggctgcggtatatatgctggtagaatgaagtgatgtctatctgctactagacttcatgtcctggaagaaaggcacattctgttattagcaaggtgtttgacacacattaataatgaatacgtgttaggcttgatgcagaatatatataaacacttgattcaactcaatgacagttttaaaatgcagatattaatatctaattagcatatataaatctttaaattttaaaattcagctaggaactgaa

SEQ ID NO: 228541 - DNA, 345 bp, Homo sapiens
caatatattagttacaaaaaccagttacagaaaaatgtgagtagaaaaattcttttttaaaaaacaaagctatacacagactttttatggtatgtgtatgtgtaaatacgtctaaatgtgcataggaaagatccagaaggattcatactgaacaactgccagtggttactcgtgaggaatgggagaggagcaatggaatgggagaatagagggaaagaaagggaagcttgattttatattttatgtattttgatattatttgaattgttattgcctttatattactgctgtagttttattttttaattatttttgtaattgtaaaaataaataaataaataatga

SEQ ID NO: 228542 - DNA, 835 bp, Homo sapiens
gaaaaactttaaattattagtggacaccattatggagaagcctatataacattctgatattacaaaattaatgcaaagaaattgttcacaataaaattactttaaatttgctttaattttttttcacgctaccttggccaatattttattatagtcaatttaattcattcattcattctataaatatttctgtactaattttaggtaatgttctgctcaatcatcatttaatttgctgtgctattggtttctgttaatatattcctcaatcttggagaacattttaaataattgcctattcagcatttctatggacattgttcagcccagttccattttgttaatgcacaaagcaattcaatttctgtaagtgcaggctaggagcagccaaagctgtccttgtagtaccttcagaggcagttaataagggctggctgacatttatgacttatcttttctgtgtgtttaaccattactatttttccgccagtaaattttcaagctaatgcggcaaaaccaatattgattctgacatttatgctttatattttgaaatttattttgaccattacttattattttattgctgttactttgaaaatattatacattttcattgtataaaatgtcattagaccgtgcaaaaagtttatttcttgtaaataattactttaggagtttgagtgcatctacggttccttctgttattctttctaatcaagagtctgattacataaaacaatcaaaacgtgacttaaagatgttcaaaataattttgatgaacatgttcaaaatttaaaaagtcatctgcattaaaaaattttattaataaagc

SEQ ID NO: 228543 - DNA, 783 bp, Homo sapiens
aaatggttttattgtattatagtaaatgaaatgatatagtaattataggatgcaataggaaaatagcttcgggcagaagtaaagaactcttcctggaattgtctcctgtgctaaattttagtagatgagaagttaggaaagtgtactgtatggcaagcactttccagacaacagaaatagaagaagtaaaaacactgtgaagcaccaaacattatagagagagtgtatttggtaagtatcaagaagctcatgaatagtactagtagtagctttaaattctgattagcatttactatttatcagctaacttttctaagtgctttattattttaaccttcatagagatcccataaagtagataccataattacctaaattcattagttcagggaactgaggcacaaagaggttaagcaacttgccaacaatgtatagcaaatccaaggtttaaaactctggaagtctgaaatcaaagattctgttacaccatacaagctctcaggatgaccagaatataaagaataaagcaaagagtggtgaatgataaggaatgtcagcaggagtttttgttagagctggaaccttaaccagtggtggaggggctcccttgatggggttaaacagaagagtgtcatggtcaagtcacatgtcactgtggttgtcattgtggttgtggttatgtggagggagtgggaagtgataaaaagagaaacacgctaaaaggtaattcagagacaggggcacttatccaagtaaaatatgacaaaaatatagcagagttag

SEQ ID NO: 228544 - DNA, 580 bp, Homo sapiens
tgtgccttcactgtctcttgattcttaatttttctgcggatgatatcgatggttttagatgtctgcacttggctcttacattgtcttaaagcacactttagctattcattcaacatttactgggtatcagttttgtggtgctaggaagaacttactccctccttcaggaaattcccctggcctcagctggcattactgctaaagattataaaatcaatctcttcctcacttgcgtttatttcttcagaagtccagactcatgtacttaacttcctattgatagttggttctggttgtctcatgagtgcctcaagtgactacttagtactgaacttatctccactcctatataaaagcaaaaaaccttccacctattactcttcacatgatcatacatctactgcttcttaattataatatcccccccttatccttaggggatatgttccaggatcctcagtggatccctgaaactcagatagtactgaaccctgtgtatactctgttttaccagtccgacaactgagagggctactaagtgactaacaggtgggtagtatataaagattgaatatgggac

SEQ ID NO: 228545 - DNA, 338 bp, Homo sapiens
actaaggagaattcgtagtttaatctgtttaacaccttctgatttatcagttcttaaagcatcgtgtatatttcttacatgtacatttctaaaaagtaaatacagtctctgtgcatagtcaagctttgtgtatagagtgtcttgagttgttgtccagctacgtatttatataatatttgactgtggaatcacatcagaatatatcacatgctaatattgatattcttgagtagacactaaaatgctttaaagcttcatttttcatctgagaatgaacaaagtaccctgaattctgtttgatgccatgtcaccaaataggtgttattctgatccccata

SEQ ID NO: 228546 - DNA, 343 bp, Homo sapiens
atgagaataccggtttttttaggtggggcatgatggctctgcaatcccagcactttgggaggctgagaggggtggatcacttgaagccaggagtttgagagcagcctggccaacgtagcgaaaccttatctctactaaaaatataaaaatgagccaggtgtggtggcatatgcctgtgatccccatgacttgggaggctgaggcacaagaattgcttgaacccaggaggcggaggttgcaatgagccgagagcgcgccattgcactccagtctgggtgacaggagtgagaccctcaaaaagaaacccgtttttgtgatgtgttgtcattcttcctgagaattc

SEQ ID NO: 228547 - DNA, 528 bp, Homo sapiens
gtctgtggtttcaatccccgtttattctgacttgattataacgtgatctgaaatatttccataatgctgtgataccattttgtagtaatttcattccacgtagaaggatgagcacttaaactctgggactttgttatgatttacataattgtattataaaatgtggctctgtcatgtacctaggccagcaaatttcccaaagagcttgatttataatactattttacctaataacatagcttcattgcacagaatcaagataggagttagactaagatacaatagaacctctacagaattttttcaacttctccttcaatggaaatttctctttaatgacaatatacgtttttgttaatgatttttttaaaactagaattaattttaaatgagccccagattttttctgctatatacatatatccattttcttgatatcgattatggtaatatgcccccattattctttacatagccattttgatgcagcattacctcttttgaacctgccccaggagttattgaatt

SEQ ID NO: 228548 - DNA, 389 bp, Homo sapiens
actccaagttgagacctttcctgtgtgccacaatgccggaacaaactccctccccgagtacgagattccagaagcagaaccgtggacaatttttaaactcagaaagcctcctgtggagttgggactcacagctcacagccacgaaatcactgtccattaactgtttggtttcctgagagcagagattagggatcctcagtcttgcctgtatatcaataccacctgggaccactcagaccaggtgaatcaatgtccctgcaggttgggcccaggtaatggtttattacgtgttctatgtaagtttagggtataaccaagtggttagaattactaactaaatcaaacctctttactgaccaattacattagaatgtaaattctctccaata

SEQ ID NO: 228549 - DNA, 510 bp, Homo sapiens
gccttctcttatccagacttggagcattaaccttcactctcaagatataatcactccccctaccccatttagaggagctctttccactgattctggaaatgttggaatttggaaggcactcagttaatagaatggtagttgaggtgagctatcaacttgggttcaaatcacagcttggccacttaggtagccatgtgaccttaggcaaattacttaaatctctttcgagctcacagttttctcatctgttaaaagaggatgataggctagtgcggcacccgtaatcccagctactcgggaggctgaggcaggggaatagcttgaacccgggaggtggaggttgcagtgagccgagatcacgccactgcactccagcctgggcaacaagagcgaaactcagtctcaaaaaaaaaaaaaagatgatagtggcaataatacaaatttcatgtgaggataaagtatcataaggcatgaaaagtacttggcattgaggctgaaacctactcaata

SEQ ID NO: 228550 - DNA, 445 bp, Homo sapiens
ctgaacattgcaagttatttcacatcctggccacttaacccactaaatgccagcgaccctccccattccaatatgcaccctccccatttccaaacaccctcaggacaccctctctccctttgagaactgttggaattcaattggttagagatcctaatgccaacttttgctgaggacgatcatctggatgaactatgcctctcactaagggaagaggcaagctattgagagagggacacccaatggcaaagttcccatctggaagaatggattgttactggtagctaaaatgtattgggtgcttaccatgtaccaggcagtgttataagctgactctatgagttacttcggttgttgtattcattttacaggtgaggaaaaacgtttaagaaggttataatttgcccaaagtcctaattaataagagagaaaactgatatttaca

SEQ ID NO: 228551 - DNA, 247 bp, Homo sapiens
ttataaatggtgaaaattgtgattcatggcatcttgtgatcttgtgcttttgtcttagctcacacaacaggctggaagcagaactaggactcaaatacacgccctttcattctagatccatagttcttctcattttctcatgtctttttactgtcctgaatagcatatgtagttatcaacctaattaagtcaaagttagatgttacaaatgtagattgtcttttgattaaagctcatgtgacgtgca

SEQ ID NO: 228552 - DNA, 458 bp, Homo sapiens
acagcgaggtccccgtggggcctgaggacagctggactctgctcctggctgcagagtgatgggagctgcgggactccaggagactgtctgcactcttaaaagagccaaattactgcctaagctcatgtcacacctacccggacatcagtctcccagcctcagttgagagcaagattcctgcaagaggagggctggctggccctgtggaaggtgtgcatgagggcatgcatgtataaatgacacagccccatgaaagaaaagctttcccaggcagaaagacactgcactgaggcccatacagcactctgcaagtatagtgctccacctctcttcactcacccggtggaggtgggtccacctttctaacatctagacacacctcctaatagtctctaagttagaaacgtgcttgggaaacaagcatttttttaaaaatcaataaagaaattcacatatta

SEQ ID NO: 228553 - DNA, 390 bp, Homo sapiens
ctttcatggtcactatgtggaattatccttgcctacaagttcatcctactgtcattgattcttctttggatcactctaaataattcccgttctccttagagaattctcaactaggtttttcaagtcatgcaacaacatgccaagggaaatctttgcctgactaatagacttggagtaatgatggttataacctgttgagatttttaaaaagctattgaagagtctagccaacctattggctaaaaactgggtcgtgtggctctgaatggggagagggaactgacagctgccctactctggctatagaatgtccgccattaaggacagatcttatttaacattttacaattgaaaactgtccctggttttcagataatgcttaaaacaaac

SEQ ID NO: 228554 - DNA, 274 bp, Homo sapiens
ataggggatgattttataggtctggatgctttatagcagtggctctcacctgggggtgactttgttccccagaggccatttgacaatgtctggagacatttttggttgtcacaagtgggaggtgggaggtgctcctagcatctagtggggagagaccagggatgctgttagactgcccacagtccacgggacagcctcatcacaagggtttgtccaacccaatgtgtctgtcgtgcccaggttgagaaacctgctttaacagtagtggtagttt

SEQ ID NO: 228555 - DNA, 547 bp, Homo sapiens
ctgtatcttaaagatacattttagctctctgttggattttccaccatgctcacctgccagattctctcactgcttgtaattctgatctttgttatctccaaccttacttgactgcggttgatttgttccaacacctatcttttagtctacgtcacattgctgtctaaacttctttgcgttcttccctttttgctacttaagataaaatctcaacattttttattgcataccggagtcctgttaccttttccatcttcctctgccataaatgcctgtaaaccagtcactttacactttatttaaaaaatacatatatatcaatggagacaaaagaagtaattagtgtgtggcattagagaatgtatcagaagagagaacgtttttaaaagacttaagtgaacagaagaatttatttgaataaagagaaaaatcactgaatttgatagattttgaccatacagaagaaaattttagtagaataatggagatggaatcaatgacctaaaatttgactttgaatgggaataggtaggcagctcaaaggatg

SEQ ID NO: 228556 - DNA, 572 bp, Homo sapiens
gactgcagtgctctctctggagttgagccattagacttctcatcacagagcttcctagctcatctgactttatgcagcctcttgcttgcccctccacccgaagctcattttagtgtaaaggacagagcagcctgctcaatgggaaagcaagcttcaggacttgaaagagggaagggaggtgtctgtaatccaaggagggtctgatcattggatgtcaagttttgtcacacatgcatttctgagaagagagactagttgtgtttatcagattcttaaaaggatgtaaggcctgaaatttaaggagcattgacatagggaaagagaaagtatatccagtaaagcatcagtcacttcccaatgtcctgcatatggtggagcccctgcccggccttaccataccatttcgttctcaaagtactgcagaacagcagctacaaagttgtctcaaagccgatcttgatagattactgtatacatgaatgtgaatttaaataactaactacagtcagtcctctgtacccacgggttctgcatctgcagattcaaccaaccaaggatcaaaagtatccagg

SEQ ID NO: 228557 - DNA, 420 bp, Homo sapiens
ctactatgcatcagatattcttctggctcctgaggatatactggggttttgagacaaacaagatccacagttggggctaatgggagcttccacgtctgtggcacctgaattaggcaatccgttttcttttaattacatctaaatgtattacaaactaaaaaatgtaacaaaaaggaatgaggggtaaaagatgcacagagagaagcgtcctcctgtttgcaagaccccaccctgcatgtgggagagagctgcagctgccaccaagtgacatcactcacctgtgaaggatggcagagtggatagaagagagctgctagtagctgacaatatcatcaagcctcagatttatccaattttgcaaccctatctgtccccaagcttttctttatgtaagataataaacccttattgttaatgttc

SEQ ID NO: 228558 - DNA, 769 bp, Homo sapiens
tgtctcaaaggatgagttgagcttggataggcagtggggagaacacaaggcagtccaggcaggtggaacataagcgaaagggcagtgtgcccaccaggccaaagcaaagggcacatactgtcctgaaataggccacagagatgaggggaaataaaaagccgtctcaaggagatcttgaaagccagggtgagaagcctggagtttgcccctccaggatcctggctctcaatctggataagagtgaggggaagggaagtggaggtggggaggagggcagtgggggtggggagggccaggaactgctgactgggaagattattttctttgtgtattgcttaggtttcgttttacttatttgttttcttgcagctttaacaaacatcagcgctgcatgtggaaacttggaaaagaaaaaaaaagctttaacaaacaaaaacacacatacctgagatgcacacggcaacctactagctcatggcaaacaggcctatatgttgataacctctgcattgcttaggaaataaaacactgcagattcttgagccaggggaagtgcttctatctttgttcttcctttttctcctagtacatataacatctttactctggtctcagaatgtttcttccaaaccttaatggctctccccttctttttccttaatttcttcattccacccctggaataacgttctagtccagactagaaatacaacgtaaataaagactcaatcaatgccaacagtaggaggaggattaccacccagctgtt

SEQ ID NO: 228559 - DNA, 716 bp, Homo sapiens
tgtctcaaaggatgagttgagcttggataggcagtggggagaacacaaggcagtccaggcaggtggaacataagcgaaagggcagtgtgcccaccaggccaaagcaaagggcacatactgtcctgaaataggccacagagatgaggggaaataaaaagccgtctcaaggagatcttgaaagccagggtgagaagcctggagtttgcccctccaggatcctggctctcaatctggataagagtgaggggaagggaagtggaggtggggaggagggcagtgggggtggggagggccaggaactgctgactgggaagattattttctttgtgtattgcttaggtttcgttttacttatttgttttcttgcagctttaacaaacatcagcgctgcatgtggaaacttggaaaagaaaaaaaaagctttaacaaacaaaaacacacatacctgagatgcacacggcaacctactagctcatggcaaacaggcctatatgttgataacctctgcattgcttaggaaatttttctcctagtacatataacatctttactctggtctcagaatgtttcttccaaaccttaatggctctccccttctttttccttaatttcttcattccacccctggaataacgttctagtccagactagaaatacaacgtaaataaagactcaatcaatgccaacagtaggaggaggattaccacccagctgtt

SEQ ID NO: 228560 - DNA, 558 bp, Homo sapiens
gaatttaaatataatgattggttttgaaaaatttatacctctgttatatatatatatatcttattttggtattgcttgaatcattgtgttgtaggcagatagattcttttttgagatttgtcttacttaacatttttaaataaaaagaattttaaaggtgtaagagacctaagacgtcatttacttgctgttctgattaaaacaaaaatgtttatgtataaaaagggttgcccttgccgggcaactaccgtttcttactcttttaaaattttatttgtttatttatttattatagttttagagttagggtcttgccgtgttacccaggctgatcttgaattcctggcttcaagcagtcctcctgcccagcctcccaggtggctgagattacaggtgcacgccactgtgctcagcttattctctacttgtaatataagaaaaattatccttttctgctgcttccactgaagctgaaattgatcagttttttgggggagtgggtttttttttgtttttgtttagttttttaatcactcagttcaagtgcctgtgacagtg

SEQ ID NO: 228561 - DNA, 621 bp, Homo sapiens
aggctgaataatggccccccaggatgtccacattctaatccctggaacctgtccatgttttattatatggcaaaagagactttgtagatgtgattaaattaaggctcttgagattgggagattatcctggattatcagagtaggcttgatgtaatcacaagagtccttctaagagaaaagcaggatgcagccccctgatgacagaagcagagaggaaagcagagttggagacagaagacgctatgctattggcttcctaaagacagaggaaagggccacaaaccaaagaatacacttgtattcttcagtaaatagcagctgccttggagtgttgcttgattcaatacatgtaatagtaatcgttcaataaatgcttgctattatacccttggatgtcttagagctgcactgtccaatatggtagccacaagccacatgtgaccattcgacacaggtgtggattttccgaattgaggtatgctgtatgtgtaaaataacacaccaaaattcagatactgagtacaaaacaaagaatgtaaaatagctcagtaatcttaatattaattatttgttgaaataacatttttaacacatccaattaaataaaatatattaaaatta

SEQ ID NO: 228562 - DNA, 308 bp, Homo sapiens
gctacaaaattgattcatattgtgaagaaatgggctctaccatgtttccttcatgagcagtgtgtattctatatgaatctactcccagtgcaaggaacactagtcaatttttggcatgagatgagaacctcagaattgctgcagccatcttgctaccaaggcagaacaaatgagaaagtcagtatgctaaggaaggcagctgaggaaggaagaaaaatcttgggttcctgttgacattgctctgtccctgaaatcttctacctctgaatttcttgttatgaggcaataaacactccaattctttatct

SEQ ID NO: 228563 - DNA, 349 bp, Homo sapiens
gctttctctccagcctggaatatgaagttcaatttagcacatgattgtggatactccatttcagaattaaatgaagatgacaggaggaaagtagaagagatcaaggcagagttatttggtcatggaagaacaactgacttgtccaaggtataaaagaaatctggaaatgaagaaagtaaatatgaaagaatgggtgatggaattaggatctcttacttgggcatcagttgagttgctgataatatttggctaaagccttttttggttttgtttttgagacagtcttgctctgttgcccaggctgaagtgcagcagtgcaatcacaggtcactgcagccctgaactctta

SEQ ID NO: 228564 - DNA, 2033 bp, Homo sapiens
gatactccatttcagaattaaatgaagatgacaggaggaaagtagaagagatcaaggcagagttatttggtcatggaagaacaactgacttgtccaagggtttacagagtccacggggaatgggatgcaagccagaagctgtatgtagtcacattattattgagagccatgaaaagggatgtttccggactctaacttctgaacatccacaactagatagacacccttgtgctttcagatctgctggaccctcagaaatgaccagaggacggcagaacccatcatcatgcagagccaagcatgtcaacctttctgcatccttagaccagaacaactcccatttcaaagtttggaattccttgcagttaaaaagtcattccccatttcagaactttatacctgatgaattcaaaatcagcaaaggtcttcgaatgccattcgatgaaaagatggacccttggctgtcagaattagtagaacctgcttttgtgccacctaaagaagtggattttcattcttcatcacaaatgccgtccccagaacccatgaaaaagtttactacctccatcactttttcatctcaccgacattctaaatgcatttccaattcctctgttgttaaggttggtgttactgaaggtagccagtgtactggagcatctgtgggggtatttaattctcatttcactgaagaacaaaatcctcccagagatcttaaacagaaaacctcttccccttcatcatttaaaatgcatagtaattcacaagataaagaagtgactattttagcagaaggtagaaggcaaagccaaaaattacctgttgattttgagcgttcttttcaagaagaaaaacccttagaaagatcagattttacaggcagtcattctgagcccagtaccagggcaaattgtagcaatttcaaggaaattcagatttctgataaccatacccttattagcatgggcagaccaagttccaccctaggagtaaacagatcgagttccagactaggagtaaaagagaagaatgtaactataactccagatcttccttcttgcatttttcttgaacaacgagagctctttgaacaaagcaaagccccacgtgcagatgaccatgtgaggaaacaccattctccctctcctcaacatcaggattatgtagctccagaccttccttcttgcatttttcttgaacaacgagaactctttgaacagtgcaaagccccatatgtagatcatcaaatgagagaaaaccattctccccttcctcaaggtcaggattctatagcttcagaccttccgtctcccatttctcttgaacaatgccaaagcaaagcgccaggtgtagatgaccaaatgaataaacaccattttccccttcctcaaggtcaggattgtgtagtggaaaagaataatcaacataagcctaaatcacacatttctaatataaatgttgaagccaagttcaatactgtggtctcccagtcagccccaaatcactgtacattagcagcatctgcatctactcctccttcaaatagaaaagcactttcttgtgttcatataactctttgtcccaagacttcttccaagttggatagtggaactttagatgaaagattccattcattggatgctgcttctaaagcgaggatgaatagtgagtttaactttgacttacatactgtatcttcgagatcactggaaccaacctccaaattattgaccagtaaacctgtagcacaggatcaagaatctttaggttttctaggacctaaatcttcactggatttccaagtcgtacagccttctcttccagacagtaacactattactcaggacttgaaaaccataccttctcagaatagccagatagtaacctccaggcaaatacaagtgaacatttcagatttcgaaggacattccaatccagaggggaccccagtatttgcagatcggtgagtctcattgtgataacaagcaagctggatggactttgtaataaagggtttcaaatacttaagtaga

SEQ ID NO: 228565 - DNA, 241 bp, Homo sapiens
gacacacatccaggacttggaagactagaagactgaactggggtctacctgatgccaccacctttgctcttacaaaattaactgtaagtatgtaggacttcagcagggaggaggttatccgagtgagagcctggcgttagcattagtcatctgtagaaatcactatatccaggagggtgggataactggaattgttggtccatcaaatacaatttttgataaacaatcagtatcaaaacat

SEQ ID NO: 228566 - DNA, 865 bp, Homo sapiens
  misc_feature (801)..(801): n is a, c, g, or t
  misc_feature (804)..(805): n is a, c, g, or t
ggaccaccggctcgcggcgcgtggaggctgctcccagccgcgcgcgagtcagactcgggtgggggtcccgccgcctttgccgcccgcgcagcccggggccgagggcggcggggaccgcgggttgggagaccggccggcgcccaaggacaaatggagcaacttcgaccccaccggcctggagcgcgccgccaaggcggcgcgcgagctggagcactcgcgttatgccaaggacgccctgaatctggcacagatgcaggagcagacgctgcagttggagcaacagtccaagctcaaagagtatgaggccgccgtggagcagctcaagagcgagcagatccgggcgcaggctgaggagaggaggaagaccctgagcgaggagacccggcagcaccaggccagggcccagtatcaagacaagctggcccggcagcgctacgaggaccaactgaagcagcagcaacttctcaatgaggagaatttacggaagcaggaggagtccgtgcagaagcaggaagccatgcggcgagccaccgtggagcgggagatggagctgcggcacaagaatgagatgctgcgagtggaggccgaggcccgggcgcgcgccaaggccgagcgggagaatgcagacatcatccgcgagcagatccgcctgaaggcggccgagcaccgtcagaccgtcttggagtccatcaggacggctggcacccttgtttggggaaggattccgtgcctttgtgaccgactgggacaaagtgacagccacggtggctgggtgacgctgctggtgtgggggtctactcngcnngaatgcacgcttgtccctggacgctcctcgaggctggctgggcaagccgcctactgcagg

SEQ ID NO: 228567 - DNA, 978 bp, Homo sapiens
  misc_feature (143)..(143): n is a, c, g, or t
ggaccaccggctcgcggcgcgtggaggctgctcccagccgcgcgcgagtcagactcgggtgggggtcccggcggcggtagcggcggcggcggtgcgagcatgtcgtggctcttcggcattaacaagggccccaagggtgaagncgcggggcctgccgccgcctttgccgcccgcgcagcccggggccgagggcggcggggaccgcgggttgggagaccggccggcgcccaaggacaaatggagcaacttcgaccccaccggcctggagcgcgccgccaaggcggcgcgcgagctggagcactcgcgttatgccaaggacgccctgaatctggcacagatgcaggagcagacgctgcagttggagcaacagtccaagctcaaagagtatgaggccgccgtggagcagctcaagagcgagcagatccgggcgcaggctgaggagaggaggaagaccctgagcgaggagacccggcagcaccaggccagggcccagtatcaagacaagctggcccggcagcgctacgaggaccaactgaagcagcagcaacttctcaatgaggagaatttacggaagcaggaggagtccgtgcagaagcaggaagccatgcggcgagccaccgtggagcgggagatggagctgcggcacaagaatgagatgctgcgagtggaggccgaggcccgggcgcgcgccaaggccgagcgggagaatgcagacatcatccgcgagcagatccgcctgaaggcggccgagcaccgtcagaccgtcttggagtccatcaggacggctggcacccttgtttggggaaggattccgtgcctttgtgaccgactgggacaaagtgacagccacggtaaacatattcataaaacagggctggcaggtggctgaaaggcagcattttcggaggcggaggtgggcggatcacgaggtccggagatcgagatcatcctggtaagagtgaaaccctgtttctacta

SEQ ID NO: 228568 - DNA, 371 bp, Homo sapiens
tagtctaaaaattgttctcttaagattggaagtatgtaggctgggagggtaaataccaaatcttggtatatcagaactgagcatgtcccttgaaggttaagaaatagttaatgggcaaatagagcatggcaatattttgtagagcagcaagtagtaggccttgaatagatgtcgctcaaaaagtaatatgtaagctgaacacaaaaatgtaacaaatgaatttagatacatatttgaatattaaattcaggttgtttgggagatgcacctagtctttgatggttaaacctttccctccatagaagagacagagacagaatggcttgctggactaatgtcccaattcaatagagtcttatctatgaaggtta

SEQ ID NO: 228569 - DNA, 502 bp, Homo sapiens
ttagttgattccttatcagttgacctggtcgcacctttaatttaattgatattattattacgtttgccttgcaagttctcagatatctccaaccttttgtgttgtcattcatcgactacgggaatattctcaatgaaatgtccttgatggtctctctggttcttattctagtcatgaaaaggaaaagacaaaaagatagcaaatcttaaaactagtcatcggccgggtgtggtggctcacgcctgtaatcccagcactttgggaggccgaggcgggtggatcacgaggtcaggagatcgagaccatcctggctaacacagtgaaaccccgtctctactaaaaatacaaaaaattagccgggcgtggtggcgggcgcctgtagtcccagctacttgagaggctgaggcaggagaatggcgtgaacccgggaggcggagcttgcagtgagccgagatcgcgccactgcactccagcctgggcgacagagccagaggctgtctca

SEQ ID NO: 228570 - DNA, 266 bp, Homo sapiens
ttcaaaatcaggcaaaattaatctatagcggtaaagttgggattctgtttatgcttttacccgtggtgggggcgggatgctggaagggaacacaaggggagaatttctggggggctggtaattctgcttcatggtgccttttgaatggacatgttcactgtgaaaattaacaagcagtacacttacgatttgtacactgacttttctatatatgtgtcatacttcagtaagaacttctttcaaaaataaaagtattactcccccta

SEQ ID NO: 228571 - DNA, 512 bp, Homo sapiens
  misc_feature (73)..(73): n is a, c, g, or t
gcggagccaatcttgtgtgctttacgatacagacaccgcggcttcaattaatcttccgccgaatgtcgcgtcnattgtcacggctaccattttcacaaaggacagcaatccctgattccccaagatcactacgacccatttaaggaaagctggacgccctcagaacctggtcagaattccagggtagaccactatcaactattaaattcgcggcccgcgtcgacgaattgacttggcttagttgggtaattgccacttgagtacactcatgaatttatatagttaaatgcaagctgctggggctggagtcatctgaaagttcaaatgggttggacattcgaggtaacttcctcacttacatgtttggacccagctggaagaactgggacattgaggttggccaagcatctcttttcctccatgtggcttttccatgtggccacatgaggtttcctcacagcatggcagtcttgtgttaatcttcatattgttgctgtcttccccgtcgacgc

SEQ ID NO: 228572 - DNA, 603 bp, Homo sapiens
ggaaacgtctggtcctcccagcaaccatgtgcggtagaaagggcaagctcactgtccctagttggtaggtgaggacacagatgctccttgacttaggatgaggttggatccccataaacccattggaagctgaaaataggatatcctaagttgagaatgcatttaatatacctaacctgccgaacctaaccggacctcatgtaggtggaatcatacggtatttatggtcattttgtgactggcttatttcacttagcataaagtcctcaaggttcactcctgttgtatgtagcatgggtcatagcttagctgagcctcccttaaacgtgctgagaacacattagcctacagttgggtaaagctgtctaacacaaagcctataatgaagtattgaatatctcatgtagtttattgaataccgaaaatgaaaaagagaatggttgtatgggtacttgaggcacagtttctcccaagtgcatattgcttttgcatcatcataaagttgaaaaatcttgaatcaaaccactggactttggggactgtctgtactgaggctcaggaaggtaaagtgacttgtccaggtggcccagccaggaagtggca

SEQ ID NO: 228573 - DNA, 490 bp, Homo sapiens
atggtggtaagtatttttaagtgaaaacagaaatggtacagtaaaaacatagtggtatgatcttatgggactactgttgtatatgcagtccctcattgaccaaaatatcattatcattactatgtgttagcagtaagttaatgacagagttaggatttgagcccatgtttacctgatatcatgatgtgtatttctcacattcagacttgccccttctgtaaggaggcatatcctttctttacattatttttgctcctgacagtattcaagcatcattccctttcagtaaatacatgttcaacagatattataaataaaaaccccagagtcagtgcctccatggccagtaaagaagaaaccacgcattatcagtgcttagaacactgccttttctagctactgaaccatgaagccatttaaacttcctattaaaatcaattattttcttttgtaacagaagtaattgttgatctagctgagtctaggaatg

SEQ ID NO: 228574 - DNA, 482 bp, Homo sapiens
ggggaggacgggattaacccgttataatagctaatatttatataacactgtggggcaggtggtattgtgagtgctttcacatattcattcagtctttatcacaaccccaggaagcgggtactattattactgtcactttacagatgaggcaactaaggcagagagaggttaagtaacttgccgaggtcacacagctaagaagtgacagtgaggatttgcacccagtccatcaactctaggccctgtgcttttcaacagtcagggaacgcggcaggagggcactgagtcctctaaacggccttagtcatgggaagcagagatgagtttgctctgtagataattcggtatgctctggacacctcagattatggggagaatgacagttgggagtaggttacatatttttgagaatttgtgagattatgtctaagtcatagcagaagaagatatagtatttcttcactcttaatgttgaaggcaaa

SEQ ID NO: 228575 - DNA, 344 bp, Homo sapiens
tggatctttaggacacaacgcagtgagtgccagacaagcccttctcagatgggtgtgcacgttgttaagtgagcaggactggagccacccagcggcggccaccagtcacctgcagctaggcaatgcgcatttaaatcgattacaatcccatcctgttaaggatcaggcactcgggtgtcatggcggctggtggctccatttggacagtgcgggcatgggtcacttcccgttcatcacagaaagttccagcagacggtgctgcacaagggtctcaactgcactgtcccttcaggaagccatgtgtcgcttacatttaagttaaaattaaagttcagaattcagat

SEQ ID NO: 228576 - DNA, 460 bp, Homo sapiens
gctgctttggctgcagtttgggaggattcaggtctcttccatgagattccacagttttctgggattagcagtaacctggcaaatgttctcatggcatattatgggagcacaaaagccaagtgcatttaaggcccttgctgaagttagatgtgctgaaattccattaagtaaatcatatggtcaaactcatcaatggagcagggaaatatactccccctccagtgggagggagaggagtggatatttgctgaatgactgcccattcacaaaaggttaatttttccgtcaccctagcactatccacagagtgttctgctccttatagtcataaagcagcccccaggccaggaacaatggttcatgcctgtcatccgagcactttgggaggctgaagcaggaggaacgcttgagcccaggagtttgagaccagcctggcaacatggtggaaaccccatctcta

SEQ ID NO: 228577 - DNA, 474 bp, Homo sapiens
tcctggccaccaagatatgctgtgtggatatgaagtttcatttcatatcagaagaacatggctggcaataaacatttaaaaatatgtttcatctcaacaatacccaggacatgcaaattgaaacctaaatgaagtaccttttcactttcattgggtgggcaaaattcttctaatttgacaatattgagtgtcacaagaatgtggaacagtagaaattctgtgccactggaggtcgtgtgaaccaatatgatatctctgtaaataatttggcattatccagtaaagctgaagataagcaactagcagttgcactcctacccatgtatcctagaaaagctcttgagcatgtacaccaagagatgtgaatgagaatccccacagctgtgccacttgaactagcagaagtctacaaatagcccagctgtctatccacggtggaatgggtaaataaactgatatgttcgtgggacagaa

SEQ ID NO: 228578 - DNA, 526 bp, Homo sapiens
aggctgctgggtgggaggctgatcactcagccatcagagcgtcctgtgtctctgagccgtgcaccccattgtggcatggcactggttgctggacattcttctgcgggcccactcacacatctgcctgcctgcggcctgtctgtgtttgtcttactcatgctcttggagccgtagcgaatgtgtctaatattccttccacgtggtagattgaaacttcaccaaaatagccctgtgcgcctactttgctcctgaacatctctgatttctccggctgtccctgtgtggagttctggcagatctcaccagtctacatgacctattggaaatgccagtgggtcattgtggcattcagacacataattcaaaactgcaaatggtgggaccgcactaaagaatttttagtaattaaagtacaggaggctgaggtgggaggatcacttcagcccaggaggtcaggtcaaggcttcagtgagccatggttgcaccactacactgtagcctgggtgacaaagtgagaccctgtctc

SEQ ID NO: 228579 - DNA, 121 bp, Homo sapiens
ggtgcttttttcctgcgctctcacacacctctgtctcctgccaccatgtgagacagtccatgcttgcttccccttcacgatgattgtgagtttcctgaggcctcccctaccttgtggaact

SEQ ID NO: 228580 - DNA, 377 bp, Homo sapiens
aacctgtggtatgctgagaaagcctggtgaaattgtactcagccttcacacctcaggttagatgtcatttcctatgagaagcccgcctcgttcaggacgtccatgatctctcacagccttctgtgttccctcctcaacacggtgttttatagctttttaaaaaattctgtgatcatattatgctcagcaaacagagagagactattcttgttccctgtgcctaggatgtgcttgatgtatggatctgtctccagcgggaccagaaaaccatatgtggcaatacttataaactgcctctagctatatagattaatacagaatcatctttctgtatgagttttccaccaataaacatgtgtagatataagcaaagcttt

SEQ ID NO: 228581 - DNA, 4120 bp, Homo sapiens
  misc_feature (1936)..(1936): n is a, c, g, or t
  misc_feature (2557)..(2557): n is a, c, g, or t
  misc_feature (2643)..(2643): n is a, c, g, or t
  misc_feature (3098)..(3098): n is a, c, g, or t
  misc_feature (3307)..(3307): n is a, c, g, or t
  misc_feature (3572)..(3572): n is a, c, g, or t
  misc_feature (3704)..(3704): n is a, c, g, or t
aaacaactatgatgctaattaggaggaggaagaatgttttcaaagtctttcaccaggtatcgatattcatctcaaagagtttgaacaacagattcaattctgtgtagggaccatttcttcatttattctttattcctactaaatcagaaataccaaattcataagtcatttggaagggtaacaaatgttcgatggtttgtcaactagtcttgacaaacggattctacaatgtacagaaattatggagacagttttcactgatagatgttcagtgcctcaaaggaaactcattaagatgagggaatggcctctcaaatggaacaggattgctgaatatatcaacacaaaagatcactagcaaatggattcctaatgaattcctggttgaatttgcctccgataattatgtattcatattcagtttgagcattcagatgtgttaaatatggccaataatagcactgatttatttcctcctttaatttagaatatctttaagtagttagaaggaaacccttgttaactaatccattgacatcaaaatttaactttttaaggaacttttgctgtctctcactaaatattagaaatgatgatatgttgttcgtgaagtcataaagtcaggcttctccactctctgtttgatttttatgtgtatgtgctgctcataaaaatcatcacactggtagagattcttgttctcacaatgcagattcacagtgtattttctccctgaaaacttgttattttctttggaacctttatgccaaatgatatataatttgcagtactattttcatgtctttctacttttacatctccgatggattaatgttgcagcattaattcattttgtgtgagttggtactctaaaatacaataaggcagacagctttaaacccatgtgatgtttaatatcctacaaagaccaaagagtcatagtggatatttccctcaatctaaaaataagggaaaatactaataagcaaattatataaaaatgaatctgcttaaatagacagcaccctgtttgccagatgttacctgagacaaccaatccatatatcccatgtatgtgagatgtttaaaaatgtaagaattactaaggacatgataaatttttatgagaatcataattaatcatatagttcaaatttcatggtgcctgtctattgccaacccctagtttttcacaggtttcacattggaaagcaatgggttgtcctttggcttattttattttagtaattaactgtcctttaaaaacaataaaactttcagccttcagtgactttgataacctatgtgataaagtcagaactcattagcctgatattcaaggtcttcccagagaggctccatcttacctgctctgacttctgtcttatacctgctgatccacctggggtgtctgctgaaagcaggtcagcacaatgactcagattcttccctttctttccctctcccatgccccaggatttgtttgtacaactggcccaggaatcctgacttcatttattctctatgggttaacccaggttcttgcttgtgaatggaaacaggataatggagctaaacctaaatggcattttctaaccatgtcttcattattcattctctgaaccatcctctctaatcagtttttactgatttcttccccaaatatgcatttgctttctcatttcaacttatatttacactgttctattcatcagaaatgtccctgtcttgtctgcctcgtcaaattcttcaactcccaactcctgtcttacttcctatataaaatcttattaggttaccttagctgaactatcttcttctttctggaattcctattgcaattacttttgttgtaattatttaggcagtggtttctttgatatcatttactgtgttttctggcaattgcactgaaattgtatactgctcttcaatnaatgattatctatttccccaaactagattttaagcaccttgaggacaaatattgcctcatatgcctgtatttctgttccaggtctttggcatactgttaataatgaacaaatattatattacagtaaaactgtatcccaagattttctcagactcatctaaaatataggcaagaacttaataacactaatatgcctgttcaatgaagcattctattcaaaatgttttattaattctttacagcttcctcagcatctgattggaatcagtggcattttaatttatatgtctatttaacaaatactaatatagtgtgcactgtgtgttactcattttctatgcactttacaaataataattttatttaactttcaagacaaccatctgaaataggtgctattattatccctgttttatgtatgaggaaatggatttactgagaagtaactcagccaaggtgatggaattagttactaataggttcaggatttgaacctacatttttaaccactgtgctctaggaacttagttaacagctttaatgaatgaaatggttctgctaattgatgtaagaaactacttacatgttttgttggctaggtcacctgtcactctcagttcngaatctttcaggaaatgtcctttagtctctggtgggaggtgtactgcaactaaccgtcctttgaatttatgttgccatgtacagtncctgtaattttatttcctctttctatctttacttttgggatctaagcttccttgaatgtttagcctttttgtctttttagaaaatattgttccctttatgaatatgtctcttaattgctagagtttcctaatagccaaatgaaaattacattttggcttagaaaatgctttcatctgtatccactggctatatatctgcaaccaaagtaaagtgtggaattgggtatttgttgtttgcagcatttgagcagtgtacacatcaaatgtggttaattctattaccagtaatatttctagtttcttctaaaattaccataaaggtttaggtctagattagataattatttccaatcaatctcctttcaagttggaaatgaatgaagtcccatgttttctgtgtgctatttcatatattttggcatgataattattaatagcaatgtattactattgcncttttgcttacttaaaagtatattttgcagtggtttattttattctaggtgggagaataacacgttgatatcttcttgaaataaaaattatatgtcaatgaatgtgacaatgttctatgtaagtagcaatcgaggaatgactgaaaagggattattaaatatttcaatgcatgggaaaatatttcttctacctatttactgcctaaagnaaatgctaacccagaagatatttatgtcttggtttagaaatctgtagagtgacagagcaatctgagctctgtaatgtatgcaaaatttatcaggctcagagagacatgagtatgggactttggccacataccatacctgtgcccagggacaactgttaggaaacattttgttccagactagttgtgtcacctattatcttcatgttcctggaatttgtgatacaaagaacaatgtatagccaatcgatagcttatgtatttgaangtatattcttggtaaacaacttaggaactgcctcttgtttttttcctaaaaaaagccacttgtaatggctggtagttggagtgtataatcagagcaacttgaatctacgctcctgagtggccatcttcaacnatcaccctggaataaactctttttaaactagaaaacaaaaacaaaggaaacaacaaaaaagaagaaatctatagagtgaactatatttttccaccttgcaaatagaaggggcaaaaatcaaccttgcctatctgatgatttagtgtcatagggattccaaaatgttatttgtaacgtgtaccttgatatgctaatggtgaaatctcctgtttcttgatttggtcttctcatcttacatttcttacctcaaatccattctgcgacttcaccagcagattaatattctttcctggtctcttggaattttaataaaaacagcatggtcatggggtttcatgaagcttgcagccctctgggggatgcagataataatcaatcaatctcataattaaatgtaattttaaataagagcttac

SEQ ID NO: 228582 - DNA, 713 bp, Homo sapiens
  misc_feature (306)..(306): n is a, c, g, or t
  misc_feature (362)..(362): n is a, c, g, or t
ggatgctgatgatataacaggtatgcattttctctcagaagactctttggaacataacccataggactcttccttccttccttccttctttatcctcatcgtcactggaatcactgacctgcacagttatgtcagtgctagttacaggggtccagtcaaaataaactccaaagccaatgtcatagtcatcggtcgcaaactcccagcagacacgcttcccctctggatgagtaggtacccggatggtcaccacctcaccacgcttcaccaccagacggctgttcttctctttgcccagcttgcttntgaattccttcaccttggcaaaggtccagatgcatggaggagccatcagaggtggngagactttcctgtggtcccccagaagatctgcagattccaaatcagctgaaagaacatctatagctcctgtatgttcagactggatcataacgatgtccccagacctctgtggaacttgatacttagccatctcattgaggacctgggcctggtctgcaggcagcaaatcctgtttcaccaaggcctgagcctccaaaggaccagttgctttccgcagatcttccgtggcatccttactcactggagataccatctgtggcctgtggggtgaggagcagggttctggatcggtggcagaagccaataaagagtatccttgttttctagatcttcattctctgaggcggccg

SEQ ID NO: 228583 - DNA, 557 bp, Homo sapiens
ttattgtaattgtatttatagatatcatcaaattgctctactcagaggctttccagtttatagtcaccagcaacataagaaagtacccatttccccatctctctgatagtgtgatttttactaaaccaagagttgaaaatggtatttcagctgggcatggtggctcatgcctgcaatcctggcactttgggaggccaaggtgggtggatcgcttgagcacaggagtttgagaccagcctgggcaacatggcgaaaccccatctccacgaaaaaaaaatttaaaaaatggccaggcattgtggtgtgcacctgtagccccagctactccggagactgaggtaggaggatcacttgagcccaggaggccgaggctgcagagaatcaagattgtgccagtgcattccagcctgggcaacggagcaagatcctgtttctaaaatatatatatataaataaaaattagcatgtgatatgtctttctatatatttaaattatcttttgtatctcttagaatttgaaagtttaattcataaatatgtttcaagtatctcattaa

SEQ ID NO: 228584 - DNA, 379 bp, Homo sapiens
cctggcacagagtagtagggggcaaaaagacttgagctggaccctgaggacgtcttcacagcatagaagcgtgagggtggctggctggagccgggagcctgagctgcacacagtcctcctccaaaagggcctggggagtctgggaggggttcatccacagaagcatccacgggccgggacctctggccagctgcctaggccctccctggggaggcatgctagcctccagctccagccccggatgcacggaggctttcccaaggtgctggaagtgccgcttccttcaatagagcctggcttccccttcccagcccccttggtctgatgtgaatggacacttcctgcgggggcaggtatcaataaacacatctgagatgcc

SEQ ID NO: 228585 - DNA, 568 bp, Homo sapiens
agctctttcagcctcccacaaaggtgcagggcaactgtcagggttgccagttccttccgcatggtggtgacgacctcgctggccagactctgcagtgtctgagtctccacatccaccccgcatccccaggagcaggcacagactcataaatttggcagaaaagaatattgtgaaatccttgcagctgggatttcaggaaaagtcagaagagtaagtgctgcattgtctggtgtcagccaccaagagggaatgggaatggtgatgaggaacgctgtgtgggtctaatgaactcctcactgtgggcgcttctgagaattttgacttcccagatctttgtgctgttgttacaaaagcagcagaccgtgcatcaacagagaaattccgcagctgtacagtcaactttatgatctttcaagtcaagaatcagaccagggtgaggggaagctgtatctgatcaactgctcactgacagaagaattgattgagactggaagtaaaaggaaaaaaaaaaatgcaactagagtagccccagcctgctagctgttaagaaagaaaatggggattaaaa

SEQ ID NO: 228586 - DNA, 215 bp, Homo sapiens
agcacccaaattgcaaaaccgagaccaacaagggctgctgtatctgaaaggatgactctgactaaaaaaagctttatcttttcaggataaatacaaattgcttattttttactttgaatctcccatttaaattgtcattctcaaatagtaatgattttaaatttttcaaaaataattttagatcactcataattaaaatgggatttacagatgga

SEQ ID NO: 228587 - DNA, 496 bp, Homo sapiens
ggtggatgctgccgtgtttgtgaccaggacagatttctgtgtacacaaggatgaaccgtgtgacactgttggaattgcttacttaggaggtgtgtgcagtgctaagaggaagtgtgtgcttgccgaagacaatggtctcaatttggcctttaccatcgcccatgagctgggccacaacactccgcaagaaacagatactgaagacttggagtggctgtagacttccctaaaactgaggaattgctctccacgtacacatgatttttgctacgcactgttagcagcaagttcctcctcgacacctggagggttgactgttagcctggggttttcatcttcaggagcttttagccatctttccatttcctgccctgtcccagccctgtgtctgcagcaccattagatgaattactctctaggctcagaagcagaaagcatattcttattctcaccaaatcgccctgtttccttcaacaaagttccatgataactgaca

SEQ ID NO: 228588 - DNA, 405 bp, Homo sapiens
ggtgggggaagcttcagaacctaatgctgtggtgtgacccaggccctgccacctactagaatgttaccttgaacatactattttgtctctttggtcctcagtttcctcatctataaactaataattggaggtaaatcatagagtagttttttgtagtttgaagaggtgatgtgaccctttcaatttctaacacaagttagaaactattgagatccaaagaagtcaggcagatagagataaaaatattaggcaggaagatgtgactttggtgtaggcaaaagtgggcttttaaaatccacccttgagaaccatggtgaggagacatactggacaaccacaagacttgtcctagagggcttatctctcctcacagcttggcacagaccagtacacatctgacactga

SEQ ID NO: 228589 - DNA, 351 bp, Homo sapiens
ggtgggggaagcttcagaacctaatgctgtggtgtgacccaggccctgccacctactagaatgttaccttgaacatactattttgtctctttggtcctcagtttcctcatctataaactaataattggaggtaaatcatagagtagttttttgtagtttgaagaggtgatgtgaccctttcaatttctaacacaagttagaaactattgagatccaaagaagtcaggcagatagagataaaaatattaggcaggaagatgtgactttggtgtaggcaaaagtgggctttttgtcctagagggcttatctctcctcacagcttggcacagaccagtacacatctgacactga

SEQ ID NO: 228590 - DNA, 325 bp, Homo sapiens
ctagcgcccttatgttctggtaggctcctggcaggagccaaaaagaagaaataacatgtgacaattagtccaaaccaatccttaagtatcctgcatcatgtgcgtcgttcagccctgaggactcagaatctccaaatatgtgtgtatatctttgccacaaagaggaatgcagaaggatctaagctcagatcatattaatgttcctgatcctaatgggaggctggaactatgcagggggatgcagaatgtccttgagtgactctgtcttcaagtaagaaaatccccaatgcatgagacctgagactcaaaatcagttctctggact

SEQ ID NO: 228591 - DNA, 169 bp, Homo sapiens
gtggcggtccggcagaagatatctgaagatcacctttcataactaaaagtctttatacacagaatctctatttcctcacttccaattcattccttcaaccaagacagttcagctttcactacaacacaccatggcaagtacttgtcatggtcaccaatgacttccatgt

SEQ ID NO: 228592 - DNA, 729 bp, Homo sapiens
gccgctcagcgtcccccacaccacagacccgcgccgccgacgacccagcagccgccatggctctgctccgaggtgtgtttgtagttgctgctaagcgaacgccctttggagcttacggaggccttctgaaagacttcactgctactgacttgctgaattgctgcaaggttatgggcaatgtcctgcagagttcttcagatgctatatatttggcaaggcatgttggtttgcgtgtgggaatcccaaaggagaccccagctctcacgattaataggctctgtggttctggttttcagtccattgtgaatggatgtcaggaaatttgtgttaaagaagctgaagttgttttatgtggaggaaccgaaagcatgagccaagctccctactgtgtcagaaatgtgcgttttggaaccaagcttggatcagatatcaagctggaagattctttatgggtatcattaacagatcagcatgtccagctccccatggcaatgactgcagagaatcttgctgtaaaacacaaaataagcagagaagaatgtgacaaatatgccctgcagtcacagcagagatggaaagctgctaatgatgcttgctactttaaatgatgaaatggcaccaaattgagtggagacgaaggggtacagaaacttccttcagattcaagaaagattgaactgtactgcaggggcatcggtggagctgatgggcctgagccttatcatctag

SEQ ID NO: 228593 - DNA, 847 bp, Homo sapiens
tttttttaaaccagcaattggccaaatttggggaatattctttttgatatgtgccaaaaataaacagaaggggtaatttttcccccttgaggacttagattcaaatgatactgtttttagtcttgtttgttattgaatccttggataaaacagtatgattacctctagaatttaaagtcttcatttaatgaataggctgtttcaggtctttgaaagtatcgtctttttttaattcaaagtgcattttaatatagaaacagtttaaaagtagctggccaaaacctagcttatatacagcttccacatatattgtcatatattatcttacttaagacatgctatagctgagataaatagtaataacagcagctaggtgctgtgttcttagcagcactacctgagagctttagacctggtggtagagtgatagcaactggcagctgcctggtcccattgtgcctctagagatggctcctctggcagcagagagttccagttagcaagacaggatgcctgccagtgggcatacagctgggtaggaggaagcctgaggggcaagagaactgagcagcatccacagtgggtatggagagatggtagaagtgattcacaaatcagggatttcaagaaagaaaataagctggaaagggtttagaaaacatttcgaatgaactcactgagcagagataatagctttcatataaagataaactaagtaattacaattctttaacccagaaaaatgaagctaacaatatggtaaaagttaaaatcatgaatgaaaagaatacatatgatgaatctaatatgtaaattttttaaatggatcggtgtaatagaaaataaa

SEQ ID NO: 228594 - DNA, 643 bp, Homo sapiens
atgactttcattcacaaggatcacaatcaagagtttaaagacaaccggtctctgctccagccacacaggacttcttctagtacctttactacatcatgcctcccctgcctcaggcttctgctgggatggatcgagcacattcaccctaaaattctgattcagaagatctgagccttctgaaaaaaaagcattgagagcataaaccactcagaagatttatagcttaaagcagatcaccttaaggtactggaatcagtcagtgcttagatggaacattttttgaggcctacatcttcactgagtgcccttcttctctatttcctatacttccttgtttctttctgttcccactgcatcccttatggatttgtacaaataatgctgggttcttttcttcacccacatgcagcagttgctgctggatcataaccattccttctattggttttaaaatctgtttttctcagattccttacacttgaaggaaaaaaaaaaaggacatttagcctgtttttcttttaagcaataaaaattcttctctcactgtattgattattctcaatgtggggctaaattatgcaaattctgattcttttcctctttgcaaaaattaagaagcaataatatcaagttagtataccat

SEQ ID NO: 228595 - DNA, 588 bp, Homo sapiens
atgactttcattcacaaggatcacaatcaagagtttaaagacaaccggtctctgctccagccacacaggacttcttctagtacctttactacatcatgcctcccctgcctcaggcttctgctgggatggatcgagcacattcaccctaaaattctgattcagaagatctgagccttctgaaaaaaaagcattgagagcataaaccactcagaagatttatagcttaaagcagatcaccttaagagaatgactgcaataggaaacacagtgaaatcaaaagtaccctcatcaactcactctgtcacaaacttcctccaaatgtgttaatgattttctgagacacattttcaaaggattatttataagaacgagacaaaattaagccaaagtccatattacgtgaaacttcatctcctaggctttgtaaataaaagctaaaggatacaggacacatctgacccaggaatctaagcaagtaacatactacctggctaatccagttgaggtgaaggtcacaatactgaatttgaatatgctgtgttctctactgtaaataaagtattttgtttatcttttcatgccactcaa

SEQ ID NO: 228596 - DNA, 648 bp, Homo sapiens
agaatgactgcaataggaaacacagtgaaatcaaaagtaccctcatcaactcactctgtcacaaacttcctccaaatggtgggtgtggaaaaagtactgggtaactaattaaactgaggatggatggagaaagggaaagagagggaggaagaatctaatttaacatttaaacactatttaattatattttattacaagaaactatgtgaagatgtcagctacccacagggtgggaacactaagcctggtgaatgtggtaaaatctagacataagccttagcagagaaatctacagacatacagtattgctatccaaatcacctgaattcaagtagtgaggtatacctgtatttctttagtaattgaaaaggacaggctggaatttgctaaatattacccatttcccctctacatccaagggctttggaatacatatgtaaaattatttatagatggaaatctgtgttatatgcttttagctcaagggaaatatactcattaataacctgaaatgtgacaggcacggtggctcatgcctgtaatcctagcactttgggaggctgaggcgggcagatcacgaggtcaggagtttgagaccagcctgaccaacatgatgaaaccccatctctactaaaatacaaaaaaaag

SEQ ID NO: 228597 - DNA, 325 bp, Homo sapiens
aggacttcttctagtacctttactacatcatgcctcccctgcctcaggcttctgctgggatggatcgagcacattcaccctaaaattctgattcagaagatctgaggtatgatcagtcacctttatcttttttttaatcttaatatttgtggatacatagtaatttaatctatatatggggtacaagagatagtttgaaactggcatgtaatgtgtcataatcaaatcaggtaaaatggggtagcgatcccctcaagcattgatcctttgtgttacaaagaagccagttacactcctttttttttttttttttttttttgaggca

SEQ ID NO: 228598 - DNA, 402 bp, Homo sapiens
aaaatatttgagaaaaaataatataaaaaaatacaaattaaaaaccaatactatataacaactatttggatagcatttacattgtaggtattataaataatttagaggtgatttaaagtatttgggagaatctgtaggttatatgcaaataccatgccattttataaaagtgacatgaacatccaaggattttggtatccatgagggttcctggaaccaatcccccaaagataccaaaggaagactgtattttaaaataaagctacttctttacctttttgtcaactattgccttgggtttacttatttaggaatgcacttctgcagaaagtttaccaatgtgttattgatctcgagattgtattaaaataaaagatttatttattgttttcctttatttag

SEQ ID NO: 228599 - DNA, 463 bp, Homo sapiens
agtattcctgagttcaaacctcagttttgcctctttctgcagtataacctggagtaaatttctctacttctttgagactcgatattctcatatgtataaaaaggagatgatgatggtagcctcatagaagtattgtgaagtgcatagcatcatttctgatacaagaatatgtttagtcaattttagttcttaaatatatgaatatgcagagtaattttagatgtcagtatacttaaccccagacaaacacatgcaatagcccttaaacttttagattgggcacttgtcagtttcctataccccttccctgcaattgcctcatgattttttgattatgtggcaaatgcacaaaaggaaaccacatgtagctgccatttcacaccattaaatactcagaaagtcacctttgaggaaaaccagtacttctaagaaaaagcaaagccacgaagttcaaaaaaagaaa

SEQ ID NO: 228600 - DNA, 426 bp, Homo sapiens
aaacccaaaatgcacagccgtgggtggcattccaggcatatgggcaggtgagggatgagcaccagagccggacagacctgagtgttcctgacccacttcaccttcacatgagtggacaatgtaacttctctggccctcagtgtcctcatctgtaaaatgggaataacatcttgtgctccagtttaggagatgaagtcaaggccactggccctttggccatctctggctttgttgtgggcctcccttgctgggtatcctcagaaaacttgtcaagaaaagtaaccagctggctgggcgcggtggctcatgcctgtaatctcagcactttgcgaagccaaggagggtggatcacgaagtcaggagttcgggaccagcctgaccaacatggtgaaaccccgtctctactaaaaatacaaaaaaaaatta

SEQ ID NO: 228601 - DNA, 200 bp, Homo sapiens
catcttactctccacctcaatcagcttatcaaagtattccttctgaccacatacagcagttctccctatgagttctggaagatgttgtctccagctcatgagtgagtgggaggataaatgaatagatgaatggataaatgagtgaatgaataaatgaggttctgaacatttaacactggaaatcttagacattattgaga

SEQ ID NO: 228602 - DNA, 744 bp, Homo sapiens
gagtcgctctgtcactcaggctggagtgcagtggtgggatctctcacactgcaacctccgccttctgggttcaagcgatcctcccacctcagcctcctgagtaactggggttacaggggtgagccaccacgcccagctgttacatgatttttgtttggatcaccactgccagtgggctgagttctagaccttaattgatcaaacgttatttttacaggcttagggctacaattaataaatgtaaccttactatgtttagtgtgagttttttctttgcatagatgttgcagggaaagtatctcagtatacatttataaaagccttgagaaaaaaatcaagaatcttgaaaaatgcatgcgtataatcctgttgaagaaattgtctttgctgtactgtgtttctttaggttgaatgtcaaaatagaatcagtgccggttttcacaaaacatgacttttggattttcatttatttaatagcacttcagtataaaactggaaattaacaagtttgttaaaacagaaaaatctggttggatgtgggactattataaatcttaagttaacatggaaattaaaaatgtacttgtagactatttaataataattcacaataactatatgcaaaaattatgggatgaggccaaagctgcacacaaagaaaaagtaataattaactacttgtagtaaatagagtagaaataaatgatttaagcattcagcccaagtagctagaaaacaaatagc

SEQ ID NO: 228603 - DNA, 314 bp, Homo sapiens
ggaagaataactattggataatgggcttaatacctgggtgataggatgatctgtgtagcaaaccaccatggcacacatttacctatgtaacaaacctgcatatcctgcacatgtatccctgaacttaaaataaaagttggaaataaaaaaaaaagagtgattatgtcagggactaggtggtagctgtggagatgatgaaaagtggtcagagtctagatgcattttgagggtgggcttgattggctggtggattagatgtgaaggatgagagaagaaaaaggtactaggatgactctagagtttttgccttgaac

SEQ ID NO: 228604 - DNA, 633 bp, Homo sapiens
caaacgtgagtttgacagtattcaattcactcttcactgaggaaactgtagctcagaaatgacatgtaataatatttaacactagtcatttcacctacagtgtgaccacaggatcacgattaatctgaaattcttattctggtcatttaccttttcccactctacaaagtattccagcaagaaagcaccatttaagagagagtgatgcgttatgaaaggaagaaaaaaatcacttgctatgaccagaataagcaatgctgaaaagtttctcagctggaaaaaaaaaataatactgctgggctgtagctgctgcggtctaatgaagaatgcagcttctgtctcattgtcatgagagctaagatttgtcttcccacagtggtgatggtccctttgatgacccaggtggcagtcttattgatttttatgagtaaatgagtttctgcagcttatatgcataactagtcttaaatgcttccctgagtgaaattgacagttcattttatttggtttgcacagtcttctcgtcccttgcacatcttataagccacgtgagaagaagttgattacctcctatttacattagacaagcaatgtttactctccagggttgcagacaggctgtggtgaagaggt

SEQ ID NO: 228605 - DNA, 475 bp, Homo sapiens
cagaggggagagtggttgagattgttcagagtgccaagcttctctgaggcggggggcgggggggcatccccttgactctgaaaaccctccaatctgtctcggctgcggcagagagatggaacttatgacttctgaaatgctcggcctggcgttggagcctgggcaacagcgggtagttgcggatttaagttgccctacacttctgccccctggcgaccagaaagacccagcccccccgtccttggttcgcggtttctctagccgcctggcctcggtctcagctccgctgcctcctagcgcacataccggagcacaacccggctttcttaccttggttggtggcttctgctctgcactttaacaagcatcattcaacttccttggaggtggatgttatttatttctttttttaattacacaagatgcagtcttctcttttccccagaggtctaaataaagctaattaatatgcatt

SEQ ID NO: 228606 - DNA, 482 bp, Homo sapiens
agtgctgaatagaaatctgtcactggagaaatttgactgtcttttcagaaagaattcagagagaatggggtactgaagcagaaaaggatgcccttcaatttgatagaaaagcactacatgaatccctgtaagactccacaaattaaactaggagctgtgtcaacctgctctctgttttacatccatgtgggagggtctacgagcactcatgtggacagtgtctctgtgcatctgtttaagaaatttttgcctacactgaagtcacaagaatgctctccaatgtgttctttaaaaagtcttatagctttacttttaacatttagacccgtgataagtttggaattattttgtgtttacagtgttagatagggttatctaactaacacaatcattttttgaaaatatttctgtacatgactttactcttgcctttgtaataaatcagtggcctcgttggcctcagcggtggagctctgctgccg

SEQ ID NO: 228607 - DNA, 968 bp, Homo sapiens
aatttaggaagatagccagagtaggtgaggtgatgttctggagcaggggtatttaaaccagagggtttgtgggatgttaacttaatggataggcttcaaatgctatagagtagtccctcccttatcccatggttttgctttctgaagtttcagttaccccaagtcaactgaggtctgaaaatattaaatgggaaattcctgaaacaagcaattcataagttttaaattgtgtgctgttttgagtagcgtgaggaactctctggacgtcccacttgatcctgcccgtgacatgaatcatccctttgttcagcatatctatgctgtctacacctgcccgtttgtcacttagtagcctatttggttagcagtgactgtcatagtatcacagggcttgtgtccaaataatccttattttacttaataatggacccaaagtgcaagaataatggtgctggcatgtaatgatacttgttctattttattcattatttttgttaatttcttaattgtgcctaatttataaactaaactttattataggtatgttacgtataggaagaaaacaacatacagatggtccctgacttaacagtggtttgacttacaagttttttactttactggatgtaaacctgtcataataaacctgttataagttaaggaaggccgagtgcggtggctcacacctgtaatctcagaactttgggaggctgagtcaggaggatcgcttcagtccaggagtttgagaccagcctaggcaacatagtgaaaataacatttgtcattttctctacaaaaaataaacaaaattagctgggcattatggtgcatgcctgtagtctcagctacatgagctacgtgggaggctgagatgggaggatcacttgagcccgagaggttgagggtgcagtaagccaagatcatgccactgcactcgagcctgggtgatggagcaatactttgtctca

SEQ ID NO: 228608 - DNA, 338 bp, Homo sapiens
gtttgggaaggctactttgaggaagtgacatttaaggcctgaagagatattaggaattagctagataaaaagtgggagaagacagtttctgacctggagagcagcaatgacaagaatgagttttggggactagagaatggatggctcctgtggacggtgcatgagtggtatgacacctgtgtggtacgaaaccacaggcaaggccagatcaaacatgtcctgtgaacatcttaggatactcaggaagggagagataaatttcaggggagtgttaagaaatgggcctgggagttagacagggaccacttgttgaaggcttatatgccatgcattttagg

SEQ ID NO: 228609 - DNA, 338 bp, Homo sapiens
cattggcaccctctggtcttgtccccacaggacacccctctgtcatggtgatcaagacggctagggggcagggaaggcgagaagagggaggagacactggtgtgactcatagcaaagtaagagcttcttccctcctctctgcaccccaaatacgcacttttcctggaagggaacagctgggctgctggagtcacagaggaaatatttttctggctacgttgcacattccccttctctatgaaaattggtgccaccattgctaactgatggatggacaatgaggagactgagtcccaagatcacccagatacaataataattgtagtattaacatacaa

SEQ ID NO: 228610 - DNA, 501 bp, Homo sapiens
tatagtatcctgtagaattgctatccagtaggaaggctgtgcagtgttggtcagcatccaagcacctgaatggtggtttcttgtaggtctaacatggtataatgtggtagttgccacacacagcttcagtaacctcatttgtgggatcctgctgtagataaccttgacctccaccagtgattacactgaaggctgggtttgtagttgctaagaagatggttttcgggtccaacaaggatcccacctctgctctctgccatatgtatgatcttggactagtcacttaatcttgctgccccatttctgttttcattattgattgtagttgtgattgtcttgtgttatggtgcttcagcattggattcagcagccagcttcctagtacgaaggcaacgattacctccacagggtcccttccattgtcctcctgcatcattttcctccaacttgaataaatgttctacccacctttctcctttattttctctaccccctgtaccc

SEQ ID NO: 228611 - DNA, 407 bp, Homo sapiens
acacaatgtggacatctggcagagaaaattccattaggctgaactgtctccagcaaacagaaagctggctcctcagtggtgaacaacagatgaaaaatctaaaagaccacaagtctaatctcaggctttccactgccttgctctttgaccttgggcaggtctcttcctttctacatctcaatttcttcactgcaaaaggagaagtataacattgctattccttacagggaagtaacacacattactaaaagtgactataagatatacttcaaattgcaccagagaactaaactattaatacaaatatgacatcctcaaagggtagacatttcagctacctgtatcccttaaagaatatgtattaattaaaaagagttacactgaaaaaaatgtaccaattcttaaag

SEQ ID NO: 228612 - DNA, 578 bp, Homo sapiens
tagatagatagatagatagatagatagatagatagatagatatagatatatagatatctatagatctatagatatctatatatatatatatagatatatatatatatcaggaggaatagtagtaatattgtcatcacttctcaccctgtctttgataaattgccagttgaagtgtctgcttcatcactgagaaaagagtgtgttctttcctctctgaatccccaggaccagacatatagcaggtgtccaatgaacagctcagctgttgaatgaacaaatagattctgttaggccctacaaggcataaaagtaaattcagtctgggcacagtggctcatgcctgtaatcccagcactttgggaggccaaggcgggcagatcatctgaggtcaggagtttgagaccagcctggccaacatggtgaaaccccatctctactaaaaatacaaatattagccaggcatggtggcgggcacctgtagtcccagctacctgggaggctgaagcaggagactcacttgaacctgggaggcagagggtgtagtgagctgagaccacaccactgcactccagcctgag

SEQ ID NO: 228613 - DNA, 348 bp, Homo sapiens
tgtgcaataacaattcacccatggcctttactcaaacactgtcatatgctattattgtgtctgtggggtttgtcctcagtaagaagtgactgcaagatttggggatgtaagttccacctttgtgcaatacgttgcttatctgcctctctttcttggttctccacctctcagctagtggagaggtatctgccagctggctgtgcatgctgttggtggggggcaggcacagggctgatggctggtttgctctgccctttctgtgctgtgccttcttgctgttttctgtgtagttattgcacttgtgcttaaagggcatggcattttttgtgattaaaagtgtgatacaga

SEQ ID NO: 228614 - DNA, 405 bp, Homo sapiens
gagacggagtctcactctgtcgcccaggttggagtccagtggcacaatcttggctcactgcaagctccgcctcccaggttcacgccattctcctgtctcggccagcctccccagtagctggggctacaggtgcctgccaccatgcccggctaatgttttgtatttttagtagagacagggtttcaccacattagccaggatggtctcgagctcctgacctcgtgatccgcccgtcttggcctcccaaagtgctgggattacaggcatgagccaccgcgactgtcccagaagtaaatttctattgtttataagttacccaatctgtatatcttattacagtagtccaagtgaactaacacaagggcaaaatcccagtcttttaacaggcccttctgtctctgaata

SEQ ID NO: 228615 - DNA, 371 bp, Homo sapiens
gtgattgcttttttgcacagagaggcaaaaggttatccattcagcctaacttcagaagctgttaaagaatcagcaactagcagtggcttatgccttgtaatcctagtgacttggaaagcaggaggatcacttgacaccaggagtttgagatcagcttgggcaacacagcgagatgtggttttaaaaataaaaaaaaaaaaccaaagacttagtttggcctggtggcatgtgtgcctgtagtcacggatactcaggagctgaggtgggagacttgcttgagcccagcagttcgaggctgcagtgagttgtgattgtgccactgcacttcagcctaggtgacagagcaagacctcatctcttaaaaaaaaaac

SEQ ID NO: 228616 - DNA, 219 bp, Homo sapiens
gtagtataaaagaaagaaacagtgggaacgaaaagcagagaaagaaatgccaattccagtccaaagttttatttgccaagttttcttagaatgaattttaccagtttatgaattattgtaaacagaatgtgtaatggaaatactgaaagatttttccctagagtggccttattgactgctggtgtgatgccactgtaatgtaataaattattaagttgt

SEQ ID NO: 228617 - DNA, 491 bp, Homo sapiens
gagatagagtctcactctgtcgcccaggctgtagtgcagtggcacagtcttggctcactgcaacctccacctcccaagttcaagcgattctcctgcctctcagcctcccaagtagctgggattacagttgcccaccaacacacccggctaattttttgtatttttggtagagacagggttttgccatgttggccaggttggtctcgaactcctgacctcaggtgatctgccctctttgtcctcccgaagtgctgagattataggcatgagccaccacacccagctcaaatgatttctcttctaagagacttccctgaccaccctaactcaagtctccctgtcctcgttcttagttctttcaacttttttggatctcttcctgatacttctgatacttttttttttttttttgtgagatagggtcttgctttgttgcccaggctggagggcagaggcatgatcacagctcactgtggtctccacctcctggg

SEQ ID NO: 228618 - DNA, 536 bp, Homo sapiens
gcagggctgtgtttctgtctgtcacactttcctcttgttcaaaacacatgtatctcaagcagctatatacaaaactcataaaaattaaagatggtcagccagtgccaggaaatgtggaggaggagttggtcatagaatttccatggtgggacaagagaattacccatttggccttcaacgagaggttcccagagttgcatcctttcccttccctaacagctggttcatgtaggccttgtggtgctcattctgggagagggaagatgcgcccagaggctaggcggtgtgccctgggagccatgagaacccagccaagccaggtgaacgcagcttctgctactgcacgtgcccttattatcatctgagcaagttttttaagtaccctgcaggtgggaccaacattttatagccatgtttcaaccattaatgacttttaaaccttctacaatcttgaagatctttataatccatctttctcgtgaagtacccacaggcctttgcagctgacactctcagagcatgggcagaatcactgg

SEQ ID NO: 228619 - DNA, 401 bp, Homo sapiens
gggagtcaagtcaggccctgttttcaaggagacaacagagcactgaagactaacaagtgggtcccatccaaccagttgaaagcttgactagaacaaaagactgacccactccggagtaagagagacttccttctgcctgactgctttgagacccggacattggcttttctcagccttcagactcagaagtaaacactggctccatctgggtcttagactcggcctttggactggaactacaccattggttctcaggcctttgaacttggactggaactatatcatcagttctcctgggtctccagcttgccaacttaccctgaagatcttggggatcttgggatttattagcttccataatcaaaaagccaattttttataataaaactatctatcaaaat

SEQ ID NO: 228620 - DNA, 542 bp, Homo sapiens
atgtaattgccatgtttccctcgtaccctttcatctagaacattctctcagtcttgtctggtcttaagactacagtcccttttttcataacaaatgtccctccttttggcatctgtctaatgtttcctcctgaatgcattcgggtaatacattcttgactggaatactacataagggatagtgtgcccttctgagtacatctcaactggaggcatgcagggtgcagttgcatctcaccagggatgttaagtttgaacttaaggtcaaggtgttgtctgattttacctttgtttagttactaattcttcccttgcaactaataagcaatgtgtagggaaacactttaaaacaatgctctcccccatcaaattttaccccctaaatttagcacactttttgattcttgtgtgaagcactctacctccaatggttataaaatgactttccaaatctggcacccccttccttcttgtgaacttactctactgacagcggttggcattccactatacatagagccctctcttttccctgtttgtgta

SEQ ID NO: 228621 - DNA, 516 bp, Homo sapiens
agcatttagaatttgggagaaaaaggagcaaggcatactgcccaaatccaaaacaactttggctccctttggcctccattctaacatgctgagtggatgcatcatggatagtcttttaaaaacaagttctcatctattcaatgtcagagccctaaatggtatgaaaaataggcaacttgggtcatgccactacagatcgacacccactaaatccttttaatttagtctagtgcaacaagtatttgtgtaagtgtcctctgccctggacaccggtgaggtcaccgtgggaatggctgggcaggaacaaagccttttgtttccagctgagtttccttttctgaagattgcctgtcctagacaccagttctctgttctctgtgactctgattcctgtctcctcttctttcactctcatccattttcaatactggcccctcatttcacttcctcagctaaatctacctctcaaagatagacatggacatataaataattttttaaaatcctcttttgcaa

SEQ ID NO: 228622 - DNA, 2047 bp, Homo sapiens
aggcatatcacttctctttttaaatctcttagactctcctgcacacaggaaggaatctaaggtttccctatgggcaccagactccatgtaatctagtctttggccacctctgatctcatctgctaaaatcatttcaatctctccttactcagtccatcccaagccatccctggaaggtttcatcccaactggttctcacatccagtctttgcacttcagctgtctgtcccttgaatgcttccacaaaacatagcaggggaactattatttaggcctctgttcaagtatcacctccttcaagtggtctttcctgactgtccactctaaggagcctcccttctgtcaccatttagctgtatttccctttacttacagcaaaattgtaactagataatgcattacatgtttttctgttgcatgtatattctgtttctttctcataaatgtaaaccctcctatggcccaaatcttcatttgccttttcaactcctttatctccagcatgtggagcacacttggtacacattaggagctgaaatgctccatagctgctgaatcagtagcaccaacatgtgtacccaccaccttctcaagtgtggctttataagatgttcatcatggttgagtgaggataagggaaagaatagtctgtttcttttatgatatggtttggctgtgtccccatgcaaatctcatcttgaattcctatgtgttgtgggaaggaccctgtgggaggtcattgaatcacgggggcaggcctttcccatgctgttctggtgatagtgaataagtctcacaagatctgatagttttaaaaggaggagttcccctgtacaagctctctctctttgcctgctgccatccatgtaagacgttacttgctcctccttgccttccaccatgcttgtgagatcttcccagccaagtggaattgtaagtccattacacctctttttcttcccagtcttgagtatgtctttatcagcagcctgaaaatggactaacacattttatgattggtgcaaattggctactgataaaaatcctgatgataggaaaatttcaaatttccttatagtaaaaatactacttaatttaatttttagagacaaggaaaaacattttgcagagtttggctccactattgaaaaagggatgctttaggttgaaccattgtagcctcagattctatcttttcctaaataaacacattaaagcctcatgtgtgaaattattttttaaaaatatttatctggatttaaagaataacagatcaacagatacctctcaatgtgtttgctaattaataaaaatcagtttcttacaactaatgtttgtaagaaaatgttcattttaagtgctaaatagtgaagaaaatttatcacctaaaatacacccatcaatataaggcaagaaaaaatcttaacatgcagccattcgcttttgccatgccctgtcctgtttacttcttaagaggtttatttttgtacttttgcagaataaactttagtaatctagaactggaaggtactatatatgtatgtgtgtgtatatatatatataaaagaaaaacatatatatatttcaattacttgaaatgtaaaaacttaccgaatacaaatggaaaaagtgatgtgtattatatcatattgctttttgtccatctttgtgatttatttactcacttcatgtttttcatttacaaaattgtcaagctagccaaaataattcttgttttcttaattgggagagaagagacctgacagattatctatactcttcatatgttaaaagaccatttcctgtaaaactgacctagtgcacaaactgaatttgaaatagactgtgaagtaaactataacttgtccttttaattttgtttaacatggttactgacttacatgatgtattgaatatcaagataaagaaaaatgtgtctaaaagctaattagaattctctgggtcaccaagtcaaggtgctattgatctgggttaatctgagtaacttattgtctagcctataaataagttccaaaatatcgaattc

SEQ ID NO: 228623 - DNA, 1330 bp, Homo sapiens
ttttttttttcctgtgtcagcaagatcagtcttcatgaaatcctgctaaattccctgtgaaatataataagcttaagacattttagagaaccaaatgctgtttatgatacagtttagtagagttgtaatatatttcagcacagaattttagaatactatgggggctgattttcaattttgtaagagaaattatgagcatagtttatatagtcttttatttgtaattgtttacgtgatttcagaagtaatatgcttaagttattctaatgtttttaaagctagagagtctgaaaagagggaagaagaaagaaaagtgtttaaattgatctcttttgaatttaaaatgcatattaagtataactagaacataaaatgaagaatttaaattctcatcttattcctagaattatacctataatatgtatcattacttataacaattcatattttaattttgcatggcacataatctcttctgtgagttggatttttaggtggtgggaatttaagcataaattctcataactttcttggggtcaatttaatattaataagtgtagtaagtaataatacccagcttgagacctcatgtacttgttgcatttggatttaaagctcatttcctatagaagagctgtagaaatcagtcatgtagtttcataaactccttcatgcttgttaataattttcaagaatcttaaaataaattacaggaatattgttatgaagtagtagaagcagtatggtataggggagaaagtgattgtagttgggatctgaggatagtctttactttgctattaactagctgtgtgaccttgggcaagttgcttatctctgcttcagttccataaactaagaattacagagctgaaccggatcttggaagcaatctagtacaaacctctcattttacagatgaggaagcagataatttgcacaggctttcactgtaagacagttgggcccaaaattcagttttctgactctcaggttggttttttttttccattatactttacagcctcttttcatctgtaaaatgagagcattggattagaggctctcaaaggtctcttccagctcaaaaatattgtcattcctgtgacattagtcgtaatataatttattaggggaaagtttgtagcttttatttattggtgaaagaaatgtttcttgaagaggcagtataacctttgcaaggttatattttgtttttttaagagaatatcatcaggcgaggtgctatgtctcaggcctgtaatcccagctttgggagaccaaggcaagaggattgcttgagtccaggagtttgagactagcctgatcc

SEQ ID NO: 228624 - DNA, 166 bp, Homo sapiens
ccttaaagaattaattatttaaatattctaatagctttactgatttctcattacaatgttttttagatcttatgcccatcaatcaatttttttagattataaacttcttacctgaggaatgtaaaactattaaaggaatgtaagttattaaaaatttacacaagtt

SEQ ID NO: 228625 - DNA, 213 bp, Homo sapiens
caaaatttaagtccccaaaccttgcccttcctcccaacccaaatgttctgagcacaagagacccaggcgctctgagggggtaagagcaggaaaggcacctcagcgccacgatgcagagcatggcttgctgacgcatgttgcccatcaaaatctcagtggattcttcaagaattagtatctagaaaggccaggaaacaaacaaacaacaacaaa

SEQ ID NO: 228626 - DNA, 350 bp, Homo sapiens
atttgactcacgatgtttccttcattttcttgtctgatgagcccacatctttgaggttcatgcaaacacccagttctgggaatgagattctgtgtgccattgcccatggggaaatgactgctaaccaaattcttaatctccaccaattattaaaaggcagttctagccattaaacattgaaaattctatttagacagactgttaaaaaaaaaaaacagagacacttttcatattggcttttcttattgacctaactaaacactcattgcagtcttgttccaaaactatatcttccattagcacaaaggaaaacctgttcttatagttcatgtagtagggtatggaatata

SEQ ID NO: 228627 - DNA, 568 bp, Homo sapiens
tataataaagtatggtcccaaactgggaacaatgcaaatttccagtaccaggagaatgaataagcaaattgaggtatattcatgcaatacaactcaacaattaaaagggacaaattacagatatgagaaagaatgtggatgaatcctagaaacgttatgttgaacaaaagaagccagacacaaaatagtacgtactttgattccatttatgggcatacagctaagctatggtggtagaaatcagaacagtggttgcttcttgaaggaagaattgattgaaaaggggcataaacgaactttctgggatgatagaaatgttctgtatcatagtagggatgtggattatctggatgtatgtatttgtcaaaacagatcagacaacatctgtgcctttcactgtatttaaattataaatcaatttttaaaaaagtaatggaatagtatatacaggaaagagtatttgcttagaaactagatgtggtttctcgtcttgactctgccctaaatttatatatgccttgggcaagttcattcaatcagtcatttgttcataatgtatttaacaaag

SEQ ID NO: 228628 - DNA, 462 bp, Homo sapiens
cgcctctgctatcgttgggaggttgtattttcatgattccttcaataactgcagcctagcattttacttcaggaatatcagtattccttaggaggaacatccttatcagcgggacatcagcgccacagcacaaggttgcgaaaaagagactgaggctcaggctgtgtgaagggaacagagtgctgggctccccgggcagcccacattggaagggtgggctctttccatgtttcaggaaagacctggccctcgggggcgcatcaacaggtgtgtggacagatggaagaggctggaggttacctcacagccgagagaacagaacaaacactagcttgaggaagacgctgaggcacagggcggtgaccctggaatgtgaaacagaggattcaatgcctgcgtggatctaggactaagaactggatctgacactcagcattaacagaaagccaggtttttcttaaa

SEQ ID NO: 228629 - DNA, 480 bp, Homo sapiens
cacctgtatcagtaatggacttgggtcttctctagatgttacttgctcacttttatcattcatctactcacccaattaaatatctactaaataaaattatgtgaaagggttcagcctagtggctggcgtatgagcagaacaagtgttcatctgtactacagacaaagcataggtctctttttttgtgtgggtgtgaggttattgggttgaccatgataatctctcaggttccttttgttgcagaaacccgctgctcctaggccagcttcttctctctcctagaaggcgagaattgggttcctggctcattttccctgcctgtgcatcctgtcctctccccacagcctaatgcctccaccagaagttactccacagaagaagaaaagttaaagaataagtttttcattctctagggtttctaggtcccagggaacatccgagggggcatctagtcaaagagcacttttatctagggagaaa

SEQ ID NO: 228630 - DNA, 566 bp, Homo sapiens
gttgtttgtaagttatatactttaaatataaaaatgtatatccataaaaggaatatttacttggcaataaaaaggatgaagtactgatacatgctacaatatgaatggaccttgaaaacatcgttaagtgaaagaagccagtcacaaaagagaacatattttatgattccatttatatgagttgtccagaatgggcaaatatctagaagcagaaaggagattcatggttgccaagggttgtggggaatagagtttctgcttatgaacaagaagtttctggggtgatgaaagaattcaaaaatagaatgtagtgatggctgctctgggaactctgggaacatactaaaagccatggagctgtacacttcaaatggttgaataatacggtataagaattatatctcaataaagctggaagggtggaaaaggttataccatgctaccactcatgaaaagaaagttggagtggctgtattaatatcagagaaagtagatttcagagcaaaaaatattatcaggacaaagagggtcgtttcctattataaagaggacatataaccctaaat

SEQ ID NO: 228631 - DNA, 201 bp, Homo sapiens
agtagtggcatttgtgtctgtgttgtccaaagtctgtactttgtatataatggacaggaataatttttgtcacaaaaatttttaagaggatgaagcaggtttccaaacagcatttcggttacaaattatgtaaatgcctgtatgcacttggacaaaaagcttgagagatgttaacggcacttgtctctcggtcgccagctt

SEQ ID NO: 228632 - DNA, 803 bp, Homo sapiens
agtgacaagaaagacacttttcctctgtggtattctctgcaaaaccccataatcccagtctaatcgtgagaaaaaccagtcaaatacagaatgcagtggtggatattctagaggatacctggctagtactctcttaagattgtcaaaatcatcaaaaatgaggaaagaatgaaaaactgtcatagaggagaagagagcaggaaggtattagtagtacaagatggtactctagattatggaatatcttaaggggaaaaatgataacattctagtaaaatctgtaatgtaattaatagtaacataccaacgctggttttggttttgagaaatatacacacatggcaatttaagatgctaatgactgtagaaaattagtggggatatatgagaactgtctgcacaatctttgcaacttttctttaaatctaaagttatccaaaatagtgtttgtctaacctccctgactataattggctgaaattatatattctctaccaaattaccagactaaaaaatatctgactatcgggcttaacaatttcacatttattttctcaaaagagttttggcttttattacacataatactgaaatttcccatcatgtttgggggtgaatccctactttgctattcctgtggcttccttgggcaagtttttaatttccccgtgctttaaccctccttttcgcaaaacacaagatatgcaagagtatatactctcacaagatcatagggagaattagataatgcctgcaaatctctctctctctctcacacacacacacacacacacacacacaca

SEQ ID NO: 228633 - DNA, 385 bp, Homo sapiens
taagtcataaaaatggaaaattcattcaacaactctagtctccttagtgttttacattgtatttcccatggaattgatttgctttatgttaaaatcatatcagaaaatccatcttctctgacaagagcaggattcagttgcacagaataaacaaatatatcttttaaaatagttttagaagagtatatatattatcataaatgaaatcataaaccacccccctctgcattcacatagaatacagacactaggttgcataattctaaaataaactctattgatttttagttagagtttgaagttagctacagggaattgcagaaggaagcattttaaagtacctttactgacagaccatctaactactttgaatattttatttaaa

SEQ ID NO: 228634 - DNA, 627 bp, Homo sapiens
gagtgggaaacttttaaatataaggaaattcggcttacctacttgacagtgtttgctgtctctctctctctcatcccctaagtataccagcaggcagcctccttaaagttgtttcaaagttctgtgttcttgagattatcaaatgatattatttaaaacaaaaatccttctagaaaacttcccttatataatgaataattacttagtcattaaagggtagccagagatttcatttaacatggcatactgaataaaacagcatattctatctaccacaaattaggtagtggctttacttagtatttactgatgtatggtttcatatattatcttttcagtaaaagatttatataatgttatttcaaatacctggatgtttgtgttgaatcaaaaacctgtgtttttgagagagaattttttttacccttatgatagtttaacccatcctcctaaaattagccccatcatggttacctcagccctgtcctcatttttattatatatttttaaaaagttttttggttttgttactgtattcctaaatacaggttgagtatccctgagctgaaagtttgggaacagaagtgtttcaaattttagatgtttttggatcttggaatattcaaa

SEQ ID NO: 228635 - DNA, 1145 bp, Homo sapiens
tggctgggggtctggcaggaatgggaggcatccagaacaagaaggagaccgtgcaaagcctgaacaaccacctggcctcctacctggacagagtgaggagcctggagaccgagaactggaggctggagagcaaaatctgggagcacctggagaagaagggaccccaggtcagagactggagccattgcttcaagaccatcgaggacctgagggctcagatcttcacaaatactgtggacaacgcccgcatcgttctgcagatcaacaatgcccatcttgctgctgatgactttagagtcaagtatgagacagagctggccatgcgccagtctgtggagaacgacaccatgggctctgcaaggtcattgatgacaccaatgtcacacgactgcagctggagacagagatcgaggctctcaaggaggagctgctcttcatgaagaagaaccacgaagaggaagtaaaaggcctacaagcccagattgccagctctgggttgaccgtggaggtagatgcccccaaatctcaggacctcgccaagatcatggcagacatccgggcccaatatgacgagctggctcggaagaaccgagaggagctagacaagtactggtctcagcagattgaggagagcaccacagtggtcaccacacagtccgtggaggttggagctgctgagatgatgctcacagagctgagatgtacagtccagtccttggagatcaagctggactccgtgagaaatctgaagcccagcttggagaacagcctgagggaggtggaggcccgctacaccctgcagatagagcagctcagtgggatcctgctgcacctggagctggcactgacttgggcagagggacagccaggcccaggattacgagaccctgctgaacatcaatgtcaagctggaggctgagattgccacctaccgccgcctgctggaagatggcgaggacttcaatcttggtgatgccctggacagcagcaactccatgcaaaccatccaaaaaccaccacccgccggatagtggatggcaaagtggtgtctgagaccgatgacaccaaagttctgagacattaagccagcagaagcagggtaccctttggggagcaggaggccaataaaaagttcagaggtataa

SEQ ID NO: 228636 - DNA, 640 bp, Homo sapiens
gatgaatttgaccagagtcattatttgtataatattaagaaagtaactcagggaaatatttgtttgatttccaagtaaagaagacatttccaagcataaaagcaaagaaagaggcgtaaaggaatgactgatagccctgactacataaaaatattttagtatagtatttaatgatgaagaaaacccttcatgacatgttgctatgtttaaaaaaaaaaccagcatggacaatataattcaattttgcaaaatctgtgtctgagagttatatagatatatacctgaaaaaatgccaaatgttaagaggataggatcatgggtaatttttattttcttctttatgcttttctgaatttcccaaaattttctacataaaacatgtcaaaaatgactatgtttttaaaactaaactcagttacacttgagtcatatatttctacaggtttttagaatcagcagttgaattctatttaattcagtggcagaccaaagataaagcaagggcttgtgaaaaaaatgtttgggactaaaatggcctgaaatggaaagttctcctagacattgaagatgtataatatacaggtggatctaatctgatcctgttacagaaaggcagcagtacaaaaaaaaagaaagaaag

SEQ ID NO: 228637 - DNA, 429 bp, Homo sapiens
cagcccctccatggagagtatcaaagagatgctctctgctcctttcaaaggagtattgcttgtggcctctcattgattggcactacctgggcagaaataggaaaacaggggttttctgcccttctcaattcaatctgctcccttatgccagttattttgttttaaatctgcttggcaccagagttataatattgccaataaaaataatttctagaccagctaccctggtcagctcagaatgctctcctcaaaactaagagacagacaagaggagtatctcagtgaacaggaaagagcagacaagtgcaataggaaaagggataaagacaaatcaagctcttggtttgattataggattagctttggccattggatttattgactttcaatttggatcaccatatggagggagggagggagggaaggagg

SEQ ID NO: 228638 - DNA, 383 bp, Homo sapiens
tgaggtttccagcaattcagttgaggctgctggccagccggggcttctgttattggtgcccacaccatttggttggcccctccaggagaaaggcctgaggagcctggggacttgtacgatgtagcttggtggccaggagggtgggtgcctgtgtcagagcgcttgagccagatcctgaatctgctactcacaaggagtgtgagtctggatacattgataaacccttctgtaaatgcaaataatttcttaatctgtcaaatgtgaatcataattgtacctatactttattggatcgtgggaagattaaaagggttaatatatggaaacacttaatacagagcctatacgtaataaacacccaataaatgtaagcttttaatatc

SEQ ID NO: 228639 - DNA, 371 bp, Homo sapiens
atcaccatggcacatgtatacctatgtaacaaacctgaacactcagcacatctactccagaacgtacagtgaaataaataaaactacaaaaaactagccgggagtggtggcgtgcacctgcaattccagctactcaggaggctgaggcaggagaatcacttgaacccgggaggcggaagttgcactccagcctggatgacagagcaagagtctgtctcaaaaaataaaaataaaaaataaatgtccccttcttgtcgtaatagccctggcagtcctgactggggaaaccagctggaaggtggggcctcctgggagaccaagccctgacccaattatagatggaagcccagtaacagctcatccctttaaaa

SEQ ID NO: 228640 - DNA, 843 bp, Homo sapiens
tttctgtttggttgccgccctaacggccagaactaaagcaccttgcaaggaatgaagttggttcttgaagtccgtgctgactggctgggcgcatttgcgcatttgcttctctggctgcaaaatggcccgcaacagcactcactaatttgttgctaacttcaggaactgtgcggacaggtctctgaggcttctgagccgcgctatgtccagtagatctgggcgcctcagaacctgtcacagccgacggaagcgtttatctgagtttcttgtttcttcccaaccttttgattttcgcaccattacgcgctcaactatgcctcttcttttgtcctatggtctcaactaattaaaggaagaaaagcaatgcatgtgtgtgtgtaattttaaagaaactatgctgtcttatagaaaaccaaaccatcatttttatcttttgtaccaggtattcaagtatgttttgagcaccgacgggctgtgaactggactgtgctgaaagctcctctccctcttctctctttaagccctttatatttgacatcagcttcccccacattctccaaagcttctctcacaaataaagccaggtgctcaggctgagaagattcaaggaaagggttcctcacgtagttatacagttgtgttccaggggaaggaaaatattgttcggttttgttctgcaattccccacggtggttttcggtaagacttgagacttccttattctaaagtccaagcagcagtggaaacatttcaagatccctttttgcaatataacttttccaaagattcaatatttatttaaacccaaaaatcttgtcactcgaagtaaaacgattttctcca

SEQ ID NO: 228641 - DNA, 446 bp, Homo sapiens
tacagatccaaaaaccgagtctcagaaaagcagagtggataagagcccaaatctagtaactaagaattgaaaaggaggaagatgagcatgagcacatgaacgaagagtgtagtagtagagggaaatgaatgaaatctcaaccctaagcttgaagagaagaaaagtgcacgcgcagatgaaacagaagttcaagacaccaaaattcatttactcatatgaaagagaaagacagaactgggctaattttaagaacctgaaggcaaggccagcttatagaatttaagagtactagtcaaagtttccaggccccccaacagcaagcaattttcagttattccactgttatttataattgactcgatggcatagaggtctacaggtatcttttagagaaagtatataattattacagtcaaaattaaaagttggaagtcaattggccatgt

SEQ ID NO: 228642 - DNA, 503 bp, Homo sapiens
ctcatttgaatctgccttctgagagttatttcatcaaaaccatatttctccttgcacttgttcctatgtgaagcagacagttacacctaacctttgtaaatttagaaaataaaaattgcatttgagtagaaaaagcatttggtaggcttttcaggctatttaacttaattatttccattaatcctctgtatatttctaatgtatttacacatttccttaagagttttacagcatctcaaataatatcattgcattttggtggatgttttactaaataatgtctgtttgttatcaccttaaacaatttgtcatgattcaatttaattcaattgaaatcaaattctcctgaaattgtttatgtaaaagattatcaaatattttatccatcctgacaagtggtttattatagttctacaatttatgggtaacacacactagaggcttggggaagcagggaagcagcaggaacattaaaacattaaatacctgttataattctgtct

SEQ ID NO: 228643 - DNA, 443 bp, Homo sapiens
aacccaattagatttgctaatttgtggtatttgtgtgtctcctgtacagacattttctcatttggattcctgacacttggtaaataaaattactattattgttctcttgtttctttgaatttggaattcctggaacacaggaaaatttgatacacgtcctaaaagaaaaagaggagaacaaactgagtgctacttaatatgggggcagcacagtggctcacaccaataattccagtgctttgggaggctgaggctggaggattgcttgaggccaggagttccagaccggcctgggcaacatagcaagatcccatctctaccaaaaaaataaaaattagccagggtggtggcatgagcctgtagttctagctacttaagtaggttgaggcgggaggattgcttgagcccaggagtttgaggctgcagtgagctatgatttcttc

SEQ ID NO: 228644 - DNA, 487 bp, Homo sapiens
atgggaaacgatttcctcttcttcctcctcagtccagcctttactaatagctcctcaatacatctgggctctgttttggcatctgagccacggggggcatcttggggtgtggaaggagcttccactgtgatggctgatctgggcttgaatcccacatctgccactcactaacgagtggccttggtcaaatgagataatctttctgggtcttagttttcttatctttaaaatggaggtaataacatcttcctcatcaaattaaatgagaaaatgcatgtgaaattcctgacccatgataggtgctcagtaaatgctacttctttctttccttccacaagaatgaatgtaatcaatttacgaacaggattctggactgtgtttggcatcatttacatgctgccattacacaaacaaagatgtttgagcctggagttggcactactttgttgtaaactgaagttgtcattaaactgaaatgaacacagta

SEQ ID NO: 228645 - DNA, 412 bp, Homo sapiens
agttggctgatgggaggagtctggaatgcattagagccagagctgctgggggcaaggctgtggctctgctgggccacttggggcaacacgctcttcctctctgagccttggttttctcatttggaaaaagggaagtaaaaaagaaaatcctaccccagcagtttgggatgccaaggtgggcggatcacctgaggtcatgagctcgagaccagcctggacaacatggcgaaaccctgtctctactaaaaatacaaaaattagctgggtgtgatggcggatgcctgtgatcccaggtacttgggaggctgaggcactagaatcccttgaacccgggaggcggaagttgctgtgagccgagattgcaccactgacctctctgagccttggttttctcatttggaaaaaggcaagt

SEQ ID NO: 228646 - DNA, 570 bp, Homo sapiens
atgttattctttctacgttgtaacctttgcaagtatagcatttgaagtttagttgccagtgatgtgtgtctcaattcttcttgaagtagatgagattcacttccttcctttaaatatgaggaagccaaggcaaggagaagaaaagtgaattaactaaggagagaaagctaagagcaaagttccttgctgagtttaggataaagagacagacgaggaggaacccaattactaggggacaccattaggatgaaagagcagaagtatggaaatgggaatggggaactgtatccacccatagaattgtcaacaggtatgcacgtagcatctgcgattccgggagagctgacaggctaggagccagctgtagcttacacttgaaaataataataatatccacttaggggtatggaattatttatcaccactggtggaatttttgccaaaggcaagaaatgaaaacatccgatgaaaaatgtcctcagtccacagcccattacactgacacaccgtacaaactgattaactctctggccaagaataaacagtactatagttactactaaaaaaaaa

SEQ ID NO: 228647 - DNA, 520 bp, Homo sapiens
atgttattctttctacgttgtaacctttgcaagtatagcatttgaagtttagttgccagtgatgtgtgtctcaattcttcttgaagtagatgagattcacttccttcctttaaatatgaggaagccaaggcaaggagaagaaaagtgaattaactaaggagagaaagctaagagcaaaggggacaccattaggatgaaagagcagaagtatggaaatgggaatggggaactgtatccacccatagaattgtcaacagaaatgttaatgtgttcaatgacgatcaagccccaggctctactgagcattctacataatgtacagtatattgcatttaaaattttgcaaactcctgaattacaaaatacatttggctccatgtttgaggataggcaattctagatctacaaaagaaaaaatggacaaggcaaatcagaaagcaagcattattcacgaaagccaagatatggaaataacctaagtgtccatcaacggataaataaagaaaatgtgccacacgta

SEQ ID NO: 228648 - DNA, 475 bp, Homo sapiens
cactgcagcgggatctgaacagtgtttcgcctccgtgtacaactggactcctgcgtgcctgcaggctcacactgcttctccctctccctcctaggcactgctcaggcctcacggccgcaatcgccccatctcgcccatgccagtcttgctcctcccagtcactctgcactcactccccggccacctcacagagttaagtggcatctacatgctgagggctgtacatctaagtccctggccagacctgtctctccagacttgacactccgcttgtttgcatgatacccagccgaaacaaacatcatcttcccaaaactgcatctgcagacagtttcctatctaacctgcaacaacccatccttccaggaacttccagtcgccatcctcatttcctcacacaccccacattcagtccaccaggaaatcctactgacccagcttccaaataaactctatccgggtttgaaactttgtc

SEQ ID NO: 228649 - DNA, 524 bp, Homo sapiens
cagagacagatgaggtggctcccagagtcaggtaaggacaacactcgaagaggggtgcagctgagaacagcagctgggacaggtgcttcatatcgctaaaggcacctcaacagaatctgctactgataaataattttaattttcttttgagctgtttaatttttaatcttattgtgaataatttcaagtacataccaaagtagaaagaatagcacagagaactctagtacacacacgcctattatcagtaagaatcaacacgtggccaactttgttctgtctgtgagtgttgagttcttagataacagagcttgtcattctctgtatgataggaacaccaacatacatagcataatttaaataattattttaattgaaatattctagttaagaaacagtttagaatactagagagagacttggatttatgatataatgctatgatcctttgtagcttaaaacacattgtaattttctactaaatgtaatatagaataaacagtttatgttatcaaatgcattca

SEQ ID NO: 228650 - DNA, 458 bp, Homo sapiens
agtcctttagcgaactcacactcccacctcgaatgtttgctaatccaaacagaaggttcttaggatccccatggccacaggtgggtggtgctagcatctgagcaggtggaagggctcgtaggactcccatcaatcaggaagagcctttgattggcactgctgagccatttgggctaaaatgttgttaaccaagtggatgggggtggttctttgtgactgttgctccactatataaatgtactgagggtctacccctttctggacaggctgctgcactcagtgggcaaagtactggctggagatcaggagccataggtgcttctgccaccaccatcgggggtgcttggatattcaactctcccctagggctcagttcttctgtgcaaagatgaagagagctatgctgcctcaagttacaagtttcttcaaataataaaagcaaatgccgtatttactta

SEQ ID NO: 228651 - DNA, 294 bp, Homo sapiens
tcattatcgggggaagccactgcaccacaaacccagaacaggaagctgaatgacaagctgaattaaaacaaaaagcccttgaaaaatacagacaggacgatccaaacaaaaaattccataccagagttggaagctgagccaaacaaatctttcataaaggaaagtcaaaagttaaaaaaacaggaggaaaagcaagaacctagaggacattccagagtgagaactgaaaaaacacccaacaaaataaaacaggaaaaatattatcacagaaataacataagaacattagcaaga

SEQ ID NO: 228652 - DNA, 707 bp, Homo sapiens
tggtcttgaactcccgacctcaagtgatctgcccgccccggcctcccaaagtgctgggatcacaagcgtgagccaccgcacctggcccttcctctgaggccttcgtctccaagaatccagcaaagtgacaataatgaaaataatgtcactaaagggccagcaccacagaagaaatctcactggaacacctgacttcaagtgtgaccttgaatctcactgagctctcaaatgtaactgccagttccccaaaatgtgaggaactgagaaacaggtaaaatgacatcacatggacacagccagccccacacaaaccagaaaaacacacggagcaaaggccccagggctcctgcaagttaaatgtagaaaccaccaactgccctcatacaaacaagcaaactagagaagaaaaccccttttccacagtggaaaatcagttgccgggcatgctggctcgcgcctgtaatcccagcactttggaaggccgaggcgagagggttgcatgagtctaggagttcaagcccagcctgggcaacatagcaagatcccatctcttaaaaaaaaaaaatgaacgaagaaaaaaaaattagttgggtgtggtggtgcgcacttatagtcccagctactcaggaggctgaggtgggaggatcacctgagccgaggacatagaggctgcagtgagccaggctgcactccagcctgggtgagag

SEQ ID NO: 228653 - DNA, 426 bp, Homo sapiens
tctatgtgattcttggaggatgtggtcaaagatttgggttaagtagccactaaatcacatggtatgcaacatgctcttgctctttctcatgatgccagcccggagtaccatgcagcctaattcacctactagtccagccagcagatgctgccctagactctgccagccttatctcattttctccagatcgtgcctggctctctggtggctggtgacacacccatctgcagaggtatcgctacctgtcagagaacaacttcatccataaggtagctcagcagtgccccttcttctgctcagggcagccaggggtgggaggaggctgctctcttgggctgcccatctactctgggcattgatatctcaagtgcaaacctggctaactccagcttctttagatcccttccttatcaacacctgaagggg

SEQ ID NO: 228654 - DNA, 625 bp, Homo sapiens
ctaacccctgtgtcatgagttatcacgttaaaagtccatagaaaaaattttttttaacccagttctttttgtgtatatattttttgccttgataatactagtttattgagtttgccgagtgacacattgccaaatcttatgccctatttttaattcctcagatacatgatctttctgtatagtcttagacagtctttacccctagtctgtttggatgaagagcttggtagagaggttgagtttgatatctaagtgtcagcggcatcaaactcggagccaggtattatgataaagtgctttaacatattcagtgaatccctacaacaggctgaagatgttatttttatccccattttttagaaaactttattcagttataattgaagacctctacgctgcacatatataaagccgtaagtttggtttgatcagttttgacatatatgtatacccattaaaccactactacaataaacataatcttctgtcaatcccaaaagttttcttgtgccctttgtaatccatctctctttccaacctcataccgaagcaaccactttctgtcagtagagactagtttgcattttcttgaatcttaaataaatgaaatcattatccccacaca

SEQ ID NO: 228655 - DNA, 304 bp, Homo sapiens
ctgagagaagctttcccactcactgtagatgaaagtagggtcaggagcttctgaggatggactcctgtttggtggaaaggtccccggagccacagctgtaacccctcttgatactctggtctgccctgagaggcgtggaaagcaggggccttcacccaccgggccccacacaccagaaccccacacagcgggcccccacacaccagaacccacacagcgggcccccacacaccagaaccccacacagcgagtccccccacaccagaacccacacagcgggcccccacacaccagaacccacaca

SEQ ID NO: 228656 - DNA, 506 bp, Homo sapiens
agggcctttctctgttgcccaggctggagtgcagtgaggcaatcttggctcaccacaatctctccctcctggattcaagcaattctcctgcctcagcctcccgagtagctgggattacaggcatgcaccactacacccggataatttttgtatttttagtagagatggggttttaccatgttggccaggctggtcttgaactcctgacctcgtgatcagcctgcctcggcctcctaaagtgctgggattacatgcatgagccactgtgccctgccaacttgttaaatttttaatcattctgctcaccttttgcaaccttactgacttttgtgtctaccttatctagcagtggctgaaatttccttctatgattatagatttgtctgttatttcttatagatttctcaatattgcttgtattattattttaagttaataccattaggcataaaaattcaaaattgttatcgcttactgaataaataaatcttaatctattatcaagt

SEQ ID NO: 228657 - DNA, 561 bp, Homo sapiens
agggcctttctctgttgcccaggctggagtgcagtgaggcaatcttggctcaccacaatctctccctcctggattcaagcaattctcctgcctcagcctcccgagtagctgggattacaggcatgcaccactacacccggataatttttgtatttttagtagagatggggttttaccatgttggccaggctggtcttgaactcctgacctcgtgatcagcctgcctcggcctcctaaagtgctgggattacatgcatgagccactgtgccctgccaacttgttaaatttttaatcattctgctcaccttttgcaaccttactgacttttgtgtctaccttatctagcagtggctgaaatttccttctatgattatagatttgtctgttatttcttatagatttctcaatattgcttgtattattattttaagttaataccattaggcataaaaattcaaaattgttatcgcttactgaataaataaatcttaatctattatcaagtggaaaaaaatattaaaaaactgataatggcctcggttggcctcagcggcggaact

SEQ ID NO: 228658 - DNA, 583 bp, Homo sapiens
atgtctcaaggattgtgactttatagatataggggatggtgagttactgactgaggaaatgtaatgctcaggagaaggaggtaacattaaggcaataaataacagtaactccgacagcaatgattatgtttgttcatcaggtcctttcctgcctgcactgtgacaccccaaaagtcacagtgattagctaaaagcagctgaagttttcatggtcccaatcctggagtgaatacttgataagtgtcctcaaacatgagtgctcctgagaggttcaggcaggaattcttccagggcacttcattcctttatgtctatttagtaagtggaccccactgatttagggcttctcatcctaggtagaaagggtgactttttttttttgtcttcagcagtaatggttagattttgcatcgctgcatccactcagtcacagagggtcactgagagcctattgtggccctgtctttagaattgctcaaaggcttttatgctttccctttctgctaagctctgaccctgttttaggatctggcccttcttaaactgtcattcacagagaggtcttggaggagtcagagtcctt

SEQ ID NO: 228659 - DNA, 473 bp, Homo sapiens
cgcaagtctttctttcggggaaaatgaaaaggggtcaagatttggaccagatgacacccaatgtcccattcaacggtcgcattctgtcatccacaggaattagtcctgtatccgaaacattctctggtagtcaaaagcttataagcacaagatgtgaaggaggccacacttaaaaaaaaacttgaaatggagtttcatttggaaggacactgactaaggaaaaacagagaaaaggatgaaacccaagccaactctgcaactctattaaaaacaccaagacttcaatataatctccttaaagggaggcagtgcattcttcatggctagagcttcagcagctatctagaaccatatggtggaagccacttactgagaactgtgaaacaagagcctgggtccctgacatatgaagccaccatacctaccttaacctctctttcacttgagggaaaaatacatctttcttaggtaaa

SEQ ID NO: 228660 - DNA, 412 bp, Homo sapiens
cagatgtataggagaaaatttatcacgtagataatgaggatattcagagactaattagcacctttatatgttctgccttaagctgattacatgatctgagtcagatatactgatttgatttctattgttttgttgtgctttatactccagtagtttgagtaggtgagggaatgttctccagttctgtgccgttttccttgggagattttcatctcccacttctatccattcttagtctggtttgattgtcttggatggtttttctcattcctttttgtttaaacttgggaaagagactttgattttgtctttaaatttttgtgttgattttaatataccaactgcttgctgctttgggcgtgtatctgaaatctaaaaaacattactcaacattttatttattccaacattt

SEQ ID NO: 228661 - DNA, 526 bp, Homo sapiens
tttagttttatctttgttacctctttaatcataaatgctctttcataatcaactttttaatttccctctctatgcttcgtgttagacttaatcacatcattgcttttgttacccaaaatggcggcatacaggtggattgaaatggaatcaaatacaaagaagtctgcaggattttcatgggagttgcacaggctctagggacaacagcatggactaaaaggcactgaaattaccccaaacacaaagagatctgcaggcttccagattatcttggggtaggggcagactgggaaatctacccagccactgaaatggctcctttcttcagaaatccagatgccacataaggtgatggagaagaaaggacatctcagagtgtgaacccaggagccatgcagaccagtggactgaggaatgactctgggggtcaatgaggcccaaatcaaagtgcaatgctctctcctggaggtgccagcatttgccctgtggatttcagaattactaaagaccagtgactgctctgtgc

SEQ ID NO: 228662 - DNA, 522 bp, Homo sapiens
tttagttttatctttgttacctctttaatcataaatgctctttcataatcaactttttaatttccctctctatgcttcgtgttagacttaatcacatcattgcttttgttacccaaaatggcggcatacagatgtggttttcacctgcacttgtaactggcgtttgagtattgttggcacactcaccggaagaatgttcccgtcccctgccccaaacctcacatcttcatcctgattagattgagtttcagttctgccaaggaccaccctgaatttattttttcttgaaagatgaacgaaagtggtcaaggctggtctacttctgaggcttttgaagggaacccgctcttcatttcttcctgggcagctcttgagagcatccttctatcactgcgttccatggtagctcatccattctggttgtgttgctccgtgtacccttctgcatgaaaagtcatccttcttcagcttgtaacagtgcagcttttatttgaaataaaagtttatcctccgtgaaatggt

SEQ ID NO: 228663 - DNA, 649 bp, Homo sapiens
tttagttttatctttgttacctctttaatcataaatgctctttcataatcaactttttaatttccctctctatgcttcgtgttagacttaatcacatcattgcttttgttacccaaaatggcggcatacagatgtggttttcacctgcacttgtaactggcgtttgagtattgttggcacactcaccggaagaatgttcccgtcccctgccccaaacctcacatcttcatcctgattagattgagtttcagttctgccaaggaccaccctgaatttattttttcttgaaagatggttagaaagacactttttctttgtctgaaactgtgtttattattgagcaataatttggtttgatatgggatttgatcttaaaaagtaccttcctttgaaattgatatgacactccattgcctttaagaacgaaagtggtcaaggctggtctacttctgaggcttttgaagggaacccgctcttcatttcttcctgggcagctcttgagagcatccttctatcactgcgttccatggtagctcatccattctggttgtgttgctccgtgtacccttctgcatgaaaagtcatccttcttcagcttgtaacagtgcagcttttatttgaaataaaagtttatcctccgtgaaatggt

SEQ ID NO: 228664 - DNA, 158 bp, Homo sapiens
tcatctaaggtaatgagttaaacccaaaagtaacagtgacatgataagtgaaactgtttgcatactttgttttttaaattgctctatcatgtttatcttttttatagctactcaataagacattgcaatgaatttttaattaaaaccaatatgtctat

SEQ ID NO: 228665 - DNA, 210 bp, Homo sapiens
gcccaggatgtggcaggaatggcaaactccattgccatcagaggccgacaaggtaatagagggaatgggcataaggtgcaggaagtggaggggagtagagtgacccagagggtgcatgccccacctaaaggcattcaaatctattatttcaaaaactccatgctgacaagcagagtgtcctggggactaaggctgcagccgtgtagatgg

SEQ ID NO: 228666 - DNA, 480 bp, Homo sapiens
ggaacatatgtatgcctcctgcactcagacgtctgcttgggagacctcttgagaggggtgaaaccatcccggtaatgagtgaaaactcagaattgactgaatatctctccaaaagagactgtttgaaaccagaagagaatgggctatattctattggcaagctcaagcattattttctgctatttatagaaataatacctaaaagacaagacaaagtcagttatcacagctccaggcattgtggcttcatgcaactatgaccaaagcaggaagaaaaggaatggcagagacttctcagaagctctccaacagacttctctttgaatctcattggccagaactggagcacaaacccattcctaaaccaacttatggcaaaaagagggttgtcaagattgtcctagaccagttgtaattggtacctttgatcaagtgggactcatggagtatagttataaaacaatttcatttttgtctcct

SEQ ID NO: 228667 - DNA, 206 bp, Homo sapiens
ctctctaatctaccttaaggctagtaaaataaaacatgagacaacagtagcaacaaaaatcaagcaaattttccatgagctgcaaaaaaaaaaatttttttttttcgagatggagactccctctgtcgcccaggctggagtgcagtgagccgggatcgtgccactgcattcccgcctggcgacagagcaagattctgtctcaaaaa

SEQ ID NO: 228668 - DNA, 453 bp, Homo sapiens
aagcaagagggagaataacaaatcactcatgctctcaaagcccatacttacaaagagaaaacaggcaccgatcattgctgctttgactgttacatctagatctgcaggaacatgaattccgaaattgtcagcatttgtgaagacatcatttacaaatcctgaccagtactttgaaatcttcccaattatggagaatatcaggataaataattaaggctcagccaccacaagatggcagcaggtacatagttcaattgtatcatctaagcatgaaggcgatttctttacttgaggtccagattttaaacctgaattctccatcttaaaaatgtaaaagaagatatgtttgaaaaaatatttcagaaggaattaaattaatttctaggcataatttgtaaactttcaaatttcagttgctaaaattttataattattaaaacatttaaatattat

SEQ ID NO: 228669 - DNA, 591 bp, Homo sapiens
gtctttaagatcccctagtctccatgggatttgctcagttgtgaggtgcttgagaaggctgaagtttcctaggggatggtagtgtggtgaaaaggtcaatcattttttgtctaaaccattgaagaaccctctgtagtcggaactaaaccctagtgaagcatcagggaaaggtgaaacaccgtccattgagttctagtccttttctggttctctggactgaggaatactaccgagcattccaggcaaaaggccaggagttctttcaaagatgacatatgcttgatcagaactagctgcataatttgcagagttcagtacatattgaaagttgggcctcttgttctaatatcattaagaatttcaagatggccacagcagagaatcaaatatgggacctgtctgagcacagggccctgtgcagctgcatgggtcacatgcccatgaagtaatccctatatttgacagtagcctaaaagtcacctaggaaaaagccaggcctacgcattgaccaagaagtttttccttgtctgatcatgtgcccactgagataatagagtaatatccatgccaggaactttaccaatatgactg

SEQ ID NO: 228670 - DNA, 190 bp, Homo sapiens
ggaaggatttaatacatctcatctaaaaaattgtatccattataaaacttctgcctttgtgaattttctatcgtgaccactgtttctattaaatccaatttttctggacatatatttgtaggtctaaattttatcaaaacaatttgatcttttataaaatctctaataaattcttcagtgtgaaatttta

SEQ ID NO: 228671 - DNA, 251 bp, Homo sapiens
gaacaatatttaaaaatccatacttacaaaggaattcaagtagaagatatctgttttgtctataaaggaatctgccattatcatcttttaaatcacatgtttgaaaatataatttgtattcctgggtcctcttatttatcttttatctttgagatgcattcttactctgtcactcaggctggagtacagtgagctgagatcacgccactacactccagtctgggtgacagagtgaggggactctgtctctg

SEQ ID NO: 228672 - DNA, 360 bp, Homo sapiens
atatttgatggttaaaaatgagaatgatcataaatagattaaccatactgtatagataactaaccaaggagttttggcttaatgtgatttgctccataacactgtgccaatgacatttcatcagggttggcataattgtgaagaaaatatttgtattcagggtcaatagtgtgccaggtcacaagaggagttccaaacttcttgtttgcctcttgagaagtttttcttgttgagctgctggagtaaacactcattattatttttattaacttctacctgtgtggcttagtccaggaagctgcccaaacactattgagatggagttgttttgcttctcttcaaatgtttatctttttgcta

SEQ ID NO: 228673 - DNA, 500 bp, Homo sapiens
aattgggaaagattccattacacaggtgacatttaagcaaagtcttgaataagggagggaatagtaccatgagatatcctggtgaaaagcaatttaggctgagggcacagcagggaagaggccctgatgtgggaacatccctggtgtcttgaggtacagaggccagcatggctggcacggagtaagaagttggaggtgccgggcatggtgactcacacctgtaatcccagcactttgggtggctgaggcagatgggtcacctgagcccaggagcttgagaccagcctgggcaacatggtgagaccccatctctacaaaaaaatacaaagaaaattagccagatgtggtagcatgcatctgtagtcccaattgcttgggaggctgagatgggaggatcaaattacttgggaggctgagatgggaggatcacttgagtccaggaggtggaggttgcagtgagctgagatcatgtcagggtgacagagcgagaccctgtctca

SEQ ID NO: 228674 - DNA, 479 bp, Homo sapiens
ctaaatctttgagatattggtaagtataacatttattcttgcttgctcttttcctctcttctcccattatttggcctatgctttctcttaaaaaaaaaaaaaaaaagctttattgctgggattacaggcatgagccaccgcgcccggcctatttttaattttttgaggaattgccatactgtattccatggcatttggaccattttatgttttcatcacagtgtgcaaggattccggtttctcccattctcactaacacttgttattttggttttttgagagtagccatcctaatgggtgtgaagtggtatctcattgtggttttgatgtgctcttcagtgccattttaatttgaactatatctctgaaacccactcattcccttttttcctaaatctttgagatattggtaagtataacatttattcttgcttgctcttttcctctcttctcccattatttggcctatgctttctctt

SEQ ID NO: 228675 - DNA, 468 bp, Homo sapiens
gggctggagtgaaggagtcctgatctatggttgatattaaatgtaactaacttcactatctaatgtgccttcttctttttaagaatgagattggtggcatgtctaaagttggattttggttctaatacattaaaaaaataactttcttatcttgaaaaagcaactagtgaacagtagagatgcttgctcactttatgagtgccatgtattaagggagttttgaagtgatatttatctgtacaacttcaaatctaccatggcattctgtggtagagtaaaaactttagagctaaacatacctgatgtttatacatgacatatagctgcatgtccttgggtaagttatttaatttctctcaaccctaaattttgactgtttaaagtaggttttataggttttatgtaatttgaagtgttgttgtaaataataacgataataaaatatcttacacagttcttggtttgcaa

SEQ ID NO: 228676 - DNA, 296 bp, Homo sapiens
ctgctacaaataatgctttcttgtgactggtctggcaatgatagcaaaacagcatttcctctggtattttcctatttatgttccataagcaagagaaaacaaacttggattttcagatgtgatacacttcaaagagcagtaagttagtaagtacgctaacatttgatcctcacaaaaactcaagcttcaaattatctctgaagaaatagtccaaattaatttaaggtaagtaaatacagtactcatatttgtataacataacttagagcctactttttaagtgccttatatgtagt

SEQ ID NO: 228677 - DNA, 297 bp, Homo sapiens
caagtcctttctcaatgcttgtaattctctgagcatatctattaacacattattttaaaaaataactactcagcaatattctgagtaaactttagaatgcctaagaaatatgtagggtgctatttttaaagggccactgccagaaatttgaaaattgtgaatcagtaagtttaagacattgcccaagaatctgaactttaatcacccctgatgattctttttctttctttctttctttttctttcttctttccttcctttcttctttctttttctttctttctttccttccttcttt

SEQ ID NO: 228678 - DNA, 202 bp, Homo sapiens
ccctgggcaacatataagaccccaactctacaaaaaataaaaaatgtaaaaaattagccagacatcgtgtctcacgtctatagtcctagctacttgggaggctgagatgggaagatcccctgaacccaggagtctgaggatgtagtgagctatgatcacgccactatactccagcctgggcaacagagtgaaactgtgtaca

SEQ ID NO: 228679 - DNA, 1215 bp, Homo sapiens
agcggagttccggtccggcagagatcgcggagagacgcagaacgcagcccgggacaggccgagccctctgccctgcagataacggaggcctctgctgtggctgcccactggctgtgcccgcccactggctgtgcccagaccttgaagccgcagcgaacctctctttcccaccccacctcggtgactaatggcggccgtggcgtctcccagcccggaccccgccggcacccgggtctcccgacccaagcctcgacgaaacccccgcagagccgccgggacgcagcgcctttgggcggcgctgggcgtggtgggccgggaagtatggcggcagctcgaacgccgcgcggcggaggccattaaggcgtggacggcccgggaaggcggcctagggacgcaagcaggctcggccgcctctttaggccacggagccgcgcagatccggttcccgggtgaccactctgtcgccattgggcgagacctacctagtcctgacgacaacggacaaaggccttaaggggcctggaaggtgagcgaagtcccgaacgacgacgggtggaacggttagcggccatcgggcggttggtcttcattctaccagactttgctgtcggaagagagaaatggtagaatgacaggccacgtttggcccgttggaaatgcccaccaccctctgggaagatttactggccgtttatggaaggcctgtgtatataatatgaaaaagctgctctcaactccaccccaaccttttaatagaaaacatttgtcacatctagcccttctagatggaaagaggttgccgacgtatgataaaatagagttagaaagttacacatcttgtaaattctcatttgtttaaaagaaatcatagaaaatacatgtcttctggagatgacttttggaaatggagttgttaagacggcctctggaagcgatacgtccacgtttgttaagtgggttagatgacatggagctggaagacctgagaaggaagagaagaaggttctatgctagactggtcatatttagaagacattttcatattctatccattgttttgtgtgcattttattcctcactactgtgtatatagttgacaatgctaagcttttttgaaatgtctcttctttttagatgttctgaagtgcctgatatgttaaaattagaggtagcaaaatcacattttgtaaatacctttttgttacaattcatagg

SEQ ID NO: 228680 - DNA, 1275 bp, Homo sapiens
agcggagttccggtccggcagagatcgcggagagacgcagaacgcagcccgctcctccagggccctccaggccctccggccccgggccggcgggtgaactggggggccccgggacaggccgagccctctgccctgcagataacggaggcctctgctgtggctgcccactggctgtgcccgcccactggctgtgcccagaccttgaagccgcagcgaacctctctttcccaccccacctcggtgactaatggcggccgtggcgtctcccagcccggaccccgccggcacccgggtctcccgacccaagcctcgacgaaacccccgcagagccgccgggacgcagcgcctttgggcggcgctgggcgtggtgggccgggaagtatggcggcagctcgaacgccgcgcggcggaggccattaaggcgtggacggcccgggaaggcggcctagggacgcaagcaggctcggccgcctctttaggccacggagccgcgcagatccggttcccgggtgaccactctgtcgccattgggcgagacctacctagtcctgacgacaacggacaaaggccttaaggggcctggaaggtgagcgaagtcccgaacgacgacgggtggaacggttagcggccatcgggcggttggtcttcattctaccagactttgctgtcggaagagagaaatggtagaatgacaggccacgtttggcccgttggaaatgcccaccaccctctgggaagatttactggccgtttatggaaggcctgtgtatataatatgaaaaagctgctctcaactccaccccaaccttttaatagaaaacatttgtcacatctagcccttctagatggaaagaggttgccgacgtatgataaaatagagttagaaagttacacatcttgtaaattctcatttgtttaaaagaaatcatagaaaatacatgtcttctggagatgacttttggaaatggagttgttaagacggcctctggaagcgatacgtccacgtttgttaagtgggttagatgacatggagctggaagacctgagaaggaagagaagaaggttctatgctagactggtcatatttagaagacattttcatattctatccattgttttgtgtgcattttattcctcactactgtgtatatagttgacaatgctaagcttttttgaaatgtctcttctttttagatgttctgaagtgcctgatatgttaaaattagaggtagcaaaatcacattttgtaaatacctttttgttacaattcatagg

SEQ ID NO: 228681 - DNA, 462 bp, Homo sapiens
ctaaacattttttctgagtataaaattactaagtgtagaaaatctggaaaatatacaaagaaaaatcaagattttgcattttgagtggcacagcttaagaaagctatttgaattggtctgattccctgaaaacaatatatgcatgtatttctgagccaggtttggttatagggagaaaaaaacagaaaagacaataaatctgggcattaataggcttaaatagtatttagttatttgggatctgaagaagaatctccaaaggaagcttgtccaaaagtggaaattttagcatttatatttaggtccaatttgggttgctttaaatgtcttttttgtttttttaagttaaaaatggagacagtctaaatgcaatgtgggattctggattggatcctggaagagaaaaaggacattagtggaaaaactggtgaaatctaaataaagtctagagttttgtacata

SEQ ID NO: 228682 - DNA, 453 bp, Homo sapiens
gagatgatactgggcagaatcaaataatttggtgacttttagtatttaaatggcaaaaggggtgagtcaaagacaattgcttggtattgagcttgagggcctaaaggaacagtagtgctattgagaatggacatgctgagttgtctgtggtgaatcttgtaaatggaaatatcttactgaaagttggaaacgtgggagcagaatagaggtaagagtatagatacagatcttgaggtcataacaaaagtgatggactttaatgaatgagctttctagaagaagtttagagagaagatgacatatgaagtattacagacagctacttgaaaaatgcccataaaaacaagagaagtaaggaagaatccaaaagataggaagaaaaaccaaaaaaggacaaaaataaggggttttaaggaagggatagatagtacagttaaatgcagtagggactga

SEQ ID NO: 228683 - DNA, 522 bp, Homo sapiens
ctgccaactcaaacgagctaagttgacttcctctcttctctttgactttatttcccttctctgtttctatcagccaaaatctacctgttctccaagactctgctcaaatacaatctctttcttcaagccttctcagatgtctccacgtgaaagtaatatttagcatcctttagcacattaaagcgttcctgtgcccagtggttctgaaattttaacgtgcatcagagttccctggaggacttttacaaccataaattgctagacccccagccacagtttctcatttagcaggtgtatggtggggcacaagcatttccatttctaacaagtccccaagtgatgccaacactgccgagccagagaccacactttgagagctgccaccagaacaagactgagcatgtctcacttccccttataaagcttcttgggaacagaaaagaattctgtctttgtatttccataactcttcagcccaagtttatattcagtagatactcaacaaatatttatcaaattaaa

SEQ ID NO: 228684 - DNA, 502 bp, Homo sapiens
tgacctgtttgaaaacagaaagaaaaagaacaacatcaaattgtatgtacgcagagatttcatcatggataactgtgaggagctaatccctgaatatctgaacttcattagaggggtggtagactcggaggatctccctctaaacatttcccgtgagatgttgcaacaaagcaaaattttgaaagttatcaggaagaatttggtcaaaaaatgcttagaactctttactgaactggcggaagataaagagaactacaagaaattctatgagcagttctctacataaagcttggaatacacgaagactctcatgagatggtttctctcaaggactactgcaccagaatgaaggagaaccagaaacatatctattatatcacaggtgagaccaaggaccaggtagctaactcagcctttgtggaacgtcttcggcatggcttagaagtgatctatatgattgagcccattgatgagtactgtgtccaacagctgaaggaatttg

SEQ ID NO: 228685 - DNA, 437 bp, Homo sapiens
cgggggggggaagaaggagccaggcagtaggttgtggggttacaggatcgggctgaatttcagaatgaagagaaccagagatgggccaaatggtttacctggcttttatttcggctctgtaataatcctaaacagtacacagatattttctcctgcctccagcttgctacctgcagatggcgctcatcatctgatccaaaactgctctggacccccgcatgcggaagacgggaggacaagcgccctcagccagacttggtgactgtttctccccagggcctttacatctcatcccaaaccacaactaaaatcagcactcctcctctcccactctcccctgagtttggggttccagaactcagcaaaaagtttccctttttcctcacataattattgtataagaaataaagtcagaggcatttctggattactttcga

SEQ ID NO: 228686 - DNA, 415 bp, Homo sapiens
taacctgtccaggcacgatggaacattgaataaccccttattctaaattcctggtccctgtaagactccttccccatgcccttgcccttttatgaccttcccctaaagtccttgaggcttaagcgggcatagtctgcagcaaacactggggaagctgagtccagacttcagagcacaggctttggatctaggccagctggatttgaacctcacatttgtgatcagctggcatgactgtttccaaaaagtccattttaatcctctacgtgaccctctgtaaaatggggatactgaacggtgagctagcacgattttacagagagtgaatttttttttttttttttttttgtgagacagagtcttactctgtcgcccaggctggagtgcagtggtgcaatctcggctgactgcaacc

SEQ ID NO: 228687 - DNA, 527 bp, Homo sapiens
agagcataagagtcacaatatttaagaaagcgaattttaagccaattgcttgctggcctgctgaatttgaagtacttctatctctcacttctgattaaacatggaagaaaacagactggctaatttggttatactttgtccaaatacaatgttaacgtaatggaacccttaaatatccaaaataataactgaatgctagttataatacaataataaaaagtttaaaaatcttccaaatgtgctgttaacagtacaaattcaagtacagaattattatgccattttaagtattatctactttataaaaaaatcacagtggtcttcatcacatggcaaaaaaacaaatttcactcttctccaaaggagtaaggccatcctaaatgtaactacaaacaattgtgtaaaactttttgggttttttcccacaagctactaaacattttccattgcactatacttgaattactcagggaaaataagatgacatatgttgtagttttgcagtgcaaaaaagagctttcatttta

SEQ ID NO: 228688 - DNA, 199 bp, Homo sapiens
atttttaaatttaacatcagtgagggcatcctatccatttcatttcatgattccattacatcatttcacttagatgaaatgatgacttgagatgaaatgatgagatgaaatgacgaaatgatgagatgagatgatgagatgaaattttgagatgaaatggtgagtagaaatgatgagatgaaatgatgagacgaaatga

SEQ ID NO: 228689 - DNA, 465 bp, Homo sapiens
tttcaatgagaattttaagttggtttaaaatatttttttctttaccggaggagtggtattataggttgaggagttaccggttgaattttgtccccctcaacaaagatgttgaagtcctgacccccagtatctgtgaacgtgaccttatttggaattggggtctttgcagatgatccagttaaggtgaggccattaagggtgagccctcatccaggatgactggtggcttttaaaaggggggaattttggacacagtcacagggagggcaccatatgaaggtgaaggcagagtctgcggcaatgtttctataagccaaggaacctgaggattgccagtgacccccagaagttaagggaggggcctggaacagattctcccccagagccctcagaacaaaccctgccaacaccttgatctcagacttctggcctccagaactgttcagcaataaacgtctgttgttt

SEQ ID NO: 228690 - DNA, 373 bp, Homo sapiens
gagtctctgctagtaatttcattatttttaaatttgaattaattgacttaaaataatacagttaagaagtataaccagcaggattatggagaaaggtttctttttccttaaaaaaaaacagtgctctcagtgttacacttaagatgagattgaaattttcttttttacgccaggtgccccgttctaagattcagagcagcaatgtgaatattcatccttgcagtggagctgagagaagttgtagggcaaatcctgggaacaaggtcactttaaacaaaaaagttctccaagtttcccatgcttataaggctggctgggcttaattaaagtcaatggatgaccaaaaaataaataaataaatagagagagagag

SEQ ID NO: 228691 - DNA, 1745 bp, Homo sapiens
gaaaaaaccctatgaatgtacgcagtgtgggaaagcattatcctctcttacaagttttcaaacacacataagaatgcactctggagaaagaccttatgaatgtaagatatgtgggaaaggcttttgttctgccaattcatttcaaagacatgaaaaaactcacagtggagagaaaccctataaatgcaagcaatgtggtaaagccttcattcattccagttcccttcgttatcatgaaaggattcacactggagagaaacctatgagtgtaagcaatgtgggaaggccttcagatcttcctcacaccttcaattgcatggtaggactcacactggagagaagccctatgaatgtcaggaatgtgggaaagccttcagatctatgaagaaccttcaaagtcatgaaaggacacaaacacacgtaagaatacactctggagaaagaccttataaatgtaagctatgtgggaaaggcttttattgtcccaaatcattgcaaagacatgaaaaaactcacactggagagaaactctatgaatgcaagcaatgtggtgaagccttcagtagttccagttcctttcgataccatgaaaggactcacactggagagaaaccctataaatgcaagcaatgtgggaaagccttcagagctgcctcagtccttcgaatgcatggtaggactcaccctgaagataaaccctatgagtgtaagcaatgagggaaagccttcagatctgcctcacacctttgaatgcatggtaggacacacaatcaagagaaaccatgaatgtaaagaatgtgggaaacccttcaggtctgcccagaaccttcgaattcagtaaaggacacaagcacacataagaatgcattctggatagctgaacaaaaggcagcagaaacttctgcagacttaaatgtccctgtctgacagctttgaagagagtagcagtcctcccagcatggagtttgagatctaagaatggacagtctgcctcctcaagtgggtccctgatctccaagtagcctaactgggaggcacttcccagtaggggccaactgacacctcatacggccgtgtgcccctctgtgacgaagcttccagaggaaggatcaggcaacaacatttgccgttctgcaatatttgctgttctgcagcccctgctggtgatacccaggcaaacagggtctggagtggacctcaagcaaaatccaacagacctcagctgagggtcctgactgttagaaggaaaactaacaaacagaaaggacaaccacaccaaaacccatctgtacatcaccatcatcaaagaccaaaagtagataaaaccacaaagatggggagaaaccagagcagaaaagctgaaaattctaaacatcagagcgcctcttctcctccaaaggaacgcagctcctcgccagcaatggaacaaagctggactttgactttgacgagctgagagaagaaggcttcagatgatcggtaataacaaacttctccaagctaaaggaggatgttcgaacccatcacaaagaagctaaaaaccttgaaaaaagattagacaaaatggctaactagaataaacagtgtagagaagaccttaaatgacccgatggagctgaaaaccatggcacgagaactatgtgatgcatgcacaagcttcagtagctgattcaatcaagtggaagaaaaggtatcagtaattgaagatcaaatggatgaaatgaagtgagaagagaagtttagag

SEQ ID NO: 228692 - DNA, 901 bp, Homo sapiens
cttatttgtgaaatcctagcagtccaagaagaaagacttgcatatattgatattggcatctctccaactaaatgtcccaaccagattaccctgcagtaagctcacaggccacaagccctactcacatgctcagtcagtgctctccagctaaatgtcccaaccaggtcaccctgcagtaagctcacagaccacaagccctactcacatgctcagtcagtgctctccagctaaatgtcccaaccagatcaccctgcaataagctcacagaccacaagtcctactcacatgctcagtcagtgctctccagctaaatgtcccaaccaggtcaccctgcagtaagctcacagaccacaagccctaccctttgccagctgtatgacaaaaattaggaggagatttacattttaatcatatggatatgcataaagccatcccaaaggtaaccataagaatgtctactagctcttcaaagttggggcagaagtttaaccgctctgtggggggctattctagctgggagttggcggagttttacagagtccgtgaatgggaaactcctggggtgtccctaatatatgcgatgcgtgattcactcttggcaattgggtcatccggatggcccctgcagagcttctgcagggtggcgagcttgggattggacgcctattgcgcgttacggtggcttgtaggtaccgggccggttaattcgagcctagacgtcttggttctcgtgttgtgcgtcggttcggtaagtaagggcccattggccgttcagtttcgcgccaaagattgggcgggcccctagcgtttggggccttttgggttaggaacacgcttgtaggcgcggggaggtaaagtaaccaggtgcgcgttattgaagtgagctctcccgcgtatcgtc

SEQ ID NO: 228693 - DNA, 384 bp, Homo sapiens
acttactaaatgctaagcactattcatgcattagttcaattaatcattacaacaattctatagagtaggtggtattattattatccttattttcctcattaagaaaatgaggccaaaataggcaagtaatttgcctaaggccacacaggtaacaaatgatagaactagaattcaaactctagcagtctggttccagagtccatcctcaatggcaacaaactgtgtgtatgtatgtatgtgcactcacacacattcacacacacacccctttaaggggaatatactaataacaggaaaaagtaaatttgttattttactttttaaagtgttaatcccaaaatggtataatgaaagcttgcaattaagtatcaagaaaatcacaca

SEQ ID NO: 228694 - DNA, 503 bp, Homo sapiens
agtgcttgaagctcttggatgggaaataagaggtttgtcactgagagctctctgctgtttggtcagcaggtgtctggttctggaatgttccaatgaagagtcctttttcctctcctctttaccatctttctgggggcttgtctgctgtctttcccctctggtccccttctccacatcactcctgatagggtctccaggggttcaggaagtgttctaccccctttctcccctcatctgcctcacctcccacacccagctgtcctctcgggtctgccttccccacctgcaggaggtcatgtaggggttcgccagataatatgggtccatggagcagggctgggggcttgtggagtggggttaggtatgggcttgtccctgctccaggcaccctaacaccgcaaggagcagctcaccccaatctcaccttcaagaagcagctgagcagttgactcggggtacgcagtgtttgacaaaacgaaatataactcaacttaaaagtgaag

SEQ ID NO: 228695 - DNA, 497 bp, Homo sapiens
tggagaaccagctggccgagatccgctgcgacctggagcgacagaaccaggagtaccaggtgctcctggacgtgaaggcccggctggagggtgagatcaacacgtactggggcctgctggacagcgaggacagcaggctttcctgtagcccatgttcgaccacatgcacctcgagcaacacttgtgagccatgctcagcctatgtcatctgcactgttgaaaactgctgcttgtgaatgttaaggacagcaggtagaggaatcaaagccagcagcatcctagaaaggagatggggcttcaaccagggacatccaaaccggaagcacaaatccaggaggctctcatatcctggaattgccctccaggtatcctcagtctttctgctttactatttcctctccttccggcttatttgtggtatactggaagcccataaagcattcttgctcatctccaaataaaacgtgttttattcctttagcgtggtaaatatagct

SEQ ID NO: 228696 - DNA, 347 bp, Homo sapiens
attattcctacgttgttgttactattctgtgtctttttcttttttaacatctttaaaggtatcaaatttttatattttgaaagtagaatttattttttgtcagtctaaaatatttttatgttgaacaaaatgcatgaatggtaaacctagatgcaatcaatttttcaaataaaaaaagtagatacccatgaacatttcttttgtaattgcaaactgtcttgaaaggcagtttcaaaaagagtttagttcctaaattgtaccattactcactgcgttaaaatgcaacattcatttgagcgtataaccttttgatcaatttgtttttgatgtcttgttccctgagagtt

SEQ ID NO: 228697 - DNA, 455 bp, Homo sapiens
tatcacagttagggaggccttcccagagtttatttcagtatgtttaaggtttctttttctttctctctgaccctccatttattccttttacatttcatccatttgcaatttgtatatgaagtgtgaatctcatttttttcctcagatgcctactcagtgcactatttgttgaataatctatcattttcctgttgtgttgaaatgtcacgttttccttaagttaaaattctccacatagctctatttattttgggactttctattttcttccttgggtctgtctgttaatatcttaatatcacactgttttaatgattgagactttttttttttttttgagacagagtcatgaaagtggctcatgcctgtgattccagcactttgggaggctgaggagggtggactgcttgagcccaggagttcaagaccagccaacatggcgaaaccccatctct

SEQ ID NO: 228698 - DNA, 262 bp, Homo sapiens
ctttatttggtctggcctggttataagaacttagaagggtaggcaaaggacactataggtagctcacaatattctcgttaagttcactgcctcctcaaataaagacaactccttgactgttcatttcagactgttcattaaaactaattcagatctgctgaaataatgtctacctttgtagggggcaaaagaacattcatcaaaaaatttcacatagtgaagagaattgttcactttcttgagagtgaaaaccaataaactt

SEQ ID NO: 228699 - DNA, 422 bp, Homo sapiens
ggtgttattgagcaagacaggaaggcagctttctggataatcgaacgtgctagtgaacagagtgttgccagagatactccaggtgtacactcagatgtatacgtcatatgctccctgagtgattacgtgttccaggctctgagggtaggaaaatgaagacaacagtctctgtctcagggaagctccaggtccacaggggaaaatggaagtcaacgccaagtggtactgcagagtggcaaacaacacagcacaaagtgctccagaaacactcatcaggggtcagccatatgctggaaggcaggcaatggcccactccacagggaccctcacaaaacacacaaggcttggatgatgaaggggagatggaaaggctttgtagtttttcagggcaattgtaatgaatggcaattatcatggtaaca

SEQ ID NO: 228700 - DNA, 689 bp, Homo sapiens
ataaaataaaaatgcctgagtttggcatatataaaataaagcctttatttcccccacactatctaccccaggccttcatccatagactctatgttcttgctattttgaactatttataattccctctttcttcttctctccatgccattgaagaagccattccctctttctggaattctctttcctgttctctgcctggctagccccagattgtcctatcaatgaaatccttattgccttctatgggcaggcttctctgggagatctgggctagacatgcctggaacaggaggaagagaggggaagtgaatcagtgaagatgacttgggtggctgcttttttctctctctcagtatcactgtgccactgcacaggttcttgcacttccccacttctctttccctttagtcttggtcctgatgatctcttctttcctcctcttcttaaacaccagggaagaggaggagaaagcgtgtggacacatcactcagataaacgtttgagcagtgaatggatatcgtctcatgaaatggaaggctggtgtcctgcctcatccccagcaactccagtgctgggtttaaagagatgatgcactccaatgcagaacatgacacccggattcagacatgaagcgtctgttccttcaaatgcttagtaataaatgtaatggtttgctagagtcaaggtca

SEQ ID NO: 228701 - DNA, 622 bp, Homo sapiens
gtgacttttttattgccgtttttttaaacattaacaattgtttttttcagggaaggacaaccataacccaccctaagttgcaacattcctttcataagttgtttcattatgatagtagattgtgttgaactatagaaattaatttgttgtgtatatatccatttgtggcaagctgctgtggaatgggaagcagaggtctggagcttaaatacagtttcttttgaaattaacaacatgttaatgacatgtaccatgctccttgaatgtaacagttttatcacatttgaatgtttcacattgacttaaacatttgagtcaaagcataagggtttctgattgataaattctatatacacctaagaactggtaaataaatttgttcaatttcattgattttcaacagaagcatatttcataatcaatattataactatgataaattatgataatcagtaacaggttatcagaatcaaatgtaaatgttatataaggatcaataagtaacaggttatcagaatcaaatgttgttatataaggatttctctattttcctcccattaatttatatacatactaatattctagtcaagagatatactgaatgccttactattagggccaa

SEQ ID NO: 228702 - DNA, 572 bp, Homo sapiens
gtgacttttttattgccgtttttttaaacattaacaattgtttttttcagggaaggacaaccataacccaccctaagttgcaacattcctttcataagttgtttcattatgatagtagattgtgttgaactatagaaattaatttgttgtgtatatatccatttgtggcaagctgctgtggaatgggaagcagaggtctggagcttaaatacagtttcttttgaaattaacaacatgttaatgacatgtaccatgctccttgaatgtaacagttttatcacatttattgataaattctatatacacctaagaactggtaaataaatttgttcaatttcattgattttcaacagaagcatatttcataatcaatattataactatgataaattatgataatcagtaacaggttatcagaatcaaatgtaaatgttatataaggatcaataagtaacaggttatcagaatcaaatgttgttatataaggatttctctattttcctcccattaatttatatacatactaatattctagtcaagagatatactgaatgccttactattagggccaa

SEQ ID NO: 228703 - DNA, 303 bp, Homo sapiens
tgcgcagtatttgaggaagataaattatcaggctcctgcttccaaagcggttttatcttaagaacctttatggggattgttgactgttggtcacatgccctaccacttaggtttcaggccctataattagattccgggcagtgtggtttgaggggatactataatgaagacaatatcagaacacttggaggtgaacttggagctccagaggacattactattccttactcacctttcatagatctgcctttatttttcttgtctgagtcattttttcccatggagtcaattctctaaaaactg

SEQ ID NO: 228704 - DNA, 410 bp, Homo sapiens
agcccattgaattatgagcattttcttggaaatgcagcaaaaatgtgttctgacagatgcctttgggtcccttgggttctttgctaagacagctatagagagagggctcaataaggtggggcctgtgatgggacattgcttttactgcactggtgatagaacaaaagtcagacagggcacaacacacactgatacaaccaatcacccagtcacactgcagccttaggaaacccatgagcttgtggcagcaggcaaacttgcttcagagttccaagaatccaaatgttcctggtgtgtctgttgtcttgcgatatagactgagatcacaggattgaagatacgaccagagtcatgctgttgaaagagactggctgagtagtgatgaaaaataaacttggtcaatctatgct

SEQ ID NO: 228705 - DNA, 985 bp, Homo sapiens
cactcacacaaagcgctttctcagcgagtgcggctgcggcgtaagtttggttttgcaaatctcccgtttccctccccgtgtggagtctgaggacccgccagtcagacaggagttatttcctggtggatctttccaaacatattattaaaaagtcacatgtgactttcccacagacttttatgaaataaaacccaaaggaacagcgtgcaacatgctcagttatggaagagaaaatattttatgatttcaaaaagtcctgacaaattttcaccctctctaagaaaggaagcttaagactataccttgctgttgtcacttacaagcagggatctgttggggtttggaattctctgtctcagcccggagcccagagttcagcgatagctgaatactggtgcgagctcagaagcttccgtgtgcggagaacaaagactgaggcgctctggggggagagcgctgtccgaagtgctgatcagacttcggatccacccaccgctcaggccgcctcccaggggctgaagggcggcagccgaaccggagagacgtgccggcggcgctcttctgtcctgctcttttccctggactcctttgtcttgacggggtcagctaaagacttcgaacctttactcatcaaagctcatcttcggaaactgctcatagcactttaacctcccggtgggagctcccagggcgccctaggtcctgccagcaggcaccgatttcaagtttccaggcacattctgaatgctcctcctggcagcgccacagagggtctgggggcccattcccgacccccggagcgccacacctcaggaggcctgtgattgttcaaaaggggaagtgagaaatgccgaaagacttacgttttcacaaatacaatttctattacctgaaaaaactgttgtgccccacgaagcccgtgttgcgcaggttcatctctcctgctgccacctccgcttcgctgtggtttcttaggtgtgactgt

SEQ ID NO: 228706 - DNA, 475 bp, Homo sapiens
acctttaagattaaaaaaaaaaacaaacaaaaaaaaacggcaaagttagaacacacaaaagatagtatagttccttacccatccaccacttggttttgaggagaaaagggaaataagaagagttgaagagaagaaaaacagaacagaagagtgggaaaggaagatgaaagggtgctctggagtactatgcacctgtttagaagtggggaagtagcacaaacactagcaaaagaagaaccaccatggagttcctccttgcacatctctctcccctcctgaaggcctagggtgagcccacagcattgttccagcagtgagggagtcttcactgccccctgagactctctcacggctcttaagatacctccctgaagtccctccaaagaattcaatgtgcccctagtctaaatcagtttcctccatcataaatactcatagatgatgcaacaataaaacgttaataacgataatggca

SEQ ID NO: 228707 - DNA, 1649 bp, Homo sapiens
  misc_feature (124)..(124): n is a, c, g, or t
  misc_feature (891)..(891): n is a, c, g, or t
  misc_feature (894)..(895): n is a, c, g, or t
  misc_feature (905)..(906): n is a, c, g, or t
gtcatgttttccaagggtgatttatattcctaggggatttgggtggttctcgcttctcaaaacccatatcaaatgactttgcctgtgactttttacaaaaattcttattctaatacctctctgngcccttcccaagcacacagatgatgttcagtaaatgccagacctctttcctcccatttcccatgtgccctgcctccctcacagccagtctgctctccttctttcctcccttcctctctttgccctcttcatccctctttcctttcccactatattctcatttgtgcaatttcccagttaaggtcagtgtcaccctgacttctctttctttttttaatcatcatctgtctttcttgacatttcacatcctgaataatttccttcagagaatcagttctttaagacatcagaacatgagtcaccctgcgaggtaccaccagactaacaccagggaccagcacccattctagcaaaacactgcctaagcagcctgaactgcgctagtttctttaatgagggttgtagcacagaaagttgctttcttttttttttaaagaaaggaaatcctctagcccaactaagctttcctgttaaacaagtgctttgagagacccattcagagtacttttcactagaaggacctttattgtgttttgtgagaaggaaggacaggcacaaacatgctgttagaatgtgccatggagaaagataagcccacaggttcgagtggagtaactttaccctttgtgtaaagattcagcaaagattctcagaaatgagcgggaatgttttcagtgctatgggatgagctctgtcgtttcctgatgaacacacttctcagcatgtgttctgggaaacactagtttttgtatttttggagttttcttnttnnttgtttgttnnttttgaggcaggagaatctcttgaacccaggagacggaagttgcagtgagctgagatcgcatcattggactccagcctcagcgagaacagcattgaatttccctttgtatgaactgtcttttcatgtcctttagccattctctcttcaattgtttctatggtttttttttctttttgatgttggactttttatctacttgttttccttgtttgctgcagtgtgtaccaaccagtgcagcttcttggttgttggtgggtctgtaagcaagcgttcggagccagcacagagaggatgagaggagggctgcactcatctgctcttccagatggcactgatcaaaggacgtggtgatcatgggaacactctggagagcacgtagccatatttagatatattgacaacacaaccatttagtagactcagggtgactttaagccacatgtcacatggcagctgttaaaatcatctctgtacatgtacatggatagttctgatggcacacccttgttagctttgtagcttttagctaaagggccatatggtgaaggtgcattttttgcatttcttatttcttctcttttctttgtcaatatatccattctagaaaatgagatgagccaggcacagtgtggtgcatgcctgtaatcccagctactctgaaggctgaggcaggaggatcacttgagcccaggaatttgaggccagcctaggcactgggcaacatagtgagactccgtctctt

SEQ ID NO: 228708 - DNA, 773 bp, Homo sapiens
atgaaaaaaacccaaaacacctggttgatggccatttggtcaaacacctctaggagtctggagttgagtggccagaactcagtctttctttacatgctgtgttaagcaggcttttatctcattcaggtgttagaagtggagggaggaacacagttaggctgtgttctactgcactgcatagggaggcagggtatcacccaggcacaacgcccactttgcaagtaaataatcagtagcatgaagctcacttctgcaggacccaccatgacaaagtggagagctgggcggttaaccagtgaaccaattgagtggctctgggctcctatacccctttcattccacagcctgtgatacacccttagagtcaaaatatcaaattcagtgggccatgagtcttgcccaaaagtataaatctttttttcatatggactatttgggtctattttcaaaaatccctttttcttctctaaactatctcaattccacatttcactttgcaggtgtagacatgacttttaggttgttgatgatttaatgctattgaaatgttcttatatgcaaaacacctagatagatgcagagtgtgggacaaagacaaccagcacattgctaagcccaagtagcaaatttcctgaccccattttaaaggttctgagacagataggcggaataggtccccctgtctttgagtagaagagttggcaagcaagctggactaaatgggccatgtgcaattttgctgtctgttcacatttcaaataaactaatgtgtt

SEQ ID NO: 228709 - DNA, 508 bp, Homo sapiens
ggaccctccacactcttggaactgtacacctagaccaaactaaaatacagtcactcttgctaaatgtaacataatcaaactaagactttaaggaaacaagcaaatcctagaaaagaccaggtttttgtattttttttcctcctgtaaacagtaccttccaacataaggaggtaccctctactctaacacttacaaaaataataagaataataacctggagtccttgtaaggtgaaaccttacaaaacccactgctctgctgtttcctagtgggtttcaagaggaaataagtacttttacagtggtgatggtgaaatcaatgactaacattttggtcaatctcccacaatttagagaatgaccaaaacgggggaattgttaaatcaagtttatcctaaattgatgggatcaatcatactccaaaccttgacactgcacaatatacccatgtaacaaacctacacatgtacctcctgaatctaaaataaaagttgaaattctaaaaaatg

SEQ ID NO: 228710 - DNA, 472 bp, Homo sapiens
cattattttcatcttcaggttttctttcactatctaatttctttcttttttttttaatcaagctctaaacttgatgttattgttctggggccccaaatctttgtgcttgatttagttttcacttggaagagaaatagtcaccatctatttgcaggtgcaagttaaggcctgttagaaagcttggcgtctacgctatgagctctgagtaatattttctagtgtatagttttgatcagatgaagtgtgtatttgtgggaagaaagaagcttgtattgttttatgtttgtaccataggtcataattactgtattgtttataggataataaactcattaggcaattatgccttgttgggttatttgaaacatttgtttttaacttgaatgctctcaggtaggtaataattagatttcatttgggatcttttattttaatgaaagttacccagaataaactgcattttttttggttt

SEQ ID NO: 228711 - DNA, 435 bp, Homo sapiens
caagagggctgagcaggaaatggagcccctcatttggctgcaattaccactccacagggggctagggctggggaggggaaaagatacgaagggcaagtaaattaatggatgtggcattcctaaggagaatgggaacagggagttagcctccaataaatcaaacgctccagacccccaaacgcacagatgagcagtgcctcttctgagtttggcctgcaggtatgatacacgccgtgtacatgtgtgcacacatgcacagactgaattttgtgaagtaaattgcaaatccaagagtttggggggacaacaccagaaaaacatttacgtcattcttgattccaaaatattctgctggaaaatgtccaaaatctaataaaatttaagttatatttctctgagagctctaaccgtgaaaaataaagaaaaaaataagcc

SEQ ID NO: 228712 - DNA, 383 bp, Homo sapiens
tcataattcatttttatttattcttttttctattagagacagggcctcattctgtcacccagcctggagtgcagtggagtgatagatcatggctcactgcagcctcaaactccagggctcaagggatcctcccacaccagcctcctaagcagctgagactacaggcacacactaccatgcccagctaattttttttctttttctgagacggggtctcgctatgttgcccaggctggtctcaaactcctaagctcaagtgatcctcttgcctcagccttctttttttcagacagagtctcgctctgtcacccaggtttgggttttctgtccttgtggctgaagggaccctgagtgaaggctgcagactcatcaggggcagatgg

SEQ ID NO: 228713 - DNA, 454 bp, Homo sapiens
ggaggaaaacagcaatgtttctagccttgaggctgggtgctcagtaggatggcaatgtggtaacacacacaaagcagaggaccatgtttgggtaaaagatgatcagtttcttttcagatatgttgcatttaacatggaaacagaatatccaaacagccctattctagactagggccccaaatgtgagggctgtccttatcttactaaggatagagataaattgtattactcctctggggaaacccaacggatgagttcaccttccgagaatgttgaacctactcacattgtacaggcttctcatctttcagaaaaagttaatgacttctagactcctccttatcctactctgcttcaacatctccttacagcgcaaaccagcttggagatagcctttgcctgcattttgagcagtcaagacattaatcaaaagtcttgtaatgatgccatgggg

SEQ ID NO: 228714 - DNA, 412 bp, Homo sapiens
ccttttttgttaaacttattttaaatgctttagtatttaaagggtatatgtttttaattaatctgcatatttaaaaactttttgtaacgcgaataactacttcctgatttacatctcaatatattctcctttcatttgcccaattaaaaaaatatgtagtctctattattgctgtttactaatagttttagatcccaatgtgtattagaattatagctacaaaaagttgcaagtaaaatttaacaatttcctattgaaacaggatctcattattatgtttttaaatgtgtagaattaacactttaaataaacaggtgtgaaaattgtaaaggaatatatatgacaactattttctgtacattaacgtccaaacattatacttgtttttcataataaaaaacattttgaaaca

SEQ ID NO: 228715 - DNA, 805 bp, Homo sapiens
ctattatatgcggtttaaatccagataccagtaagatctgtatgttgtgattgattgaaatgttttaggaggttttcccttccatctgttttcctcttactattttatttgttgaagcaacttgcttatcccatagagcaagggttgggcaggattttgctgattacattcctgtggtggtgttcaacatattcctttgtttattgtattttttgtaaattgttaaggtggttgtagcatctagaggcttgctctcagattcagcgttaacaccccactccagcacacacacagccacctcataggtgtagtactgtattcttctatttggatgcacataatatctggttgtctttttgtgatggtaccagtcattgatgattcatacccaattaggggttgcagagggatgctattctaattctatcattcttctttattgggtggactgtttctagaaagagaaactttcccttatttactatttggttacccagtggtatcatttacacaggaaagccaggatatatgtttgattctttcctttttatttaccaattttcagaatattgagctgcttcactggcatctctgacagtggccagttagttcttaatttttccttttttcccctttagattcattttgaactcatggatttgaatatatgtaatgtattttggtccatcgcaggtattatccttaatgcttttgtccatacagtgagagcctcatcaggttggctcttgagtcttctcaacatgatcctagagactttgattgatccttgcttgctgggatgtaa

SEQ ID NO: 228716 - DNA, 761 bp, Homo sapiens
ctattatatgcggtttaaatccagataccagtaagatctgtatgttgtgattgattgaaatgttttaggaggttttcccttccatctgttttcctcttactattttatttgttgaagcaacttgcttatcccatagagcaagggttggtcctttgtttattgtattttttgtaaattgttaaggtggttgtagcatctagaggcttgctctcagattcagcgttaacaccccactccagcacacacacagccacctcataggtgtagtactgtattcttctatttggatgcacataatatctggttgtctttttgtgatggtaccagtcattgatgattcatacccaattaggggttgcagagggatgctattctaattctatcattcttctttattgggtggactgtttctagaaagagaaactttcccttatttactatttggttacccagtggtatcatttacacaggaaagccaggatatatgtttgattctttcctttttatttaccaattttcagaatattgagctgcttcactggcatctctgacagtggccagttagttcttaatttttccttttttcccctttagattcattttgaactcatggatttgaatatatgtaatgtattttggtccatcgcaggtattatccttaatgcttttgtccatacagtgagagcctcatcaggttggctcttgagtcttctcaacatgatcctagagactttgattgatccttgcttgctgggatgtaa

SEQ ID NO: 228717 - DNA, 752 bp, Homo sapiens
ctattatatgcggtttaaatccagataccagtaagatctgtatgttgtgattgattgaaatgttttaggaggttttcccttccatctgttttcctcttactattttatttgttgaagcaacttgcttatcccatagagcaagggttggcacaggcatctcatgtagtttgccagttgctgctatagagcttctcctttgtttattgtattttttgtaaattgttaaggtggttgtagcatctagaggcttgctctcagattcagcgttaacaccccactccagcacacacacagccacctcataggtgtagtactgtattcttctatttggatgcacataatatctggttgtctttttgtgatggtaccagtcattgatgattcatacccaattaggggttgcagagggatgctattctaattctatcattcttctttattgggtggactgtttctagaaagagaaactttcccttatttactatttggttacccagtggtatcatttacacaatattgagctgcttcactggcatctctgacagtggccagttagttcttaatttttccttttttcccctttagattcattttgaactcatggatttgaatatatgtaatgtattttggtccatcgcaggtattatccttaatgcttttgtccatacagtgagagcctcatcaggttggctcttgagtcttctcaacatgatcctagagactttgattgatccttgcttgctgggatgtaa

SEQ ID NO: 228718 - DNA, 849 bp, Homo sapiens
ctattatatgcggtttaaatccagataccagtaagatctgtatgttgtgattgattgaaatgttttaggaggttttcccttccatctgttttcctcttactattttatttgttgaagcaacttgcttatcccatagagcaagggttggcacaggcatctcatgtagtttgccagttgctgctatagagcttcgcaggattttgctgattacattcctgtggtggtgttcaacatattcctttgtttattgtattttttgtaaattgttaaggtggttgtagcatctagaggcttgctctcagattcagcgttaacaccccactccagcacacacacagccacctcataggtgtagtactgtattcttctatttggatgcacataatatctggttgtctttttgtgatggtaccagtcattgatgattcatacccaattaggggttgcagagggatgctattctaattctatcattcttctttattgggtggactgtttctagaaagagaaactttcccttatttactatttggttacccagtggtatcatttacacaggaaagccaggatatatgtttgattctttcctttttatttaccaattttcagaatattgagctgcttcactggcatctctgacagtggccagttagttcttaatttttccttttttcccctttagattcattttgaactcatggatttgaatatatgtaatgtattttggtccatcgcaggtattatccttaatgcttttgtccatacagtgagagcctcatcaggttggctcttgagtcttctcaacatgatcctagagactttgattgatccttgcttgctgggatgtaa

SEQ ID NO: 228719 - DNA, 660 bp, Homo sapiens
aggaggcggaggttgcagtgagacgagatcacgccactgtactccagcctgggcagcagagcaagactctgtctaaaaaagagaaagaaagcttgaggactgttgggaatattggaattattcttcgttatccttttacctttgtatagtaccttacagattacaaagtttttggatccattatctcatttcctcctcatcactaactgtgagagcctattgatagggctcagaagttgagtgagtttgccaaagttacccaagtaccaggacttgaatgtgagtcttctgacttcagtgttcattttacccatcacacctgcctcttaaagtagagattgtcatattgtcctgtgtaaccttggtcgaggctaccttcacattgtgagtgctaggtcctattgtggtgaacacaccttcgggccagcatcaccaaagtgatcaagggtgtagagagtctgctgctggacaggctaaatgtgccaggactctcctcagtggaaaaggatttcctcaaagtctacagatccaggaaggaacaaatgttaccttcaccatacaggcttaagaaaggcaaatttgggacattaagtaactgtgtagacttctgcttctggctaagatggactaacagagaccagacttacctttgtccctctg

SEQ ID NO: 228720 - DNA, 606 bp, Homo sapiens
aggaggcggaggttgcagtgagacgagatcacgccactgtactccagcctgggcagcagagcaagactctgtctaatccttttacctttgtatagtaccttacagattacaaagtttttggatccattatctcatttcctcctcatcactaactgtgagagcctattgatagggctcagaagttgagtgagtttgccaaagttacccaagtaccaggacttgaatgtgagtcttctgacttcagtgttcattttacccatcacacctgcctcttaaagtagagattgtcatattgtcctgtgtaaccttggtcgaggctaccttcacattgtgagtgctaggtcctattgtggtgaacacaccttcgggccagcatcaccaaagtgatcaagggtgtagagagtctgctgctggacaggctaaatgtgccaggactctcctcagtggaaaaggatttcctcaaagtctacagatccaggaaggaacaaatgttaccttcaccatacaggcttaagaaaggcaaatttgggacattaagtaactgtgtagacttctgcttctggctaagatggactaacagagaccagacttacctttgtccctctg

SEQ ID NO: 228721 - DNA, 283 bp, Homo sapiens
ccttattaataggtgacttttcattcagtcaacaaacatctgtaagatagttaccgtacattgtactgtattctgggtgctggggatgtagctaaacaaaataagcaaaaatccctttgctctgggagtgtacattccggttagaagagattattaataaataaattttatttatttttgagatggagtctcacactctgtcgcccaggctggaggttgcagtgagccaagattgcaccactgcactccagcctgggcaacagagtgagactcgaactaaaaa

SEQ ID NO: 228722 - DNA, 516 bp, Homo sapiens
gccctggctccacttggttttgtcctggttcctctgcaagccccatcacaccctctgtcccctgatgtggggacttctccctcttccattcttctcaacacagcccctcagaaaactccacctctgacctgactctgctttctaatatttttttcaataccttcactcaatgatatcttgcatgcaattcccttttcttccaatgatgaggagcataatagctaatttgttgtgttttgtggcagaagtatttaggtattttcagctttcagaagaggaaactgatgggtgataatagatatcacagtagcatattgttctgtagttctctatttgaacctaggtcaaaataaaaagaattggatttaaattgcagcacaatagagatctttttgatacctaaacaattcaacattggaatggattattaatggaggatgtgacattttactcttgaaaatgcttgggagtaaatagaaagtttaaaaaaaaaaagtcactcttgaaaaaaaaaaa

SEQ ID NO: 228723 - DNA, 236 bp, Homo sapiens
aagggtctgcgacgtcagtgacataaagcccaataggacagaaaaaggaagcacttctctcattggaagtgttacctagatgtgggaatgacagtgcagtcattgtgaatggaggtcctggggccgaaccgcccaggtgagaatccagcctctaccaggagaagctgctgaagtctcatttcttcacctgtacaatgggcagagttgctttgaggattaaatgagataatccatac

SEQ ID NO: 228724 - DNA, 446 bp, Homo sapiens
gcaagaatagtagatgtgaaattgttgacatttaaatctgaaataagatgaaatggcacttcttgtctcttctgcctccatgtgagaagccaacagtgcttcaatataggatcacaacagctatgtttttgtctccccttgcatctgctttaggaaacacctgtttttttggcaagttgttttgatatcaggtagtcaattaagctgcatcatattgagcgtcaaatcttaattttttttaatagcaaaaggtgaagatccagaggactttgaactacaccaggcatcatttgaaacatcatgcagtttgtacctctagttaccacaggtgaattaaaccagctaatcaactgcagaatacatctagtatttttcccaatggtgtgctgctctttggggaaaagatttaaaggtttaccaaataaagttttgttcctgcactaata

SEQ ID NO: 228725 - DNA, 443 bp, Homo sapiens
aagattgaatatttcagggtctaaaggtagatatgagaatgattttgaagggagttatcaggacaaagggaataatgagtttgaactgaggaagaaaagactgaggatttataatcttatttttcgttttgctcttcaaactttatttcaactttctaaccccttatcattatgagaagacatgttgtcattgacctggagttgtcttttatagttgtgtgaccatgggaatagtaatgacacttactgatcagtatatgaactctggcagagaactatatttagatcatcacttgttccctggatggcttccaccagttttgctatataattttggaactcaatattagtgcttgtacccctcccttgaattctgatattatgcttattggctcttttcctgaagcaattaaaccatcttttatttgggctaaaaattttga

SEQ ID NO: 228726 - DNA, 488 bp, Homo sapiens
gtaaaattcattacaaataatgcagtctttatcatttttattcaaaagaattttaagggttttcaggaccactgttttaagctttcaaatatccataaatcaacagcattcagtagagacgaagtagagtcatacaaacctgtgttgaaatcttgacttggccactgaacagctgtgtggctgttaccctgagctagtttataatcttttagagcctcaatttcctaatttgtaaaatggggttaataacagtaactccttgggtaattatgaggagtgaataagataatgcatgtaacatgcttagcctggataacatactccacaaacgttagccgttgtatgtaataaacaaattaattatctgcttttgtgagttattgtgtgggagacaagtatggatggcacagtgcctaagatcaagtagctcaatagactagttgggatcacaaatactgtaaccactacagtgaagaaagcaggaatcc

SEQ ID NO: 228727 - DNA, 458 bp, Homo sapiens
caatgatttgccagtcatctgttttagagttgcattttaaaacctacttaagttctgaaatatactcatcagaaaagcaaaggtgctcagtttttaacctgtgtattactcatagaaaatactcaactctcccagaaaaagtgaaaggcaattataaagaaatgcagttgccattctggtaacatgtatgccaaacaagtccttatcagatgatgaggttcatgaaggcaagagttacttgcatttactacttttatatcgctctcacaatctaacatttttcatacaataggattacaataaaactatgtagaatgactacgtgaaggagatcaactcataactcatcaattccagacactgtttttatcttttcagataaaagggatcgatgtccccaaagaataatgcccagagccaatagatctggcctctgaaagcgctgtggttacataaga

SEQ ID NO: 228728 - DNA, 704 bp, Homo sapiens
  misc_feature (540)..(540): n is a, c, g, or t
tccttgcaagcattggaagttaaaacatgatggccatttattgatgatttattgatctctctgtatccccttgggcactagcggattctcgacagaaccacaaagtggagttggctgcagatgagtctgttcatggccccagtttctcacctattcctgagtcaccttttgcccctcagacacagagatgggatagcgccaggatgtgggtttgtgttgtctaatttcttggagtttgtacaggttttacctggtaccagcgtgaccttcccatgtaccctcttggtcagcaactttttacaaggagttaatcccactttctggaacttgctcattctcaaagtgagtggttattggtcctcaagacagtccgcagaaatttcagccccatgggaaagaaaaaattccaggtctctacctgatgcttggaaagccagccatgttaacttagtcaacaccaatgctcatcaaatacacacatttatctagtgttcccaacctagattcccagcctgggattctgtgggccagagcccagtngtagagattatagcctaatgtcccagcagagaatcactgattgcagataggaaaaatccagacatttctgaactccaagaccacagtgatttatgtggcctggtgataagctatgattgatatattactcaaagtttctgcttcccccaactctggcaagaact

SEQ ID NO: 228729 - DNA, 738 bp, Homo sapiens
actgctcctttgcgggatgaaccgcattttatctattcatggacgctaggactgcttccacgtggcttctgtggacaatgctgtgaacattgtttacgaggttttgcgtggacctgttttcatttatcttgcatagatacctaggagtgggattgctggggcgtgtggtgaactttcataatgtcttgaggaactgccaagccatcttccgcagcggctgcattacctagttcccaccggcaacgctggggagggtcctggcgtctccactccctcgacagctcctgccgttgtctgtccttgtgattctggccgtcccagggggtgggagctggtgtccccttggctttgatctgcgtttccctggtggccagccatgtggggcctctctccctgtctcatccacccgtgcctgtctttttttcattcattcacttatttatttatttagagacagggtcttactctgtcacccaggctggagtacagtggtgtgatcacagctcactgcggcttctacttcctgggttcaagagaacctcccatctcagcctcccaagtagctggaactacaggcgtgcaccaccatagctggttaattagaaaaaaaaaatttggccaggcgcagtagctcacgcctgtaatcccagcactttgggaggccgaggcgggtagatcacctgaggtcaggagttcaagaccagcctggccaacatggtgaaaccccatctctactaa

SEQ ID NO: 228730 - DNA, 685 bp, Homo sapiens
actgctcctttgcgggatgaaccgcattttatctattcatggacgctaggactgcttccacgtggcttctgtggacaatgctgtgaacattgtttacgaggttttgcgtggacctgttttcatttatcttgcatagatacctaggagtgggattgctggggcgtgtggtgaactttcataatgtcttgaggaactgccaagccatcttccgcagcggctgcattacctagttcccaccggcaacgctggggagggtcctggcgtctccactccctcgacagctcctgccgttgtctgtccttgtgattctggccgtcccagggggtgggagctggtgtccccttggctttgatctgcgtttccctggtggccagccatgtggggcctctctccctgtctcatccacccgtgctctgtcacccaggctggagtacagtggtgtgatcacagctcactgcggcttctacttcctgggttcaagagaacctcccatctcagcctcccaagtagctggaactacaggcgtgcaccaccatagctggttaattagaaaaaaaaaatttggccaggcgcagtagctcacgcctgtaatcccagcactttgggaggccgaggcgggtagatcacctgaggtcaggagttcaagaccagcctggccaacatggtgaaaccccatctctactaa

SEQ ID NO: 228731 - DNA, 423 bp, Homo sapiens
tggtgttctggattaccagaataaaaggggtgggggaggaaagaaagtttagcaagagcagagttttgtaaatagtgttgtaacaggaaaaagaaaacggttgggtgactgtgccaacaggaagccactgtgagcttagaaaagagtctatgcattcctaccaggtgagggcaatgctgtaccataatcctaatataaaaaggatcattccgtatatttgtttgaggaaggatacaggttaatctagatggatcaaaaggtcttaaagttcatgcagaccctttcaatacctgtactaattacagcgcttcttccaagaagacgtggatggtcttggtaacatttatgctaagacaaagactgaagtaatttcagtaaattccataatgttaataaagcatacaagcttaaactctctggaaa

SEQ ID NO: 228732 - DNA, 643 bp, Homo sapiens
aaataggcatttactttttctatttcactaactgtatgcctcctatttataagacaaaatagaaacatgaggtttggttaattatgtacaacctctctatcaggcatctattaccgtagctcatatatatataacaaaaagttgtgtgggaggtgaaattttctatttcctcgtaactgagcacaaactgaaaaattctgatattccttactatttgagtcttgcttttttcctgagtgcagaaagtgaaagatcagaaagtgacagattccaatctgttatgtcttggatttttgggaggcatgagtccatatggtacacactaccatgtcttccaaatagccttatctgaaataaaaaaaataaattatctgaacccatttgttgtctaaatttgaatagcaaaggtttagatagcaaaggatacctttacacccattccaacacgggattagcaaattgattggaacttgcatgctaagtctgattgattagtgatatttctagcaagggcatgggaataagaagtaatgatacacatgccctataattgccaccctttttctttccaaaatcagtaatttttaatttgagctctcttatagatgaagcattacagcaatggctatcttggggagggaga

SEQ ID NO: 228733 - DNA, 157 bp, Homo sapiens
tgaggattatttgcatctgtactcataaaggatattggtctgtaacatctttgtctgactttggtatctgggtgatactggcctcacagaatgagttaggaaatggctcctcttcttttatttttggaagaatttatgaaggggttttgttaattta

SEQ ID NO: 228734 - DNA, 474 bp, Homo sapiens
aattgtagctttatattctcattagacattatatagtacttgatccataggtgtgggatagcagagtggcttatagagggaggaattggatagtgatttgggtgagctgttaatccaaagaaaggcaaaatttggtgggatagaggtagcattggattgggccagaactctgacgccacaacttcttagagcagctaggtcaaacatcatttttttgcactactttttctacccgtaagacaaagatgtggactagaagtttcctagggcttttcaggtttaagattctggagcttgcccttctttctctctttaaaaagatagaaaagaggaattgttctggcctttttaggatatagtagagagtgtctaaaagatatccttttagattgactttccccccctgtgatttagagattttgtaacttttcattggggtttttttttttttttttttgagacagagtctcgctc

SEQ ID NO: 228735 - DNA, 468 bp, Homo sapiens
ctgggcctcccaaagtgctgggattacaggcgtgagccaccgcacccggcatggaagaggataattctgatcatgaaaagttacccaggagaaggagatttgtagtgagagggcaggctgggcgtgctggcctacacctataatctcagcactttgggaggtcgaggtgggcgaatcacttggggccaggagttggagaccagcttgggtaacagcaaaatcctatctctaataaaagtacacaaaattagccgggtgtggtggcgagcacctgtaatcccggctacttgggagtctgaggcttgagaatcgcttgaacccgggaggcagaggttgcactgaggcgagattgcaccagcctgtgcgacagagcaagacttcgcctcaaaaaaaaagaacataaacttttaatgaagctggtaggctttcaagttcaaatataagtgatgtttaagaaaaaaaaaatct

SEQ ID NO: 228736 - DNA, 415 bp, Homo sapiens
ccataaataattaatcacctgtagttatatcactattgtattttatatattttaagatctacattttaacctctctgaaagtggaatatatctactaatctatgctaaattaagagttttactgggccgggcacggtggctcactcctgtaatcccagcactttgggaggccaaggcgggcggatcatgaggtcaggagatcgagaccatcctggctaacacggtgaaaccccatctctactaaaaatacaaaaaaaaaattagacttgcgtggtgctgggtgcttgtagtcccagctactcgggaggctgagtcaggagaatggcgtgaactcgggaggcggaccttgcagtgagccaagatggcgccactgcactctagcctgggtgacagagcgatactccatctcggaaaa

SEQ ID NO: 228737 - DNA, 427 bp, Homo sapiens
caaattaagaaagttttcaatgtaaatgaagaaggagaaattattttagctatgttggaaagttaactatcacagagaaaaaaagcatgctaaaaaaaaaattaggacaacagtggaaaagtatccagtaattcccatgaaaaacaacatattagggagttctatattcaggcagagagagagagagagatcggtgtaaagaaaataggtataatcacagtattggttttttgttttttgcccaaggaagtaaataaaatttaagaggtgagcctcagtagacctcatgactaaacatggtgttggagaaatgtactttgcctaaacggaatagccaacagatgaggtgagacaccagcaacatatatacatgagcacatgcatcttcccagggagacgtgcagttttgatcacattcttagggtgg

SEQ ID NO: 228738 - DNA, 417 bp, Homo sapiens
actgtgtgctgagcacgtggggtgctgcaggcccttgtgctgcagagaagctggcccttgcctcaggcggcagagcagggaagtgcagtgggcctgaagccatgcggggctgggagggatgacctggtctgtcctctgagccaggcactgcacttggaatgggcttcttgaacgcaaagcccagaccaagtgtggcagaaacatgaaaggacaggcagtcggctgctgtgggcgggaggcaggacgcccaggcctgtccccacccccgtgacccagagcctccctgggcagtgactccaggatgtccaggagcttcttctctacctcacaggactggagaggctgtggtgagacgcatcctgtgaaggctgggctggccacaggcagctccccagggcgcccaccgccatctgctcc

SEQ ID NO: 228739 - DNA, 509 bp, Homo sapiens
gcaaccaccactctactttctgtctctatgaatttgactactcacagaatttgacctcacagaagtggaatcatacaatatttttccttttgtgtctggcttttctcacttcacgtgttctcaaggttcacccatgttgtggcatgtgtcagaatttccttccttttttaaggctgaatatcctattgtatggacagaccacattttggttatccattcgtctgtcttagacacttgggctgtttccacctcttgctactgtggaaaatgctgctgtgaacaagagtgtgcaaatatctctcagagcccttgcttgccatgctcttggaaggcacatttttttaaactgcacacaaggagcagttgctgcaggccaagggaggccaggctgctctcttctttggtggcaaagctcatgtttgatggagaaagcagaaagtctgggaagccttgggtggaaagaggaggggtggcaggtgagtagagtcaggttggggcaatcccagcca

SEQ ID NO: 228740 - DNA, 271 bp, Homo sapiens
cagaaagggatcaaaacagtacctactacataggcgccccaggaagatggatgagaccatgcagtgagggcgcctggctagcccgtggtacatgagcacttgttaccactactgtccatcattattacaaagaagaagaaaagaggactgctgccatcataaggctatttctccaagttgacatgtatttcccatgggctcagatcaattccctcccacacctaaagaaggtcccctttaaaatggcaataatcatcaacaacacaagttc

SEQ ID NO: 228741 - DNA, 717 bp, Homo sapiens
tgcgggccaccacacccggctaattttttgtatttttagtagaaacagggtttcaccgtgttagccaggatggtcttgatctcctgacctcctgatctgcccacctcggcctcccaaagtcctggaattacaggcatgagccacagcgcccagcccgagatacagcatctaaagcataggtctttctgaaatgtgactccctgtctcctctctgtataacccctggactgggagtccccggggctccctccactctgcccccagagctgggctgcagcccctgggcctctctcacagccgtacctctctccagcagaaggtgctgagggtcctggcttgaggcccatcctccttctgcagggccccatgccggggtggctccagcacctgcaggccaaggcccgggagagtggggaagcaggacctggcaacgcggagcagtggaggggccagggtgcagctgcgactgtgccccctctactgctgaagttttgtgcccccagtggggatgacagcaggcagcacctccagctccacgtgacgtcctcaaggggagcacccaggccgaggccacatccagcgagaaggcatgcctcagggcgggagtgcaggtagaggatcctgcctgtgtccactgcctcttgggagaagctctgcacggggtccaggctgggtggctcatctgccaagatgccacgcagcaccatcaccaggtag

SEQ ID NO: 228742 - DNA, 298 bp, Homo sapiens
gtctgtcacatttcctttggtccttagtttttaggagctttgcttttaaatgggtatacaacacttcaaaagcatgggtaagctgtgatctaaccatttcccttattttgtgcattcagatgccataaagcactgtggtgagagtttggatgggcctgcaacttcaaatgcacattctacattaagtccagacacaaaacagtagtaagaattatgtcagtacacagtaggcatttaaacatcccaagaaaaagaaaaacattccctgaaggaagccatgagttgagaaaggacagcc

SEQ ID NO: 228743 - DNA, 618 bp, Homo sapiens
attgcaaatagaaaaagtagtccaatgcccaggcttgggaacagggagacatgagggtccagcatttggaagtcaaacatagctccttccaggaataatttctgtcacctcagagaaagcgatcgtgaggcactggtgatatccatatcccccttcacacagtcgtccacagggctggcctttcctcagtacagtaggcaattacccacaggctgtgttccaaagggtgccagagaagccattgtcactgccccacagactgcaggctctgtaacagaaactgcatgatcagtgactcattaagatttccatgttcagagaacctcttcctaaaagccaaagaatcttagtaggattaatatatccagattgtaacatttagtattggtaagttcatcaggtggcctgtgaatttcagatcagagggctggatttaagagctttgtgctgaaagaggagagcaaggccatgaaaagcaagatgtggaagatgccaaggatcaattttgccttcataattttgtttaataatggtcttggtcaccagcatagagtctttaaagtgaatgcatgcccccagagggcttgcaaaacaatccattgagatgtgagaaataac

SEQ ID NO: 228744 - DNA, 976 bp, Homo sapiens
ggctcattaaaccctatagaactaacagcttttaaggacattaacagaaatatatcttcagatggataaataagatagggacctattcaagacagcagcatttttgtattgtgatacctcccctaagttactctcacaataaaaccttatttgagaattttccttcacttcaatctgtgacatagcattaggcatttagtataccttatttgtgaaacctaaggttcattcaacagatgaagttgcaaaacagttttcttggtagactcttggaacttgctcagttttttccttactttacctgcatgacacacattgggttgaaagttgtttggttttacccttcatttctcttaaatatgatttggttctttttcatgcattatatttttgaaatatatggaggaaatattttattgaatcaagaaatagaaaatattccttaaaccggtagtaaaaaggtgagttagaactccatgtctggaagacaattcaacttttaaaatattaagatgctataccacttaacaagtgaatactaaaatttttaatttaaagattgattgttctgtttttatgaccatgagaaaaatgtgacagcttcagctgtcatatgtttatcttgaatgcttttctaattatgtatttctggattattgactttgaatgccacagaccaactactttacatagagtaaaatattgattaacttttgtgctttgggtcactggcaaaagttgaacatcctgttaagtcaaggttaaccagaaacctttttgttcacgtctgaaattgaatatttataaaatgtgttagtatgtttcctgccttgataagttcacctatattgaatgtaatttgatctttgataattttttttaatcttgagaattctctgatgctgttttgaataccagtgttcaccatgttataaagttaaacataaaaattgaaataaattgaactaaatatgca

SEQ ID NO: 228745 - DNA, 487 bp, Homo sapiens
agaaactttatagtactacatttcatcaattgtaaggcatttttttttccacataacatttcagaatataggatacatcttaaagatgatggtgttatagttttaagtggtggtgttttttctttcttagcagtctgtaaaataatactgatagtgtctttaattcagtgcaataatgaccaatcatatgacatagctgcgtaagaacaggaactttgtctatagccaaatcatgaaatctgtgtatcatttttacccaaaacaataataaggtatctagttatccatagcagttttctgtaatctatcatacatattaaaaatatacaatttctctccttggttaccttaagttgaaaacagtccacagtgataataaacatactacaaagaataaactgctgaagaaatgccaaaacaaaataaagaaggttttgcgtttatagtgtatgctttctatgggggaattgaataaatgttgtaacac

SEQ ID NO: 228746 - DNA, 515 bp, Homo sapiens
ctcagaaggagcaaaaagcagagcagaatctaataggctgcttgcatacctgtcactggattcgatgaaatcctgttgtttattatgcacatgtcacatacctcaaaaatcaagttcttgggagagggaatttaattggcctaacttgtatcacccgcccttgggccggtcccaccaatttgcatgtaattgggtacagaattaaggtagtccccaaagaaaaaaatggtgctattaacaaatagagaagtatatgctgggtaggcaatatcaacagatttcgtctatgttaactttgagttggtttgctactagactgcagccttgttttaatatcaatttttttttctcgaagaattttactctttcaacaccaaggaaactcaagacaatagaaaactactggacaatagcaccaagtaatgtatttgtgtgtgaagactcactaatttatgcaattatacctcaatctatgcagtatcttcctaaagattattaaaaaatcaaatgtattt

SEQ ID NO: 228747 - DNA, 624 bp, Homo sapiens
gtcatgttttccaagggtgatttatattcctaggggatttgggtggttctcgcttctcaaaacccatatcaaatgactttgcctgtgactttttacaaaaattcttattctaatacctctctgcgcccttcccaagcacacagatgatgttcagtaaatgccagacctctttcctcccatttcccatgtgccctgcctccctcacagccagtctgctctccttctttcctcccttcctctctttgccctcttcatccctctttcctttcccactatattctcatttgtgcaatttcccagttaaggtcagtgtcaccctgacttctctttctttttttaatcatcatctgtctttcttgacatttcacatcctgaataatttccttcagagaatcagttctttaagacatcagaacatgagtcaccctgcgaggtaccaccagactaacaccagggaccagcacccattctagcaaaacactgcctaagcagcctgaactgcgctagtttctttaatgagggttgtagcacagaaagttgctttcttttttttttaaagaaaggaaatcctctagcccaactaagctttcctgttaaacaagtgctttgagagacccattcaga

SEQ ID NO: 228748 - DNA, 250 bp, Homo sapiens
atccagtgtttcttccctttatttttttcttcataaagactaaacacactgttcatatcattaagaaaatcatgctcaacactctaaactgggctttcattctcaattctaatatcaaggttaattatgtattgatttaaattggtcttttttgccttgaatattaactcacatacaattcagtggaattggtttcttggtgtgagatacaaaatgctttcttctttacaaacataggcttgacaaggta

SEQ ID NO: 228749 - DNA, 325 bp, Homo sapiens
gaggagggccaaagagttctgtttaggccacatcaagtttgagaagcttatgaaacattaaaatggctgtgccatgaagcagtaggcactaccgtgaccaccctatctaaaactgccaatccggccgggtatgatggttcatgcctgtaatggcatggtggcgctcacctgtaattccagctacttgggaggctgaggcacaagggtcacttgaacccaggaggcagaggttgcagtgaaccaagattgcaccacctcactccagcctgggcaatgaagtgagactctgtctcaataaaataaaataaaattccaatccttcaac

SEQ ID NO: 228750 - DNA, 475 bp, Homo sapiens
tgagctcaagtaacccaccctcctcagtctcccaaagtgctgagaatacaggcgtttgagccaccgtgcccaactgataaaattaattttgaaaagtattataaatattgtatgaggaaacagaagactgtcatcctggaaagccaaggccccagtcaatcacacccagaaactatgaggacttcgtacaggagacgcaggcgtagccagaagcgtgagaagagccccttctcccccagcaccagggagtggcgtacctcgccgaggtaaacctgcggtgcctagagctgctcgttcacacgcactatctcctcttctttgttgggcagaaatgccggtggaaatggtaataacaacaaccatatcaaaacagagccgacagaaccttaatagggaaatattccactgaccctacagatatgaaatgtcctaattaaataagcctacagttttaaattggaaaaatggaaaatca

SEQ ID NO: 228751 - DNA, 493 bp, Homo sapiens
tgtgaatgagatccttgttggaactctagagttgcttaccagagttcaaagaaaatgaaaaaaaaaaaaaaaaagggaggcagggaaggctggtgaaaaaaatgattcaaagggtagaaaatagatctctgaaggaaaatcttgtaagactggagtgttcagactagggaaggaaaaagagggtaaattaattcctaacctcaaatagcaaaaggtttctttttttttatgtgaatctttgtttctcaaagaacgttctatggaacccaagttctggagcggggtggcttctgaagtcaggtcagtcccccatggacaattcccaaagcacatttgcatctaagagggactgaggatttctgcagaaagaaccccattttactttgagtaacctactgtattccaaacattttcatctctggaaatttttagttttctaacacctttggaaaatgctgagtcagaatcactaagatgatgttcagtataagag

SEQ ID NO: 228752 - DNA, 228 bp, Homo sapiens
agcttatgggaggagttgtcggtgaggacactgaacctaaaaatggtgaagcagttgcagcaaactggcttttatcccatcagtgtctctctctcaacatcctgcatctgagtctggaagacaaactttttctgcttgtgaacctggcccaccagagcttttagcaatctggaaacagaactgggaacttccttgtaaacttcctgaagattgataaatgacatctat

SEQ ID NO: 228753 - DNA, 566 bp, Homo sapiens
ggaacagatggctgccccagggctttccttcatgttaaaagaacaacagtaactacatgtaatcaaattaaaaataaagcaaatgcacatataatgacactaaaataaaataaatgcctctaattataggtgtgtatgtgattcctatgtctctgggctattctttatcagaactaagaatgaactctggctgctgggtttattccaaagcactatccctcccaaaaaggtctcaaagtcagtttggccaagggcagtgaactttcatattaaaaagagaaaaaggccgggtgtggtggctcatgcctgtaatcccagcactttgggaggtgaggtgggcagatcacctgaggtcaggagttgaagaccagcctggccaacttggtgaaacctgtctctactaaaaatacaaaaaagtagccagacatggtgatgggcacccgtgatcccagctactcaggaggctgaggcaggagaactgcttggatccaggaggcagaggttgcagtgagcctagatcatgccattgcattcctgcctgggcaacaagagtgaaactccatctc

SEQ ID NO: 228754 - DNA, 280 bp, Homo sapiens
taataagtataaaaacaaacacacaacggagagaatcaacaaagccaaaactgaaaccactaataaaattggttaatccctaaagagaatgattaaaaggaaacaatttgacagttttcacaaaaggcatctgtgaaaagaaaaagaaaatagaaaaggaaaaggctgggcgtggtggctcacgcctgtaatcccagcactttgggaggctgaggcgggcggatcacctgaaatcaggagtttggcaccagcctggctaacatggtgaaaccccatttct

SEQ ID NO: 228755 - DNA, 215 bp, Homo sapiens
gggctctgaagttcagccttccctgttatttcccttcctaggccaagaggttgattggctgtctagggaaggtgggtttaatgacagctttataggagcaccagccaagcagggaacatcacaccaaatgtggtttgatacttctcctgcccctttgcctacggcacagatgctgtggcagctccaagtcttgctcccttttctttttgagacag

SEQ ID NO: 228756 - DNA, 775 bp, Homo sapiens
ttgttataaaagactttgttttggatattccttttagaactgtaaaagagtgaatgctttccctctccacccatctaccttgcttcaaagtacagaaatgaataggtcaatcctaattgcatgcttctgtctccaactaaaccatgacctttttttaaaaggacatttcatttggccagaacaggcttaattaaacaagtgtgttacttacatagagtgtctcttatcttcacaagtttaacacttaaagctgccttgtgataattttaacaattagttggagacaggaatatttataattgaagttgattattgacttctaagtcggtttaagaaaaaagaatctgacaggtttaattctcattgatatgaaggttaatgagtgaagagtgacagattttgcagtgctgtagtgttatgagaaaggtcatggtttagttggagacagaagcatgcaattaggattgacctattcatttctgtactttgaagcaaggtagatgggtggagagggaaagcattcactcttttacagttctaaaaggaatatccaaaacaaagtcttttataacaacaaacaacttctctcagatctaaactggaattagtgctattatgtatgaaatgaaacacagatttaaaataagaaatcatttcccattcctcactgtccagattcttactagctattctgtactgatcttagttaactggaagtttaatacctggttgtctatcactggcagaatagataaataaataatggcataatcat

SEQ ID NO: 228757 - DNA, 528 bp, Homo sapiens
ctgataaggtctgttaggttagatataattgctattttattttaaatcacagcaaagttatttgtgttcacccttgggtttatttagaaaatacaaggttacaaagggcttccaaagatcattattagcagtaagaagattaccgaggaaaggaaaagtggtaaggaagtgggaagaaaaccgaagactgatgactgaataagatcttacatatttgcatagctcagaaatttgaatactatatccaggagtctatttttttttcaacttgtaaaaaatggtagtaaaatacaaaaaacataaaatgttctatcttaaccatttttaggagcacagttcagtgttattaaatatattcacaatgttgtgcaaccattaccaccatccatctccataactctgttcatcttataaaactgaaactatggccgttttaagtccccattgcccttcttcccagtaaccactattctattttgtctccatgattttggttactctatatacttcatgtcagtggaattacac

SEQ ID NO: 228758 - DNA, 367 bp, Homo sapiens
atcgtggctgaagacaaatgaggagcaaagtcacattttccatggtggcaggcaagagagcttgtgtaggagaactcccctttataaaaccatcagatctcatgagacttattcaccatcatgagaacagcatgggaaagacctgtaccccatgattcaattacctcctactgggtcactctcacaccatatgggaattatgggagctataattcaagatgagatttgggtgaggacacagccaaaccatattacagtggatctttctttgtctcatagtcctcaggaggaaccaatcctgtgatgtattgattttggacttatagctcctagaactgagagataataaatttctgttgtttcagcc

SEQ ID NO: 228759 - DNA, 1066 bp, Homo sapiens
aaaatggcagggagaggcagtctgtggaccaagttcaggtgaaaggatcacccatcatgttgggcatcagatcaggcaggttcacacactacctgaggaagctggtctttgtgacagacaagagctgctctgcctcttgggaaacacaggcaccagttttagtgccatcttcttgcacccaaatgctgtcctttaactcatcagttacagtgctggatccctcatcactgccaatacggggctagcaatatgtctgccccagtgaatgcagccgccacggagccccagcctcctctatggcaggggccctgtggtggggaatgaggacttctctatcattaacctccatgcagttggctcaagaaaaggatatggtagttgggcaagggggctcacacctgtaatcccagcacacttgtaatcccaggagggtcgcttgagcccaggagtttaaggccagcccgggcaacatagcaacctgtttgtaggcaaaatgaggagttgaagttccccgtaggatcttctagggctcaaccagccttcatgtgcagtgggactggcaagaaatctgtcatccctgttaccactttgaaggtctcagtgtgtatgcaggtcctgaaaagttcaagtcccacctgaaacgcaacacagcatcatgctctgattcatcagtgattccctaatcaatgccattggcttgcattgggactatctatcccagcctatccagtgacttcagcagctgcagagccccagcctcttctttggcaggggcactgtggtgaggaggaaggattcccttatcacaaatctccatccaattggttctataaacagatatggtggcccaactgttgcgggaagtcagggaccccgaacggagggactggctggagccacagctgaggaacataaattgtgaagatttcatggacatttaccagttcccaaaattaatacttttatactttcttatgcctgtctttactgcaatcactaaacataaattgtgaagatttcatgaacatttatcagttcccaaataatactcttataatttcttatg

SEQ ID NO: 228760 - DNA, 437 bp, Homo sapiens
ttgcccagcacaagtgcatcactgaagtcccaagtcttgaacgtggccttggtcttgaggaagtcatgaacaccctggctagtgagggtgcaggctgctccaggatgatggtgtctaaagttgtgcacaaggtcacaggccctgcagaagcatcacccctcaggaatgggtagtacaggaagtccatgcacaggcagatctgctggtgccattacactatgagggcactgagctcaaatagggtggcaatatattcactgggattcctgcaaggtgaggctggggagaggaagcagctccataacacatatgaaaccctggaaacccttctcagccaaaatctcaggaccacattacacccagaaatgggtgccctctgagcacaattgtctctctgtctcccactctgagctccctcatggccccacatgccccag

SEQ ID NO: 228761 - DNA, 857 bp, Homo sapiens
attgaatagtacgattgagagatgagtgctatggagaaaaatccagccagaaagggagatgcagaagatagcaccagatcttctcaatgttgttttcatcatggacaggtgcgttccttagaagatgaagtgttagtgattcctgagtttttctcaccttcacgtcgattgatctgaatttggagagtctgttttctgtgtctggctctgcactcaactttgtaggggaccctgtcgaggtccccacactgtggcttcaggtagacagagcagatgggagcccatttcagttcattgtcttgctgaccaatggggaactgtggtcaggtgagaggaggcagcttttacaatcagacttcattgaatagtgtgggctgctgtttccttgtaacaaaaccccataatgatggcagtttccggatgtgtctttttaggacttcagaacttattatttgaatagaagtttaaagcatctggatgatgatgctgtagctaaaacagctgcttgtcagaagagaccctatttaacacttctaaacttgtttcagaggtggaggaaaggataatctgggaaggcctccctctcaagtccacaggttggtatcagctgtgttcatcccccaaaaggaaaataaaatgacaacaatattttggtcacagaattcctgagaaacctctgtttctatcttcatgtctttaagatagggacatgaattccccatgatctgggtgatagggttagggtggccaggacactgttactttgtgtgtgacacaggtggctcctcatgacagttcctccatgccttagaacatgttgtctgtctggtcatccctgggggtagagctgagtgacc

SEQ ID NO: 228762 - DNA, 208 bp, Homo sapiens
attattgacttttaaaaataattttctcttcttttttccctgaagataagtcccatagactcagcatggtctaaaatgtgtaaaactaccttgtcaagtactgttattatctctatcatgggttttcttgtttgcagaaattttttaggttaaattctatcctgcatgcaaatttttctaaaaggagttttttattctagttctaaaa

SEQ ID NO: 228763 - DNA, 414 bp, Homo sapiens
cttaaggattttagaatagttgaccagagagcaagaagacaaagtagtcttaatcctaagaagattaggagcagaagagccagggagagtaggccgtggtgagggcagtagtggtgtttaacaaagaaggctaaactctggcacccagagtggctaaactcagccacccaaacagctgtggctatccagacccagaacaaaagcataacacacaccagtccttgctgtaatgctaggctttaacattgttaaatgttgaacaattttgtgatattagggttccccccgctctctctctcgctctctctttcaagcccttgaaagtcctcaaaccagtccagtgtgtagtctgtagattataaccttcagaattaccaaagatatttcagtacaaaaaaaaaacaggggaaaaac

SEQ ID NO: 228764 - DNA, 422 bp, Homo sapiens
aggtgggaggatcacttgaggccagaagttcaagaccagcctgggggacatgatgaaacctggtctctacaaaaaatacaaaaaaaggcagggtgcagtggctcatgcctgtaatcccagcactttgggaggccaaggcaggtggatcatgaggtcagagttcaagatcagcctggtttgagaatctggtctctggttcgagaccagaccaggagttcgagaccagcctagtagatagaagatgaaaccccatagctactaaaaatacaaaatttagccagcacggtggtgggcacctgtaatcccagctacttgggaggctgaggcagaagaattgcttgaacctgggagacaaaggtggcagtgagccaagatcatgccactgcactctagcctgggcatcagagcaagactccatctca

SEQ ID NO: 228765 - DNA, 429 bp, Homo sapiens
gtaacaagaaatgcctcagcagatgagctctttgtaaaatgaagaggccttctacaccaagatatggatgtttgagatctagcttcatatgcattgcaaatctgacactcctacatatatttaggcacaaaacaagagattccattatatataatccagtgttaatcatttgccatatcagaaaggtaaaggacaattcattcacgcatccattcatttaacaattattaattgagcactgtgctagctgaacaattcagatttgttgcatgaactcccagaaattatagtctgtgggagatgtgaacttataattaggtaattacaatagactgtgtaagtacaatgatagagaagtgcagactgctacaaagtttaaccattttaatataacaatactaaacatgcacatatttactaaaataatct

SEQ ID NO: 228766 - DNA, 334 bp, Homo sapiens
tgcggtgggggtggtgggtggggggagaaccactcttctgaagtggatatttaccttttcaggcgtgttttcataatttagcttcgtcagtctatatccacaaacaatatattatattattttgcaagtacttatacttttaaaaaatgatctcatgtgaggatgtcctattgtatcatattttttcacgaaacattattattgttatatccatgttgtgcatacaggtagacttagcttattaatttaaatgaggtataatattccatcatataaatgtaccacaagttgttatccatttgctgagtgttaattttccattaaataaatgcct

SEQ ID NO: 228767 - DNA, 1067 bp, Homo sapiens
gatcctgggaagggaaaatgtatgattttacctgtaaggaagcacttagtgtagcagaaagcacatggcctttggaactgggcagatatgggattgaattctagccctagcatttccttgatgggcaaacttctgcaggttacttaatctctctaaggcccaatttcctcacctgtaaactggtggtattacttgaccttgcagaattgctgtgaagtttggaaataatgcatgttgggtgctcaataagtagtagttaggaagaataattactgtgttgagtaatttatttgttaattgttataaaaacaattctctatcctttcggaaaaagggaccaaatgcaacataaaaatgttttctcttgtcactgcacatttaactgtcacagagtcccagaatgtcagaactggaagaaactttgctcctctaacccaaccccttattttataggcacagcaatagtcccaggaaagtgtagtaatttgcctaaagccacccacagaagtggttagtactagagccaaaactagaacccgtatctcctaaccccatacccttcccattatataggaaaagatatgtggttatataagtcttgcagaattctctgccatttcaatattcgctttactaggaaagttaagttgtacctttatttaaactaaggcacacgtagaaggaaactaatcaaacttgggcaaaggtaggttgtgcctagagcttgcttgagttctgagtgggacagttagttttttggtattggggtttgtttgtttgtttgtggttttacagcaggtggagtgggttaagtataatacatgaggccagtcatggtggctcacgtctgtaatcccaacactttgggaggccaaggtgggaggatcacgtgaggtcaggagttcgagaccagcctggccaacatggcaaaaccccatctctactaaaaatacaaaaaaatcagctgggcacggtggcacgcacctgtagtcccagctagtccggaggctgaggcacaagaattgcttgaacccaggcggtggctgaggttgtagtgagccaaaatc

SEQ ID NO: 228768 - DNA, 912 bp, Homo sapiens
gttcttccagcacatggaccaatacaggcactctctcattggacctgcattaatttgaggttgcttcattttgcctcttacagtgactcctacagagctaggcttgctgagtctctacggtgactgatggagtcagttggaggggccagttgctactgaaaatgctcagagacctaactcctaatttacccataaacaccagctagccaggctgtatcatgtctgctgtaattagttagcgagctgacttagcacctcagtgctataatttaaagtaaaccctgaacagtcttagacttgagtatgcacggtacagttaagtttaatctgtatacaggttgtctctttggagtctgggaatcagtttatgctattggtcttctctgacaatctccaggtcacgcagatttgtactgtctaggacataattagcctagattatactcagtgattgccagcttcacagtggcctgtgaacaaattattttgtttaatgtgagtgaatcaataatgtgtcagcagtagcatcactactcacatgctataaaatgcaagacagagttcagatgtttttatattttaaaatagaatgtatattccttactgtgttaggtgattactagtttttttaacagatgaatctgcttctataatagtgttctaccccaagaaaatattgctgacacaaattgatttatggaaagttttatttgctactacctataaatgagttgtgctggaatttgttgctgtatctgcagttcttagtatttgctaatataaaagatccttgttatcttagtgccaaaaggctacttaaatgaattcataaaatatccttaccagaaattcataggaaacagtgaaaaaagtttgttactttactttgaaaaataaaaacctcaaaagttt

SEQ ID NO: 228769 - DNA, 507 bp, Homo sapiens
gagacatatcttaatagtaatacatgttaagtgctttgattcaattcctgttgttgaaacccaaaagcaaaaaaaccccaaaacctttgagaaagctgctggtaccaaaatggagtcacttacattaaactccagcaaaatggagtggtgggaggccatcaagaagccctcacgcccacatgcctgaaacaggacttatcccaagactttcctgcacccagaccagcatcacgacttagtgcaaggacttctcgaggctgcagtattccagatctgccaccagcacgcaacactgacctggcaacagccgcctcccccaatcaacagagccaactcctgcagtgagcttctgtcacctacgagccttgtttcaaagccgctcatgtgtacatctgtttgtctttaaaagattcctctttggctgggattacaagcatgagccacctcacccggcctaaaatctggagatatcaaacctaaatatatattcccttcttttacaaagtg

SEQ ID NO: 228770 - DNA, 486 bp, Homo sapiens
tgcttctcctgttccataggcacaaagatacaagtgcctggtcgctctagtcctgcactgtgaaaaatctcaacccagttttgcttagaccagacaaaggtggtagctggctgagaattagctgtagagcaggctgtgtgaccgagccgtctgtgtgcagccatgttcagaagcccagggttttccagctatttgggagctttcaaattctctgagaaacaaggcttctgcctgtaactattgaacagccaaaggcacttccttaggggaaggagtttctatttcaacaataaaaacttaagcttcattggattcccatgtcaaaggaaagtttcaagataaagtagccttgtctcaaggactgttaaattttgaagatttgtcgtagcttttaaaattattctcttgaatatctaactcttaagtttcaatgtttggcaatatgttttctccctagaatttgatttattaaaatgtatgaagcaa

SEQ ID NO: 228771 - DNA, 396 bp, Homo sapiens
ctcagtttgggttaatgattaccccactcactgattgtgtgacactggggataagtcacttttcctctctgagtcccattttccataaacaagaatagaaaggtgctcttggccaggtgtggtggctcacacccgtaatcccagcactttgggaggcccaggtgggcggatcacttgaggtcaggagtttgagaccagcctgaccaacatggtgaaaccccacctccactaaaaatttagccgggtgtggtggcattgcctgaaatcccagctactcaggaggctgaggcaggagaattgcttggacctgggagacagaggttgcagtgagctgagattgcaccattgcactccagcctggatgacagagtgagactccagtgagactccaactca

SEQ ID NO: 228772 - DNA, 486 bp, Homo sapiens
agtttgtatatctctgttatcggtggtgtgttatctttatttggaaagttcttctgccgaacccgtgcccatcctacaatgccctgggcaaatgtttattggtgaagcacttccaactctcaggcacttggccagactttcctaggagcgcccacagcctctgtacagatctctggccacgttccatggacttctttgttttcggccacgcctcctagtgaccaccgtctgacgcgcatctagctctgggatgatgtctattcatctttgtattctcagtgccaaacagagggcccgtaattggaagctcaataaatggcagtgattgtctttatcattttgggggaagggggccgtgattgtttactgaattgaattccagtgtctcagaacaatgggggcagtttacttctctagagttgttatgttctggattttagaagcattggctgaccggtgacaatgaagttaacatttgtacagatc

SEQ ID NO: 228773 - DNA, 489 bp, Homo sapiens
tccttaagtccttagctctcactgcactccttcccaattctccagattgactgtctcagcctctgagccactgcacttactgtttcctctgcctggaaaactactccccagcctcccactttataataattttcatccttgtctcagctccaacctcaccttctcaaagaggcttggtctgccagattttaaaaaactgcaccccgggtcaggcatggtggcttacgcctgtaatcccagcacttcgggatgccaaggcgggcggctcacttgaggtcaggagtttgagaccagcctggccaacatggcgaaacccagtctctgctaaaaatacaaaaactagccgggtgtggtggcggacgcctgtagtcccagctactcgggaggctgaggcaggaggatcgcttgaacccgggaggcggaggttgcagtgagccaagatcgagccattgcactccagcctgggtgacagagagactccatctgaaa

SEQ ID NO: 228774 - DNA, 556 bp, Homo sapiens
ctcagtcaagtgtcctctgctctaatagttccctacctggttgggaaaacaagctacttaaaccttgtcttttagtagttttaggagataccatttttggcacttgtgttatgttacattcttgatacacaagaggtcagtagcgttctgcttataagcatttcttgaaatcaaacatgggctaaacttcatactttggttgtttttttttttaattgaagctacagtgttcaccatactttcattgtttttcttttttctgccacttgcttacatcttaaggaaattgctttatgggtgaaacattttccaagcattgttggaaattttttactggttaattggacttgtccacaattaaaaaaaaagtttaaaccttttcagtaattcagactaacagccagaagtgaattaacttattttaaatgaaggtgaaactataatctgaatgtgtgagtttagtacaatagagaatgaatttgtattagtggggaatcattcttttttctccctagtagttgttttttgttgtcgttgttgctgttgtataaaaaaa

SEQ ID NO: 228775 - DNA, 365 bp, Homo sapiens
gcagaggctgcagtgagccgaggtcacgccactacactccagcctgggagacatagtgagactccgtctccaaaagaaaccaaacaaaaaaaagaaaatctaaatataaaaccaaggttgtggaacgtcccatcccagggaaagaatccacaatcctgttttggtcaagctgacacctgccagaccagcaggtggcccattactcaaaatagtaatggaaaccagacatgctgacttgtgcatctgaactccatgtcctgaccccctagctgcagctgtgcctcggtagaacaccccttttcgttcctgtcttgatgattgttggagcactctgtaagtttccctaataaatgctttggactgat

SEQ ID NO: 228776 - DNA, 604 bp, Homo sapiens
ggctagaaaaagcctgtattgctgagaatagagcattaaggacaattctgatgaggattcagaagaagagagctgtagggaaaatctggaacttcttagagagttgtcatcagttggtagaactataagtggtaaaggtctttctgatgatatctcagaaatgaagaacaagatactggacactggagtaaaggccatccttgttaaatagttgcaaagaacttggcgaaattatgttcatatcctaagactttatggaatgcagaatttaagagtgatgaactaggatatgctgcagaagaaataactcagcagcagagcatttaggttactggatggctacttttaaccacttaaactaagctgggggaagggaatgacttgaagacagaatttataattaaaagagaggcagaatggaaatacttggaaaatttgcagcctggccatagtaaagaatgcaaaaggtatgtttaggagagcaaaccaagggtgtggtccaggaaccatttgctgaagagattaatattcctagaggagacccaagggctatttatcaagacagtggaaaaagaccccagaggcattttggagatctttgagg

SEQ ID NO: 228777 - DNA, 493 bp, Homo sapiens
cagttattatgaagtgacctcgttgtcttatgtcatctgttttgtatttagcaatagacttcaagatggagatacagctgatcagagtgtgctgagcctggcattagtttcacaaggaaatcaccatgccctggccatattctttttcagcttcgaatgcgacattcattacatgacgatgagaagatactaatttttcgatttagacattagagtcatgtgcagttcagggcatggcatcagggtgggagaggtgctggatgagctctgtgatgtaaggaaggagaagtggctaggatggccaaaggtgggaggagggggccctggggatgggttgagttggaagagctgtggaaagcatgagtcccaggccgggccctgtggctcacaccgtaatcctagcactttgggaggccaaggtgggcagatcacttgaggtcaggagtttgagaccagcctgaccaatgtggtaaaaccccatctctgctttaaa

SEQ ID NO: 228778 - DNA, 378 bp, Homo sapiens
caaacaggtatgaagatggcaacgattataaaatattgaagaaatggctgaatgagttgtttaatgtaaacggtaccagtattgagggattgatagaccaggtactctttgcaaagacttcagtttcagaatccaactgggtttgttttatgttgtcaaagtcattttgggaataaagaaagacacaaaggcacgagaaaaattttttaaaatctgctttgggagacagaatgtagtaattaaagcttcttttgtgctatgaatcatgaatgttattaacatcttatttacttagaacttgtttattctattgaaaatagttactatacaaaaaagacacctttaattttgtgtttaaatatattcaaattaaaacca

SEQ ID NO: 228779 - DNA, 583 bp, Homo sapiens
tgaacggattcttgggtgctggtaatattctatttcttgccttgaatggtagttcttacaagtatttgctttgtagaaaaaatcactcagattaacaactaggttctgaacactcttctttctgtattacatacatcactaaaagtgattttaaaaaaaaagcaaaacataataacaaacatagcagagtttagcatggctaacttcagccaactggaaaattaaattacactgaactgctcacttttcccccaagttccagtaattgagggattaaaaatcttaagatttggctttcaggcagaccaaaaaacccctacaaatattcccccagctaactcatgtaaataagtattcaaaacagaaataacatatattgcattgtctgatttcctataatggttttctttttaaaaccccaaaaacataaaaaatgcaaaaagaaagaggaagagtaaggaaagaaaaacaacgaaagataacataattagctcccaataaaccagacattagacaatcatcaattcacttctagtgtttactttcaagttacctttaagtaaaacatgagattttcttagtg

SEQ ID NO: 228780 - DNA, 257 bp, Homo sapiens
gtccatctgaactgtttactgtttgttcatcgattagcagaagagtccaggacaaacgcttgtgcgagtaaatgtagagtcattaacaaggagcatgtactggccgcagcaaaggtaattctaaagaagagcagaggttagaagtcaaagaacatattcttgaaagttatgatgcattcttttgggtggtaacagatcataaagacattttttacacatcagttaatatgggattattaaatattggctataagtga

SEQ ID NO: 228781 - DNA, 870 bp, Homo sapiens
  misc_feature (656)..(656): n is a, c, g, or t
  misc_feature (661)..(661): n is a, c, g, or t
  misc_feature (663)..(663): n is a, c, g, or t
tgcaacttcacagctttaaggctgtctaaaggtcagcaaaacctaggcacagtttaggacaggattagaacaggagagcttaaggccgggcatggtggctcacgcctgtaatcccaacactttgggaggccgaagtgggcggatcactggaggtgaggagtttgagaccagcctgaccaacatggtgaaaccctgtctctactaaaacaatacaaaaattagccaggtggtaaagagcagtcaggtgcacctgtgaggaagtcaggtgccgtgactcagactcgagtaaacacgaagtatgagttcaacccagaaaactgctctctcttgggttttgcaaacttgtcagaaataaatcactaactttagaaagctttggtgcaagaaaaaaaaaaaaatttagccaggtggggtggcggacgctctgtaatcccagctactagggaggctgaggctgaagaatcacttgaacccgggaggcggaggttgcagtgagcagagatcgcaccattgcactccagcctgagtgaccacagtgaaactgtctcacaaaagaaaaaaaaaaaaggagtgggagagtttaaattcagataaactttaaattttaaattttttttgtggggacggattctttgtcggcccagggtggattcccntctcncnatttttttctattcggtggacgcggccgggggctcccctgtattccggcttggaaagggggctgggggggccctctggggcgggttcaaaccgctggcagttggtgacccctttcctcacatctacattcggggggcggggcccgttgtcccgattcagaagcgggagaacgctaccggcaagttgggccgtatgtgttcccggatc

SEQ ID NO: 228782 - DNA, 275 bp, Homo sapiens
aagacagtgtgatgactactttttggaataattgtcatttctttctgcatagacgtaatctaatatatgcagttttctaactaatttcatcattttatccagtagaaatgagccttcattatcagagataagcaacagcaaagagctaaaggtacctggatgcggtataatcttcgaagtttaaaggcaaatagtcataagtattgagcaaaaagaagtctggaaatacacatatagtaacctaattaaagaggcataaatgcctgaaaaagtat

SEQ ID NO: 228783 - DNA, 494 bp, Homo sapiens
gccggctctgcccgcgggcgggtgtttctctcggggtcgtagggtcggagcggagctcaatggcaggtgcttgggggaccaggaggtctcatcccaggacctggctcctctaaggtctgtctcactgaactcagtttttctgtggtggtgagtgcgaaagggaacttccgatggcttgctcggcggtctggtgctttcaggtcgttaagtttcctggcaagttgaggcggtgagatctagacgaggctgcgccgccgaaggtggcagggacgtctgtggtctcagctcccgggtgggtgacctagatcaagctcttcccaacatggatttcacccaggacagggagaagccggtgcgagcattccccacctttgtacttgaacctttctcctctttcagcggtgtggaggagatgcgagtgtatttatgttattgtgaattcacatgtatgttaaaataatttttaaagttatctttgggatttcacaagattc

SEQ ID NO: 228784 - DNA, 412 bp, Homo sapiens
atctctgaaggttttattccggatgcttctgcaccagaaagaaggttctagacataggtatcccgcaactacagtgatcacacaagtgccaaagcaccgtttcaattctacagtcaaacttatttaatttggtaaccaaatgcgtcaattccttcaattcccataatccagtttttgtcacctatccaagtctgttgtgggtgaccagggagtttatctttacctattcctgagctgccttcctttttaacccatagcacaagaggattcaactgcatttaatatacaaagtgcagagaactttaatgaccaagttaaattaaacgtatcatcactctgtcatttaatcaattattgggtgccgccatcaaggagttcatagataatattgtttgaatatgtatattttaat

SEQ ID NO: 228785 - DNA, 664 bp, Homo sapiens
ccacctcagcctcccaaagtgctgggattacaggtgtgagccactgtgcccggccttgactaccatattttaaatttactggaggacttttttgttctcttcttttttctttttttaatagcatcccgctcttatttcagaataaaaaaatttttaaggtatgttgagtaagaatctatagagcaatgaaaatgcaagagcaatagctatgggcaccaaatggtcaatcttcttatcataatgttgagtggaagaagccaggtccaccagacacatgctgctcatttatccaaagtttggacacaggcaaaacaaaactagtttgatcgtgatgggaaacattagagaaatgcaaagacatgaccatcataattgtcaggagaaggcattggttaggattgggaagcggcaagcagaagcatttagggattggctggcaatgttttacttctcagctgagtgagggttgcatcggtgtttatttgataacacgttctaggggctgggcaagatggctcatgtttgtagtctcagtactttgggaggccaaagatgggaggattgcttgagcccgtgagtttgagaccagcgtgggtgacatagcgagaccctgtctctacaaaaaattaaaaaaaaaaaaaaaaaccagctgcgtgtggtggca

SEQ ID NO: 228786 - DNA, 606 bp, Homo sapiens
  misc_feature (587)..(588): n is a, c, g, or t
ccacctcagcctcccaaagtgctgggattacaggtgtgagccactgtgcccggccttgactaccatattttaaatttactggaggacttttttgttctcttcttttttctttttttaatagcatcccgctcttatttcagaataaaaaaatttttaaggtatgttgagtaagaatctatagagcaatgaaaatgcaagagcaatagctatgggcaccaaatggtcaatcttcttatcataatgttgagtggaagaagccaggtccaccagacacatgctgctcatttatccaaagtttggacacaggcaaaacaaaactagtttgatcgtgatgggaaacattagagaaatgcaaagacatgaccatcataattgtcaggagaaggcattggttaggattgggaagcggcaagcagaagcatttagggattggctggcaatgttttacttctcagctgagtgagggttgcatcggtgtttatttgataacacgttctaggggctgggcaagatggctcatgtttgtagtctcagtactttgggaggccaaagatgggaggacttttttgttctcttcttttttcttnntttaatagcatcccgctc

SEQ ID NO: 228787 - DNA, 377 bp, Homo sapiens
agggccatgaattttataagatttaattttaaggtgctagaagttttccttttttgaaactgaccccagtagtttggtgtggctatagtcctttacatagctgtcactgcactggtgtgattggtctgttcaaatagaccaaatgcaatcatgtccttaaccacccacctgcatttactattcctgtacaccaaggcagtttcctggctcttaggaagaaaagcacgatagaaattgtacaacttaggccgggcacagtggctcatgtttgtaaccccagcacttcgggaggccgaggtgggcggatcacctgaggtcaggagttcgagaccagcctggccaacatggagaaaccccatctctactaaaaatacaaa

SEQ ID NO: 228788 - DNA, 345 bp, Homo sapiens
gtgattatcacaatgttttggtcctcaacaatttttgatggcagctaattcatcacagtgtcctttggaatgaaatagatgggtagattactaaaatgatatttgatctaaacaacaagaatctaggtttgatagaaacttgacttgaatcactaaaatggaaattcatggctcctcaaacccagttctaaaacacctaaaaagttcatagaccaggccgggcacggtggctcacgcctgtaattccagcactttgggaggccgaggcgggcggatcacaaggtcaggagatcgagaccatcctggctaacaaggtgaaaccccgtctctactaaaaaaaaaaaa

SEQ ID NO: 228789 - DNA, 752 bp, Homo sapiens
gtggtggcgggtgcctgtaatctcagctcctcgggaggctgaggcaggagaatcgcttgaacctgggaggcggaggttgcagtgagcctgggggtaagagcaagacttcgtctcaaaaacaaaaaacaaaaaaacgaaggagtggtcagttgggcgcactccagcctggggacaagagcgagacttcctctcaaaaaaaaaaagaaggagcagtccgggcgcagtggctcacgcctataatcccagcactttgggaggctgaggcaggctgattatgaggtcaggagatctagaccatcctggctaacagggtgaaacctcatctcactaaaaatacaaaaaattagcagggcgtggtggcccccgcctgtagtcccagctactagggaggctgagtcaggagaattgcttgaacccaggaggcggaggctgcagtgagctgagattgtgccatcgcactccagcctgggcgacagagcaagactccgtctcaaaaaaaaaaaaaaagaagaaggagctagcctagatgaacctctacagagtcctgcagcccggatgttatggcagtttatagacatcaaccaaaccttagggcttttctgtactgagcatgtgcccaacgcctgagtttatagcatctctaatccttccagcaaccctccgtagggtaaatcatgatgtccattttatgactaaagaaacaaaagtttaaagggggttaaagtgattggccccagactacatagagacaa

SEQ ID NO: 228790 - DNA, 367 bp, Homo sapiens
agttaaggtacaattgatagagtcaagttatatatattagtatagggtttaaaggctaaaagaatttagcctatgcctaaaatagtcaggagccaatttaaagtttttaaaaaactctttttctttgatattataaataatatatgttgttacacgagtaacacgattggaaaaacatcagattaaaaattcatttttaggcccttcttagagtacaattattaaagaacagttgaaaattggttttgtggccaggcacggtggctcacgcctgtaatcccatcactttgggaggccgcggcgggtggatcacgaggtcaggagattgagaccatcctggctaacacggtgaaacgctgtctctact

SEQ ID NO: 228791 - DNA, 353 bp, Homo sapiens
aaattaggctttaaaggggctgctggttttcagttcacacacacaatcgaactctgctgtagtttccatatttataaaaaatccctgctgtgaagctaacaaggaaaaagcctctgaatctcttctttctgcttatcaagaatcaaaatagaaacaaggaatgtttgaaataatacagaaatggcactgaggaatgtgaacattctggggggaagggaataacttatgtgttgttgggggtgcttgtgcatgcgaatataaaaattgatattcatagactcgttaaccacagtgttagggggctagagatttgatttaatccttgatatttttattttcataaaggccagaga

SEQ ID NO: 228792 - DNA, 559 bp, Homo sapiens
caaatatttattgaatgatttttccagacactggactaagtgtgttacaggcattgctatttcagttgatcttcatgggaacccttttaggaagatattgtcaccagcattttaagggaacaggacagaggttaggcagttagctccagccttatagccaatgagcagcaaagacaagattcgttatctgattctgaagcttggtgaatggccttctctcacagtatgagaacatacttgttaactctcagcgtgtctgccacatgctataaaaaatttaataattgagaaatcagttttaaacttggaacaattttggaaacaggaggcaagatagctgttgtagaatctggagatggaagatttgggttgtttatactcctttggtggtgaagctctattcatttggaatttgctctggacaattttccctgagaaagtctcttgctttaggatgtcttatgctgttgccaacacaaagaatttttcctatgaaaatgaactcttgattatcctgatttaacaaataaagaatttcttgttgacttgacagcaacaa

SEQ ID NO: 228793 - DNA, 314 bp, Homo sapiens
tgcaatgctgtgagcattgtagaaaaaacctgggcaggcactaggaaaatgagctcttctggtggttctgccactggctggttgtggggacctgggtacatctgtcaccttcttgggccttcttaattaggaaatgctgctttcagaatctcttagtttcattttttttgtgtgggttttctctttttcttttttcttttttttttttttcattttaatcttctatttccatggctgtgcctttccagaattaaatgaaatgtttcttgatgcagactgttataatctagtagggtggtttggcaaaaaaaaaa

SEQ ID NO: 228794 - DNA, 390 bp, Homo sapiens
atctcttgtgcagaaaaattccaaataatttgagtagacacaacatcctcaaagaggtagaaaataactcctttcttcttaattgtgggctacacatagtgacttctttcccaaaaatacagaggaaagcagcaggagacagactaacttttcagtggagaaacctgacaaacactatctcatcaaggtcaacatcggtagtgatgccatactgatattatagacccttgatatgatgtgatgaaaatggcacttttcctctgtggtcttcctcccaaaatctcatagccacagtctaatcatgagaaaaacaccaggcaaatcccaattgaaaggcattctacaaaatatctgtcaaactattaaggtcattaaaaacaaggaaagtct

SEQ ID NO: 228795 - DNA, 438 bp, Homo sapiens
cagctcccctgggctcctgtgatcaaagtgtctttccataagtctcccagggctggcacagtctggtaggaggggaggagacagtgtgacagactctgactgagcagagggaaatcacagggaggccgccaagacattcctgcccgcttaggccagaagacatcacctcctcgtccccctggcctgaggaaggctggaggtagtgcggcaggaggcaacaatgagaggtagggaaaggggtgcagcgttcctggtctttaaaaatgaaggccaccactcccctcctgccagcagatgttgaacagtgtggtcctgaagaagcatcccagctggcctggttgtgagatgcagaaagaggataactctccccagcccccgctgttaccaaacccctctgagccctagttttcattaatcaaatgagaatataagtaccca

SEQ ID NO: 228796 - DNA, 442 bp, Homo sapiens
ccgaacacatctgaacatcagaaggaacaaactccggacacgctgcctttaagaactgtaacactcacctgagagtccgcagcttcattctggaagtcagtgagaccaagaacccaccaaattccggacacaggaggatcacttgaggctgagttcgtgaccagcctgggcaacagggagaccctatctctacaaaaataaaaacttagctggggatggtggttcatgcctgtagttccagctaaaatatatgtattttttattagtcaatttaaataagtaaatagataataaaaattttaaaaagagacaagagaatggcggttacatgggccagttgacttgtgaaaattcattagactggacacttgtcatcaaactatgtaattatacatttttctgcatgaatattttcaattaaaagtttattaagaaaagatgg

SEQ ID NO: 228797 - DNA, 283 bp, Homo sapiens
aatggtgagcaaaacagacacagtatgaataacaacagtgtccactctcatggagattagtacctaatggcaagaaaatagacaattcttatgctgaaatttgtaaagtatgctatttgggatgttgcttgtcactccccatctcactagtagcttccctatcccagctacttctgatctctgaattctcaccccccaaaccctactccattgcaccatcactgaagctccagccagtaaaataactggactaccagggccctgggacctcagagaataatca

SEQ ID NO: 228798 - DNA, 583 bp, Homo sapiens
cggggttcctttgcttttcccaccttacaccaaactccctatttttactcccacttttacctcctctccaagacacaacaaacaaaactagcattttaaaacttagttgtaatctttcttccttcatgaaaatttctccaacagccactcccacggtcctgtgtgttccggatattttaaaataatggctataaggttgagcacttcaggatacgctgttttgctgtgtgcagatggaggcagtggctggagtgaatgaacggcaacacttgctggcaaccggcagaagctgagagacagggaacaggctctcctccagagcctccaggagccaggcctttggacaacttgaatgtgggcttctgggagaccatgcgtttctgttataagcagcccagtctctggcagtttttacggctgccccggaacactcatctatacctgtctgacaaggtcaagctccaaggaagggactctctacatatctacattgtttgcagattttacaataatcatttattcttgcatggctgatcattgttaaccaatacaaataaaataataaagaaatgacccacatttt

SEQ ID NO: 228799 - DNA, 449 bp, Homo sapiens
cacaggcacacccaccaaaagacaggactgaaaggtttgcaaggggagtgagcagatttctaaaaataatttctgatacttgcccagggaatacaccgagaaatagaatcctgtaagaaactaatatcatgatcgagcatgtgcttctgaggattccgtgtctttcttgagctcttgtgtgaattaggatgttggatcctcaaagaggaaggccattaaacgcctgcctggaagttcagaataggctgggccagttaggggtcatgggtgatactgaggcaactggcctttgtattacccatggtctggggtattgtgcattcagatgcgagtgtgacagatgggcaaagacctctggctaacttgcacacctccctcaagtaacctcagctcagcctaagtaggagaatcagttgtttctcagggcctttaaatcacattcctccatg

SEQ ID NO: 228800 - DNA, 497 bp, Homo sapiens
gagtctggctgccctcagcactcgcgtcccgccctgcagcctgataagcttgacgccaaggcattctcccgagagccggcccagcagctgctggcaggagagtggcctcagggcagcgggaaggggacctccggggagagaatgaggcctgcgcaagggtcctggaaggacccaggagtcgccccggcttccctcccccaggccctggttgggcgccgtgggccgcgtcccagttgagcccggcgtggccgtttaatggcgtccctccgcgaccgaggacgaaggggcctagagaggctgtgcccaagcgacgctgcgaggccaggccgcgtctcgggccagggcggtccccttgccaccgccgctcttggccgccaggaccaagcacagcacgcagcgtcgcgaaaggggcggtcctggaaggcgcgaaggggtctccgggtctcgcgaacacggcggggtcggggcggagtcgtgggtcctcggtcgagcggccg

SEQ ID NO: 228801 - DNA, 454 bp, Homo sapiens
tatgaagaagaggagtgacatagtccgccagagtgtggccgaggagtaggaggagtgtgaagaggctggggtactgtccagaccagagacggtggtggccttgacatctccccagagatggggatggaggggagggaccatattccagagctgtttgggaggcagaagggagactgaggggagggtggggcatgaaagacagggaggtgcccagggcaggcaggttcctgccttgacagcaccaacaggagcaggaatctctccacggcactgaggcgccgggcagggaggggatggttcctgagaggccaacctgcctcccagtcctgggccccggggctggcggaggcctcctgtacacgcacacgcacgcacatgcgcacgcacacgcacgcgcacagacgctgcctggattttgctttgggttccgtcttctcactgcggaccctggatt

SEQ ID NO: 228802 - DNA, 355 bp, Homo sapiens
agaacagaactattttcagacatagatttaattctctaaattgggaagtctggcccatggcctattttgtaaataaagttttattggaacactgccatgttcattcactcgtatattgcctattgctatttttgtgctgcagaagctgaatagttgcaacaagacaccataaagcctacagagtctaaaatatttactacctggcactttgcagaaaagtttgccgactctgttcgtatcactacaattttgatatggtgtggcttgaaaaaaataaaaaataagttgttggcttttaaaaaatatattaaggtcatcctatcttgttcgtccccaacaccccatccacttcttc

SEQ ID NO: 228803 - DNA, 463 bp, Homo sapiens
aggtactttagtttgccattatcagggaagcaatgattagccaagcatagaaaacaactgagtcatgtgcttgtgtgccaggtatatgaaatgctgtcatttgggggaaagaaataggtttatttaaggaagtagattttggcttattgtaaagaagactttataattaagaaatctttaggccaggtgcggtggatcatgcctgtgatcccagcattttgggaggctgaggcgggcggatcacccgaggccaggagttcgagaccagcctggccaacatggtgaaaccctgtctctactaaaaatacaaaaattagccgggtgtggtggcacacgcctgtggtcccagctactagggaggctgaggcaggagaatcacttgaaaccgggaggtggaggttgcagttagctgaagtcgcgtcactgtactccatcctgggtgtcagagtgagactcggtctca

SEQ ID NO: 228804 - DNA, 786 bp, Homo sapiens
ctgtctagatttcttttcattatcttagaccattcagtaatgggaaagcagtaaaggggcatgaatattctagacacagcccggagagctatttgaacaagttgctggaacatttcttgctggagctgagggagcccaggtgaccttttctgactgccagcagcctggcccagagggtccagcctggcctgtgtggacagcccaggggtaggggatggcatgcaggcagaagggtctggccatcagcggatggagggagaggcaggagagggacagggacctttacccagattgaagcatatgaaattgttaacattcagccattttgacctatagaaacagcaatttcaatttaaaaaattaacaaaaggaatcacatcacacatctcttcattatcaactcctacagggattaaatcgattgtgaaaatccaggtgcccattcttcatagccaggaggagcagccaggccccacccagcacagctgggctcctccagctccctggggttgacactgggaggggccctggctgttgcggaggaggacaagcacttggtggctgtcagccctcttgatgcagaaactcatgctcctcagatccacagtgccctgacatggggtgagctctccccacaagtccctctctgcagaagccacagagttagcctagagcatggctgtgtacctggtttgccccacagggtgttcgaacctaagttgatctagcttttattggggctgggtacaggcctgagccactgcacctgactgggttgtttttttg

SEQ ID NO: 228805 - DNA, 907 bp, Homo sapiens
cggaaagtacctagatgacaatgtttccattctgaaaaatagaaacatactattcaagaccaaggtagcagaaaagttacttgtatctgcttatcataagacgaaactctgcaacttggcaacggtggccagttttcgtaatgaaacagtctttagtaatttaatcttcatgcttcataacaaaccaaaaccccatgagatttccacattgcataattttgccttactaacagaatcatatccttaaggatgaccatcattcccccaactaaaacaaatacaaactaatgtatgatatttttttaagtgccagatcaatatggtctaaagcttcaataaggattgtgtgtaggtgaataaagacagctaagtgaatgtgtgtaaagtgtagcaaaagcagacagatatttatgtacagtattcatagaatggaaagttaaatatttttgcagtgtgtatttaaaagagaaactcaccataatagtgccgtctaaaaatctttgtaaagttaatttaatgtcctttagaagtgggagtctggtggaactgtgttggatttaagataccttttcactcttccgtatgtcatgagccttgtgggtcacctcactgtggtgcatgtgcaagggcgtgtgcacgcctgtgctttgccatcccatgttgtaaacagctgttccaaaggcacaaacgagtttagggtagactctgtaaacacctccttactcactatagtcaagaagtccagcggcgtcccaatatagaggtcccagtgcagtctgtccagaatagccagctccatcctcagcagctcattcggggaatagtcagagccatagtgctttgtgaagtcttttacttgtggaataaactgtaaaaagaaaataaagaggccaaagccctaaaaaat

SEQ ID NO: 228806 - DNA, 470 bp, Homo sapiens
atgcctgtatccctttgggtggattttttccccccacttaaattgcatgttttatttcccccaatcccagcaatagcacagaagccccatcatatccaacccaaactggtttcgagtaggttaaggttatagggacacttgtcagaacgttgatacaaagggctcccaaacgctgggcacaaatgtgtcagcaaacagatggaagtaaacagtgcactggcccaaatgcttcatgagtcagtttgattttgcaatgcagtttgcatccttgaaactgccagtctggagggagacagggtagcttgagggagtgaagttgaaattgcctcctattagctcaccctttcaacattaaacagaccaagagagaaatggttccaacatttcaccacatctatttcttatgcagtctaagctgggaatgccatgtaaatggatcactgcgaaatgcagcaatttaatttttctcc

SEQ ID NO: 228807 - DNA, 860 bp, Homo sapiens
aatttgcctggcaggccctgcgtttcccattgtccttctgccaccatggtgactggggacatgcccgtgcctgtgggggacaagcatgcatgtcagtttttgggcatgtcaatgctgattcctgtgccctggggtacggcccaccttctctcggtagagctgtgaccctgccaacaggaagtgctgggaaaacaagctcctgacacctccgtctggggtctggggtcgccttctcagcgtgggctgcttcatgacccataggtgttctggactttcctccccccgcccaaggattaaacagcacttggctccttgttaaaagcacattgatgttttgagcccagagggaggtgtggatcacacagcaggtcaacagcctccattttgcaccccgccattccctgtggctggttaaggtgggagtgggtagggaggagaaaacagaactagagagtgacattggggcgatgctgaccgagggtgtgacccaggccaggccaggctgctgtggccactgacctgctcctccctgcacttcacatgggagctcgggcattgggagccgtcaggccagtcctcaaggtacggccaagcagcccggaggccacctcccgaggcctgtgctagcagctcctggtccatgcctgccggtcagctcactgctccacccctgctaggcgttagatgtttccagaaggcctgagggccaggcaggtgaggggcttcaagttcactcagggcagctgttgagagtttagcgagttttatttttgcccccaaatttaaaagtatcacggaaggcagagctattacagagagaaaccaaccttttggttatcacacagcagcttttatgaatt

SEQ ID NO: 228808 - DNA, 283 bp, Homo sapiens
tttaaatagcgcgaggagggaagagtcagaagaaggttttgagcagaaaaactacgcaatagaaagtgtatacattgccctatagcagacagacccgggacgggaccagcctccagacgactttaaacccgaaaggaagcgacacccggcctctcactgggctgtctcaatttgctctgggcgaaggaagacgggcgagaatttccaggtctgtggggaccccacgtcccagggacagaagcggcggggacctgggaagcggagacttaatgcaacacagagc

SEQ ID NO: 228809 - DNA, 344 bp, Homo sapiens
ctagccaggcgtggtggcaggcgcctgtagtcccagctactcgcgaggctgaggcaggagaatggtgtaaacccaggaggcggagcttgcagtgagcagagatggcgccaccgcactccagcctgggcgacagagcgagactctgtctcaaaaaaaataaaataaaataaaataaaaatcatttggtagcccggttttatgggagatttttaggaaaccctataaaacaaataattcctatactatttaaattgtggtaggacatagaaaaaaataataagctttccttctcttttatatcataaccctaatactaacatctgatgaaggccatagcgcccccc

SEQ ID NO: 228810 - DNA, 723 bp, Homo sapiens
gcctaactttcttatgtgattcatgcccttcatagtctagtgacaatttattcatctaatatcagctcaacactcacaagtctcctgcccactattcctgatgtttcagtcattcaactctttcatctctctgtggaaaatgatccatttgcctgactctccttcatctccatctgatgaagtcttaattcatcctttaaaattcagctccaaggtcacaacctaccttctctgtgaagtgtccttgactccctgagagtaatatcactctgcccccaaagaataactcctataccacacagtattttgactgcatctgtcattgcaacagaaggtaagctcattcttgaattcattgaaatatttactgaggcagtgtgatgtgccaggccccatgctaaaccccaaggatatagaaatgaattatcttgcaaacactatgatcttaagagcatattttgtgctttaaaaaaatcagatcttaagcccctgacatgtaatatttagaaggtatataatacagtctctgtatatgaaaagtgttatttatttacaaaatggcaggacatgaaaaacaaggtatcagagtatttgcagtatttttttaaaactggtaagataataacttctcagctcaaacatctatttcccctttccagttcttctggaattgttaatccttaagaaacataatgaacaaaattcactctgccatctaaaatg

SEQ ID NO: 228811 - DNA, 723 bp, Homo sapiens
ctgtcacactttccattcattgagacattcatactgaggccacacttcctccagaatactcccagctagtgaattactgagctttgcaggagtattagagccaggtcactgctgcccaacacattcactccagcatttgttactgttagtcttttttgtaacagtcataattacagatgtgaggtgatatctcattgtggttttgatttacactaatttgatgatcagtaattttgagcatttttacatataacttttgggcacttgtatatcttcttttgataaatgtctatttagtggttttgctaatttttaaaataaaattattcatttttcattttggggttttttgctattgagttcctatatattatggatattaacctttggcagatacattataatctgtgatatttttctgccattctgaaggttgtctcttcactctgttaattattttctttgatatgcagaagggttatagtttgacataataccatttgtctattattgctcttgttgcctgggcttttgaggtcttatcccaaaaaatatttacccagagccatgtcatcaagtgtttctctcaagttttcttctagtagttttatcatttcaggtcttacatttaaagccttaattcattttgagttgaattttgtatacagtgatagtctaatttcatccttctgtcattcaatcaataaacaaaaaatcccatca

SEQ ID NO: 228812 - DNA, 441 bp, Homo sapiens
tagagtttttccataaacaaataactttttattgtggagaatttcaaatatgtacaaaaagaaacagtataatgagtcccccatcatctagcttcagttattttcagtttatggcattcttcttttatgtatattctcattcagttctctctttttttgagattattttgaagcaaatttcaaacatcacatattctgttagtaaatatttcagtatgtatccctgaatgatgaggactttagaaaaatataatcacactgcttttatcatacaaaaaaaaccccaaataatagtatcaagttatttagtctgttcaaatttctgattgtctcaaaaatgtcaaatgcatatgtgtgcttgtgtatgtgtgggttgtagtttgaggaatcaggatcaaataaagtcagtgtattgcacttggttgatatagtttttagtct

SEQ ID NO: 228813 - DNA, 405 bp, Homo sapiens
  misc_feature (259)..(259): n is a, c, g, or t
  misc_feature (296)..(296): n is a, c, g, or t
  misc_feature (311)..(311): n is a, c, g, or t
  misc_feature (321)..(321): n is a, c, g, or t
  misc_feature (330)..(330): n is a, c, g, or t
  misc_feature (351)..(351): n is a, c, g, or t
  misc_feature (368)..(368): n is a, c, g, or t
  misc_feature (385)..(385): n is a, c, g, or t
  misc_feature (392)..(392): n is a, c, g, or t
tttccataaggaaagggtataccaaagagaataatacttttaacaaaatgtcagtgggaaagttttaattacttcagagagttggattctttctaaacatcctggactgcaggaatctctgcaaattaggattctccctacaggtttgtggattcagagtttggctctgcatttcaataatcattgcagctgttttatttgttgttttactttgagaacaaaggtgtttcttccgagagcttccccagggcctcacacntcaaattttcttcctcgtcccaagtgacatggcaagnttttagtaactagtngcttgttctnagggaaacnaaagttgtggctccaaaatgnttccttaaaaatgtcangtgattttggtataatncatcctnctctgaaagaaaa

SEQ ID NO: 228814 - DNA, 489 bp, Homo sapiens
aataaataatggctcctcttcagttgtatgccgtgaatgtaaattaagaagccgctacaacgctcgacataacctttctgacgccacaaaaatgaatgaattatatccatacacacacacaggcacacacaccacgcaccacgcatcacatgtcattctgaaaactgattctgagcttaattcgaaaaacgtgaaatacaactggtcccgtcaacggctcgtaatctgaaggtttcttgcatttccaagcacgtccataacacctcatccgtttccagtttgttactgtttccaaccgaagggagagaattttccacacagaattatctcctcgggtccaaatactagaccgaagtccccacacggggctggctggcggcgtggaaccggccagcccgccgagagccgcctggcgcccgcggggaagacgcagagcccgcggccaggagccgcccggtgccccgggagtcgccggccctcggcggccgc

SEQ ID NO: 228815 - DNA, 428 bp, Homo sapiens
aagtctcgacctcaggtgatccgcccgcctcggcctcccaaaatgctaggattacagaagacgtgagccaccgcacccggccacctgtacatacttttaagaatgaaagtaaagtatgtcccattatgatctatgcaattctatgcttgaggtccaaaaaacatatacatacctacgttttactaaattataaaaataatatgtgcacatcatagaacacctggaaaatgttaatgctttgatacatttttttctcatgtcacatttgtatgcagtgatgttttaatgtaatgtgattatatggtactctacataccagtcgatattctgacttctaaaaattaaagagtataagcatttcccccatgtcattatacatttttgtaaacattgttttaaatagctcttgaatcctctactgagtggct

SEQ ID NO: 228816 - DNA, 537 bp, Homo sapiens
atgtgatgcagacacacaaagtacgcacaagctgttggaaaaatgctgccgactgacttgcctgctgcagggctgccacaaactgtaaaaatgcagcgcacctgtgaagcgccacgaagccacacatgatggggtgggacacgtctgtgcatggctggggaaacagtcacccttgtgggtgtacagctcttcagatgttttgcattagaatgcaggcataaagtcccttatgtatttttaatttccaagcaacaataatttaaaaatcagttggagagtgtcagcaggtgcttctaggttctgtgtggtgagcccccaggtcctggcgtgtagggctctggatgtctctgtacacgggatagaaacatggtcacgtgggaatgccaatatgacttattgcttattgagctgtgcaggcttttctgctttatcaattacgcctccaggaagctgtgaaagaaagcttcatccatctcccacaggatttgtctccatatttgtgacacataataaaatgttatgtactctttatgtaat

SEQ ID NO: 228817 - DNA, 532 bp, Homo sapiens
tattttttaaaaagtaagcagttatactgcttttaatattgattggtctttttatttggcttggagttcttcaaagcagtgaagtgtgttcatagtccagatttttttttagtaaacacaattttgctgccaaatatatataaataaaacacaaaacaaaaattaaaaaatgttgaaaatattagaccatctccctttttaccaccttccctttttaccttttactgccatttacatccacacatccacacacacaatgctatgctatgtttaatagcatttccctgattaccaatattaggcattatatattgtctattcatgttttcatattttgtataatgtctatatcctttgttcattaaattgtgttatttgtattattctttataattctttaacacattgctgtttatatgttggttatattttacattttcttctagtttatgggaagtctttttcttttcctaagacaatctattgataaatataagctatgaatattaaagttataattaaagttaacaaa

SEQ ID NO: 228818 - DNA, 476 bp, Homo sapiens
atccctgtgtctgtgaactcatggagcacgttttagccaaggtctaaccctttgcgctagagaagaggaccctcacccaccattgaatgagcagtacacacaaaataaaatatgagggttcaaccaaaggagacggtgaagggagagttttaaccctcataaataacaggtataagactaaaatctgtcatttgtaccccttcctcagtgctctttcctatctaagataatgtatcctgtgttaattaatacacatttttataaggggttgttttataaatcttacctcttttctgcattatgtgaatagtaagatggagaatgttgcttattataataaagtgataactcagctaatattcttatttcttcaccctcattgagattttctatgaaatatcatttggagaacatttcttattataatgaaaagtgataactcagctaattttcttatttctttacctgtcattgag

SEQ ID NO: 228819 - DNA, 800 bp, Homo sapiens
agaaatggaaaataattctaattgtacacatgtctgataaaagagacttaaaatacatgaagcaaaatgtaacagattaaaatagaaaaaaagatgatttcagagtcttagttacgattttaatatccttccctacaattgatagaacaagacaaaatctgtatgaagacataaaaactctaaacaatagtgctaaccaccttgacgtaattgatattttaaaatataacactaaaaatactgcagtatgcaagctctttgcaagtgtatgtatttcattccccaacattcatatgctactccatctttggctaatgatacctgtccttaattcctttttaaaaacttgatatcatacagattatgcccttgtgccacaatggaattaaattagaaatcaatgagaataagataacaagaaaaaaaaacaacagcaaaatacatggaaattatgtaagatacttctaaatagcccataggtcaaaaatacttgggctagtctgttcttgcattgctataaagaaatacctgaggccgggcgcggtggctcacgcctgtaatcccagcactttgggaggccgaggtgggcggatcacgaggtcaggagatcgagaccagtctggctaacgcggtgaaaccccgtctctgctaaaaatacaaaaaattagccaggcgtggtggcgggtgtctgtagtcccagctactccggaggctgaggcaggagaatggcatgaacccgggagacggagcttgcagtgagctgacattgcgccactgcactccagcctgggcgacagagc

SEQ ID NO: 228820 - DNA, 391 bp, Homo sapiens
taaagtcctataagagcccggcatctggctgcactgcctgtatttgagcactgtcagttcacgcctttccagctcagatcatatgggcttgggatcaagagaaacaaattggttgtagtctcagcttcgtttctaactctgcctattacataatgtaaggccaaacccctctctgagcctcaaaaacctcatgtataaaatgataggactgaaatacaaggcttctaagattacttgtagatttagacattatgactctgtatataaacacacattttaaaatcttattagtattaccttacagattagatttttgaaaatatttttgttactgtaatttcctactctctccaaaatttcaaataaacgtcaactgattcactatccaatc

SEQ ID NO: 228821 - DNA, 130 bp, Homo sapiens
agcttctgtgccatgcttctttattgttttgggtacttggaaatccattctgcattcgctcaggtacagacctcagatttggtggaagcaatactgatgatggaaccgcagtactatgtatcttacccta

SEQ ID NO: 228822 - DNA, 506 bp, Homo sapiens
  misc_feature (502)..(503): n is a, c, g, or t
  misc_feature (506)..(506): n is a, c, g, or t
gaaagccaagctgcttctcctgtcattgtacccagacagcagggactatccaggctctgattaaacatgttctatacctggaatgttaaagaaaatgaatccctttccggggttagaaaaaagagaagtatgtgaagggggaagaaagatgagtcatgtgaacagaagttgaatggaatatcaactagaaaactgagccccactgacggagctgctgtgtttgatgcagtgggtttaggaacaaagagattgcccgagttaggagatgagaagcaggcactaggggcgctcgcctgcaggaagcaggaacaggagctctccggcacacctcagatgccagtgctggctgtaaaagccaacttgctgtaaaagccaacttgctctaaacagtgccagttttgcagcctcacaggccgacaattacagaaacctcattatacttgagtagcttaatgtaattatcgaaccacagctgtgtgatgttggagcggccgcaaccttnnggn

SEQ ID NO: 228823 - DNA, 512 bp, Homo sapiens
attaagcaaattgaaagctcttagcaaaaagagggggcctgaaagcaagttgccagaaatggggctgagttctgtgtttttgatatggcagaagtcaggatgttttctgtgggtttgtgacttcatgtttgttattacccatgaatacctaagcaaaaccgagggagggctaacacaacaatactaatgccatgttaatgacattataatgagctgggttaagttaagtacatttaggttgatttattgtgcctgtgcctaagttggaacagtccctttgggcaacatcctggcacaaggggaaattcttaaccacgtttcttcccattagctgcagaggcagtgtaggtgctgtgttgaggttgttcctgtgaacattgcctttctctgtccttctcccgagaccctccctctttgtctgcctatccagcccctaaccacctcctccctcaatggaatgtgttaataccaccaccataattgtaaaataaaatattccagtgaaatagaag

SEQ ID NO: 228824 - DNA, 86 bp, Homo sapiens
ctaggttcttgcttgtacttttatgtgggactttttaaaagagttcaaacaatagggaaatatgacacaaaggaacctgaaaaaca

SEQ ID NO: 228825 - DNA, 499 bp, Homo sapiens
ttggcacactgcccagtgtggtgcttggtacatggaggcctgcagaggtggcactgagcagcagaaagaacatcagctttcaagtttgttaggcctgggtttgagtcttatctaccatttgccaggtaggtgaccattgcccaagaaataacctctctgagtctgttacattttctgtaaaatggagaaggaaggctgggcatggtgactcacacctgtaatcccagcactttgggaggtcaaggtgggtagatcgcttgagctcagcagttcaagaccagtctgggcaacagggtgaaaccctgtctctacgagaaatacaagagttagccaggcgtgatggtggatgcccgtagtaccagctactcatgaggccgaggtacaaggatcgctcgagcccgggaggtcaagccttgaggccaaggtggaagttgcaatgagctgagattgagccactgcactccagcctgagtgacagagcaagaccctatctcaaaaa

SEQ ID NO: 228826 - DNA, 284 bp, Homo sapiens
ccatccctccctccatccccttctctccaccccaaaaggaaactctctgccgccatcattactgttatgtcaagatgcccaaactctccataacatatcccatcctccgaccacgttcagtattgatgactttcattcagtgttatgaatgggaagggcgggaagggagggagtagccagtggggaggggcgggtggtgggggtgggatggagaatggagatcttttttgtcttttttaaaaaaaaaaacaaaacaaatttgtcatttaatggatccaaaaacc

SEQ ID NO: 228827 - DNA, 110 bp, Homo sapiens
ctgtggccttccagggagtctgactcttacagacaaagcccatggacgcgaactcatgcccacagcccgtctttggactttataaagcctaagcccacaggctggccact

SEQ ID NO: 228828 - DNA, 934 bp, Homo sapiens
gtacagaaggaagatagcagattccttgatcactaaatcggctttaccatgcagacaggatctaatccatatatgcccctatctaagatgatctggcccaagtggatggagaataaacctctaattctgcctggccctatggattcatttgtagcttttagcacaggacccaggtcctatagaactaaagtctcagaaatacatgaggagatgcctgactttggagaacaccaagaatattttcaatgtgcccaatatccaaatggtagctcctatagtgagagaagtcaggggagaacaaaatctgcgaactttaaagcaagataagaactgaatctgattactacttgtcgacaccaactttctcctccagagacaggaaatttcctgagttgtgagtacaattttgtatccactgggtatagactagccaaagaagagctttacttcaggggtgatcgagctcatcatggggaatagacacaggtgaacttctcatgacatggcttcctggaatgatagatcatcggaaaaacaattgttcaagcagcattggtaataagaatgagccctctcagggactagctgatagagctagtttgggtttgctgtaggccaagcaataatgaatctctttcaaagagagactgggggtagaggtgaccattaacctatatactcactttggttcactattagtggcagtattttaacttcactgggacatctttgatgtggtttagaaataagtccaacttgttttgtgggacatcccttggtccaggagcaatctaaggtcagattaaattttctggatggttgtgaaactgtagaacctgcctcattggtcagatttgggttgatttagtcactgaccccacaagacaaacattaacacaaaatacccccacttaggcttataattagaaagtac

SEQ ID NO: 228829 - DNA, 476 bp, Homo sapiens
ttttcttcttttcttccttccttcctttcttttctttctctttctttctttcttctttttttaacagacaaggttttgctctgttacccaggctggagtacagtggcacaatcctagcccactgcagcctcaaactcctgggctcaagtgatcctcctgccttagcctcctgagtaactggaactacaggtatccgtcaccacacctagctcatttttttaagtgatggggtcttgctatgttgcccaggctggtcttaaactcctgagcacaaacaatcctcccatctcagctgcccagagtgccaggattacaggcgtgagccaccgtgcccagccttgtacatttcatacaagtggcatcctacagtatgtggcctttgcggctggcttgtctcattcagcactgttctcaagtttcatccttgtggtagcatgaatcagtacctcattcatttctatggtccaatattctcc

SEQ ID NO: 228830 - DNA, 444 bp, Homo sapiens
cattagatctttggttagaattatactgaggttaagaatatgatcaatgaaaaacacgaacagaggacagaaaggtgatgagacttactgaatctaagccagtgtgctactgcggcagatctaaaatcaagaatgttccattaaaaaaattaagcgtgggccggcacagtggctcacacctgtaatcccagcactttgggaggttgaggcaggaggatcacaaggtcaagagttcgtgaccagcctgaccaacatggtgaaaccctatctctagtaagaatacaaaataattagctgggcatggtggcacgtgcctataatcccagctactcgagaggctgagccaggagaattgcttgaacccgggaggaggaggttgcagtgagccgagattgtgccactgcactccagcccaggtgacagagcaagattccatctcaggaa

SEQ ID NO: 228831 - DNA, 499 bp, Homo sapiens
tagaattgcgaggggagtaaagcaaccaagtaattgtataggtacccttgggaactaggattttcagcatggaggaaaggggaaacagaagcaagatagcagagattcatctaaattggaattggaagtatcagtgtgaatgaatatgagttcatgataaatctcatctattaaaaaatatacacatttcctaatattttcattgaaatagtcgagaaactaatcaagcagcaatgagctcctccacccatgactccttggggatataggtgattttggtctagagcaggaactgtacaagttagactggaatatttggacatacagatagcatagtaagtatggtgtcaaggactactgagagtatatcaaaagttctcaagagccaaattgaagaggctcccactggctatttatgggataattggaacatcaataagaataataaattgaaagcattaaataaggtttaaacccaagagttcataataccaaaaaa

SEQ ID NO: 228832 - DNA, 322 bp, Homo sapiens
ggacggcttgtgagtttgaaggtctgagacccaggagagctgagggtgtcagctccagtctgagtctgaaggtgtgaattctagtgtgagtcagaaggcctgagacccaggagagccaatggtgtgagttccagtctgagtctgaagtcctgagacccaggagagctgagggtgcccctagctcctctgaggcacgggaatatccagtttcttctcccctctgaagaacctgcctgataacaaccatagtgctttaaatggcatctcccaaaagataagtccgtgcccttctccctaaaacctgggaaggtgactttattta

SEQ ID NO: 228833 - DNA, 360 bp, Homo sapiens
ctccttgactccctctgttcacgcagcagggcagaaaacatctccacgggggccacgacactgtgaagggaatcagcagtagctcccagaagaacagcggaaactgcaggcaggtgaagaccttggcagcactagccccggctccgccccgtgccttctccccagacaacaccccatacccggcagcaagggtggaagaccagtaccaccgtaatatgttgtgacaaagcagaaataatgcacctgtaagagtcagatggcaagagggaaatggaatgagctcatcgatggttttcccggcagtagcttggggataaggactacttgtcatgtgctttatatatttacccacatgttaac

SEQ ID NO: 228834 - DNA, 402 bp, Homo sapiens
gttgaaaagagcaaaaaaaaaaaaaagagagagaccgaagtacaattacaatcccatcccacaaaaaggtcaagggctacctgaaagaccggtggccccaggatcctcaaagcatccaaaccatccctatactctcaggaaagaaataaaagccaaagtgataacttaaaaatgaagctgccacccacaggggatgaggacttggatggagcccagcatcaacaaggcggatcacttgagcctgggagtttgaggctgcagtgagccatgattgtgtcactgcacttcagcctgggaacagagcaagaccctgtctcaaaacaaacaaacaaaaacaaaagagtccaataaccttcatggacacacaaccattcttaataaaatgttagccaatcaagtcca

SEQ ID NO: 228835 - DNA, 597 bp, Homo sapiens
  misc_feature (383)..(383): n is a, c, g, or t
  misc_feature (558)..(558): n is a, c, g, or t
  misc_feature (580)..(580): n is a, c, g, or t
  misc_feature (591)..(591): n is a, c, g, or t
gctattttttgtatttttagtagagacggggtttcacgttgttggtcaggctggtctcaaactcctgacctcaggtgatccacccgccttggcctcccaaagtgctgggattacaggtgtgagccaccgcggctggtcaaaattttttttttttggtactttttttgcagaggcggggtttcgacacgttgcccaggctggtcttgaactcctgagctcaagctatccatccacctgcctcggcctcccatagtgctgggactacaggcgggagcacagcacctagccccttccttttcttgtctctgtgaatgaggtttggagccgagacactgaagtatagataattgcaaaaaggctctgtgtgctccgggatggagcangtgtgcagagggtgagaacccagctctgggaccaagtcacttgcttccttacttagcaagactatcgacttgagcaaacttggacctgggatgaggatgtctgtgggcctctcgctgctgctgcccctctgggggaggacctttctcctactgctctctgcggttatggctcagncccactggcccagtgaaccctnagaggctgcanggactg

SEQ ID NO: 228836 - DNA, 328 bp, Homo sapiens
atttttcaactatttttagttgttagaaatctccattttgccaaattttcttgatccagatgcagcgcaccaacatggcacgtgtatacatacgtaacaaacctacacgttgtgcatatgtaccctaaaacttaaagtataataaaaaaaaaagaaatctccattttgaatttctgcaaatgaggtatgtaaaaagcacatatttttaaatgacttttgttcttcctcttagaaatggtgaaaattggaccacatttttttgtttagtgtaaggatcattcatttgtattttaagacaagaaaggcacttttgaattttcaactaagt

SEQ ID NO: 228837 - DNA, 410 bp, Homo sapiens
tgatcaggaattcaaactgctttgcctttccttcacatgcacacggagctgtgtgtgtggggtccacgactctgggcagaaggtagccttgaactgcttggacaccctccctcggcaccagctttctcacttgggtcttgttaatctcaggtactccttgaaagcagtggccaagtttccttcataacgtgccccctaggagcccatgcaggtccttacacccagggacggctcagagagggcctggtggctgatcagcgagtctcctggcatctgtatccaccctgaactgggtgaagggaactttcctccagggccaaggatgtaatgagctgcctgcttaggaggaaagctagacgtattcccattgagtagatttgaaaaacaaggctgatggtggatcataaagt

SEQ ID NO: 228838 - DNA, 934 bp, Homo sapiens
tgtagcatactcaaggagacctccagcctcctcttaaggagtgatgatctagagagaagcagggtcagtcccattcttagccactagactcaattattttgtgtctcctaaaggaataatatttccaacagtgagaactgtaggaaaacgattattacagtagaacttaacacttgtttttgattatggaaatctgaggaggcttttcgtaatgcttgaggaatgccaagcagcagactacgagaacttgagtatggaaatagcttagcaaatagcaaaattacaactgtaccttttgcaggcacggaagatagatgaatccagtctcctgaactaacaatagttactagtaataacaatataccatacagattacataagttatataaataacaacttgttatttatatggaagagagacctaatgtgataaacacaatttcaatcttgtaagcatttatttaaactttatatctacctggtctcttatccaagattttcctgaacactttaagctggtctcactcctgtgctcccttcagggctgttttcccgccaaactggatcattcagcccacccaagtaactcctgagacttggcttgacttctcccagagctccttctatgcctgacacaggtaagatacacagtgtctttcatttcatcttctacgaaaatatttgggatacacacatccttaactatcttcattctaccctttgtgagtaactcaattctgaactgttttccactaattctggtttacaaactagtatggaaacctcctttcagccatccataatttcttgctccaagttcgggggtacattttacttttagtataggactctgggccaggcatagtggctcacgcctgtaatcccaacactttgggaggccaaggcggatggatcacctgaggtcaggagtttg

SEQ ID NO: 228839 - DNA, 416 bp, Homo sapiens
agagattcaagtcttattattttaataataagatattgatttgttggcccacagtttgaaaagatgctgaattacgggagggacaatcagtagttctaatgttgggatataatcagaaaaattaacctcttattccccagaatttctaaaccaataggactcaagacaaatgaatgtgatcctaggttagagtgtgaatggaatttacattatgtatatacgtagaagagctggatatatagttgtttagttttttatataataccaaattatatttcagagatacttatttttgtgtttcttggaaacttagacaagttattttagaaaaatcctaatgatttttttctcttcacccactcccttctcactaaaaaaggattgcttcattgtcatgaaaattaaatctagaatcc

SEQ ID NO: 228840 - DNA, 322 bp, Homo sapiens
aaaaatgttcatggtaacaaaatattggaaatagcccaagggaccatcaatagggaatttattaaattgtgtatatttatgtaatatattaattttcacacaggcactatcatcgtttggtgcaagccagttctttattgtatgatactgtcccgatcattcactacagggcagtttataactttggacctggcacaataagtggaggttgcacattcaaattttgagacaactcaaaatgctcccacacattttcatgtgcctctagggtggggcattccacttgagaatcattaatattatggaattccgtacaactgta

SEQ ID NO: 228841 - DNA, 427 bp, Homo sapiens
aaacgtcatggtgtttttcactgaccacagctgtcttgtggcaatctcttgagcagtcaacatctatggctggcgcaataagtcattaaatcaaaatacatcaattactggttttcaaagagagtcttgatttctgcataatgtgacttacataagggtaactgtattgttgctgagtgtgattgcacaaagaactcactgggcactgctttaacaaatgaaagcaggtcagagggaaatgtatcctttataaatggcttcatctattcattcaatttaggaaaccatttcttttaggctggtaatttaaggatagcactgctgaggactaggaatttgtttttacctgtactatttcatctgattataaaagtaatatatgccgaccaaaaaaaaaaattacacaaataaatgtcttacagagaat

SEQ ID NO: 228842 - DNA, 214 bp, Homo sapiens
gagcaattgaaaaagcaccaaaactaagaaatcagaaccaatcgcatttttaaggcatatacagcaggcgaggtgcctgctcttatgtaatctcctcactaacgtgaaaaagatgggaccctcctcctccgcatgttacagatgagggagcgcgatctggctcagtgatttgctccaggtcagaagctttccatagggaagcaacaccccgccc

SEQ ID NO: 228843 - DNA, 272 bp, Homo sapiens
tgacaaatagagtccagatgccaatgttactggtatttatgatattataatgcactgcactctatggcaaactgctaaagtgccattttgttacttcttcttttttttttttttttgagacggagtctcgctctgtcgccaggctggagtgcagtggcgcgatcttggctcaccgcaacctccgcctcctgggttcaaccaattatcctgcctcagcctcctgagtagctgggactacatgtgcgtggccatgtatttttagtagagacggg

SEQ ID NO: 228844 - DNA, 475 bp, Homo sapiens
ctatgagaacccaggctcagcaggctaagctgttctccacccaccccaagaggtggctgtgggggcaacagacaggcgggagggggaagcagggacagcagggttcagacagagtttgccttgacgtgacactcccccagagccaagacctgggggatgtttcagaggtcctggtttcctattggactgacagacacatttgctgagctgcagacatttaaagctcctgtctcttttctcctcagagctccagcgggttttctctcactctgcatacaacatgcatactaattggaatctctccctgagaagaagccttcttcctgacagatcctttaagaatagctgtaggttttgaagaaacccaagatggcattgcctgtaattataaagtaattggtgtaattgagagctcagggtctcatgcaaatcatcctcccatttctaactttacatcaagactatttttattttt

SEQ ID NO: 228845 - DNA, 433 bp, Homo sapiens
ctgggcaatgtgaatatgagtttgttggaaaagtcctcatctagcagcgaagacgtgtgatctctatctcctgagcaacaccatttcacaaatgaggaccctggaacagttaacaaggttcctaaagcctctatattcaatgtgtggccccggaaccagaagcattgtaatcacctggaagcttgcttgtcataaatacagatacttagaccttgcttcagacatactgaaacagaatctgcattttaacaaaagacccagaggattgcttttacattgtgtgtgtgtgtgtgtgtgtgcatttaaaaagatacaggtgtcacaatttcttattgtttggtcaattttaaaatttaatactgtataatggatatctcttatgtcaacacagatctacgttattattcatcataaataaacagtaagttattgt

SEQ ID NO: 228846 - DNA, 437 bp, Homo sapiens
tgtgcaataagacatttgggataactggtaaaacttgagtgggatttgaggataaaatggtgatagtgtatctgtatttcttgattttgatggttatgttgagatgatgtaggagaacatctttgtaggacagacactatttaggagtgataaggggccaggtgcagtggcttatgcctgtaatcctagcactttgggaggcctaggcaggtggatcacttgaggtcgggagtttgaaaccagcctggccaacttgaagaaaccctgtctctactaaaaatacaaaaaagccgggcatggtggcagatgcctgtaataccagctactcaggaggctgaggaagaattgcttgaacccgggaggtggaggttgcagtgagcggagatcacgccactgcactccagaatgagcaacagacagagtgagactcccatctc

SEQ ID NO: 228847 - DNA, 482 bp, Homo sapiens
agatgagatttgggtgggacacagccaaacgatatcagttactaaagttatcttggcatattattactctgctcagatttttttttggataatacctgcagaataaggtccattccacatattatcacatttaacactacatggcctaattctgctgtgacccacttttctcatcccagcatggcctctttccttccatggaaaatgggatccatacagcctgctggaatgcccattttctcctacagctggaatgcccattttctcctacagcatttacagaactgacttggctcagtttcctcttcctggaatactctctgcctcatttccttctggaaaaatctccattcagcaggcatcttattgaggatctcctttgtgccaaagactgctcactggtagggagctcaaagatgaatgaaatctgggccctgttctcaatatcacagaagtgttatgagcaaaaaagtcacaaaaca

SEQ ID NO: 228848 - DNA, 308 bp, Homo sapiens
tcatgcctcaggaactgagaaccttagcaccagacagaaaacctccactttcagaaaaagtcctgaatcttggggagggagctctctcttcaaaagccgatctggcctcttcttatacagaaatgagccgcacaatgacatttcgttcaatgacagatcacatataagacagtgatcccataagattatgacggagctgaaaaattcctatcacccagtgatgtcgtagccatgataacatcatcgtgcaatgcattatgttaccttttctatggttaggtgcataaatacttacccttgtgttacca

SEQ ID NO: 228849 - DNA, 393 bp, Homo sapiens
actccatctcaaaaaaacaaaaaaaagaatgatgttagctgtggcttttaaaaaaaaaatgctgtttatcagctgggcgtggtggctcacgcctataatctcagcactttgggaggttgaggtgggtggatcacaaggtcaggagttcaagaccagcctggccgagatgatgaaaccccatctctactaaaaatacaaaaaattagccaggcgcagtggcacgtgctgtaatcccagctactcgggaggctgaggcaggagaatcacttgaactcggagggcagaggttgcagtgagctgggatcgtgccactgcactccagcctgggcgacagagtaagactccgtctcaggaaaaaaatcaaaaaccaaaaaacaaacaaaaaaattgctc

SEQ ID NO: 228850 - DNA, 417 bp, Homo sapiens
tctgattagataaaagcgagaaatacagaggctgccggttacactgagaaattacatttttttgtaaagagagcatagtgcccgtgtgctcccaagatcttaaattataaacaggagggggacaaagcaagagggaaacaaacttcaaaaggagcaaataacaaaagcctcttttgctgctcttgaagggaggggggaagggggaagaaagaaaagaaagttgctgaatcgggacattctggaagtgcctttgctgtgtttactagccccatccccgcctgctgcacccggagacgtctgaagtctctaatcgctcagcgaaaagttggtttcgggaagggcagcgccggggtgcgggagggcaaaggaggaagaggaatgcatatgactgtgagaaggaaaagtaatcgtggcaaa

SEQ ID NO: 228851 - DNA, 535 bp, Homo sapiens
acattgagatgccgaaagtgttaggagaaatcattttattggggggatgcagagaaagagagaatgggagtgacttgatcaagatcacacagcattaggggctgcgtttgacctaaacttctcgactttttttatcagcccaaagcaggcaggcaggatgaagtgggatgacattacagttcacttggtccacctgagaacctgagattctggtatgtacacagcttgtctgagtcaggttgtgaacttggtcctttagggcacatgagaatatgtctctgcttataggtctgaaagtaataaggaagagtagggtttggggcatgagaaaaatgggcattctcctgcaaagtcatttgcattaagtatctttaagcaaggcaggaccagactcaacagatagggatgggtgggactgcttctgttgcctagggaagcttagtggagtttggagatttaaaggtgagcaaactctgaccagtgggccaaatacagcccactacctatttttgtaaataaagttttattgaatcac

SEQ ID NO: 228852 - DNA, 528 bp, Homo sapiens
tgaaagctttcacctcttgctgaaggaaaacaccccatgctgcctttgaaagcttctgcaagttttgtgtatccaaaatgatggccatgcctgagaccacacctgaccccaccgactaagggacagaggaggtggcccgagcttctccatgtttcccttagagcgcctccaggtgtcctctggatctgtcatgcacaagccaaactgtctgcaagggaaaccaaggatggaactggactatatagcctgtactggaaaacaggccacagtgtggtactgttaacctgtgctgcctgacttaggtacaccctcttgtgttgcccaaactatggtacactctgagtttgcagggagaccatgtgtatgctcgggtattgtacagcttatgtgccctgcctgtcatgacactgcctcagccctggatggcttccaggtcagctcgaacttcctgtccagagctgtgttttacctgaattgatgccccaattgattgaattggccaagtataaagaaaaagtactgaaattt

SEQ ID NO: 228853 - DNA, 388 bp, Homo sapiens
tgaaatctcagtttgcttggacaagctggggtaagactctgtgacatgttgtttaagatcagtgcatgctggggccagtttacttgaaaggggatctgtagattgaagatgctgctgcctctcttacatgagaataatctgcttatgtgcctggccttggccagacagaaaggaaatgtcgggcatcagctgtctgaaggtgcggtgaggaactgaagagaacagaaggaaaacctggctggtaaatgcagacgagccactgaaggattccaggaaggaagccccgagggtgttgctgtctcccttgccagctttttatctcttgcaaatgtggacacgttatcagggcggatctattagaaaatgaatccactgaaacatctgcaaa

SEQ ID NO: 228854 - DNA, 421 bp, Homo sapiens
taagccaggcacagaaagacaaataccacatgttctcacttatatgtgggaggtgaaaaacttgacctcatggagatagggaatagaataagttatccggggctgagaaggggaaatgaagagaaattggtgaatatgtacaaatttccatttagatcaaaggaataagttctgatgttagaaagcatactagagtgaactatagttagcaaaaatatattgcatatttcaaagtagttggaagagaggacttgaaatgttaccaacacatagaagtggtaaatactcaagatcatggataccccaaatacgctgacttgaccattacacattctatgcatgcaagaaatgctcatgtgtaccttatatatatgtaaaatatgtatcaataaaagaaaatatataaaatagttttaaaata

SEQ ID NO: 228855 - DNA, 453 bp, Homo sapiens
tgggagctaagaacataaagtacattgatttctttattacagctagcagatatttaataatgttagcacaggtctttgaataaattttgcttctaagaaaagttactatttactcctaattagacggagacgaaagtctttgaagaggaacctctactttactttttacaaagatgtcatgaaaaaggaatgctattaaaaaatcggagacaaacaaaggctcctagaaattaaaaattaagttagatcatctgaaattaaaattttaaattaagatgaggagatataatgaagtttcccactaaataatatgaaaaaacaaaattaaaaaccaaaaaaatggaatggacaataacagggcccactgaatatccaaatgatgagttcaaaaagaccctcacgaagacatagactcatgaaatttcagaacactgaagaaaatgaaagaggaaa

SEQ ID NO: 228856 - DNA, 1111 bp, Homo sapiens
ctcacttcttggtgcctgcctaatcctccaaatcaccacaggactattcctagccatacactactcaccagacgcttcaaccgccttctcatcgatcgcccatatcacccgagacgtaaattatggctgaatcatccgctaccttcacgccaatggcgcctcaatattcttcatctgcctcttcctacacatcggccgaggcctatattacggctcatttctttacctagaaacctgaaacattggcatcatcctcctacttacaactatagcaacagccttcatgggctatgtcctcccatgaggccaaatatccttctgaggggccacagtaattacaaacctgctatccgccgtcccatacatcggaacagatctggtccaatgaatctgaggaggctactcagtagatagtcccaccctcacacggttctttacctttcactttatcttgcccttcattatcacagccctagcagcgctccaccttctattcctacacgaaacaggatcaaacaaccccctaggaatcacctcccattccgacaaaatcaccttccacccctactacacaatcaaagacatcctcggcttatttctctttcttctcaccctaatgacgttaacactattctcaccatggttaggccttccctaaccatgctcctcaaagagaattaggtcttcccattattctctctcacagcactcctttctgatgcagaggcagtatctgagccactaacagtatggattgcctggaatccaatcctgactccacacttactagctgtgagaccttgggcaagtcacttagcaagtctcagtttcctcctctgtaaaatttgggaaatctatttcacagagttctgtgaagattaaatgaatgaatacatgtaaagtccttcccatagtgccatgacccatagtttaagtgttcactaaccatttgctgttaagattttccttcctagggccgggcaggtgggggcacctgtaatcccagctactcgggaggctgaggcaggagaatagcgtgaacccaggaggcggagcttgcagtgagcccagatcacgccactgcactccagcctgggtgacagagcgagac

SEQ ID NO: 228857 - DNA, 498 bp, Homo sapiens
agcatgagccaccaagccaggcctatttatggtttctgatcatttttatttctttaaaagaagtgtacaggtgggcacagtggctcactcctgtaatcccagcactttgggaggccaaggcaggtggatcatttgaggtcaggagtttgagaccagcctgaccaacatggtgaaaccccatctctactaaaaatacaaaaagttagccgagcgtggtggtggacgcctgtaatccctcctgctactcgggaggctgaggcaggagaaccacttgaacctgggtggcagaggtggcagtgagatgagattgtgccactgcactcaagcctgggcgacagagccaggctctgtctcaaaaaaaaaaaaaagaaaaaaaagaagtgtacactacagcaaagcatgtctgatgccagtgggctatgttggggtgggggtaagggtgtcaatttgacctgggggttctgaaagtctcaggaaaggcagatgggggaaggcccg

SEQ ID NO: 228858 - DNA, 425 bp, Homo sapiens
ctccgtgtgcacgcactggacttcctggagttattcatcaggatgaggggctggcctaactttaaaaatcaaaaagccaggccaggtgcagtggctcatgcctgtaatcccagcactttgctcacgcttgcaatcccagcacttggggaggccgaggtggccagatcatgaagtcaagagatccagaccatcctggccaacatggtgaaaccctgtccctactaaaaatacaacaaaattagctgggagtggtggcacgtgcctgtagtcccagctactcaggaggctgaggcaggagaattgctttaacctgggaggcggaggttgcagtaagccaagattgtgccactgcactccagcctggcgacagagtgagactccgtctcaaataaataaataaataaataaataaaataaaaaagcca

SEQ ID NO: 228859 - DNA, 377 bp, Homo sapiens
tccaagagtcaaaaacttgctatcttctgagatagacataggtaaataacctaccttcctaaaacaaagtacaaaatgtaccagtattttgaaaaagaaatcagcagggaagaagttgagaaagaaaattcttggacaagatcctacccattggattttacttgccttccacacttgaatttctctcatttgagtccacaagctaccaccagggacagcctgcttgctacactcctccgaactcccaatccaactaagagggaaaagaccttccttgatctgctcaacacagctgcatcatgacatagcattttagaaagtaacattatgacattttcaagtaagacggaatggaagtaattagaaatgcatatggg

SEQ ID NO: 228860 - DNA, 6050 bp, Homo sapiens
  misc_feature (6042)..(6045): n is a, c, g, or t
  misc_feature (6047)..(6050): n is a, c, g, or t
gagcgggtccgtagccacggcaacaggttgcttctgcagtctgagctgagcgcctttcgcacgacttggagttacggtttatctgataccccggtacccctacgcaagcaagcccacatcgacacacattcacacacgcccttcagcaccccctcccagcaccacgaccatggacgacgactatgaagcgtaccacagtctgttcttgtcgctgctcggactctgcccgtctaagactcccatcaatgaaaatgctcccgtctttgatcctgaaccggtcattgcccactgcttcaagcagttccagcagaaggacttccgcctgcctcagacccgccggcgaatcatcatggtgcctcgcaaggaggatcagacaccccttaatcctgcatcccaacctcaggctcccccaaagcccatccccagcttcaaagttctggaagctagagatatccaagagcagccagaggacaggaagacctggctgagccagaggtcgaagctgcggcaggagctagagtcctttggtgatgtaaagaggtggctggagaacaagcccagcatcacgccttcagaggccaaggtcttacacatgatccacgaggagcagagtgcccagccaaatgcctcccaggcaactaccaggaccaccaggaagaaagcccccaggctctcccggctgtcccgccagatggtgccccagctccagctgcccgagccccctgccctgtcggtcatgtactcctacctgcatagccgcaagatcaagatcctggagatatttcacaaggtgggccagggtgagaaccagagaatcaccagggaggagttcatcgcggctgtaaaggcagtcggagtccctctgaagaaccaagaggtggaggatatagtgatctacctcagctctcttgggaagcacaacaccatcaccatggatatcctggccaatacctacaagcagtggtctatggctcagcaaaggagcagcctggccactgcaagggagcgtgcgtacccctccccatcctgtgcctccacctccccgtcctgggagcaagcatggtgcaggcagccttggcctctcctccaaactcacttcctcagtgtgttccccagttttggccgactgtggtttggccaagcctctggaaattttcaggcccagagattaactaaggagtagatattcccttgagtgcccagctaccactgtgtccattcaaagacaaatgagtcccagcccttgttcttagaggaggatactcagcccaccagagcccacctgagaggctgagaactgacccaaatggcaagcctttccagagacatttatgtgtgtgtgggtccaaggcctcctcactattaatccatagcttattgataaaattcttgttcagaaccagaattagcacatgtttacagtttactggaaagtgtattttggtattctgctatcaggggtattatggcagggttgctgtcaacagttgtaaaggttgtacatggctcaagttccatctgccaagcaatacatttgtggggccacatctgtccagacaaggcacagaggcaaattagaaatggacttgctaaagctctggctgtgaatttactctacaacacaaaggtgcattgtataatatttctttatatcttagtaccattcttgtagtaaacaaacaaacaaaaaagaaccattacaaccacccacccattctagcacccttcccaaacatagccacagctttgtttttctaaatgaaacaaatcttgctctgttcccatctaccaggttggcaggaacttaatctcatgcatgtttggggcttccttgtcctccctgagtcacacaggagccctggaggaggcagtggaggggtttcctaacaatggtaaagatctggggtgaggccgttggagtttacagtcacaccaagaggagttactcagcatcctcactggagtggctcatttggggacagcaggcagctcagagcatccattcctcagtcctccaggagattttcaatgtccagtctcaaccagctgccctgcagagaaactatcacctcccaagcagggtctctgcctctctcagagctcagggaagctcagcaccccaacagtcgctcctgcatgtgtcaccaccccaacagtagtaatctcctttatgtccagcacatttttaaggtcacctcaagttgggctgctttccctctgatactctttgtgcctttttgttataaattaccaagcttatcattatctgtgtagctggctgtgagtcatttcaatgaccacagtgtgctgtgatgcatattcgcagcagagatattttgggtcctgttatttcccagtaagtaaacacaaagccaagcagcagacctttgctctcatggtgctactttggcgtcatcactgagttctttttccctggtgagcaatagtgggtaagataggtagactggggtgtgtaagaattaaagaaagaggaaagaaacaggaaaggtggctcaatagtcaaagacaggtttattttagagaaaacaaacctgagaggggctgctggctgagttaggtcagagccacattctcttacagactaagagtttttaaggattcacagtggaagagtttatcagaggcttggactgcttctctgtctctttgttgtgtttatctgggaggcagagttgcgtgtctgtttccatacatctttctgcagctgcaggcatatcccccaagtctgcttttagcttccctatcttagtgcacctgaagggaaaggaatgtgcttattaaggcccacagttttactggggcccattgtatgagggtgaagtttggcagtcacccaagagactttcccccgacctccctctgtgcctgagctgtcttgtctgtgttttactgtctgctctttctggctgcttatagttagaagagaagtgatttccttgaaatgcatgaggctagaaagggagctggaacttaaagtggcggtgtttgtcccagatgacggtgctcctgctctgtccgggtgtctctcactttgtctaaagaggcaagagtttgagcgtcttggcaggggtgccttcttccagtagttcttcttgcagtagctcttcttcattcttgcagaatgatctcagtttatcctttatgtccgcagaggtcaggattgctattcctgctttacgaggaggaagctggagctcagagaggctgagccacttgttcacagcctcaatagaaggtggtaaggtcaggatattatttcagcttgagacgatgaaggtctgaaccagggcagggacaatgggattctttcattcattggaatctttgttgagcaactactatgtgccacttctagaaactgggaacacagcagtgggccagccaaagccccagctttcgatgagcttgcacctaaagggctggtggtcagggacggcctctctgagaagcagacattggagctgacatctgagtgattgacaggaactagtcttgggggaagcacaatctaggcagatagaactgtgaaggcaaaggccctggggtaggatagcttgcaagagacagaaggtggtcagggtggctgggtggaatgggtgaagggtgaatggtatgccatggaccaggtgggaaggcagctgaggccagatggtacagcagggccttgtagcccagggagaggactctgggttttggtctaaatgctgtgggaagccaagggaatgaggcgatctggtcggtcggtcagtctgtctatctatctatctatctatctatctatctatctatctatctatccatccatctacacatatccaacataaggagactcatgcaatggggtctccttatgttgcctaggctggagtgaagtggctattcacaggtgtgatcatagcttactgcagcctcaaattcctgggcataagcaatcctcccacttcagcttcctgagtagctagaaccacaggcgtgccactgcaccctgctttatatatgtgtatatatatttttggggggggatggagtcttgctctgccatccaggtttgagtgcagtggtgtgatctcttctcactgcaacctccacctcccgggttcaagcaattctcctgtctcagcctcccaagtaactactacaggtgcacaccactgcacccggctaatttttgtatttttagtagagatggggtttcaccatattggtcaggctggtcttgaactactgacctcagctgatccactcgcctcagcctcccaaagtaccctgctctatattttttgtttgtttgtttttgagagggagtctcaccgtgtcacccaggctggagtgcagtggcacgatctcggctcactgcaacctccaggtcccaggttaaagcaattctgcctcagcctcccgaatagctgggactacaggcacgtgccaccatgcccggctaattttttgtatttttagtagagacggggtttcacagtgttagccaggatggtctcgatctcctgacttcatgatccgccctcctcggcctcccaaagtgctgggattactggcgtgagccaccgcgcctggctatactctatattttttaaagatcctatttgctgcttggtgagacagggtgacaggacgagaatggcaaccagagggctggggttggtgcagtaagggacgccattagtggagatggagaggagggccacatctaaggtacagcttaggtggcttaggtgggcactgcccagacgtgtgggaagggagcggaggggtggcctggtgcctgctgggtgacactggataactgcttggcaggttccgtggctgggcaccctcttagtccctccttccttcatctcttccctctgactccagattatatcttggccaagcacagagattccctgaagggtccgctcaagaagcaggaggtggattcagccccacagcttcccaaagtggacctactgacggtgcctgcagtcgacacgcagatggagacgcggcccatgaccctggaggagatggaggaagtgggcaagcggtaccgcgagcggcagcgacagcacaagctcacgatcccctccatccagtacacggagcaatgtcacctggtgcgctgtgggaatcggcactttgatgagcactgcctcccgtccaccatccacggggatatgagggagctcattgactcggcccgcaggcacaactttctggtctacctgcaatgctggaagctctgtaagtcctatggcctcccgctgacagaggacatcctcatgaaagccttgctgtacccaggagacaagatcattttccagatggacaaagtgtgccccatccggcagccgggaggctactactctgactggaaggtcttttctccgaatctggctctgctccggtcccagggccctggcaagtctaagaggactgacaagaaaacgccaaagaaaagcaagaaaatgcgctttaaggagtttgaggaatttaccaggaagctgaaggtgaagaggtccagtggtctgcagcaaacacaccccaattccttctggccgggtcatcttctggataagctgcagctctacctgcccactgtggccacagaccggagcctggcgctcttcagttgtgttcaacaccagccccatgtctacccagccacctaccaccctgaccactggtggccccttaggaacaagaactacatgacccacgcccattatgatgccgccaaggtgtactacatcaactagagctagccaggtgttgccggacccagccttcctgggccaggggccagtgcagccagcggcccagagcccagacacaagaggagtgtcaaagagtcaaactaaagaaatcctttcaaagagggatggaccgggggccagttccctctggactcaaagtgtccagtgtctcagagggtagatgtgtccaaggaatgacgtgcagtttttgactatttccctcccctgacctctgccctttctacataaagcaggttggagtttttctcannnnannnn

SEQ ID NO: 228861 - DNA, 2164 bp, Homo sapiens
  misc_feature (2156)..(2159): n is a, c, g, or t
  misc_feature (2161)..(2164): n is a, c, g, or t
gagcgggtccgtagccacggcaacaggttgcttctgcagtctgagctgagcgcctttcgcacgacttggagttacggtttatctgataccccggtacccctacgcaagcaagcccacatcgacacacattcacacacgcccttcagcaccccctcccagcaccacgaccatggacgacgactatgaagcgtaccacagtctgttcttgtcgctgctcggactctgcccgtctaagactcccatcaatgaaaatgctcccgtctttgatcctgaaccggtcattgcccactgcttcaagcagttccagcagaaggacttccgcctgcctcagacccgccggcgaatcatcatggtgcctcgcaaggaggatcagacaccccttaatcctgcatcccaacctcaggctcccccaaagcccatccccagcttcaaagttctggaagctagagatatccaagagcagccagaggacaggaagacctggctgagccagaggtcgaagctgcggcaggagctagagtcctttggtgatgtaaagaggtggctggagaacaagcccagcatcacgccttcagaggccaaggtcttacacatgatccacgaggagcagagtgcccagccaaatgcctcccaggcaactaccaggaccaccaggaagaaagcccccaggctctcccggctgtcccgccagatggtgccccagctccagctgcccgagccccctgccctgtcggtcatgtactcctacctgcatagccgcaagatcaagatcctggagatatttcacaaggtgggccagggtgagaaccagagaatcaccagggaggagttcatcgcggctgtaaaggcagtcggagtccctctgaagaaccaagaggtggaggatatagtgatctacctcagctctcttgggaagcacaacaccatcaccatggatatcctggccaatacctacaagcagtggtctatggctcagcaaaggagcagcctggccactgcaagggagcattatatcttggccaagcacagagattccctgaagggtccgctcaagaagcaggaggtggattcagccccacagcttcccaaagtggacctactgacggtgcctgcagtcgacacgcagatggagacgcggcccatgaccctggaggagatggaggaagtgggcaagcggtaccgcgagcggcagcgacagcacaagctcacgatcccctccatccagtacacggagcaatgtcacctggtgcgctgtgggaatcggcactttgatgagcactgcctcccgtccaccatccacggggatatgagggagctcattgactcggcccgcaggcacaactttctggtctacctgcaatgctggaagctctgtaagtcctatggcctcccgctgacagaggacatcctcatgaaagccttgctgtacccaggagacaagatcattttccagatggacaaagtgtgccccatccggcagccgggaggctactactctgactggaaggtcttttctccgaatctggctctgctccggtcccagggccctggcaagtctaagaggactgacaagaaaacgccaaagaaaagcaagaaaatgcgctttaaggagtttgaggaatttaccaggaagctgaaggtgaagaggtccagtggtctgcagcaaacacaccccaattccttctggccgggtcatcttctggataagctgcagctctacctgcccactgtggccacagaccggagcctggcgctcttcagttgtgttcaacaccagccccatgtctacccagccacctaccaccctgaccactggtggccccttaggaacaagaactacatgacccacgcccattatgatgccgccaaggtgtactacatcaactagagctagccaggtgttgccggacccagccttcctgggccaggggccagtgcagccagcggcccagagcccagacacaagaggagtgtcaaagagtcaaactaaagaaatcctttcaaagagggatggaccgggggccagttccctctggactcaaagtgtccagtgtctcagagggtagatgtgtccaaggaatgacgtgcagtttttgactatttccctcccctgacctctgccctttctacataaagcaggttggagtttttctcannnnannnn

SEQ ID NO: 228862 - DNA, 1727 bp, Homo sapiens
  misc_feature (1719)..(1722): n is a, c, g, or t
  misc_feature (1724)..(1727): n is a, c, g, or t
gagcgggtccgtagccacggcaacaggttgcttctgcagtctgagctgagcgcctttcgcacgacttggagttacggtttatctgataccccggtacccctacgcaagcaagcccacatcgacacacattcacacacgcccttcagcaccccctcccagcaccacgaccatggacgacgactatgaagcgtaccacagtctgttcttgtcgctgctcgaagaaagcccccaggctctcccggctgtcccgccagatggtgccccagctccagctgcccgagccccctgccctgtcggtcatgtactcctacctgcatagccgcaagatcaagatcctggagatatttcacaaggtgggccagggtgagaaccagagaatcaccagggaggagttcatcgcggctgtaaaggcagtcggagtccctctgaagaaccaagaggtggaggatatagtgatctacctcagctctcttgggaagcacaacaccatcaccatggatatcctggccaatacctacaagcagtggtctatggctcagcaaaggagcagcctggccactgcaagggagcattatatcttggccaagcacagagattccctgaagggtccgctcaagaagcaggaggtggattcagccccacagcttcccaaagtggacctactgacggtgcctgcagtcgacacgcagatggagacgcggcccatgaccctggaggagatggaggaagtgggcaagcggtaccgcgagcggcagcgacagcacaagctcacgatcccctccatccagtacacggagcaatgtcacctggtgcgctgtgggaatcggcactttgatgagcactgcctcccgtccaccatccacggggatatgagggagctcattgactcggcccgcaggcacaactttctggtctacctgcaatgctggaagctctgtaagtcctatggcctcccgctgacagaggacatcctcatgaaagccttgctgtacccaggagacaagatcattttccagatggacaaagtgtgccccatccggcagccgggaggctactactctgactggaaggtcttttctccgaatctggctctgctccggtcccagggccctggcaagtctaagaggactgacaagaaaacgccaaagaaaagcaagaaaatgcgctttaaggagtttgaggaatttaccaggaagctgaaggtgaagaggtccagtggtctgcagcaaacacaccccaattccttctggccgggtcatcttctggataagctgcagctctacctgcccactgtggccacagaccggagcctggcgctcttcagttgtgttcaacaccagccccatgtctacccagccacctaccaccctgaccactggtggccccttaggaacaagaactacatgacccacgcccattatgatgccgccaaggtgtactacatcaactagagctagccaggtgttgccggacccagccttcctgggccaggggccagtgcagccagcggcccagagcccagacacaagaggagtgtcaaagagtcaaactaaagaaatcctttcaaagagggatggaccgggggccagttccctctggactcaaagtgtccagtgtctcagagggtagatgtgtccaaggaatgacgtgcagtttttgactatttccctcccctgacctctgccctttctacataaagcaggttggagtttttctcannnnannnn

SEQ ID NO: 228863 - DNA, 720 bp, Homo sapiens
accaaactgatattttaacaagaagagtatggaaatcatttgcctgatatacataattgatttatttatttattttagaggcagggtctcacttcatctcagcctccagagtagctgaaactacaggtaagtaccaccatgcccagataatttttttttttttggtagagatgacgccttgctgtgttgcccagggtggtctctaattcctggcctttagcaattctcccgccttggcctcctaaagcactggggttacaggcatgaaccactgtgcccagcctgcatgatgtaatctccaaattgagggtcacccaggcatggaatgcacagctctgccagacagaaagcgctttggatgcctgagaaacaacagcttgtccgggctactgatgcgaagagaggccatggtttcctttttctctgctctgaatggcagccttgacgtcacaacagctaggaaccactggagggacaaataacaaggcgcaagccagaagcgccctgctctgtcgcaggggcagggccattttcatccagttctgatgtcttctgtggccgctgcgagtcggcgggagtagagacaaatgactggagctttaggcgtaaaggcggtctctctctaggctgatcaaacagccctttgcccagtgctaattgccttcacggaacctggataaactacagttcccgaattaaacttgtttctgatgaactaga

SEQ ID NO: 228864 - DNA, 457 bp, Homo sapiens
agctacacatccgtccattcgtttaatcttcacagcagccctggaggtcacccaggcatggaatgcacagctctgccagacagaaagcgctttggatgcctgagaaacaacagcttgtccgggctactgatgcgaagagaggccatggtttcctttttctctgctctgaatggcagccttgacgtcacaacagctaggaaccactggagggacaaataacaaggcgcaagccagaagcgccctgctctgtcgcaggggcagggccattttcatccagttctgatgtcttctgtggccgctgcgagtcggcgggagtagagacaaatgactggagctttaggcgtaaaggcggtctctctctaggctgatcaaacagccctttgcccagtgctaattgccttcacggaacctggataaactacagttcccgaattaaacttgtttctgatgaactaga

SEQ ID NO: 228865 - DNA, 367 bp, Homo sapiens
ttatgatgtaattaaaactactgactattaagggtcataactgaagaccagaggtaatttgtgtttatgaagttattctgccacaaagatgaacaggcaagatgataaagaaccagtttaccaataaataaatcaatataataaaggcatgctaacactaagagtgccaagtctgaaaaaagcacaaacaaaaatgaattagcagtctcaatttgctaaataagaggttaatatataattaggtctcactctgtcgccaggctggagtgcagtggcatgatctgggctcactgcaacctccacctcccgggttcaagtgattctcctgcctcagcctcccaagtagctgggattgcaggcatgcgcc

SEQ ID NO: 228866 - DNA, 676 bp, Homo sapiens
aggaactcctcccagggtcctggatccagctgctgctcacggcaggaggcccgaaaccagaaggcctgagcacttgccccgtccccaagagatgcacagaggctggaaggggcagtgcaggggctgaccaacctgctcatgaaaggagggtccagctgggcttcctgggtcgagtaggggttcagaaagctgtgaaacactcatttcctgcatcaggacttacttcggtcctggatgaagagtactgaagatacatgcctaaaatattcctaacaccaggatttgtgcatgtgtttccttccccaagaaagctataaacagcaaaaattctgctgtaagcttccctgtgtcctctctccctctcttccttccccctcccctaaaactaaaaggaatgttaaaagaccctttttctgtgaccagcggaccttatctatgctcccaattccaattccttgtgaacatactttgtaaagtcctgtaaaatcctgtctcttttgccatgctgctgcaaggtcataaagtagataaaattagataaaacctaagttgcaattctgtttttcctcaaaatctaagacatgtcacaaaataatttactgcctttgtttctctctctggtaacatcttcccaccacatgtatttcccgccttaaagagattaaaaggcaatcac

SEQ ID NO: 228867 - DNA, 443 bp, Homo sapiens
gaagagctcacacagcagcagcagactatctaaaaatagaagatttgaacagctactacaatatccactttttgggatacctacccaagataataaaccttaaatgatgtttcaaaggttaatcatttagttaaaatttactccaaaagtgctacagtgctggctatgtttaaacttgatactcagttaataatgcccagttcatggcactgaatttacaacatgatacatctggaaattacattttattttgttctgccatctgttctattctaagaacaaacatattactaaaatacccacaagttatttttttacatagaactattggaatactttcaattcagattctttaagaaccaactagaaaacattttcttttccaactgctatttcttcctataactaataaaattttcagcctgattttaattaaccagaaa

SEQ ID NO: 228868 - DNA, 559 bp, Homo sapiens
gaaatgtgaatcatatccagcgtatcccagcagtgtatgctatctgtcttaggcacttagtagccatctgggttttagatcaaaaaataataataatatgtatatagagtttggttctatccatggttttatgcatcctctaggggtcttgaaacatatgtcccactgataagaggggtctactataccacatattggatttatggactcctcatcaatttgttttcaatctaaacaaaatgacttttctttgagggtccattctcacacaatatgtagatgatattttgcagtgccctcttgatctaagtatttcacagagactccatatttcttttcaagattagctgaaaaggggcataaggaatctagagaaaagtgattttgccaagaaactgaacaaattatttgagtcatgatctgtcagtacatgggtatttttcgtacaccaaaacaaagaaaattccattttactaaagctctaaattaaaagacaatgaaaaaatttttaggattgactggttattgcaagcaataaatacctatttttttaaaagtt

SEQ ID NO: 228869 - DNA, 466 bp, Homo sapiens
atgaaaagagaaagcaaacgacagaggcttcgagtcaatgcccaagttgttagtctgattgaacagtgttactgaattacgaaattgaattattgaattattattgaattatttttgctgctgttgttgttctcattgttgataaaatggtggagcctgaggctggcattggatgtgagtttttgagtgattcccgctctgctgcactggactgcatgaattatttacaagtttgttacccagttctacttgatggattgatttcttcactccataaatatgcagtgaatgtccactccataccgttccagacacagggggctctgaccctggcccagcaagcacatttctgaccccctggagcttgcattccaggtgggggaggcagttagtgaacaagatcatttcagacagcgctaagaagcatgaggagattttttatttttttttttgagacggagtctcg

SEQ ID NO: 228870 - DNA, 467 bp, Homo sapiens
ccaaggtatgagcagagggagagagggctggaaaaagagactctccctttgctaactgatgagggagaagtatggggtccaagtgggcctgccccttgcctaatttttgcccaattttttggcctctggagtccctggtagacttcttaacttcttgcacacaaggttaccatgtgtctaattgctcagctccagttagagtggtggagggaaactggtatcaatgaatgaatgaatgaatggatggatggtttaatgacagcttggagaaccgactggggtttgagcaagaaacaggaagagaaagccaacatcttttagctcaccaaatactttcatgccccttgggaggaagaaaaatggatatgggaaatgcagagcatggaagagcttaaattgagcataaaggacataaaactagataagtaagatcagaaataaaagatgagtcatcatcgaatccaaac

SEQ ID NO: 228871 - DNA, 553 bp, Homo sapiens
acaaggaatatagtgttttgcccacccaatgttgagctagcaacaacacatcagatagactaaataatactttcatggtttttaaaaaaatccataagtgatatccatgaaaatccatagtacagatggatccaaaaatttttctttatcattacatcgctttctaaaatgatagtctgatgtactacaaacattaataagtcaatatgtgaaattctgctctaaaatattctgaatcattaaaggtatttactattatttcatcattcgctgtgtggtcaggctttgccataggttaaaatataacatgagatgatagatatgttaattagcctgattggatcattccacaatgtatgcatatatcaacccatcacattgtacctaataaatatatacaattatttatcagtttaaaaaaggagccaagcacagtggctcacacctgtaatcccagcactttgggaggctggggcaggaggatcacttgaggccaggaattcaagaccagcctgggcaacatggtgagactttgtctctaaaaaaaaatagg

SEQ ID NO: 228872 - DNA, 576 bp, Homo sapiens
tgccctgtcacccaggctggagtgcaatggcacgatctcagctcactgcaaacttcgcctcctgggttcaaacgattctcctgcctaagcctcctgactagctgggattacaggagcccgccatcacacccagctaatttttgtatttttagcagagacggggtttcaccatgttggccaggctggtgtcaaactcctgacttcagattatccacccaccttggcctcccaaagtgttgggattacaggcatgagccactgtgcccagcctcatgacttcttattcctggtcccatacctggatttgtctccatccgttttccgatttttaatagtttgttttatcttttgggtttttcatctaactcctctcgtagacctcattgctcagagtgcactgttagggcaaggttctgccactgccaccctccatgagtagatttctccctcctgccctggggatatggagagtggcttgtttctttccctgtctatcctagaaagatgatttgtgggttttctataaggggtttcctgctggacaggggcgtgggattgaattaaaacagctgcgac

SEQ ID NO: 228873 - DNA, 638 bp, Homo sapiens
tgccctgtcacccaggctggagtgcaatggcacgatctcagctcactgcaaacttcgcctcctgggttcaaacgattctcctgcctaagcctcctgactagctgggattacaggagcccgccatcacacccagctaatttttgtatttttagcagagacggggtttcaccatgttggccaggctggtgtcaaactcctgacttcagattatccacccaccttggcctcccaaagtgttgggattacaggcatgagccactgtgcccagcctcatgacttcttattcctggtcccatacctggatttgtctccatccgttttccgatttttaatagtttgttttatcttttgggtttttcatctaactcctctcgtagacctcattgctcagagtgcactgttagggcaaggttctgccactgccaccctccatgagtagatttctccctcctgccctggggatatggagagtggcttgtttctttccctgtctatcctagaaagatgatttgtgggtttttgtttttgtttttggttttgttttttttttttgtcaccaaaatggcagctgggttggtgttgggggaatacagctggccttgggtggaagcactcctccaccgtttctccctggtttc

SEQ ID NO: 228874 - DNA, 600 bp, Homo sapiens
cgcttctggtcccaagcattttggataagggatacccaaccatttcagacagcttagttttaaagcagctgaaatgttatggtgattccataaccaagtttgtgaaacatttttctttgttgtgggactttggaagctttaatatgccaattttcattgtgactatagttggtgagggtggatgagtagcactttataaactgtttaggtggtgtggcctttttagccctagcacaacgccttactcaattcttaactccagctccctagagcattcactagatacgtttctgcagaatatactttgggaaacatggttcaatgaatcgccttcctctgcttttccctcccatcctgccccctagggtaaactaaaacctgaaaatgtcctcccctcttctgcccacaactacctttaaaagttttctttagtacaagctttagtacacagtttggacagtctttcccactgtcttgtgttagaagagcactaaattattctcagggcttgcgagtcagtcttgatctcaacttattagctggctgtggtatcatctgaagtcagtttcagtccatctagactggtgaaactaggaggag

SEQ ID NO: 228875 - DNA, 546 bp, Homo sapiens
ctcatatgatagtgaaatgatacttaaatgccagtgatgctttgtgtctgtctctcttaatacacgtaagctcccagagggcaagccccatccatgttttattcatatttgtatttaatactttgcaaattgtaataccatgaccttgggccatggacatcaccgctggctgctcagtgaatgtgggctgaattgctctatgtatcggtctttgtctcagtcagcttgggctgctatcatcaaatggcatagacagggtggctttaacaactcacatttatttctcacagttctggaggctgtgaagtataagatcagggtgccagcatggttctggtaaattgaagttcatgaaataatgagaccttttataaaagacagtggcataaatacaaaatataccacgaacatttcccttaagaaatgtttcacagagtagcatattggtgtaattacacataagactgattcagcattataattacaaaactgttttcataggattcagtgttaattcaggctctcaaattaaagccaaagtctgca

SEQ ID NO: 228876 - DNA, 401 bp, Homo sapiens
catagtccatagtgagatatatattttcaaaattttatttgtttaaactatttgttaaattctgtcttctccactagactataagccccacgaagacaggattcatgtctgtaaggttcacctatttccagtacatacatagtgtctggcgcattggatgtaccaaataaggatttgttgagtgaatgagaatagtcagtcaagactctggattgttgaattttaggtgctgctcattgtccctcttttatcttcagaaatctcgatgaaaatatacacatagaagacaaaaccgaagaaatattttattatttgttggggcttctctaatttttgtatagctttagtaagctgaattagatggcatggaaccgagaagtttccttctacctgaattgggt

SEQ ID NO: 228877 - DNA, 440 bp, Homo sapiens
cagcaaaactggagcaagttttgtaggaatggctccacgttgctgagtcaaccacagttctcatctcagtccttggctcaggctcggcacagtggcccagggctatgtgctcttccctggagcccattcttgccatcctgggcacccagcaacctggggtctcctgcctttccggctgttccttcttggctgcctctgctagttcatcctccctccccaaagctgaaacctgcggctcccagggttcctctgtccgtacctgtgctgtccagcacggtagccgctggccacaggtgagattttcacttaagttgaaataggccgggcgcagtggctcatcatgcctgtaatcccagcactttgggaggccgaggcaggcggatcacgaggtcaggagatcgggaccatcctggctaacacggtgaaactccgtctctact

SEQ ID NO: 228878 - DNA, 351 bp, Homo sapiens
aggagttcaggcaatgacactggacatgtcatcagccctgggcaacttcaggcgcagtgttgggaaaagaatagacaaggtcccaaggtcaattccagcgcctggatcctctgatcccagcctcgctctgcaggcaagcccaagaactccaagcacaatcgccaagatgctacccaaggagggaagcaagatacctgaaggacacccaaacctcagtcattctaattcttgggaccacacaagaagactgaaaggtattattttttcaaattaatttgaagtgtcagcagaaaacattttgtttcattaaagacagcaggcctcaagaaaaaataaatcaatgaacaaata

SEQ ID NO: 228879 - DNA, 683 bp, Homo sapiens
tccagagcaaggctgtaactctctttaattctctgaaggctaagagaggtggggaagctgtagaagaaaaatttgaacctagcacaggttggtttatgaggtttaaggaaggaagctgtctccataacattaaagtgcaaaagcagcaagtgctcatgtagaagccagtaagttatccagaagatctggctaaaatcactgatagaggtggccacacttagcaacagatttttcagtgtagatgtaacagccttctattggaagatgccacctacatctttcatagaggaaaagtcaattcctggcttcaaagaaagccagtgcccatttgccattctgaaaatcttagggcccttaaaaattatattactctactctgcctgttctctgtaagtggaacaacaaagcctgatgacagcatatcaacattgaggcaagacccttggccagcaaaaagatgatagctcactgaaggctcaaatgttagcatttttagcaataaagtgttttttaattaatatacttttttttagacataatgctattgcatacttaatatactatagtatagtgtaaatataactttttttttttttttttcgagacggactttcactcttgttgcccaggctggagtgcagtggagcgatctcggctcaccacaacctctgcctcacgggttc

SEQ ID NO: 228880 - DNA, 1180 bp, Homo sapiens
tgcaattttcagtttttgtttatagtaaataatacgcagtgaatatttttgtgcctataactgagtgtgcattttacattttttttagggaggagaaattgctggtaaagtcctaaaaggaaatttcctaagtaacaaggtattatttttacattaaagagtagtgtatttttattaccaaatctgtcgtgtttattattgagaaatttaaaagtataaataggaggccaggctagatggctgacacctgtaatcccagcacagtgggaggccaatgcagatgggttgcttgaggccaggagttggagaccagcctggtcaatatagcaagacccagtctcattaaaaagaaaaaaaaaaaaacttataaataaatgaaaagaattccccataaaatcacaaccccaaagataaccataactagttattttcagaccttttctataatagataacttgagttttcctcaacaccatatacctctcatattgcttagctaaagagcatgtaaatgtatagtctgtggaatcataaagatatttcatagaggttctaaaaatgaccttattaaaatggcatgtgggtgtcaggctgcttacttacccttaagagaacttggaatgcaaaactgataacaaggacattttgaaaactgtatttgtttgctaaaaagctttccatgtgcattttggggattttatagttaggcctaattctttaccaccttaaaatgtaagatttttaaaaggttttcagaattgttaaggtattaaaattgcatttttatagcaaagtcagaaacaagagaaaggcatattacaccctgattatgatgtttcttgaagagaactcattttaaaaatacatttgaattttctattttgctttaaaattttaagactcctttcagtagtcttggtattaatcttgtactgtgaaatattccagatttcaagaagcaactgtactatgtgcaacagaaggacttgttaccaaataactcaatcgctaatatttgtatctagtcttatgtatgatctttaattttgtattgaaataaaattgtatttgtcatggaatatatatactttcatagaatttttctgtagtttttggcaccccagacaaatagtatttgtcaaagtattctgctaactattgttcaaaatgatctgctctt

SEQ ID NO: 228881 - DNA, 518 bp, Homo sapiens
tgatgaggtactttgtaaggtttgacataccagattttttaacccagatcctgtttgaatatatctggaaatattctggggcaactaacctcatttttatttcaagtggggatatatttttaagggaaaccaggcaatcatctataatgaagtgattctcaactaggtgatttttgccctttgggggtatagcaatgtgtgaagacgttttgggttgtcacatggagggggaggtgatggccagggattctactaaagatcctgtagttcacaggacagtcccctgtctcccttagtaacaattaccagactcaaaatgtcattagtaataaggttgagaaatcttgctgtaaagaaataaggcttattccgatgctcactaaagtcggaaaaaaagcttttaagaaaaccctattttaaacttatttctaaaagtttagtatcatcctggtgatcatgtggaattgcagtagtagttgagagaggtcatcttcactcccaaaaccaaggcaaaaaaa

SEQ ID NO: 228882 - DNA, 890 bp, Homo sapiens
tgttaccaatccattctcttttaacttaaatgttactaacctctttgagcacctactctgtgtcaggcattgaagccaagttaaagaaaacacagcttctgccttcaaaaaaacttacagtctaatggcaacaccagacataaacttcagcaaggatctgagggaggaacaaataaagtgccaacaaagggaaaaaggtgctacctgcaactagcaggaatcaaggaaggctttgtggaggccatggtattagaacatgacccttaaaaccactgagcttgagatgcacagagaagaaagagaaacatgagcaatgaaggaaaaacctagggcacctagaagggtgagaggcagctcagttgggctaaaaggcggagcccagaatgggagatcaagctgggctgtaggaagctcattcttgtggcaggttaggctggattgcaggtgggaaagaccaaagaggcaagtgggaggctcctgccgttgggatcaaggatgactttatccagagcagatgctgtgagacaagaaagagggagagaagccccagcaacatccacgaggcggaactgacacgcaggcctgaaacaaggtgattctgaggctgtaggcctgggggcctgggagaagctgctggcaaacataggcagcaccagaggagagagacagatctgtgagatccatgaagaggtgggtgtttcccactggggggcctgctgaagagacagagcgctttcaggagagccacaggctgccgtcatatgacaaggctatcgtttactgaatgaaggggaagagaagtggggtagccagggtcatcttcctctcccatgagctttgacatgaaatctttagctagaaacatgttctcttctatgttatgtatagca

SEQ ID NO: 228883 - DNA, 420 bp, Homo sapiens
tccaaattcttccatagctatatatcatctacctaattttccttgttttatcagatggaaaacgtaccttgaatcatgaagttagtacaattgattcaatcaggttgtttttcttgaagtagttgaaagattggactgaagtattcactctactttggcctatttacaactgtaatacagaatggcccatgaaataactgggccatcctaaggattaaatgaattaaacacaaatgaccctgccttcatttgtttcatcataacttcccggccttactcagactcattaaaatgccatatcctttgtacagtatactatacaagaatgatagccacaggcccacaaaagtatctcacagggccaatactagacgtcaggtaggaggtctgtgaggcagcctgacccaggtgtttccggga

SEQ ID NO: 228884 - DNA, 423 bp, Homo sapiens
taataggtgtatctattttggtataggcatgcaaaacataataatcacaacttggaaaattgggtatccattgccccaagcatttatcctttgtgaaaatacagaacactttacaaatttccatgtcatccttgtgcagggaccatgctaacctttgtatagttctgatttgagtgtgtgtgctgctgaagcaagcactctcatctgggtttttttcccgtttctcctccacaaaggctgataccaaaaattccacatttcatctagaatcttccttctttatgtaatattttctggctgggcgtggtggcttatgcctgtaatcccagcactttgggaggccaaggcgggtggatcacctgagatcaggagcttgagagcagcctgaccgacatggtgaaaccccatctctacgaaaaatac

SEQ ID NO: 228885 - DNA, 339 bp, Homo sapiens
agccaaagaacttcttttcagtggttttatttggtattttcaccagagctttctcacataatcgtctcctttcttttgttccctgtcgtcaaatgcatggcctctgatgctgaacattccccgggggagagacatggatgatcacaatggcccagcatgggtcttggcactcgatgtgtgaggcaagttagcaccaagctgcagggctgcaagtggggcagagcttctccaggccttcctatggggcttcatcacactctgtagcttttcctcgagttcaaatcctgtccacagacaaacttctaacaaagcttttgttgttctgatgagtcacagctt

SEQ ID NO: 228886 - DNA, 534 bp, Homo sapiens
acgccagagatggaaagatgttagagaaacagaagaatgaactcggctgaactaagaaaggcagtccttggcaggatgtggggagggtagcgcctccggccaacacaataggattcacctgggagaggggccagctccggagatttctgagaggctcctcctccagaaggatcagccaggtcccggcagctcaaccgggccaaggtgccggagaccctcggactctgcagactgtccagtagggggcactgttgcctccacactggccgacctcaaacaccttctgctcctggtgtgcccctccccaaggtcctcccccaggagtggaaggccgtctccagccctgaagagactcaaggatcctacctgtctgcaagccaccccaggctggcctacctggcagagcctgggtgacatcctgcatcctcagggatgacacagcaatcactacagctgctgtttactgagcacctactatgtgccagatgctttcactgtgtgacctcattaaaactccaccggagccctctgaaa

SEQ ID NO: 228887 - DNA, 639 bp, Homo sapiens
gtttttctttaccatgacaacactctagttcattcctctcattaaacaagggcaattttgtgagagtgttagtaggaaatcattaggccctcacctgaaggttctgatttggctccttctaacttctttttgtttcctaatcttaaaatgtctttaaagggcacccattttttttctgcaaataacaatgtaaaaatgattgccttgacatggttgaattccttggatgctcagttcattagagatgaactaaatgactgtataatctcttatgaatatgttttaaccttcataaggcttacagtgagaaataaagagtttcttaaaaaatcttttaattccatttttccccaaacttttaaaagtcccctcttaaaatggatcaatctattttcttttcaacggttatattgatactttcttgctttttttttcatctatgatactaataccatgagcatccttgtgcatgccctttgaagtggcaaattttattgtttatttctttctccaaagaaacaactttcacttgtattcctatatgctatgtttctgtttcttattctgttttctttttctttctttaattctattaaacagtgtgctaaagaggcaattcagagcattaagaaaaacaaa

SEQ ID NO: 228888 - DNA, 451 bp, Homo sapiens
gacaactggatgtttttaagagagattcttgtcaagttgtgccagccgtaaggtaggaaacccttctgctcttgaggaatgtgactgctgactaggccttaataggcaggttattggagcttcctggacagtggtagagataagttaaccaagtttctcttcaaacccctttttaaacttactgtcaggctttcacctacagcatagccattccagtgctttagtaaactgcctctactaagcactggttattttcttatgtttataagaagtgtcctttccttgattctgccatacctttcttcccaaggaatacttccaaagatgggttttagctcttagctcccaatcaccaagattgcttggcctctggaaaattaggggtgtgaaacactaagaacctgaaatactttaaactcctgtcatctcaataaaaactgccattgtcacc

SEQ ID NO: 228889 - DNA, 775 bp, Homo sapiens
  misc_feature (757)..(758): n is a, c, g, or t
agtattccaggtgagtagcttacaggttcttttttatttttttgaaagagggtctcactctgttacccaggctggggtacagtggtgcaatcaccgttcactagactcgacctccctgggctcaggtgatcctcccacctcagcctcccaagtagctgggactacaggcacgtgtcatcaacccagctaatttttttattttttgtggagacaggctttcactatgttggccaagctggtctcaaactcctgacttcaagtaatccacccacttcagcctctgaagtctctcatatggtgtccaagaaatggtgacaaatctcacaaagggactaggctcagcagggctggaatattcagggaaggtgtcaagaagaaagatgaacttgagttggcttttgagagatgcataggactcccacaggcagagtgaaataagggcattttagatggacaaacacacagacaaaagcagaaatgtgggtggtgtgactggggtttggtgaggggctgctgtggctggaatggagggctgtcacaaataatggaaatggtgaatgaggcaagtcaggtcggactggtggcatagcgtcaaggtggcagcttattaatcactcttccatatgctagcctggctgtgggaaagtatactcatgtctcgacaaaacaaggagcccgtggccgtacagatgtcgcgatagctagtatgagcaggagcctacgggggagccccggcgcagggctccagtgcgggggnngcgcagacagccgccgc

SEQ ID NO: 228890 - DNA, 1072 bp, Homo sapiens
cgctcctgggtaggtatttgccccggtgggatgccttatcagagtggtgcatggcaggcccccgtggaggatcaacgcagtggctgaacactgggaaggaactggcacttggagtctggacaactggaatacggtgatcgggtatggatcacggattggaacatagcctccttgcagccacggtggagaggaccccagaccatcgtcttgaccactcccacagccataaaggtagaaggaatcccagcctggattcaccacagccatgtaaaacctaaagcatctgagacctgggaggtgagaccaagcttggacaacccatgcaagatgactttgaagaagatgacaagccctgctccagtcacacctggaagctgactggtccgtgcatggctgaaagcatgaggaaactcatcgtgggactcattttcctaaaattttggacttgtacagtaaggacttcaactgaccttcctcagactgaggtagggcaaaaagttaaaacagactttctgtttaaaagggacttgtgtgtataatgctacccagtacaagatatgcagcccaagaagtgaccagcttgatgtgtgctataacccattggaactagtttatccctgttggaaaacagagtatgtaactctaggaattgatggaactggactggaagacctgggtagtgaagatgacagtgagaactcccactagtgagtgagattctcaaaggggggaatgagaagtgaggccatttctcttactgtctcctgtctctgaagaggaggaggaagtaaaagttgaaaaacaacaggaatgaagtcattggcaagaccagccggtgccactgatgaccaggcctgaggttaaaagatcaaccccccactctaaccacatgtgctctcaatctatcatgaccctttcatgtggacccccttagagttgtaagcccttaaaagggccaggaactctgtcttcagggagctcggttcttgagacatgagtctgccaaagctcccagctgttgagatgcgagtctgccaaagctcctggccgaataaagccaaatccttcctta

SEQ ID NO: 228891 - DNA, 1121 bp, Homo sapiens
cgctcctgggtaggtatttgccccggtgggatgccttatcagagtggtgcatggcaggcccccgtggaggatcaacgcagtggctgaacactgggaaggaactggcacttggagtctggacaactggaatacggtgatcgggtatggatcacggattggaacatagcctccttgcagccacggtggagaggaccccagaccatcgtcttgaccactcccacagccataaaggtagaaggaatcccagcctggattcaccacagccatgtaaaacctaaagcatctgagacctgggaggtgagaccaagcttggacaacccatgcaagatgactttgaagaagatgacaagccctgctccagtcacacctggaagctgactggtccgtgcatggctgaaagcatgaggaaactcatcgtgggactcattttcctaaaattttggacttgtacagtaaggacttcaactgaccttcctcaggaacctgaggggtaagggggggccaaaaaaacacacagcgttcttaaaaaaacccaaggaaacacttttcttcgtggctttttaacacacgggggacttgtgtgtataatgctacccagtacaagatatgcagcccaagaagtgaccagcttgatgtgtgctataacccattggaactagtttatccctgttggaaaacagagtatgtaactctaggaattgatggaactggactggaagacctgggtagtgaagatgacagtgagaactcccactagtgagtgagattctcaaaggggggaatgagaagtgaggccatttctcttactgtctcctgtctctgaagaggaggaggaagtaaaagttgaaaaacaacaggaatgaagtcattggcaagaccagccggtgccactgatgaccaggcctgaggttaaaagatcaaccccccactctaaccacatgtgctctcaatctatcatgaccctttcatgtggacccccttagagttgtaagcccttaaaagggccaggaactctgtcttcagggagctcggttcttgagacatgagtctgccaaagctcccagctgttgagatgcgagtctgccaaagctcctggccgaataaagccaaatccttcctta

SEQ ID NO: 228892 - DNA, 407 bp, Homo sapiens
tcccctgggaatgtcatcttgttcctcctctctcttgcttacggacaggcagttgctgggtgcagggattttgccttccagggtccattccttcctggacccatttcatgccactgctggtctcagcctggatcccctcatcccagattctggccacggcctcctaactggtctcccggatttggcctttctcctctaatatagctttcactctgacaattgatagtctttcaagagcacaagctagaacagccagaagccttccgtggtttcccattccctagcaccagatacaatcctgtcttctttggtgcacagtttgtgaagcacaccaaatgtttgaccctggaggtgtccaagcaggagcagaacgagcactgagtgggacaggtgcccgcatgcagagg

SEQ ID NO: 228893 - DNA, 548 bp, Homo sapiens
ggttgatcattgtgtctgtttagtggaaaaattaataaaatgttttgtttataggataaaatacattaggagttcttattaatacttcctattcaaattcaggactatgagattattagtgaacctcgtgtactctgtttcacaccaagacttgtgatttttaagatcagtaaggatgacaggattagaatatcacttacttgttctctttattccacattaccccctagatctgtctcaaaacagtaatattaacatgaccaccaaaaatatgattagtactaacagttaacatctttttgtaatgcggtcctttttgtccttaagttgttctctagaggtgtgtgcaaattttgtattttaacaaaaatatattcttactggattattacgtaatctggcaatatgtattaagcttcttctaaaaagacctccatatccattaatccaggaattatacttctaaaactttaaagcaacaataaaaaaatctggacaaaactttattttcaacaaaaatttcctatttattagagggaaaaaataga

SEQ ID NO: 228894 - DNA, 444 bp, Homo sapiens
accgctcagctcaggacctgacagcgtcactcccaccctcaccaccacacacacaggatgggggactgctgctgctttccagcctgtgagcctggataggtattttgtgacccagctcctgctcagtcccatcgctgtccccggtctctccagggagtaagggattctccgtctgtggtaagttacctgtgactcttcagcagtttcctctgagcataattatatctgagagcacagggagctcctcattccatgtatttttcaaatattcaagatgtacaacgtgatgatttgctataggtattcattgtgaaatgtttgccacagtcaagcttgttgacatacccaccagctcacatttactgttttcgtgtgtgtggtgagaatactcacaatctactctctgagcaaactgcaaatatatgttattagtaactgtaaaat

SEQ ID NO: 228895 - DNA, 493 bp, Homo sapiens
ctcacatacagtgttagttgactttgccagccagccagtacccaggggacatcagcctatagtggattagtaacatgtaaatatccaaaaagtatttaattctgtaaacctaactttgtctcacacttactgtcttcatgacttttctgaagtcacttccagttttcaaaaatggtcagctacaagggaccacttgctttgttttacttaccccaacacattttgttcccaccaagatgtggattggattttctttcttaataacatttcatgtttgttaaaactgctattaacattattaacatttaaagttttaaactgctttaaatagctgctttgcatattttgaaccacaaataactctagtctggaggtggtttagaccacaaaatactatttgtgggtttaagctctgtatctttttaaatccattatatgtacagtgtaaacttgagtacctaataaaataaatgtcacaatgtttaaatagcat

SEQ ID NO: 228896 - DNA, 835 bp, Homo sapiens
gggaggccttccttcccggggacccagactcccaaagtggggagggcgtggctgcaggggaagtttggtgtctgccgtcttcttttgcacctgtacttttgcgcttggttggaaatcatcacgtaaactgtttacatcttgttcagccaggaaagctgtcctttgggagttctacttattcctttttttctggactcgaaaccggggccgtggtttcggaaatgggaggaaagatgggaaggatggacgcaggttttctgagcctctctacctagagcctgccaggataaacccaaattagaaccaacatgtccagtactctccgaacgtctgccacgtacatcgttctccttgttaacaccagtgtgtatccagtatcataaaggcaagtacacacttcggaatcagctacttgccctactaatctgtgaacctcagatttttgcctgcaatataagaggttttatgttcatgacaagttagggtaaacggaggtatgcagacttcgaaacattttggtcccagggagaaagaaacctgaacagtatccacgttaactgtttctctctgccatgctcattcagctcttaactcaaactcaagagaggccttccttgaccaccctagctatggtagtcctggtcattctctacccggctgtcctatatacttttcttcaaaacgcttatcactatttgagattttttttttctattttgtgtcctagaatagaaaataagcatcatgatgctggaatcttgtctattttgtacatggctgtataaagccgctaaaacaatgcctggcaaaaataaattgaatggaatgtatggtg

SEQ ID NO: 228897 - DNA, 663 bp, Homo sapiens
agacagaaaatgcacaagatacaccgccctttttgtttgtttgtgattcagggctcaggattgactgggtcctcgggaggggactcgagggcagaaggatctattaatcttacaactatgtgtttcattttccaagtggtcagttttttaggttactttatgaaaaactgaaatggaacacagaatatgaacaatttctcagggtaagagcagctagatgtaaaaataacataatgcaattaaagaagaaatcttccagcaaatagaaccccatttcggggattttcaccgtgggcgtgagggtcacacaagactgaagcccgcccaggagcaggcgaggtcactgcaggtggtcagttacagagctctgcgtcatagccctctggccccagacaaaattcactcatctatacatttgcttgaaaatgcattatttgatattcattttgtatacttaaatacaaaatgaaatgtaacctgatattgaaaataaaaactccaggcaacgtctacatttctatgtatttagtcttttcaaggtctacattttaaaagcaagaaatgaacaaagttaggaatacattattactctggcaggaaaattagacggattgatgaagtgggttctgtctattgttatttatcctactagaaattaaacta

SEQ ID NO: 228898 - DNA, 211 bp, Homo sapiens
actttttctcagaaaagccaagactgggtctggatcacaggccaaacatctctgggttccagagccagagcgggaagtccctttcctgcaagaagactaaagaaggtgctggtccaacccatgctgggtactcagaaagaagagaaaacaattgcagtttttatcagaagagaaggagcaggattctactcctggactcattccttgggca

SEQ ID NO: 228899 - DNA, 202 bp, Homo sapiens
gatgtaccattactatactctgggatcatcttcctgggttccgcatgttaacttcatgtaggtgtttacaaagcacttggcacatacctgtcacctcagctatcagttgttgaaagaataggacagacgtttgttatgctgcaaaggtgagagaactaaagcccagtgagtgctgatttgataacagcacggcagctacttg

SEQ ID NO: 228900 - DNA, 452 bp, Homo sapiens
tagttagattttgaccaactttagttggctaagattcacattaacctgtaatataaggcatagtctttttcacaccaagatagcagctcatcaggttattttagttggaaatatcttcattactttgaatatattaagttagttaaactaaaatgctattttgaatcacattttagtcatgtaaaaagtatctcctgtaatcccagcactttgggaggccgaggcaggtggatcacaaggtcaagagatcgagaccaccctggccaatatggtgaaaccccgtctctactaaaaatacaaaaattagctgggtgtggtggcacatgcctgtaatcccagctacttaggagcctgaggcaggagaattgcttgaaccccggaggcggaggttgcagtgagctgagatcgtgccactgcactccagcctggcaacagagcaagactcctctcaa

SEQ ID NO: 228901 - DNA, 627 bp, Homo sapiens
gcagaaattattaaggaaaaatgatgaataaatttgactatactaaattttaaattttgcatagcaaaagataccataaataaaaacataatatgcagatcagcagaaaacattttcaaacgtaactagcaatgaattaataaaatatcttatttaaaatttttattttaagttctggggtacatgttcagagtacgcagctttgttacataggtaaatgggtgccatggtgatttgctgcacctaccaacccctcatgtaggtattagggcaatacactttcaaggtagaatgctaacacattctttcataagcattaccaaggctgacatctaatgttagttctgatatatttattatacatggaaaactttaaaaatgttactccagtctgtcattgtatatcccacggtgttactcatcaaattttcatagctgctttaatgacaggaatggttaaaaaggattttgcagtagaagtttaaaattggaaaagtctggccaggtgcagtgcctcatgcgtgtaatctcagcactttgggaagccaaagtgggaggatcgtttgagcccaggagttcaagactagcctgggcaacatagcaagaccctgcgtctaaaaaaagaaa

SEQ ID NO: 228902 - DNA, 602 bp, Homo sapiens
gcagaaattattaaggaaaaatgatgaataaatttgactatactaaattttaaattttgcatagcaaaagataccataaataaaaacataatatgcagatcagcagaaaacattttcaaacgtaactagcaatgaattaataaaatatcttatttaaaataaaatagaaaagacaaagaaggatattacataatggcaaaggcttcaattcaacaagaagacctaactatcctaaatatatattcatccaacacaggagcacccagattcataagtaaagttcttagagacctacaaagtatgtttcacagtaatagtgggagactttcacactccaatgacagtattagatcattgaggcaaaaaaatgaacaaagatattcaggacctgaactcaacattggatcaaatggatctgatagacctttacagaactctgcactcaaaaacaacagaatatgcattcctcacatcatcatatgccacatactctaaaatcaaccacataattggacataaagcaatcctcagcaaatgcaaaacaactgaactcataccaaatacacactgagatcacagtgcagtaaaaatagaagacttag

SEQ ID NO: 228903 - DNA, 584 bp, Homo sapiens
gcagtggctcatgcctgtaatcccagcactttgggaggccaagggaggaggatcacaaggtcaggaaatcgagaccatcctggctaacacagtgaaaccccatctctactaaaaatacaaaaaattagccatgcatggtggcaggcgcctgtagtcccagctactagggaggctgaggcaggagaatggcgtgaacccgggaggcagagcttgcagtgagctaagaccatgccactgcactccaagcctgggcaacagagcgagactgtgtctcaacaacaacaataaaaaaattatttcactctttaaaaattgttagaaatgtggtatgcacctctcactgttagtgccccttcatctcctacagggctaatctgattctacaaatggaataaaagatagagtaagacttctttcaatgtttagagtggcccaaaaataacaaacacagcctatgagctaggaccatgagccaggaactttggggaacttacacacataaagcacatcaatggtcagtctatgtcttatgttaattatgaggactaaactctgatttttttttatcttgcccaaattcctat

SEQ ID NO: 228904 - DNA, 233 bp, Homo sapiens
acagagaaacaaagtgagtatgtgttattggaaaaatggtgctagtagacttcatcagtggccacaaaccttcaatttgtaataaccttcaatttgtaataaaaataaaaccccacacgttatctgcaaagcacaataaaatgaagtatgttacatgttgattttcaggaattagaagaaaatgagagtattgttgtcatcggaaataagaggattgttttgccaagctactg

SEQ ID NO: 228905 - DNA, 403 bp, Homo sapiens
tgtgtgtccgtgctcctgtcccacccccagttcatttctctgctcctcctgacttcctgttttctgcccctgaggctggtcacagcatcccgtgctgccttcattacttcactgtctgcctctacagcattctctttcttctgggcacagccttggtgcatgacttccttgacaatgggttagcctctaggttgacaatgcagacccagatggccttgacatacccttatggtataccctaaatatgatggtgcttacccaagagggatttgaagaccacttctatcaagattgcctcaagggagtgtgtttgtaaaatatctaagttgactgagtcaaaacccctgggaagcagagcccatgtaatctgcactttaacaagcattctacttgattatcatgt

SEQ ID NO: 228906 - DNA, 577 bp, Homo sapiens
tgttctgtcaatcactgagagaggggtgttgtttcagtatgtttttcattttttctttttagccagcagacatcaaggacttctgaggagcctggtaccttgcataggcactatggaccctgttttgcttaacccacccaacagccaattttagcagacatcctagttttgcaggtgagaagagctgaggtacgaagaagttttgttaatttttccagttcacgtaacaagtaaatgggaaaccaggatgaaaatcaaggtttatctgtcatcagactgttactcataatcaccattcggagagttcagatgtgggacaagattctaactccagccttctcccaaatggttaatttgccagttgccctagagttacatattgtcttatttgtttgttttactgaatctgtctgagtattaaaagccttgtatcttgtgaaatttctttcaggtctcataaaagcgatgaaagagaccaggataacattctaatatttaaataagatttttgaagtaaaatccttattttgtaaatttaacaattgaatcttgctagattaataacgcatctttcctg

SEQ ID NO: 228907 - DNA, 387 bp, Homo sapiens
cttataatgagtttatcaggacataaccccatcatcagtcaaggtgctcccatagtatggaatggctggaagtggggggtagttaaaaagagccatgtgggctgggcgcgatggctcacgcctatcatcccagcactttgggaggccgaggtgggcggatcatctgaggtcgggagttcgagaccaggctcaccaacatggagaaaccccgtctctactaaaaatacaaaaaaaaaaaaaaattagctgggcatggtggcacatgcctgtaattccagctacccagctacccagctacccggctgaggcagaagaactgcttgaacctgggaggcagaggctgcggtgagccaagatcgcgccattgcactccagcctgggcaacga

SEQ ID NO: 228908 - DNA, 207 bp, Homo sapiens
tctaatcatttaaacacatgaagtgaatgtgtgaatggacaattaagtgctggccaaatgtggaaaaatgttaagtgtaaatcaaaggcaactgaaacgttaaatacaccttccattcctccgccacatccatgctctttcccatactccacatctgctcactaaaattggaaataaactgtaatgaaccagaaatgtctgacttac

SEQ ID NO: 228909 - DNA, 450 bp, Homo sapiens
gaggctgagccacccatcggggatgagtggacttccctcagctgtggctggactcctaaccatctggaattgctgtaccagaggggccaagctgaggccaccgcctgcctctgacgggtacttggctgagggacatcttgtagggaccattgctgtgtccccctgtgctccttgctaatgaggggtgtgggaatccttggtgactcataaaggaccgtagaggagggctgatcacttcagccaggcccacattttgggatagcgcgttcggtttcttgactttccaagctgtgacaccgattcttggcactctacacttacttccagggatttgagaacgtgcctcatgagcgtgcgccccacacaggcctcctactgcaacttacaaacttggaccatctcccatgtgaacctttttcccagactgaagatcgttctgggaaaatgccc

SEQ ID NO: 228910 - DNA, 342 bp, Homo sapiens
agttggaaggggttacatcggattgctgttttcagctggggtttaggagagtgttttcttttggggaatactaagtagggttcaaggcccctgggaggaatggccacagcagaagcaagccctgtagttacaggcattcattcagtagatacacagggagtggcaagtgtgtaccagacactattctaatggacagaacacacccaagtctttttgcctttatgagtttatgttctagtgcaggggtgttcagtcttttagcttccctgggctacactggaagaagacgactgtcttaggccacacataaaatatagtaacactaacgatagctgatgagct

SEQ ID NO: 228911 - DNA, 451 bp, Homo sapiens
actgaaattactcagataatggcacaatttttatttttgtacatggagacatagttgcatttctctcatatgtctactgtcagtgagcatgagaaagaattcctgcctactttctctgaactcattatctttacccgagacctgctcccttttcctcttccttctcaggtatccaatggtaccaccatctacctactccaccaacttaaaagctagaactcatacttaactcttcagtttgcttcacctccaacattcatttggtcactaaatcttgccagctccacttctgactacctctttacctggtctttctgttcccagagcatccctcctttcctctgtgttccataatgccaccagagttctctttctaaaactcagatctgacttggatattctcttgcttggaaaatcttcctaagatttcttgtctcttctaagataaaat

SEQ ID NO: 228912 - DNA, 553 bp, Homo sapiens
agtgagacaggttgtaattttaaattaagcaatcaaaatagtattcagtgagatggtgacatgtgaagcaagacttaaaggaggtgagaactttagccatgtgaacacctgagggaagagcattcattccaggcagaagaaacagtcagaacaaaggccttcagatgggagcatgcctagaatttttgcaaaataacaagaaaattagtataaattagtcttcatgcctttaatcccagcactttgggagaccaaggcgggagggtcacttgagcccaagagtttgagaccagcctggtcaacatagggagactccatctctacaaaaaaatttttaaaaattcgccaggcatggtggtgcatgcctgtggtcctagccactcaggaggctgagatgggagtatcacttgagtccaggaggttgaggctgcagtaagccataatcacaccactgcattccagcctggacaacagagtgagaccctgtctaaaaaaataataataaatatatatataccttataatgaatgagcaaaaggaaagcgctaagaga

SEQ ID NO: 228913 - DNA, 341 bp, Homo sapiens
cactcaaggcccaccatagcccagagtgtgtctcacccagccgatggtctttctttccatatacactgtattctaggcaacttgtactgtagatgagtgctatgattaagtccagcctgaaagacctgggcatgaatcacccacctgccctttactgaatttggaagagttgcttagattccctcatcttccatgtcagtctctgtaaaattgtgataaaaatggatcccagccagagggattactgtgagcagtgatgaaggtgaagtgtgccaggctcctggcatagagcttggtacatggaataggtgctcagtaaaagctcctaatactgaccgtct

SEQ ID NO: 228914 - DNA, 428 bp, Homo sapiens
cctgtaggcaccaacctttttcaggttcactttgaggaatattataactatatttcatcccattattaagacttgaaaaattttacttgcagagaatgcaactaagttatatatcttgcaatgtaagatcacaagctacatttgcacctgaaaaaaacaagctcctctgctacttgtccatttgttttgaaatttgtgaccactcaggagcaggtaggaaagtttaaaaataaaaaaagtcacagtaaaaacaaaaatacataatagacaagattccattaccttatttttttctcaattttagaagcagttcaacttttggtcagctcacaggggcataatttgagaacctttggtctaatccaaccctctcattttacagatgaagaatcataaagaccttgatttaaatccgttttcatctctgg

SEQ ID NO: 228915 - DNA, 574 bp, Homo sapiens
gtattaccttctcattacaagaagtctttcacattagtataaatgcatatggcagttgtgccagaaataaattgcctctcaaactagcacatggaaagaagaattctgagatttagcacatatgtagcttttaaatagtatactctgtttcaaacattatgtgttagtccacgttctcttcagccattttcagttgcatttttactttatattcctttgtatatttatctttgctaatcattgtcctgagattcctttagctcttgaattctacgtttttaattaatagaaaactttctttttatttttcccccgacatagttgttttctagaaagaaacagttataggttataaatccaacactttagggccgacttgaacatgcatcaaagctactagaggacttgtagaaatacagattgaatggtcccatgcctagagttttacattcagttacagatagggtaggacctgagaattcacattgctcacaaatttccagttgattttgatggcattggtctagagaccaaaccctgagaaccattaaaaaacaaacaaacaaaaacaaac

SEQ ID NO: 228916 - DNA, 622 bp, Homo sapiens
ctccatcctgttgcaggtggcaggctggaattccaagccagtgggtcttatcttgtgaggtgctatggaagtggggccctcagaataacgctgcgcacctcactggattctgcctctttactatgggtatgtgcagacttcccactttgcttgagttgcagacatgtttttttgggatcccaggggctgaatgtgtaaagctcttggttccctgttcatgactgagcagctgatctgccaagactccacacagctttgtgtgtcgagcccttgtggtgtgggctcacaaggggatctcctgatccataggttgaaaagatccatgggagaagcctggtttcatagggtcataccacttcccttggctgagggtggggattctcttggcttcatgttgcttccaggtgggccattgcctcacttgcttttctttgtttccttgggtcaagttgttttcctaatcagttccaatgtgagaaactggatatttcagttgaaggtgctgtattcattcaccccttttgtttctctctgtgagtgccgtggatcacagctgcttctaataggccatcttggccccttataatttcaatctttaaaaattgtttgagacttgtggctt

SEQ ID NO: 228917 - DNA, 510 bp, Homo sapiens
gtaaggaaaccatggcacagagagggttagcaacatgtcccaaatcacatagaaaggcctccctctctgcacaccgagagaccaaatatacaaacggacaatggccaaaccgtatatgataatagaactctttcctacaacctccatcatgatcagccctggaaaccaaaccaccacctctgcagcaattggcccagaaggatcaggacttggtcaatgattgccagtgactgccagtttccttgtgtccccctgacaccctccccaccagtacaaccgccacatccaactcaggaccaatcaatcacgtaggatgtccagcttctagttagctgcctccagcacccccatgccagcagcctccggtgagggcacacctgaagccttccctttttctcactgcaaatctttctcactctgcctgactttgagtctttgccgaatatatgtagtggtggccaactcccttgctatggctctgaataaaaagcctctgtgtggtcttaaatg

SEQ ID NO: 228918 - DNA, 357 bp, Homo sapiens
attttatattaccttgtgatttcatatttaaaagtctcttattttcattgttttctgaactcagaaatcttggggttggtcttcaagacacaaagttgcatggtctcactgtgctgcagtcctgcaaaagagtgacatgacatgggacaactgaaactgtcatatattgcttttgaaaacgtaaaacgctacaagtactttggaaaatggcttagcagtttgttataaaattaagcatacacctgctctagaacccagcaattccactcttgtttgcccaagagaaatgaaaatctatgtctgtaaaaagacttgtggaagaatgctgctttattcttctccagtgtccccgaagtg

SEQ ID NO: 228919 - DNA, 378 bp, Homo sapiens
tatatttctttcgttgaatgaactcagaaaatgaagtgactgaatggattctgagctaaaaacatctccagatggtttagatttgtttttaaaggaatctcgcttttttaatgtaatgtatagatattataattaaaggaagtcatatcatctagagaaggcagatgtttttggtacagtctccatttagtatctggtccttagctttggtgaggccattcatgctaagtcaattcaaaagatagtggtttataaaaaatacaatgctgatttaaaaaaatagtgaaacaaatacgtaactgagcaggcaggctgttcatgcttgttgatctctatgggaaaactttacaagagttgaaatataagcaggaggtattt

SEQ ID NO: 228920 - DNA, 499 bp, Homo sapiens
aggcgtaacacactgcataaagagaaggaccatcttgtaaatgattatgagcaaaacatgaaactgttacaaaccaaatatgatgctgatataaaccttctaaaacaagaacatgctctttcagcttctaaggcatctagtatgattgaagaattagagcagaatgtctgtcaattaaaacagcagttacaggaatcagaacttcaaagaaagcaacaactaagggatcaagaaaataagtttcagatggagaaaagtcatttaaaacacatctatgaaaaaaaggctcatgacttgcagagtgaacttgataaaggaaaagaagatactcaaaagaaaattcataaatttgaggaagctttgaaggaaaaagaggagcagctaactcgtgtgactgaagttcagaggttgcaggcccagcaggcagatgccgctctggaagagtttaagcggcaggtggaactgaactcagagaaagtctatgctgaaatgaaagagc

SEQ ID NO: 228921 - DNA, 430 bp, Homo sapiens
agttgcctcccaccgagaacggccagaagaaccaagcggatcgccaggaccgtgcgcagagcctgcacgtagcgaacgctgtgattcccttcttcccctcccacggcaagcgacaccgaaggtctggggacacccttagggttgtgactgaggatggttgtcgagtgactacagagcccagtaaataacgcgcatctcctcggccgggcccgcagcccagccccctggctcccggcttcccgcttcgacaagggcatgccgcggccccccggagctcggggcgcgggagctggcaccggaagcggggagggccggcggagctgggcggccaggagtcgggtacttacccccggcgggcggcgggcggctgaggtcgcggccagccggctccaggcggcggcaaagtcgggcggcggggcgcgcgggctcc

SEQ ID NO: 228922 - DNA, 417 bp, Homo sapiens
tgagacgagtcttgctctgttgcccaggctggagtgcggtggtgcgacctcggctcactgcaagcttcgcctcccaggttcacgtcattctcctgcctcagcctcccgagtagctgggactacaggcgcctgccaccacgcccggccaatttttttgtatctttagtagagacggggtttcactgtgttagccaggatggtcttgatttcctgacctcgtgatccacccgccccggcctcccaaagtgctgggattacaggcgtgagccaccacgcccagccaaggagagctggtattttaagagataactggcttcaggttttacaaaaataatgagaaaccgattcacagatcccagaaggaaaacacatcccaagcagaataaacagaaattcacacctgcatgcatcataatt

SEQ ID NO: 228923 - DNA, 662 bp, Homo sapiens
aagggatttttctctagtattccctgtgaggacctgatcgagctccagaaagtataagtcacaaaagtgcaggaacccctcacccgccaatgactgagactccctgcagtttttaactctcagacttggccaccctgagcctccagcagttaatcagttccaggacagtgttttctgtcctcgccttggttcctgcaaaggtttctgctccatatgttgtgatcgcttctctatttatctgtctgtctgtccaatttggcagcagttgtttgccttgtgactttacgtaggatctaagaagagttgttaattgttctttttagattttttacttgtcagaccagagtgataacttgcaggcttctcacatgcagaacctgaagttgcagcatttttttgtaatgcatatatcttatttggtgttgtgcctgtttgtgcattttcttattgggttgttttattactcacttttgatagttatttatatgttttggatataagtccagatacgcaatgtactttgttctcccaagagtatttttgaaaagcagtttaaaatttcttgtgtaatcaagtttatcatttttttcttttatggctcttccttttggtttatattcctcctataagtttaattgctttagattttacatttctaggtc

SEQ ID NO: 228924 - DNA, 464 bp, Homo sapiens
catcatactgagagactggacgtgatcatgcagatttgaggtaaaaccttcacctacccaaaaaggaagtcaacagttcacagcaaagggaggggtgaaagatgaaagagggcgtgcggaggtcagcgagggaaggcgaggaaaagctgagctgaaagccgcaccctctggggaagggtcaggaagacagagagataagggactgctggcttttgttttaaactgttcactcggactttgtctttgcctaattatataataaaagtaactcacttaataacctgtgtatgacactagaatggctttaattttaaaagggaaaaacgacgagtctgggtgaggatgtggagaaatcagaacatcgtacgttgctggtgggactgtaaaatgatgccgctgctgtgaaacacagtctggcagatcctcaaaaagttaaacacagaactaccatactctccagcaag

SEQ ID NO: 228925 - DNA, 441 bp, Homo sapiens
cagcatgggaaaaagaggaagaccagaagactcagcaagtcacatgtaggatgtagggaaaggtatcaacatcatccttggcagagagaaggtcagagatcacccacctgttgtgcccatggagtgtctcaggagaactcaggccgaaggaagcccctccatccaaagacttggacttctcaactggaggttgcaggttctgccacagcaggagagacagcagaagcaaaaaacgaacaatgaatcccaagcccctgctgctgtgtagatggggttcaagagtcctgccctaccagacattagagaacacaggaagagcctggtgcctggaggggagagggtgtggctgccctgacgacgggaaggaggggccctctctgtgttttgagtgtagcccacatgacctgttttctgctttaaaataaaacattaaaagtccca

SEQ ID NO: 228926 - DNA, 508 bp, Homo sapiens
aaatgtaaggatcagtcatttctgatttgtatttttataaaccagttcttacgtgtaaaatattttcataaagtcacagtaagatgtttttatgaggctttggaggcttttttgcataagttaaaatagaaattttgagttcttgacccaggatcactatttatacatgaattaatgctgcttttttttttttaatgaagtcatctgtatccaaataacttatgataaaaattgattctgggctggccagatgctgtggctcatgcctgtaatcctagcactttgggatgcctaggtgagtggattgccggagctcaggagtacaagatcagcctggcaacatggaaaaaccccatctgtaccgaaaaatacaagaaaaaaaagtgttagcattatatggctcatgcctataatcctaacactttgggaggctgaagcaggtggatcacttgaggccaggagtttgggaccagcctgggctacatagcaagactctctctctaaaaga

SEQ ID NO: 228927 - DNA, 459 bp, Homo sapiens
gtgtcagactgaaggcaggtgggacagggaaggagagagcaggtctggtcccaggcaagcaggggagtgttcggagcagggggaaggagtggcaggggaaatgagaacagacccttgttcatgtttttgccatctttatcagcctggaggccgttactgtgacgaatgaactcccacaattttcagttttttcttcagtatattattaagtaaattccaaataattgtagattgtatcatgtatcttccccttggctagtggtggccagagcccctttagcagctgctccacccattttttttttattatcaccctttaagaagcctttttagacatttttatcctaattgtccttccccatgtagttttatttacacagatatactgtagatatctatttaataactatgtatatttgtgctttatacataaaaaataaaccttactctttttattca

SEQ ID NO: 228928 - DNA, 340 bp, Homo sapiens
gcagaaattgacaggctgattaaaattcttatggaaatgcaaaagacccagaatggccaaaacaatcgtgaaaagagagaatgatgttgaaattatgctttctgatttcaaaatttactacaaagctacattaattgaggcagtgtggaattggcataagaacatatgaagtaattattaatatcaccatgccacacatctttaaaacaactggaacttactgacacatttaaatacaaacaatgctcaaattcaagcaacccaggactttacttgaatatgagcttggggaagaagccaccttattgcttctgtttataagctgggctctttcttgcct

SEQ ID NO: 228929 - DNA, 316 bp, Homo sapiens
ggctgctctagatggatcccgggaggccacgaactccactcccacaaaatcacagaatttcaaaccagaaagggatcttaagccagatccaactcatctttcagacacagaaacggaggcctgggaggagcgactgtcttgctcaaggtcacaaaggctgctgctgggggcagaactggcttccaaacctggactcctgacagctagccaagggcatgctccacagcaatgacgggctagctggctctgggaaaccctccagctgggaggtgaggctgatgcatgtgcctgataattgaaacaggaggtgggggct

SEQ ID NO: 228930 - DNA, 467 bp, Homo sapiens
ggctgtaccacttttcttgtcctccagtggacccagtcagccttgaggaagggccctgcgactctgtcaagcccactacgcagggcacggtggtgcacacccagtgcccggatcacgctgtggtgcgcaggactatccactatgacagcagcccattgttttggtggtggtcgttcatgtgttcttgcggtctcttttgaacttaaaggggggggttcttatttctagcaaaacatgtctggttattcgtcccctttaatacaaacttaaataggctttcatttctttcttctacagtataagacatgtcattctttcatgacttggttcccatttgttatgaaaattttcctctcaagtgttttcctcaagtgagaggttgaaaatttggaagtctggagtctggtcctcagttctaatctggtaagattagcagtgatatttaaactctgtctgcgtttgtgcac

SEQ ID NO: 228931 - DNA, 492 bp, Homo sapiens
aaaaaaattcaagtgacagtataatgtatatagtataattccacttatattaagttccaaatagtcaaaatagtcaaaatatatttagggacaaatacctaagtgggaaaactataaggcaggagaatgaatatcactaatatcactgattgctaattatttaagaattaatattactaaccactaatgaacatcaaaaatgtagatagctgtgggttgggaagatataatcagggaggataatacaggggatttttaagctctcagtaatgttctatttttttaacctttttggtttataattatactgtaaaatgtacatatacattttatatgttcttatgtgtgcttaacaatataaaagtaaaatgtttaaaaagaaagctcccatgacatacagttaactgaaaaaaagcacgttacaaaacatgaacatgtactatgatgccattgtgaaaaaaaattaaacattggtctatctaacattttaaa

SEQ ID NO: 228932 - DNA, 278 bp, Homo sapiens
gtgcttgtgttcaaggaacctttattttacttaatactttattaataatagttattaatctctcaccacgcctaatttgtaagttaaactttatcatggtatgtatgtaatgtatatgtagggtttagtactatctgtgattcaggcatctactgggggtcttggaatggatccaaagtggggaccgttgtactcaacttaggaaactcatctgtagtttttagtcaattgcttctacttctgggtaggaaaaaactctggaatattttatgagtttg

SEQ ID NO: 228933 - DNA, 668 bp, Homo sapiens
ggagggagagaggaaagccaaagggctgaatgttacgtttattgaaactagggcaaaagctggatacaatgtaaagcagctctttcgacgtgtagcagcagctttgccgggaatggaaagcacacaggacggaagcagagaagacatgagtgacataaaactggaaaagcctcaggagcaaacagtcagcgaagggggttgttcctgctactctcccatgtcatcttcaacccttcctcagaagcccccttactctttcattgactgcagtgtgaatattggcttgaaccttttcccttcattaataacgttttgcaattcatcattgctgcctgtctcgtggagatgatctattagcttgacaagcacaaaaaaagtcagcgtcttcattatttatattttacaaaaagccaaactatttcagcgtattccagtgataactttaaaaattagatacattttcttaacattttttttcttttttaatgttatgataatgtacttcaaaatgatggaaatctcaacagtatgagtatggcttggttaacgagcagtatgttcacagcctgctttatctctccttgctcttctcacctctcccttaccccgttccctatttccgtgttcttacctagcctccccccacttcctcaaaacaaacaagagat

SEQ ID NO: 228934 - DNA, 722 bp, Homo sapiens
cacatcaatttttaaaatatgttatttctgtcagtgtttaatacaaaaactcacccattctcactgtatgtataaggtacaccactgatgtcctagtacaaagtagcactgatatctcaggtgagtgttccgaaaataatgtctaaggaaccacaggctacttgtttttgacttatgagtcaaggcttcattcagaacttttttttttttttttttttttttgagacggagtcttcctctgtcaccaggctacagtgcagtggcatgatctcggcccactgcaacctctgcctcccaggttcaagcgattctcctgactcagtctcccaagtaactgggactacaggcacgtgctaccacgcccagctaatttttgtatttttagtagagacggggtttcaccatgttggccaggatggtctcgatctcttgacctcatgatccacccacttcggcctcccaaagtgctgggattacaggcgtgagccaccacacccagccagaacatttttactagaaactctgtccctgttttcaaatagattctgttttgagagtggacatccctgtcctttatatgcaaatgccctcaacacctgaaccatcaaacataaaggagcagatagcaattaaagcttgaaaaaggagtgtatctcagctgttagctcatctagttaaagaatgaaaacatcaatcaaattaattacaaagtatcacatggt

SEQ ID NO: 228935 - DNA, 796 bp, Homo sapiens
agcaatacaagcttgccagtttttgccccaacagataatccaatgaaggctgtgaaccaaaattttggctaaagcagtctccatggcagtttgatttttaaaggccaaacctcccacgacttcaaagcagggtgtcacatgttaaccaggccccctgcttagagctgcagcacaaaagcctggatacatgcaactctattccactttccaattcaacagtaaacttcagattccaaacaatgttggggccaaacagcattgcaactgcggagagaaaattctaaggagggctagacctcagaacctctgccaagagcatcctctttggagtggctggggtccgcaggacccacagagcatcctcctgtggggtccaatcttagggtcccagacgtctctggctttaggtgggcatcacatgcaggctttcccctctggagcatactatgaactttataagagtagccatgaactgtaatgtgaactggatgctgcgtgggctttttttgtccttagctagttgagcactataagggaagaatttagcataagaaagtaaggtttaagcccccagaaacatttatgagtttgctccgagcagcaccgcatgtagggatcaggaaccataggcaaaaaagatttttaaaaaaagtccctcccgctttggggcagcgcaattattccctttcattcgtagaccttcaggcagtactggtgaccccagcctcaatttccaaggagctactaggaaacagccgctgaaagactgaaatagaaagagacaaaaaaagagaaa

SEQ ID NO: 228936 - DNA, 742 bp, Homo sapiens
agcaatacaagcttgccagtttttgccccaacagataatccaatgaaggctgtgaaccaaaattttggctaaagcagtctccatggcagtttgatttttaaaggccaaacctcccacgacttcaaagcagggtgtcacatgttaaccaggccccctgcttagagctgcagcacaaaagcctggatacatgcaactctattccactttccaattcaacagtaaacttcagattccaaacaatgttggggccaaacagcattgcaactgcggagagaatggctggggtccgcaggacccacagagcatcctcctgtggggtccaatcttagggtcccagacgtctctggctttaggtgggcatcacatgcaggctttcccctctggagcatactatgaactttataagagtagccatgaactgtaatgtgaactggatgctgcgtgggctttttttgtccttagctagttgagcactataagggaagaatttagcataagaaagtaaggtttaagcccccagaaacatttatgagtttgctccgagcagcaccgcatgtagggatcaggaaccataggcaaaaaagatttttaaaaaaagtccctcccgctttggggcagcgcaattattccctttcattcgtagaccttcaggcagtactggtgaccccagcctcaatttccaaggagctactaggaaacagccgctgaaagactgaaatagaaagagacaaaaaaagagaaa

SEQ ID NO: 228937 - DNA, 361 bp, Homo sapiens
ggtcggcttgagtcccctgacccctactctcaggctgtcccggagcttttaaagactgaaatccatcatcattacagtacgtcgttgccaaacccgagcaagccacacagaaatactgaccactgagccccgctgcaacccacaaatatccggggacacagcgaggctgcctcattaacttttatctcaattttaaagaaactggcatcctacacaacccgagttcaaagttgtcatggggatactgcaacttacaacacatcacaaaggtttattcttctccgccctaaaagccactattgactacggtaatcagtaaaatgctcaggtcttcaaggacactgaagttaaacaaggtatt

SEQ ID NO: 228938 - DNA, 403 bp, Homo sapiens
aaaaaacaaaaaacaaaaacgaggccccagggagctgcctcatcctcttgaaccaagtgaggacacagcaagaagaccccaaggaaacagggtctcaccagacacccaatctcctagcaccttgatcctggatttcccagcctccagaaccgtaagaaataaatttatgttatttataagctacctagtttataatgttttgttacggcagcccaaatgctctaaacgagataatgttataagttttgttgaggtgatcttagaggaattgatacaaatctagaattattttgtgaatagttttcttgaaactgacttattgccgtgtttaaaaagagaaagagaaatttcggctgatgtgttaatagtatcgttttaaaaatggaaacattgctcattttca

SEQ ID NO: 228939 - DNA, 396 bp, Homo sapiens
ttaaaaccctatcacccatggcctctgagatgctaaatgttcctatttctctggcagcctctttccttcttagttcttcttcctaatcctacctgaaactggctattatccggatgtcccttcttaagcctctgtcttttctctcttctccagaaagaatgcagatcttatctactctccctcttttgactttttcttcctttttgagatagggtctctctctgtcccctaggctggagtgcaatggcgctttcacacctcactgcagcctcaaactcttgggctcaagtgatcctctcacctcaacttcccaaagtgctgggattataggtgtgagccaccatggctggcctcaacttttttttatgatttatttattttttattagggtaaaaa

SEQ ID NO: 228940 - DNA, 250 bp, Homo sapiens
cttcaagttcttggaattgttaagcaccatgtgaccatcaccatgtgtcagaccagtgaggaggtcaggagagagaagcgtcctcgtggcttgccctcaggagctcacaaggctctgctggttacaaggcctggcccctctccacgagatgtgctttgggatccacaaggagagtgcttacccagaacaagtgacagacaaggccaactcagggacaggacagtcaccatgtgtgtcccatggcatccca

SEQ ID NO: 228941 - DNA, 749 bp, Homo sapiens
gaagggcgaactgtgtatgtgtgcagttgagcttcacatcccatcataggtcccatgtataaaaaaatggcagtgttagcatgatccaagggtggaggttttggccctctgacatcaaaaggtgaagcagaggacacaaaaacccacatctttcggagactggccagaaccactccctgttctgtggtctcatcaggaaggaatgctggttgaccatttcaaagtggccaaagagaggggcagcagtcaggcagttgggttggatgacagcagcagtagtcttttgaaagggctggttgctgtttagcccttagggaagaacgcctacaggcagttagtgagcaagggttttgagaaggcatctgacctcccatcctgacgtggccaagaactcagttttcaaggtcactctggggtccccttggttcaggtggctggggagcttagaattttatttttagtctatagtagacttttgccgatacatttaaacttggggttaccatgaaagaattttcaacgactttctaaatgagtctttttagatgtccttaggtctctaatcttcagtcattctgtaaagaccttgagttagttgccaacatttcaaaaatagacttctcatgaaaaatctcgatttctagcttttcttggaaaaaactagaagacgtggtaacattaggccatgtaatattaccacgatttctacatgggaacaattaaatagtggctgcctcagttagaggagt

SEQ ID NO: 228942 - DNA, 508 bp, Homo sapiens
ttttatggttaaatccttgttgaaaaatgacacttgatcattaggcctttggatataattttattttctcccagtaatgagcagtcccactgtctttaacggacacctaaagagtgcagagcaaggagatggagcgctggacgccttcaaataccgggacaaccaggatccagagcagcgagggacccacagtgctccctcagaggcctctggaccccacgcccacacgtccctgtgaccacccacaccctcccccgactggcttctccatgctgctgtctccgggacatgagtcgcctgtctgtcccccacgtgtggccaggagggcatgagccacctgtctgtcccctacgtgtgcccaggagggcacgagccgcctgtctgtctgccatgtgtgcccaggagatacggtgcttttcctgccatgtcctcagagctgtgcatgtggcacacaggaagcagttgtcacaaataaacaggaatttggcctgtgtatgttagtcctgag

SEQ ID NO: 228943 - DNA, 274 bp, Homo sapiens
cggcaaccccagcttccggcttggctacagcctaagacaccctgagccagaaccatccagctaagcccctcgcagattccccacccacgaaaatgctgagatgacacgatttctttagctgtgtagctgggctggaaggctgcggttggctgaaggccgactcctgtgattgacggaaaggaaacagccattgaaagaggaggagcaagaaaattggcactagttgcctacttaaagctaaaaattagaaaaataaattaataagaactttcaa

SEQ ID NO: 228944 - DNA, 478 bp, Homo sapiens
cggggctaaagaaacctcattccctagagtttctctaagattttaaccactctacttaggtctatgggccttggataatgcctaacaaatgatgggtgtccaacaaatgtttgttttccttctctgaagggcaaattaggatctagaatggggaagagacttattccaggtctcacagaaagtaagtggtggactggccgggtgcggtaactcactccggtaatctcagcactttgggaggccaaggtgggaggatcacttgaggcccaggagttcaagatcagcctggccaacatggtgaaaccccgtctctactaaaaatacaaaaagtagccaggtatggtggcacacacctgtagtcccagctactcgggaggctgaggcaggagagtcgcttgagctcgggaggcggagattgcagggagtcaagatcctgccattgcgctccagcctgggcgacaaagcaagactctgtctc

SEQ ID NO: 228945 - DNA, 184 bp, Homo sapiens
actataaacatgtttgaatatgtatcctgactaaagcttgtaattaggagtggctggaattgctagtgacagagcatatgaacaatcaactgtttgagacaatgccaaattattttccaaaatggttataccaatttacactcccaccagcaacgtacgtggttttttttttttttttttttag

SEQ ID NO: 228946 - DNA, 1340 bp, Homo sapiens
cagaatagagacctatacagatatcctcagtaaatttttaaattgagatataacttacatacctgtaaaattcagtggttttttattatattcacaaagttgtataacattcaccatcatttaattccagaacatgatcatcacttaaaaaataaatgctggcctggtgcggtggctcacgcctgtaatcccagcactttgggaggcctagtgggtggatcacctgaggtcaggcattcgaaaccagcctgaccaacatggtgaaaccccgtctctactaaatatacaaaaaaaaaaaaaaaaaaaaaaaaaaattagccgggtgtggtggtacatgccagtaatcccagctacttgggagggtgaggcagagaatcccttgaacctgtgcagtggaggttgcagtgagccaagatcgcgccattgcactccagcctgggaaacaagagcaaaactctgtctcaaataaataaataaaataaaaataaaataaaataaaataaaatgctgtattcattggccattgcccaactgatttttgataaagatgcagaagcaattcagtgcaggaaggatagccttttaaataaatggtgctggagcaactggacagctataagacaaaaaaaaaaaaaggaaaaaaggaaaaatctgacctaaacttcacaccttataaaaaaattaactgagagtggatcatggacttaaatgtaaaacataaaactaaaaaaaattttagaaaataacaggagaaaatgtttaggatatagagctaggcaaagagttctgagacttgacaccaaaagtatgatctagaaaaggaaaaattggtaagttggacttcataagaactaaaacattttggtctgctaaagaccatgttaaaaggctgaaaaggcaaactacagactgggagaaaatatttttgaaccacatatccaataaagactactgtctagaatatataaataactccaaactcagtattaaaaaaccccaagtaatccaattagaaaacagcaaaagatgttaaggaacatttcactgaagaggatatacagatggcatgtaaccccatgaagagatgttcaacatcattagccgttagggaactgcaaattaaaaccacagtgagatatctcaaaatagagtttaatttttaaaaagcctgggtgcactggcacacacctgtaatcctagtactttgcgaggttgaggtgggaggatcacctgagcctggaaagtcgaggctgcagtgagctgtagtcctgccactgcacaccagcctgggcaacgggaatgagactgtgtcttaaaacaaattgttttaaaggaaaaaa

SEQ ID NO: 228947 - DNA, 1238 bp, Homo sapiens
aagcaaaggcactggtataataaagtaggcaatgaagagataagtttgcaatatttaaagcaaaataatattaataatatattttaaagcactttcagatttttccagatcttttcatacatttttatggagtctaataataatcagaagtagtcccctttatggacttcatttttaaagagtgataattgtccctaattttttgtaatacatgttgaatggagaagtactcaaaattttcattcattgttttgaaactattatattttctgatcagtcaactctaaatgttacttagtatatcgtcttccaatacttctcctaaacaataagtctagatggatttctgggcgtagattgtaacagtgatttataatccaggattttacacatgcttttggagttaaactagaagctttagtatgcagcagactctaatggctttgcagcattcctgggagatttctgcaaaagaggtggagggctaaattgaaccagcaatatatcaagagcactttccttttgatcagcatactcatagcaggatttgttttaattagagatatatttaggtttgatgattattacatgtgtttcagaagtgcattacaacttcggtggctcaacaattactagcagtttgtgtcagaattccttcatttggggaaaaatatttttaatgtggttatgcacaaacatttatggtttgtactaatttaagctatcattatcaacgaaaatacattcctgatgtttattgttttgctcttacaatttcttgctttttaaaattataattgatatgagaatggccatgggtaaaatcagaatgttcactatattatgttaatagtaaaactctatgtgtgtacctatggtttaatatgtaatgatatatagagtatacatgtgctttgggtcaaatggggatggttactattatctataaactgataatagtttgggggcatgaggaattaacaattttggagtatttaaatgattcaaaagagttgaaaaaataaagacactgctattttatcaattagaagctcttaccccttggatgtagactgtttcagggaagaatggggtcttgaaaaacacaaaatatacataaattttgcttccccaaccgactggttagctttcaagaatgagaagtatgttagcagtcccacacgggtcaagaaaatagatcaactgagctgtggcgtggggaattcatggttagtttt

SEQ ID NO: 228948 - DNA, 306 bp, Homo sapiens
tggtctcttgtccattttctatgctacagacaggctccgtgagggcaaaaacttcgtgtggtccacgccgaacagtgcctagaactatgcctttatctccaggggctcagtgagtatttactgaataaatatgaacgccttagtagcatatctcataagccagtttgacactagagctgggacttaccaaaaaggccagccttcatcagaactccaagggcacaaaggaattctcaaaatgtactccacagattacctgagactcaggtagacgcgcccgcgaatttagtagtagtaggcggccgc

SEQ ID NO: 228949 - DNA, 390 bp, Homo sapiens
caccgttccacatgcctgtcctttgcttggtgggtactgaactgacctgctcctgtgtggacattctttgggcctgagttgccccttctgcccacgtataggagatgtgtcagggtggcgggagaaattataaggaaagacgcaaaccttcttagaaggtcaggacgttttgcaaaacttcggaagggcaaagggtagataacaagggaatgtaaaggaatttatttggatgaatttgtttacttatgtctccagatatcaacctttgatcatttgcacacaggactgctctctactcggggggtcgacaatgttaattacccacaaattgtgtttgctccaagcctttgtcattaaatctgtactaaataaatacaaacatctctggct

SEQ ID NO: 228950 - DNA, 773 bp, Homo sapiens
tttgtgcgttgttggccaggtgggccacagggtggaaagccaattcgaaaaaaaaaaaaaaaaataaaaaaataaaaaaaaagaaaagaaaagatttttgttttaggaagctcatattttaagaaactaaaatatattctcatggttgaggacataagacattgttatagaaactaggtcaacttctcaatacctttatcaaagcacctgcagttcccatttcattgcaagtgaagtaaatctcattgaaataaagtagctggtgtatattcagtacacttttaaaatagcctattttaaaagagaaattggtgccaatctgatttatttcctgctttgttggaatgggggaagttctgtaacctcattgctgttctgctctctattgactactttgttaactggggcacagttggcctcttggatgtctaccgtgctgaaggtcagccaaataggcaggtaagactacctaggcctcttcataggcctaactaagatcacagttggaaaaaaaaaagtatagaaaaagaaaagaaagttgttttttttttctaaaatttaactttttgtattcaataaagaaggaagtaaaacatctccattcaaaagaaatttgagagtctgtttatgccatacactgaagtacaacaataaacaaaatagacctactgtttgttctcaaagagcttacattctagttgtgagagacaaataataagcgagtaaatatgtagtatgtcagagtgtggtaatattattgagaaaaaagtaaa

SEQ ID NO: 228951 - DNA, 463 bp, Homo sapiens
ctgtagtcccagctcctcaggaggctgaggcagaagaatcccttgaacccaggaggcagaggttgcaatgagccgaaatcgcgccactgcactctagcctggcgagagagtgagactccatctcaaaaaaaataaaaaaataaaaaaaaagaaaagaaaagatttttgttttaggaagctcatattttaagaaactaaaatatattctcatggttgaggacataagacattgttatagaaactaggtcaacttctcaatacctttatcaaagcacctgcagttcccatttcattgcaagtgaagtaaatctcattgaaataaagtagctggtgtatattcagtacacttttaaaatagcctattttaaaagagaaattggtgccaatctgatttatttcctgctttgttggaatgggggaagttctgtaacctcattgcaacacattgcaacacggtctctca

SEQ ID NO: 228952 - DNA, 841 bp, Homo sapiens
ctgtagtcccagctcctcaggaggctgaggcagaagaatcccttgaacccaggaggcagaggttgcaatgagccgaaatcgcgccactgcactctagcctggcgagagagtgagactccatctcaaaaaaaataaaaaaataaaaaaaaagaaaagaaaagatttttgttttaggaagctcatattttaagaaactaaaatatattctcatggttgaggacataagacattgttatagaaactaggtcaacttctcaatacctttatcaaagcacctgcagttcccatttcattgcaagtgaagtaaatctcattgaaataaagtagctggtgtatattcagtacacttttaaaatagcctattttaaaagagaaattggtgccaatctgatttatttcctgctttgttggaatgggggaagttctgtaacctcattgctgttctgctctctattgactactttgttaactggggcacagttggcctcttggatgtctaccgtgctgaaggtcagccaaataggcaggtaagactacctaggcctcttcataggcctaactaagatcacagttggaaaaaaaaaagtatagaaaaagaaaagaaagttgttttttttttctaaaatttaactttttgtattcaataaagaaggaagtaaaacatctccattcaaaagaaatttgagagtctgtttatgccatacactgaagtacaacaataaacaaaatagacctactgtttgttctcaaagagcttacattctagttgtgagagacaaataataagcgagtaaatatgtagtatgtcagagtgtggtaatattattgagaaaaaagtaaa

SEQ ID NO: 228953 - DNA, 381 bp, Homo sapiens
tgcgtgtttggctgtgggcatggggaatgcagtgactacacctggttggcatcccataccacacccaggggaatggggaagccaagaggtggactggaagcaggctcaggcctctctctccttgcccccaagggcatcctctccagcaggtggccactacaatgctgatgtcaaactggtcagtgggttcagtggaaggtttggctaccgcgggaacaccccagctctccgtcagagcacgtctgtctttggagaggtcacccacttccctctgttctaacagcatctcttcccttcatagccctcaacctgaatttctaagacagatgtttaggtgaactctcaatgttattttacattaaaaaaatttgtgtctccaag

SEQ ID NO: 228954 - DNA, 584 bp, Homo sapiens
aagtaatggagataaacccagaaaggtggacttggagtaatcatggggacccttgagctttatttggcaagtaaaggctaaacttactgaaggtttatatgcaggaagtttgcatgatcattgctgagctttataaataatttagtagaagtatataaaattaaataaaatatataaatactaacaatggggagtaaaattaggaagaccattttcataaccttctcaaacatgtgaaaaaagaaaaaatgtgccactccacacactggagtgaaatgaatggaatgaacagcagtagagaaaagacattctgagtgtccaaatcttagtgtctgagacatagtattatcattagaaatgggcaacacagaagatgattggatttgcttaggtttttaaaggaggatgatgaaattttgctggaaactgagaattggagttgacagcatgctatacacatgacacttccctagcggcatttggaaatgcctagagaagttaaagcttgaaatagagatttgtgtggtggcttcgcaggtgtggtggctgtaaccctggaggagatccccttgagaaagaacagg

SEQ ID NO: 228955 - DNA, 480 bp, Homo sapiens
ttaaggctgtatttctggattttcctttgcaatgggcttccatgttagatcttcactacatccaatttcagaaaaaaaaaaaagttttgagaaaagttctccatgtgagagcacttctgtgctgtttttgaaacttccttctcatttttctggtatcttccagcaggcaatggggaaacctgcttaagctcacccctctttcactttgagctttatggtgacacttttctggcacatatgtcagcagagcccactttttagctgagttgaaaggaacatgggaagcactgcttcatttctgcctggaaaagccagggacacgatgaaatgtgattttgtttcctgaaacgtggaaggatggttggcgaaaaatgaaacatagcacagccatcgctcttcactaagggccaactccttgagaaatgtgctactttaactctcagtagtttctggacaaggcctaaaatcaatcataatcct

SEQ ID NO: 228956 - DNA, 370 bp, Homo sapiens
ttatgtggtcatcccataaattgcatgttccatgtacaagatttttgcaattccagttgggagaactacactcagaactaagttttgggctgggtgcagtggctcatgcctataatcctagcacttcgggaggctgaggtgggaagatcacttgaggtcaggagtttgaaaccagcctggccaacatggtgaaaccccacctctactaaaaatacaaaaaaattagctgtgcatagtggagggcacctgtaatcccaactacttgggaggctgaagcaggagaattgcttgaacccgaggcagagattgcagtgaaccgagatcgcacccctgcactctagcctgggcgacagagcaagaatctgtctca

SEQ ID NO: 228957 - DNA, 415 bp, Homo sapiens
gcggccgtggttgccgcccggcgcttgcacaatcgcgatgccgggcgggcgaggtccccgagtgcgggcccagaaaagctgccggcgtctgccagggccccggggagcccgggcgcctcccggggagccagatacccccagcctggactgaagtgattttttttttttttttgcctttttttttttggaggaagtttggctttctgcgcctcccagggtggggaggatttgagtcttactgaaatgcaccagaagaggagactttcttaacttgagcaagaaggggagtttgtagaatttccttcctgctgtttcatgtttggttgttttgcagattaaatgaattaatgcacgtaaagcggcaacaacgaagccttgtctatagtcaacagtcaataaaagttagttgctgttg

SEQ ID NO: 228958 - DNA, 479 bp, Homo sapiens
gctgggcctggtagctcacgcctgtaatcctagcactttgggaggccgaggtgggcagatcacctgaggtggggagttcgagaccagcctggccaacatggcaaaaccctgtctctactaaaaatgcacaagttagcatggtggctcatgcctgtaatcccagccacttggaaggctgaagcaggagaattgcttgaacctaggaggcagagattgaagtgagccgagatggtgccactgcactccagcctggatgacagagcgagactctgtctcaaaaaaaaaagaggaagaaaaagaaatacaccccattcctggtgccagtcagtgtctgtctgtctctgtatacatacttatgtataaatatgtgtttgtatatatgtttatatacatatatatttgttcatgttattttggtttgacacttttaaaataaggctaagaaacaaatctacgtaagaaataaaacaacttgttac

SEQ ID NO: 228959 - DNA, 464 bp, Homo sapiens
tacaagccaatgatcatttagcaatcaccatggactaggagagaagcatggaacagattttccctctgtgccctaaagaggaagcaacactgccaacactttgattttggacttctgacctccagaactcattctaaaagctgagccttggaattctgtttgaaatcacctacggaaaacacacctgagaaaattcctaaactctctctgggaaagaaaaaggcaggattgaaacatgttggaattttcgtggctcctgccgtgacgaatgcctgaagaatgaaagggtctatgttttctgcgtgagtggtaaactgtgctgtttgaagcccaaggaccagccacatttaccacagcatataaagaattagtgctttaaagtctgaggccacaaaaatgaagataaacttgccttaagtctgatgtcagtagattcctgggctttattaaaacatctttggctg

SEQ ID NO: 228960 - DNA, 394 bp, Homo sapiens
caggcagttcttgcagtgcggagcgtggaagggctgcccagttctcaccagtcgtgcttctgaagcgctaggcgtctgatcacgcacaggacgtctgattgcctgaactgcccgtcaaggaggtggcatgtgttcatcattcatttattatttaatcaacatcgactatcatgtgtcagacactccgctgggccctgggggttctagaagtaagacttgttccgtgccctccagtgattcacgataagatcaaactgttcttgttcggtttacctagtgataaattgatttagtccctgaaatccctttcttactgcctgtgacctgtaggccaaaattgggaacctctgaatagtagtaaattaaaatcaccaaagacgtcattgtggcagtg

SEQ ID NO: 228961 - DNA, 492 bp, Homo sapiens
caaagtatgctctgcatttagctcaacctatggtaactgtgtagtccacggaaactgctcttgaggccagcgacattttgcgaaacattcatttccagggaagagtccttgaggatgtagtataaaaatataatttaatttggcagacttagaaatttatcctacatcccacagtaaccatgctttgtgtcttctgaagccaagtgagaaagcaggcatttgtctggttttccattggcatcctgctcagtgtgtgtgtgtgtgtttgagaagataatttgcagcttagttactgggctgaaaatgaagctcacttgaaagacatgctccacctggaggtgaagaacagccttgttgagttctgggtgccttgagatctcataggcagaatttctctgcgaatactgcggatctctaaattgttggatcttccccttttgggtgttatttgtattatgtaactgattattaaagaaaaactattagctatta

SEQ ID NO: 228962 - DNA, 230 bp, Homo sapiens
ggagaatcccttgaacccaggaggtggaggttgcagtgagctgaaattgcgtcattgcactgcagcctggacaacaagaatgaaactctgtctcaaataaataaataaagagaaataatgctgctccaaggacaatttcccttcagaagtagaaactggaaactactaaatagcttgagctgaaggaagaaagtagattatttgtggaagatttgtggtcttagaagcgg

SEQ ID NO: 228963 - DNA, 271 bp, Homo sapiens
tacttaattctgctttattgctagacagtattccatcatctgaatatttcatggtttatccattcatcagttgatggacatttagattgtttccgtttttttggctattgtgaatgatgctgctatgaatatttgtgtacaagtttttgtgggaacttaagtttttatttctcttgtatatatacctaggagtggaatgtagtgtgtgagggttccaatttcaccacatccccaccaacacttgttattgtctgtccctttgattatagcc

SEQ ID NO: 228964 - DNA, 366 bp, Homo sapiens
gtgtccagtatgactggtgtccttacaagaagaagaaatttgaatacagacatatacagggaaaataccatgtgacaatacaaggaaaagacagccatatacaagccaaggaaagaggcctcagaaaaacctaaccctgctgacattgatcttctgtgcttccagaacagtgagaaaataaatttcctttgtttaaaccacccagaatgtggtagtttgttatgacagtcctcacaaactaatacaataacttacctaaactttcagaattcaacaacattttctctttccaatgtccattaaacatatttctgttaagggaaagtgaggaatcgatcaaatatttaacaaaagttataatactag

SEQ ID NO: 228965 - DNA, 631 bp, Homo sapiens
gtcatgctagtttagatgaattaaaacctggtaatttagtttactggatcttgtgttgtaaattcagattcctaaataacaatgacaaactgtctagagtagggattgacaaattttttctgtaaattttgtaggctttgcaggccttatggtctctcaggttgcagctgctgaactcttgtaacatgaaagcaactataggcaatacataaccgaatgagcatggttgtgtgccggtaaaacattgtggatactgatgtttgaattttgtgtagttttcatatattacaaaatatattcctttgatattttttaaccattacaaaatgtaaaaatgatgcttaactcatagaccttatcagaataaatggtgggccagattcggactgtgggctatagtttgcagacttctggtctagaatctagaacaaaagataggtccttctaaagcctcaaagtaagacctttgccttactaacgtgagttctttttagttcactgtgtttaaaagtattccaggtccaaacccagatatacaaggattatttgtttgcatgcttgcattcttgctcttttttgtttgagttggggtttagctatgttgcctaggctggacttgaacttctgggct

SEQ ID NO: 228966 - DNA, 302 bp, Homo sapiens
gtcatgtgtttctattatagtttataataaaactgggagttttatagaatgctgtcattgtagttatgatgtacttaaaaactgaactcctgagtcctatttatgctgcattaactctggcaaactgcatttttcctatgggatcaggagtgtagtttaatttgaacatattgctcggatgtcagactaaataattttttcctagctttgccagggacctgttgtttaatgggtttaatatctgatacctttgacttcagtatctttcaaaagtgaaatacaactgcataccaggtaccaga

SEQ ID NO: 228967 - DNA, 448 bp, Homo sapiens
gcacattaagtatcccagtgctggcagtgggtcacggacatgagtcaccgtcaagggcacgcctttcctgcttcagacgggcaacccttgatgtccaggccggacagtgccctttgtgctcttttattcgttaaaaagaagtcccttgccaaagaatgtaggggtggcagtcctctcctgcgaaaagcgggtatgtgcggggtggacagcctttccagagggcagtctggcaagtggatcaaaagccttaaaggttttcttaagacccaagattctcacctttggaaattttgtcccagggaactagtgggaggtatattcaggaattagaagagtaaaatcaactctgcagaagggggtcagtaagttacttgtcatatccatatgttataattctgttccattatttaaagtcatttaaaaagagtattgaataggaaacattaaa

SEQ ID NO: 228968 - DNA, 540 bp, Homo sapiens
tctttcaactttctccaccaacagggtcaggctgttgattggcctcgactgcagttagcctgacacggctagcagcctcaaaacaaattaaacgaggcagggatgccgtgcagtgatcgttccattatgtcccctctgcttccacacgtgactcacactatcacttttagaaggtgaagcatcttattgaatcaacacctaatctgcacacagtgtcacggaggaggggcgaggggacagcgggagcattttctctgatccttttctttcctgaagacttcgctggagacaggctgggtgggggcgaagatgaattgtgaggaaccctgaccctatttcagtactgctgctactgtcagctccgacagatttatagcccattcattcatgggaacaaaaaccctgccacggctggtcatgggacacgcaatagcagttagttcaaaagataacagctgcaatacctcacctctccattcagcactacagagccagcactacttcggaggtaataaatgcttcttgttagtgtaaaaaaag

SEQ ID NO: 228969 - DNA, 756 bp, Homo sapiens
tctttcaactttctccaccaacagggtcaggctgttgattggcctcgactgcagttagcctgacacggctagcagcctcaaaacaaattaaacgaggcagggatgccgtgcagtgatcgttccattatgtcccctctgcttccacacgtgactcacactatcacttttagaaggtgaagcatcttattgaatcaacacctaatctgcacacagtgtcacggaggaggggcgaggggacagcgggagcattttctctgatccttttctttcctgaagacttcgctggagacaggctgggtgggggcgaagatgaattgtgaggaaccctgaccctatttcagtactgctgctactgtcagctccgacagatttatagcccattcattcatgggaacaaaaaccctgccacggctggtcatgggacacgcaatagcagttagttcaaaagataacagctgcaatacctcacctctccattcagcactacagagccagcactacttcggagtccacccaacacaagctgggttgctgaacctttgcaactcaagcacttaggcaacgctgaaaagccgagcttcctcgtggtaagtggcaatgtgggtatatacattctccttgcaaactgatcagaaacagagctcgggcatgagtcctgtcccgacaagaagaggcagctggtctgactagtccaccaccatcctcagagcctggacacacacaacaagcatgtattaaaagaatccatggattttt

SEQ ID NO: 228970 - DNA, 480 bp, Homo sapiens
cataggatgcttcctccacaccatactgaactgtcactcagttatcagtcactactgcagacattgggagagaagatgaagaactgagaatgtccagcgtgaccatcgcgcgtctctgtacccatggcttttgcctcccaacccctgtagcaggtgtccttagtcccaactgctcctccccagccctgtgtaaaatcaatgacagacaatgagtactaatcccctagagtgttccttctcccacctgtacttgaccaattacttctgaaactggctgaatctggctgagccctcctataaagcccataaacatcctattctcctgcttaggtcaaacctgctcacacgtgtatttccaggttgtgctggggtatgaaccagttccctcatcagtacatcatctagtatgcagtgatgtgtgtagggagtagtagtatcacatcaggttgtgcctgcctcatcacaattgccccacaaaga

SEQ ID NO: 228971 - DNA, 498 bp, Homo sapiens
ccaggacgtaggattcaagaatactatgctctggcctgaggtatttgggtgggctctgggcagctcaaggaaggggctggggactctaatcacttgtgaaaaagtcaaggcattcctctaacacccatttagcaaaaagttcctacagtgtgccaggcatgtggtttataggttggggattcagtagggatcaaaacagatgacgttcaagggagacagagacacagcattttcagatgctaacaggtaccacggagaagattctaacatggtgatctaggaggcgatctaacagggctagggcctaggaggagactttagggcgtggggccagagaaggctgcaatgatgtttaagccaagatctgagtgatccaaaggtcagggggaagagcattccaggcagaaggagtaggcagtgtagaggccctgaggcctgtgaggtcctgaagggcagcccacgtcaatggggcaaggagaagggaaaggaggtggatgg

SEQ ID NO: 228972 - DNA, 384 bp, Homo sapiens
gttttggtctttgacctcccacgcccacggctggggctgccgaaagtgaagaaactagatttgcagacgccactgctagttggttatgaagctccgggcaacagctttttggatgtttaaatatgtagtgcccatctaacacagcctcccttttcctgctccctgcccgcctctcatcaccttggctttctccttttctttgcactttgaaacgtacagttaatgcagatttcacttcagcaggctccaggtaacctcctgatcaccaaatccagaaacgctgtgattccggacagacaatgtaagggtgtcgttgagaggggactcagtgccagggttggaatcccagccttatctgtttctcttaatagtgtgctgggatac

SEQ ID NO: 228973 - DNA, 318 bp, Homo sapiens
gagctacaattcaagatgagatttgggtggggacacagccagaccatatcagctttaatccaatatgactgtggatccttataaaaatgggatatttggacacagagacagacatgtgctgtgagaagatgacgtgacaacataaggagaatgccatctacgagccaaggaatgcttgcagccaccacgagctaggcgagaggcctgggacagattctccctcacagcccttggaagaaccaaccctgctgacaccttgaatgtagacttctgggctgccaaactgtgtggcaataaatttctgttatttaagccacc

SEQ ID NO: 228974 - DNA, 262 bp, Homo sapiens
agtgcggccatttccggtcgctcctggaggcgcccgagcccgacgtggaggccgagttgtcccggctttctgaagaccggctggcgcggcctgagccgctcaacaccacgtcggggtctccgagccggcggcggcggcgagaggcggccgaggacccggcgggcagggtagccgggcctggagaggtgtccgacggctgccgggaggcgctggcggcctggctggccccccaggccgcgtccctgtcctgggaccgcctggc

SEQ ID NO: 228975 - DNA, 354 bp, Homo sapiens
aattaagttcagaacaaatctgctctaatagtttatgctttcctcttctttttttaaaaaagggttattttctttctatagtatacttattttttaaatatattatggatgtattgaagtacagtagtaatttagatatttttaaaaatttttatatgggaaaagaatagatttacttttgtattcttgtaaattattgaagttttaatctgaatggattaattgacttgattatattctaattcagaggaaatttatgtctccctagtctacattttttttttttgagtcaaagtctcgttcttgtaccccaggctggagtgcaatggcgcgatctcagctcacggcaacctc

SEQ ID NO: 228976 - DNA, 438 bp, Homo sapiens
ccatgtctttctgggaggaatgactaagaatccgcagccgcctccaatccaccatgcccacgcaagagacaggagtgataattgcaaccaagatggtgcatggtagcagattggtcactgtttccagttattcactgtcctcccagtgagaggactattcatcctgccccattgctacacgacgtgcagggcctccagtgttgggtacacctcccctccccaccaaatcaggtttggccatgtgacttgctttagccagtgaatccggagcccaagtcctagcaggccattcaaaagagaagcttcaagagccatcacgtgggttggccagcctgcttttccctttgaacagagctgtgttttttagagagagaccttagataagcctccctgttccacagaatacaaatccaattggtaagacttctatccatctta

SEQ ID NO: 228977 - DNA, 177 bp, Homo sapiens
caaacatgtgcatactatggagcagaatggaaactgtgcacatgtgctccaggtaaaacacaagactccgcaggaatttcaagcctgcagcgagcctctgggcacacccctggttagtgcagacccttggtggcacactctcaagagcaatgccatgagaagtcactcacggtatcc

SEQ ID NO: 228978 - DNA, 731 bp, Homo sapiens
  misc_feature (644)..(644): n is a, c, g, or t
cagtggcatgatctcggctcactgcaacctccacctctcgggttcaagcgattctcctgcctcagcctcctgagtagctgggactacaagtgcatgtcaccacgcctggcttattttttgtagagacagtgtctcactgtgttgctcaggctggtctcggaagtcctgggttcaagccatccgcttgcctcagcctcctgcgtagctgggattacaggcacacgccactacactcagctaatttttaaattttgtgtagagttggggtcttctatattgcccagactggtctcaaactcctgggcttaagtgatcctcctgccttggcctcccaaagtgctgggattacaggcgtgagccactgtgcttggccttcccattttcactgaaggttttctttgtggttacattggtttgcctttccctgcattagttgtttgtctaacttaatggcctcctcattttatgttctgcctgccttctgtcttaaagtcttaaatccgttcaggcctttatcagtgagcagatagtgtccacatgtgtatatgtgagggggtggtctgggtgtctctataggtgtgtgtgtgtgtgtgtgttgggggctgtgtatggggggatatgtaggagtgttggtgggtgttttnttgggttggcttggggggtcgggcttgtgggccttcggggtcgggtttttcttttttcccttggtctccgtggcgccttgtttcccc

SEQ ID NO: 228979 - DNA, 410 bp, Homo sapiens
cgcatttgttcttaggtgggggagaggtgctgggaggccaggccttcctccccagggtggagtttcgcatttggaaaggaagggcgcagcgtggtggcctccacaattcagtgcacgtggctgagagcctcttgtctcactgtgaggtacaggtttgttcttggaaaacagggagttaacatttgttcattgggaagtaatgcattttcattctgtcttacatgttttttaatgatcaaaaagttctaacaacatataattttttattttagagatagggtctcaccctcgcccaggctggagagcagtggtgcagtcacagctcactgcagccttgacctcccaggttcaagggatccttccacctcagcctccctagtagctgggactacaggcacacagcacatcca

SEQ ID NO: 228980 - DNA, 662 bp, Homo sapiens
agagtttccagcaggattaaatggcagttgcccaagtgatcacttacttgatcactctttttgactgttttcccttccctatcatcatttctctggtttacttacacaaacctagatggtacagcctagactatatggtatagcacatggctcctacaaccctatacagcaagttactgtactgaatgctgtaggcaattgtaacacaatggtaggtatttgtgtatctaaacataggaaaggtacagtaaaaatacagtgtaaaagataaaaaatggtgcaccggtctagggcacttacagtgaatggagcttgcagaaccgaaagttgctctcggaatctgcgagtgagtgtgagtgaatgtgatggcacaggacattactatgcactactgtagactttataaacacggtgtacttaggctacactaaatttattttttaaaactgtatttctttagtaatagattaaccttagcttactgtaatgtttttactttataaactttttttaaagcttgttgatgcttttgtataatacttagcttaaaacacatgtgcattgtacaactgtacaaaaatattttctttctttatacccttattctataagctttccatttctaaagatttttattttttattttttttactttttaaacg

SEQ ID NO: 228981 - DNA, 442 bp, Homo sapiens
aacaaagattctctgtcatgaaaataccgtaggccaccttttgacaactgagttttgcagatctgctttcacattgataaaccgaatttgtatatgttaagacagatacagcactgattattttcattttaattattccaggtcagcgcctatgattgcatacagagacatgcataaactatttaggggaatctgatcaaagctcttaggaaaatttcgtggtgcataacgatagtatcactgtctcggtttacatccatagttggttgttaaattacaggcagatacctccagagagctccctgcaattattgaaattacttctgaccttgagtttttatatgcttgtacattactgtgtaattttccaaagtctggatttatttttgagagagtgtaaagaatcatttgctttaatctctgatcctgggtgtgggtgagg

SEQ ID NO: 228982 - DNA, 941 bp, Homo sapiens
ccgggctcagacactgtctggcacacaggcccttccagacccaggcaagtctcctttaaggctacctgtgggtcatgggcacattgagggcatgctggagagtccctgggtaaagcaggtgactctctggggtggacaccccctccctgcccactgctgcccataccctccatccactggctgtcagggcaggtgcccagtggagggtgggaggtggtttatacccatcagcctcctaagggaggacactcagacttgtgccgtcatcacagtagaacattttcatcaccccagaaagacaccctgtacccatcggccgtcacttccgtgccccttcctcccagccaccagcaaccaccgactggttggtgctttctgtttccacggatttgccaattctggatatttcgtataaatggaatcacatgacgtgtggccttttgtgtcaggcttctttcactcctcttgttctcagggtccagccacaggtaccctgtattggtcttcattgcttttcatggctgaatactattccattgtgtgggtggaacacatgattccttcatttgttgctgtacatttggatcgtttccatgtttgggctcacatgaatggtgttgctctgagcgtttggcgacaggtattttgtggatgtctattttcagttctctctggtgcacactggtatcctcactttgggcaccagctcaggagtcccacagacttgggtttggcgcccagccccattgtttacaagctgtttggtcttgggcaagccattctcttagcctcactctccttgtctgtaaagtgggcatgtaggccaggctcagtggctcacgcctataatcccatcactttgggaggccaagacaggaggattgcttgagtccaggagttcaagaccagcctgggcaacatgatgaaaccccatctctacc

SEQ ID NO: 228983 - DNA, 890 bp, Homo sapiens
ccgggctcagacactgtctggcacacaggcccttccagacccaggcaagtctcctttaaggctacctgtgggtcatgggcacattgagggcatgctggagagtccctgggtaaagcaggtgactctctggggtggacaccccctccctgcccactgctgcccataccctccatccactggctgtcagggcaggtgcccagtggagggtgggaggtggtttatacccatcagcctcctaagggaggacactcagacttgtgccgtcatcacagtagaacattttcatcaccccagaaagacaccctgtacccatcggccgtcacttccgtgccccttcctcccagccaccagcaaccaccgactggttggtgctttctgtttccacggatttgccaattctggatatttcgtataaatggaatcacatgacgtgtggccttttgtgtcaggcttctttcactccttcatggctgaatactattccattgtgtgggtggaacacatgattccttcatttgttgctgtacatttggatcgtttccatgtttgggctcacatgaatggtgttgctctgagcgtttggcgacaggtattttgtggatgtctattttcagttctctctggtgcacactggtatcctcactttgggcaccagctcaggagtcccacagacttgggtttggcgcccagccccattgtttacaagctgtttggtcttgggcaagccattctcttagcctcactctccttgtctgtaaagtgggcatgtaggccaggctcagtggctcacgcctataatcccatcactttgggaggccaagacaggaggattgcttgagtccaggagttcaagaccagcctgggcaacatgatgaaaccccatctctacc

SEQ ID NO: 228984 - DNA, 631 bp, Homo sapiens
gtttgtaacataccatgttaaaaaatataaacataataacaataagaccaatataaataagctgctattatatactggttaacctcataatgatcatgtgtcaaccaataaattaccacaaatcatccctgcacaaagcttttaatctactacatatgcaggttcaggtgtattcagttatgttagcatttttgtacactaaaacaacaaaccaaagtttaaaaattgcttgataagaacaaaagagtaatttcaaagttttctcataagattatattttaaaggttaaaataatgtttaaaaatcaaattggtattttttattatcagattataatttcaggttgtactcttgagaccaaagaaaatcaatcaatggcaagaacatttgtaccataccaattttcaaattcaactgcagaaccactctaagaaagatctgttcagtttattaattccatccaataaaaaccacattaacgccaaccttaaaactgcttattagtattttgtaggtacttttaatcaaagtacctataccacatcataaatttttatacctaaatcctatttaagtaattcaatataacaatcagaagagccagcaattatttattcctccacctatattc

SEQ ID NO: 228985 - DNA, 251 bp, Homo sapiens
aaggacttcatttattatttggggtgcttctctttctctacacacacatatacacatgtgtgaatatattatctatcatacttagcatgtgatttacaggtcaattctatagaaagaaatagggttggctgggcacagtggctcacgcctgtaatcccagcactttgggaggccaaggcgggtggatcacgaggtcaggagttcgagaccagcatgaccaacatggtgaaaccctgtttctactaaaaata

SEQ ID NO: 228986 - DNA, 330 bp, Homo sapiens
aggcggctgcgggagcggagtggtcgcccagcgcgcggggggacgcgggctgcactcccgggcaggcgctctgcaatgagacagtaaatgcatcccccggtaaggcgcacggctcactcgggttttcctcttcctccagctgcatgcacgttgcatgaatttctcgtgtcttttccctcccctctccagaaggaaaatgtggggttttttttcctcccttttgcttctcgtgagtgatgccaatgcaggaaaaacccgtaaagctcccagatttgatggtctaggagggcttcttgcaggaaaataaaaataaaatgaaattaatgcacc

SEQ ID NO: 228987 - DNA, 361 bp, Homo sapiens
gggattacagcatcacgggtctagaccaagcttctccttaaccaagatgccgtgcctaaaactcgggggtcgggggtggtccatgacatttcatggggaaaattacatatgtgtttcctccagttgaaatttggcatttcctttgcttctgatgatagatgataaaccatcttggggtccctagtacctgtggctttgccaacaatagaaatcacagatgttttccatatcataggaaagttttgcaggtttaaacatatcgcttatgcccacatgcctacttcaaaatttcaggagttctaagacctgctactgaatcttcttatttatgtattaataaagcagcacatttatatccgta

SEQ ID NO: 228988 - DNA, 374 bp, Homo sapiens
caggagaggccagcctccctttcttacagacatgcccaatcttcaccaaaccaaggctctctgggcggaagcaatcatggtgattgctgctatctgtgaggggctctcctcgggtggctgctcaagggacaatgacaaggccctggactgccacactccctccttcccatctcatgcgggattcgagctgggccaggaggcaagcccggaggaagagggcaggactcaccaggacagttctcttctgaacacacaggcctcagcactggtacccaccctcacctccacaggccactcagttctctctgcttgtctgtgtcctactgaaccgccagccccccagcataagactcttgtctgatctttgtatcccc

SEQ ID NO: 228989 - DNA, 803 bp, Homo sapiens
gaaggcaagataatgtctctgagggcttcattgtgtcacttctctttggatggcggacaccgtggccctctgctggcggaggggtgccattgctgcctgccccatctctatccccagggcccatgcagtcactgggttcgccctctggggcacggggttccctctgctcttttcctagataagcccattctctgcaggtctctaccctccacacctgtgttcaggaattcagcccgcttcctgcagccccatccctaccctcctcccaacctgcttttcttctggtgtccctcactcagcatggctaacagatccaccacccaacggagctgagaactgcagtcccctctgcctgttacctctcctgccattagtgaacctgcttaactcatctgactgtgcgtctcggtgcttgctgtgacatgtctccagcccttgctgctctgtcccccagacccacgtcccacacccggatggtgactcagccgactctgggtcttctggacccagtgcttctccctgatacaattccttcctctgtgttttaggatcctgatgctttgataagaccgtgggctctaatcacagccagggacatttgcagcagcctggcctgcagctctgcacactgggtgcactcagtctaaagcaccagctccccatgagagagaaagaaggggtgaggggaagtacagagaaagctcctgaggccacagggctgacaaagccctcggctttgggggcactttgtttcttcaagactaaaatgcaggcaatggaataaatcatttgttcctaaaaca

SEQ ID NO: 228990 - DNA, 451 bp, Homo sapiens
tcaactggtggggtttgaagtaaggagggtcactgactgaagctttctgaagtaatctagccaataaaccagatggatctcacagcagggcaggaatatctaaaggagactgagaagaggatttataggggtagaatcgaaggctaatgagatgttggaggtaagcaaggcccagatgtctaacttcagtgaactgcaatgctataagctggaggatgaccagttttggggaatgtggtggggaaagtgatgaggttagtttgaacatggagaatgtgtggtattagagtagatgttgtatctgtggggggtagggggaaaaaagacagaatggcagacaggcaatgacagagcagctgccctggaagtcaggcagaaagccaaaaaaagggaagaagacagctctatgagtgacaaaagcagcaatgagctagccaggcagcagacatct

SEQ ID NO: 228991 - DNA, 457 bp, Homo sapiens
cagcagaggaccggcccccttctgcagactccatcctgcctctcacccgcctggggctgcaggagctgtatcctgaggcagactcagtccagtttaatagggatcaaggggaatagctcccaaattttaaacatgagaggcagtttctcttactgtgggtgagggtggctgtgatgctgctgaagatgcagaaaccctactggccaagttggagacagtccaggctctgagttattctaaggtcaaggtgggttcacccaagcagaacacagctcattaacctccatcccccaactctctgttcaggctgggtgatacagccatgtggggctatgggcatctagggggaaagagaggagagagggatgggggagtgatctgggaaagcagcttttaagagatggccaataagttgtatctaatttgtaaagattaaactacttttttttggtgtttg

SEQ ID NO: 228992 - DNA, 502 bp, Homo sapiens
tcttggaattgcagtaattttaaaggcagaactgagctgagtgctcagtggaaagatggccacaaaagcagcagtgactaaacgttcaattctggccattcagccacactggttgtaatttgaaagtaccaaacctcttattggactaactaggccatatgctctgccagtttatcctggtgtcatgtcattatccttcagcttcccacttgagggctagagagaaacatagtattggctaagcagatgtaggatagcttctagttagccaagagactatcctgagtggtctcactagaggtctgaaattcatagtcaagcttgaatcccaaagttgaatcaccgaagttgccttttaaaaacttaaatttcggccgggcctggtggctcacgcctgtaatcccagcactttgggatgccaaggcgggcggatcacaaggtcaggagatctagaccatcctggctaacacagtgaaaccctgtctctactaaaaatacaaaa

SEQ ID NO: 228993 - DNA, 317 bp, Homo sapiens
tttcaaaaagaggctgtgtaaaatgtcaggctgtgggttttaaaaacaccatagtccaacagcaccttgtagggcacacacaaggcaagtcattcccgtgaattcattcacgctgtcttttcagattcctaaggaagccttttgaacattaaaaaaaagaaaagagaagtaaaaacgggtagctattgaaatgggctttggatttagatgaccttacattgaggttttaagccgggtgaacaatttatatgtaaatttagaaattaaaaaagcagaaatttatacttaaattaatcgaccttatagaaggcatggaa

SEQ ID NO: 228994 - DNA, 397 bp, Homo sapiens
ctcttgaggtacaggctctgagcttccctccttcatctctaccacattcattctggacaaaacaagttgcaagtccagtccagattttaggagcaggcaaatagactccctatcatgatgggagaaactgcaaaggagagagggagaattgcaaccatatttgcaaccagtcaaccacaaaatttattgtaggagccagagaagagagtcttgggatctgaggtgaggaaaggaggtggaggaggatcaggggtcaggaaatcatgtgtctccaccagaaatgctggtggaaaatgctcatgaaatggtaagttatggaatggaaaagagtaagttacgctatatattactaggattatcactatgggaagatcaaagcacttaccaatagaaaaaa

SEQ ID NO: 228995 - DNA, 300 bp, Homo sapiens
agcatgctcttagccttcctgagcaccttcccttttttcagccaactgctcgctcgctcacctccctccttggcacgatgagcacctgcagccaccagttcacctcctccagatccatgaagggctcctgcagcatcgggggcagcatcaggggcggctccagccgcatctcctctgtcctggccggagggtcctgccatgcccccagcacctacgggggggcctgtgtgtctccttctctcgcttctcctttgggggagcctgcgggctggggggcggctatggcggtggcttcggcag

SEQ ID NO: 228996 - DNA, 513 bp, Homo sapiens
tatgtcccagacattgttctaaatgttttacaaatattaacccttttaatccttatactaacccaatgacataggtaccatcttattttatagatgaggaaaatgagacccagagaagtcaagtaatttgcctggcgtcacacagctcatcatagatggttgggcaaggatttgcaccaaacagtattgctccagtgggagctctcttaacttccaagcttactaataaaggggaaacaagtcaaatgaattttttaaaagtaacctgttattaagaggaaattaaagacgtatagtttaaatgcaaatggacgatgaaaactaaatatcctctctaaataggtgagaattaggagggtccttaaacatattgcctcatcaggtgactgagaagcagtacaaggaaattacaaagaaatggtcttccatttccaggcctattatcgttactgataaagctactattttatggttgttactattttcactttttttaatgttagtgttaaagag

SEQ ID NO: 228997 - DNA, 371 bp, Homo sapiens
ccccacagtgtatgtctgtatgcatgtaccggtgggtacacaattcctgtacatgtgtacaagcaatgcatgtacaattcctttgcatgcatgcaaactggcatagtgcatgtctgtaagcatataattggagcacacctttctagaaaagtgtacaagcataattcccgtacacatgtgcctgctgtacaatgtacatctgttagcaggtacacatacacgtgtaatttctgtgcgtatgaacaatgcctaccagtgtcttgatgcttttgtgtatctagctgcccgtccttatgcatacatgcacctgtatgagtgtgcttcatttattcacctttcttcttcattcgataaatatgaggacccaactt

SEQ ID NO: 228998 - DNA, 492 bp, Homo sapiens
acatagcaaggctgtctcagaaatatatatatttttgtgtatatatatatgcttacattttaataaaattaagtttcttcctttcttttgccttggagaaaaaatatacacataaagctgggcgcggtggctcacgcctgtaatcccacactttgggaggctgagcaaccgcacctggcctgtcaactgattttctaccaaggtgccaagacaattcaatggaggaaacaaaagtattttcaacaaatagggctacaaaaatagaatatccatatgaaaaaaaaatcatgacacttacttctcacagcatattaaaaaattaacttgaaaataagtttaaatgtatgagttaaaattataaataatgcagaagaaaacacagagaaaatctttagaactctgggttagaaaaagacttaggactcaaaaaacatgaaccacaaaagaaaaacactgataaacaggtttcatcagcattcaaaacttcttctc

SEQ ID NO: 228999 - DNA, 214 bp, Homo sapiens
aatttcaaccctggtctgtctgacacaaatgcccaggttccaactactctgctatgctgctatctctcttggatttctattcttcagtgagctccctcattggggaaactgaaaagtaactactgtaatgagaagtttacatcagcaactgtgtaagtgattgttgatatcaatttataaatgcagacctaaccaataaagattttctgtttat

SEQ ID NO: 229000 - DNA, 557 bp, Homo sapiens
ggtgaaggttcagcatcttcagaactctacatgatgcattccctgaggctgcctttcaataactgaggtgatattctttgagcagtgtgacctgttagaggtgcccagtcaggtccgatgaaaagccctctgatttgttgaaatagtgcattagtaaagtattatagtttattttcacaaagctagattagttgttacatgttggtttttgttttgcctagccctaacaagtatggaggtgaccttgatgtgtctatagaatatcaggaatatctggctgggtgggtggctcacacctgtaatcccaacaatttgggaggccgaggtgggcggatcacctgaggtcaggagtttgagagaggcctggccaacatggtgaacccccgtctctactaaaaatacaaaaattagccaggtgtggtggcaggtgcctgcaatctcagctactccggaggctgatgcaggggaatcacttgaacccgggaggtagaggttgcagtgagccaagattgtgccactgcactccagcctgggcaacagagcgagattctgcctca

SEQ ID NO: 229001 - DNA, 500 bp, Homo sapiens
ggtatatacccagtaatgggatggccgggtcaaatggtatttctagttctagatccttgaggaatagccacactgtcttccacaatggttgaactagtttacagtcccaccaacagtgtaaaagtgtagaatcaatttcatttgtgtaaatattggcctgtagctgatgctgcttttaaaaatcaagtattcctaggaaataatgtttttattgtgactttgttactttgcttttctttttgatagatgtttctttgggcaggagagatctcttttcaacacaactatatatggaacccttatatgtgattgataaaagtggtattttaaaatttatttttgctttatttttctttaaagtcaggtcagttgaggaataaattacataaagttaaaattcttctcttttaggtgtacagtttgatgaattttgacaaacttagtcataaaatcatcaccacaatcaaaatacagaatttccctttttggtagttttattt

SEQ ID NO: 229002 - DNA, 435 bp, Homo sapiens
ctcacaaaaataatgttcagcaaatgaagacagacacaaaaaaagcacatactggataaattatagttatttaaggttcaaacacaagcaaaacaaatcttgtaaatattttttttaattctcaggaagatatttttcccctttcacagtatcaaagacctgtataacaagtgttgagctcgtgcctgtaatcctagcactttgggaggccaaggagagcggatcacgaggtcaggagtttgagaacagcctggccaatatggtgaaaccccgtctctattaaaaatacaaaaattaggctgggcgtggtagctcacgcctgtaaccccaacactttgggaggcggaggcaggcagatcacaaggtcaggagatcgagaccatcctggctaacacagtgaaaccccgtctctactaaaaatacaaaaaaaaaaaa

SEQ ID NO: 229003 - DNA, 510 bp, Homo sapiens
taaactcttagcccagtgcttctttgaatataactttatgcttaattaatgcttgatgaattgaattagaacttgattcttgaaaaaagaaattgtgatttttttagacttctttttatgcaaaagtaacgtaacttccattcaacacattttatcccaaattgaataaactagggaaaaggcagacggtgaatgccttgagaaattgttcagattcaaggacaagcatttgttgcctttactgcatatgactgtactgtggttccatacatccgagctgatagaaaacttgcagcaagggtctagtggtgatgcatggcaggtggaggtgagataaatttagtcacaggaaccaaattggttctgctagggcaatataggcattgttgggccatctgggtgtggttgacttctgggaggtctttttagtttttctttctcacttcattccataaatatttattggatgccctgttctagttgtttaagatcaatgaacaaaatagacca

SEQ ID NO: 229004 - DNA, 293 bp, Homo sapiens
gagcccggctgccaagccccagccggctatcctgcgtcccgccttgcagccgcctcctcaaagcctcctcacctggcgccgccgcccgccgcccgcccagccccgcaccggcgctgcctcccctgaaagtttccccagcgtagacaccttcgcgctgcagcagcccagggagacggtgttccgaagctgtgccttggagtggctcttcttacacctttccgcctcatccccacctaattcgggcagggagtagaaatttttccaaattaaggggagaaaggggggaggggcat

SEQ ID NO: 229005 - DNA, 361 bp, Homo sapiens
cttgtgaaactgggaagcacagcacaggctgaacagagcactggattccatagaaaatgttttccctccaactctgacaaactccaccctttggtttctggtgcctagttaacaaaacaacctgcaattccaactccacgtcagcacttgggcgaaggaataggcccctataaatgaggagctttgtgtttttcgctggcttcctctcacctcttcaagccatgtgtgtggtaggacctcaacacacttgtcgattggctaaagaatcacacacctgcagtcaaattttcacttttaattttttacttaaaaagaaaaaagagcagcctgggctacatggcgaaaccccatctccacaaaa

SEQ ID NO: 229006 - DNA, 223 bp, Homo sapiens
atcactaaatcgtccttatcctagaaaattggagttccacagagacattttaaaaaaggaagtgacagaacttgatgatagatttgatgctagggacaaaggaaagacagacaggtcaaatttgcctcctagagatgctgtgagaagagtgatagttttattggcagaaatgggataattagggaaggaagtcagtttgtaaagaagctgactaagtgacttg

SEQ ID NO: 229007 - DNA, 142 bp, Homo sapiens
aacaggccaaggaccactcctaaagttctacctcctagcagcggcaggctgtggggaggggggcagctagaagcccaatgctcagacagagcagggccctgggcagagcgcaagcagactcaggcttcatggtgcggccaga

SEQ ID NO: 229008 - DNA, 390 bp, Homo sapiens
gagagagagagagagcaagcgagcgcagccatttgaagacagaggcagagactggagttatgctatcacaaaccaaggaacatcaggagccacaagaaggtgaaagagggctgggcacggtggctcacgcctgtaatcccagcactttgggaggccgaggcggggagatcacctgaggtcaggagttcgagaccagcctggccaacatggcgaaactccatctctactaaaaatagaaaaattagccaggagtggtggaacacacctatagtcccagctacttgagagactgaggcaggagaatcacttgaacccaggaggcggaggttgcagtgagctgagatcatgccactgcactctattctgggtgacagagtgagactccgtctc

SEQ ID NO: 229009 - DNA, 633 bp, Homo sapiens
aaaggatttgcttgcgtcattgctcctcatgctgtagtgttggtgagaatctcttgtttcaaatgaagctttcctggaccttcctccagagatgtggttcagcagtcggccccacttggagaagtcctggcctgaccatcactaaaatcttctctattccagatatagattaaggtgattgctatgattgatggggaaaaaaatgttctgttcagcaaatatagataagaaccccataaaccatgaggggtattctggaaatgaagttttaaagcttcatttagaatatctcgtaactggtaagcatggcacgtgacaaaaagagaggatcacatgcagtgactcttgtgagcactttccagattttcactcagatgacagcattaaaatcctcaaggctttatgacttatggcttatggtgcttcatcagctctcatttgcctcagattaatttttatctcactggaatgaaatcaactcagagtatcccaagcacacgtggagcactgctgttaggtatgggaatgttttcacgctaacaactcgtagttggttctagaaaaagttggggtggagagaagacttccaaaattcagtatgtggtctgaatttaaaccaagctgctacagatg

SEQ ID NO: 229010 - DNA, 484 bp, Homo sapiens
ggagggattcagagtagaagattactctttcttagtagtgaggtcagagattgctgtttgcactacactgcatttttaaaagggtatttgaagaagaggtcaaatttgaatacgcagaattgggcatgtgggagctgggaaggagcccagggaaggcaattcaagcaaaaaagaaaacaaaacaaaatgaaactcatataatttttcttacaaataatggggaagtagctgtaaacacactagctattatccttatcatcatcatcattatgtggacactatgtgacacacggaccactttgcccgccatgttaatttgctcccaaccttacttattgtactagccattgtgttcttccagcagaatcttcagtgttagcccaaaagttcttggggtctaaccacctgaaacatgattttgttgactctatcgctaaacgttaaaatgtgtgattattcagtaaaaaatatatatcttctgtca

SEQ ID NO: 229011 - DNA, 372 bp, Homo sapiens
agatagaaaatgaataaaacatgagtgagaaatatctaagaaattgtatttacagaattcaacactgaatatagaacatagaatttcaataggtttaatagttcttctgactaggaattcttaactttttctaagtgaagttaccttacttcctgtgtttaattcttgtttaaaattatatcattattaactgctggtagttatctccaattttgtccatctgagtccattgctcattatatttatgaagataatatttaatattgagaaatcatttaaacttaaataaaaggatagaaccactgagtatgtggaagattccttctcataagacataatttccaaatagtaatattagaagatacagtaaat

SEQ ID NO: 229012 - DNA, 671 bp, Homo sapiens
caagggaagaacatctccttcaccgggggtgagggagggcatcctgaaattctgctgctattccgacaggtgttttttacaatgtggctaacacaaaccattttttgagcacctactgtgagcatgagctggtaaaataaaataacttcatcttaggggctggacacactttatctgtaattcatccttgcattttccaggtgtaaaagttgaggttttgctaagttaagaaatttgccctgtatcacgtaacttggaaagcggcgaaagccaggcttctgactccaaagccagtgctcttctttctaacagtgtggtgtttctgttcatacatggataccatctacgcgcagcttgtgaattgcacttattggattgaattttgggtactttaagagctgagttctgaaaaggagaaaggccaggtgagcgaggacagaaggctaacttagactgatatcttcattttctggcacttggccactgtagggatacatggagtagggtgaagtctttgtatacacagctgaccctcgaacaacatgggtttgaactgtgtgggtccacttatacatggattttttcttcaataaatgtcttagaagattttttggagatttgtgacaatttttaaaaaatcacacatcaaccatgtagctgagaaatattga

SEQ ID NO: 229013 - DNA, 688 bp, Homo sapiens
gtttggaggaaggagcatacttaatgggtagtattgaggatgaaagggaatttctctctctgccattttatttgataatattaaagaaataaagactggaaagggggattccttgttaaaggtcagattttaaattgcatataaaatgaagtgagttgtgtttttttgaaccctcaaaagaaagcctgagaggtgatttatgcctctggcaaggtattatcatgataacttcagttcttctccataaatgccttcagcaaatacccagtgcttatgtgctgtgtgtatgtcttaaaccttaactttcatgaaatctcattccatcttagttcttcatcaagtccatagataaaatcctctctaagcgtttctgaagtatgtatccctgaacaaatttagtgaaataaaatcattaatctgtgttgatcccattttgccatacctttcactttacctcactgtctccttttgtgaaatattttaagaaagcaacgtccctcacaggactgttttgaggaatgcctcatggctgtgaaggagtttgtacaatgcaacattttgcttagcccttcagtacattttacttggattgttttcaagaactttattttttttgagaagaagtcttgctctatcacctaggctggagtgcagtggtgcgatctcagctcactgcaacctccacctc

SEQ ID NO: 229014 - DNA, 432 bp, Homo sapiens
tagcacatgaatagtgggtaatgatgggaagtagccacattcccgttattaacccctgccttccctgttagcttcctgcttacatgcttcaggaattgcctgggcactccacttttctggagtttcagggaagaccttagatagctgcttgttgtaccgatttaggttttccaggacaatctggtctctctttgcaccaatctggtggatgatctggacttcatctgtgaacagacaaagaaacaatgagtcccctataacctccctatttcctttctccctgggttcctaatcaccaggatcagacccaacttccttttgccctaatctaagcccctaggatccatgactgccatactctggggcatcccttgaaggtgaccattgcttagaaatatcacagtgataaatcactatagtgtctgtggggga

SEQ ID NO: 229015 - DNA, 484 bp, Homo sapiens
cagcttactacttcagaaaaatatctctgtccctcttggacttccttagtttagaaagacataataagttcctataaggatactaataatccagagaatagtagctatattaattggtaggaattggacttttgtccctctaaaacaaaatctctatattctgcttggtctaatatcctatagaacactagaagtctaaggtggactgcttccagaggtctttgtccttaaaaccatatatccatttcaccaaaagagttgttctttctagctgtcaacataaccagtgtaatcctatacagcttactattactattgcaacatctgaaaactcctccccttcattaagtcataatatgggaactgacatttcagaaaaggatcctaaaggaatttttaaaataagctttattgctccttcaacctctccatcaatcactcctcccaaacatagtgtcaaaaccaaagtctctgtagtagaagt

SEQ ID NO: 229016 - DNA, 426 bp, Homo sapiens
atgaatttttcattttctaataccattacatatatatattataatttaaggtatagtcgataatataatgttttaataatggaatagttcatggtttttaaacttcacagtgtgtgagaatcacctggaggacttgttaaaagagattcctgggccccacccccaagtttccaattcagaaggtttgaattgggacgttttaaacctccatttttggcaagttctcagatactgctgatgccagtggtttgaggaccataccttgagaaccactgccttctaatagtacaataataggtttttgaggtgggagaatcacctgagcccatggaggtcgaggttgcaatgagctgtgatcacaccactgcactccaccctgagcaacagagagtgagaccctgtctcaaaaaaataaaaatagatttt

SEQ ID NO: 229017 - DNA, 542 bp, Homo sapiens
atggccagagttaaattcaaaggtgacattaacacatttcagtgcccaataagtgatttttctgctgggtaggagtagatacagatgtgatctcagatacgtgaagctgcatacagaggggcccatccactcctaaacgggtctccaggaggcttggtttgatctactagatttggtgcctcttaaagggaagcaatacagcttttctgctgtgggttgtttgccactaggggaagattcatttctattccagccataaattagaccaaagagagggatttggtttattgctagtgcagaagttaaaaaccatcttcctttcctgagtggtctcttaattagattctttagtttttaaatgttaactggaattgctgaagtttaattcctgaaagggtttagtttttaaaaggagtacctcatttaccatattactgtgttctgagaaatctacagtaatttttgtgtaacttttttattcaaagaatggattgttaattgtaaagccatttagaaaggcgaataaagtcagatctacttta

SEQ ID NO: 229018 - DNA, 448 bp, Homo sapiens
  misc_feature (412)..(412): n is a, c, g, or t
aggaaaatcatttttagcaacaaagtactaagagggtgcatggacaaggaaaacttttccctccctaagcccatacctctagttgataatctgttcccatccccaggtcccagcaaacattctaagacccaagaacaggtttactgggaggaattcgaggcactgcagttcatgtgctgagttaaataagctctggaaatagaagctgaagaatcacaatacccaatctaatttaaccaaagtctaattagagaatttaccagaaattgagagacttgctagacataatttcctgttaggaagtagtatttttctcctttcaaatttttaaatgtttggtataatcagcaaaatagaagtaaattatcaatttaagcttaacagagatattttgttaagtaatatcacagtnccttataaataaaaaatattaattatttccagttaa

SEQ ID NO: 229019 - DNA, 470 bp, Homo sapiens
ctaagttataataaactagtaaacataagtaaagtgtttccctgagttctgtaagccattctagcaaactgttgaacatgaggaggggcgtcatgggaacctaccatttgtagttggttggtcagaattaccgatggcctgggacttgcaattggcatctgaagtggttactgaacccatttatctgtggaatgtgatgcaatttcaggcagtgtcagaattgacttgaattgttggacatccaaattggtgtctgaagaattggagaactggttgttagttttggaaaacaccccagaactttacacccattaggatggctattttaaaaataaaaggaaaataacaagtgttctcaaagatgtggaaaattgaaagccttatgcatagctggtggggatacaaaatggtacaaccgttgcactgaatagtttggtggttacttaaaaaagtaaataactttttaaaaa

SEQ ID NO: 229020 - DNA, 655 bp, Homo sapiens
gagacagggtttcactgtgttagccaggatggtcttgatctcctgacctcgtgatctgcccacctcggcctcccaaagtgctgggattacaggcgtgagccaccgtgcctggcctatgaaactttttaagttgataaatttgtattttttagatatgttctagttgaggaatgagaaccactcctggtctgaattttcatgtgttgctatataaatttgcttttaataaattcttttaaatcaccagattgttaattgacagctattcttgcagacattgttaccttattatttcttcttactatattgggcattaagtcgtttatttcaatgtgataaacatttgactatcaaggatgggggtagatagcacatgacatgagcaaaatctggttccagtatttaagacacagccttaaaaatgtatattccttttatagaagttaaaatatagttttctttgaactcggttattccttgtttaaactcaaaaggagaggatcctattttctgtacataaaattctgaagataggtattttctgtaagagctgagttttttccccatttgctaatcccttctaatttagaggaaaaaccatattatcacactgaatgttagtgatgattgcctatttgtccatatgaacacagta

SEQ ID NO: 229021 - DNA, 286 bp, Homo sapiens
tgaatatcgaaggcccagagggaaagttgaaaggtcccaaattcaagatgcctgagatgaacatcaaagcccccaagatctccatgcctgacattgatcttaacctgaaaggacccaaagtgaagggtgatatggatgtgtctctgccaaaagtggaaggtgacatgcaagttcctgacttggatattaaaggccccaaagtggatattaatgccccagatgtggatgttcgaggcccagactggcacctgaagatgcctaagatgaaaatgcccaagatcagcac

SEQ ID NO: 229022 - DNA, 156 bp, Homo sapiens
tggtggttggtgatagtgctgatgttactctgagcctgtggtgtatgtattgtggcaaacccatgatgttggtggtcttattgggaagagggaccttgggagaaaggagatatagatgatgagattgaaagaggttacagaaaaatactatcacct

SEQ ID NO: 229023 - DNA, 363 bp, Homo sapiens
ccagggaggaacaaaatgagcttttggaagttaatgtaataaaacttctttgtaaataataccttaaaaaaatctcggccaagtgtggtggctcatgcctgtaatcctagcactttgggaggctgaggcaggaggattgcttgagcccatgagtttgagaccagcctgagctacatagcaagactccgtctatataaaaaataaaaataagttagctgggtgtagtggcggacatctgtagtttcagctacccaggaggctgaggtgggaggatggcttgagcccacaaggttgaggttacagtgaactgtgatcgtgccacttcattcaggcctgggtgatagagcaagacccagtctctta

SEQ ID NO: 229024 - DNA, 1139 bp, Homo sapiens
tggggataaaaatgttttcctgataacagtacctttacgtgtaatggttcatgtatcgtatttattacagtgcctgttttatggtaaatattcaatacatattagctgtttttataattaattcctcccactacatcatgatccaaactgactcttttcttaagtgatggggaagggaactgaatattttaaggaagtagctataaaatatgatttcaagttgttctgtagtaattttggtgttccataaggacattttaatgtgaaaaagatactgacagaatctatacatggtttgaatttattagtttctaaactatgaccagtattagcagatttaaaattcataattatagcaagaaaacgtcaaagttgtttaacagtgttaaaatttgaaactgtaatgatccagaaaaatgaaataccaaaccgataattttgggaaaaaaacaaaacttgagtggcattatgcaggccatttactttttaaatgtactcaatataaacaggaatcccttctctccaaatttcagtttttcagaatttgggctgtcatttgaaacacttactttgggcactttgactgttaaagaagcaaagggtatgctaagaacttcaatgagtcttgatgttagtgtttttgtaattaggtggaatctcctaccttttcatgaaaactgggtttaaagcagtagctgctgggtccattctaatgataatctcaaaaatgtgactgacttgtaaaaatctacaattatttattaatgtgagactaggtaaagtatgagttgaaaaactaggaagaaaggcagagtggtgatttttaagcttgtataaaggaaggcccgctttgggtactatgaggtacctttctcactcagaggcatgctgtgaggatttgtgacttttaaatcatttagctctttttataactttgtggaattaaatctaccacgtatttcaagtgtattcaggatatgaattttcctggtagagagttttaacagatttttttctcttaacccttcattgatgaccaaacaattttgttgtctgtaataagaaagtactcggttttgtagggtgtcagtccttaagaaaatgttaggtagtcatcaataaaatagcaacaatctctg

SEQ ID NO: 229025 - DNA, 756 bp, Homo sapiens
tggggtggcatgggcctgtaattccaattacttgggaggctgaggcaggagaatctcttgaacctaggagggagagagaggttgcagtgagccgagttcgcaccattgcactctagcctgggcaatagagctagactccatctcaaaaaatatatatatatacacacacatacacacacacacacactaataattgttaaacaaatgatagagtaaatgatcccagatccttttttatttttctctgaaaacataccctttccccagagttcatccaaaggcgcaactctggtgttcaagctgatctgtttctgttcttactcttctggcttcctattcccagagcctttaaattctggaagaaatcagcctacattctttctagcaattttatgaccccagtttcattaaatcattctcttagcacttcaaaactccatctgttccccaacatgactttccactgagcctagctcaactgcatgcatttcatcatcatccactcctttcaacagcttcacagtgcataaaccacatatgtacctgtaagaccaccaccatatttttcttaccttttcttacattaaaaacaaaaaacaaaaaacaaaaaaaacaaggctgggcatggtggctcacatctgtaatcccagcactttgggaggctgagatgggagaatcacttgagctcaggagttcaagaccagcccgggcaacagagtgagactctgtctccacaaaaaattttaaaaattagtt

SEQ ID NO: 229026 - DNA, 419 bp, Homo sapiens
tccctccgtcctggccatggctcggcttctccgccgcccttcccgctgcttttcggccctgctcggctcctcccgcctggcctcggctcctcccattggccttggcttttccggttcctctcggccgacctcggctcccaccacccgtctttggctcccctcgcccagccttggcttctccgccgctcctcggctcagttcgttcagttcggctttctccgcccggcttcagttttctccgatttcgccgcttcagttcggctctttccgcgtctccccatggcaccctgggctcggcgtggctctgggtctggttgggtccttgtcttagtccgggggagttgcactaattgagttcccgtcattatgatatggaggtgccagtgtctccacatcctggtcaatctgttatcttttta

SEQ ID NO: 229027 - DNA, 281 bp, Homo sapiens
agaccattttatattggaattgagaaaaaaaaaacatcatagtgagggtcaaaattagacgttaagttccagatgtttttaaatttgctttagaaaatcatctttcttattttactgataattgagaatttatcatccaagacatctgcaatttcagattttaaaatttctacaaatgctataattgtgactaaaagaactttctgcatacaatcgatggcaatagctttttggcttccacacacagagtcattaagaataaatgtcagtatttgtaatgg

SEQ ID NO: 229028 - DNA, 511 bp, Homo sapiens
aaaaatagatgaaagtactacggacgtaaaatagtttcatgatatttaaaaccacggccgtattttcaaccagcattcattggaaccggaatctgtatcttggaactgaaaagcgctgatctgaaactaaaccgtgggtggggccctgacgccgtcccctccgtggcacccttccctccgggccagcagagggcgctcaacgggcagtcaaaggggctctcgcaggagtcctgcctatacaaacattttattttagcagggaactgagttgtctatttactcaccagtgtttttatttagccaatgcctttctttgaatatagatgtgctgattagagtgctgtattgttccctctctttatgagccacacatataatgcatcctccatgttgtctcatttgagtttcctttgtgaaatgagaatttagagacagtgtaaaacatcttgactaaagaatcttagattctgtactcataaccatcaaatataattcaacaacacatttaaag

SEQ ID NO: 229029 - DNA, 421 bp, Homo sapiens
tacccaggataaattctctgcatagcactttatactttctaatattttcttgccttttacgtttatttattttctgtctcctcccatttggggaaaggggagggagagcattaggacaaatacctaatgcatgcggggcttaaaaccttggtgacaggttcataagtgcagcaaaccaccatagcacatgtatacctatgtaacaaacctgcacgttctgcacatgtatcacagaacttaaagtaaaaaaaaataataataatttaacgtgtagatcaatatgaaacaatggtcaaatacatcatgtgaagtgagccattttcaatatgaagaatttgatacaatttttgtaaaaacagattctatgtgtgtttatatatatttgtattcatagagaataaattacaaatgtcttcatctc

SEQ ID NO: 229030 - DNA, 155 bp, Homo sapiens
ttccatggagccatggcattgatccaggagctttcaccttttatgtgaactttggtactgtcaagacagagacaattttgtttacatttacccagatacgtttcattcctaagaaaagcctcttggcaatacgtttattcagttctgagaaatgg

SEQ ID NO: 229031 - DNA, 485 bp, Homo sapiens
tcagaaggtggtatactagaaatcactgtactatttttacatcttttctgtaaatctaaagtaatcatacaatttaaaagtttattagagaagaagaataagaattggacttgtaactaaggggtgtgttgcccagtaagtgacagaaaaaaaaaatcaatttgtttattcttctttttcttacccatactgagaataagggctctcaggcactgaaggctgcacatcttatgattgcatctgcatgaaggtcaataataagcagagctaaagtgcagtgctggaagccaggagggcaggcacccttaaagggcatgacagtgacaggggtgggggcacgaggaggagaatgctaaggttatagacatgccctgtttcttgctctggattctggttacatagatgtggtcacctcgtcgaaattcatcttactggaaaattaatatttcttcacttttccatttttgtgttatacttaaatttac

SEQ ID NO: 229032 - DNA, 101 bp, Homo sapiens
ctgacatagggtcagaacctttattgctgagataggtgacaagctcattatgcataatgaacatgtaggaatcaaggcctcaaagcattatgcccatgtgg

SEQ ID NO: 229033 - DNA, 484 bp, Homo sapiens
taaataaagtccagacaagcaacttcaaagaccaaaaggacctaagtgtcagtgttcgacgtctggctattttgaaggaagacatggaaatgaagcgtcaaacattggatcagctgagtgagattggccagtatgtggggcgggaaggggtggcctgctaagaatccagtcaagacacttacattctcagaggtggagccctgaggacatgctcaggggaacaaaaagggtgttttccctgctgttccagcaagagaaagagtaagaaagggctaagtcggccaggcacagtggctcacgcctgtaatcccagcattttgggaggccgaggcgggcggatcacctgaggttaggagttcgagaccagtctggccaacatggcgaaaccccgtttgtaataaaaatacaaaaattagccaggtgtagtggcacatgcctgtaatcccagccacttgggaggctgaagcaggagaatcgcttgtac

SEQ ID NO: 229034 - DNA, 524 bp, Homo sapiens
ccacaggccagcattcatcttcccagtctgaccctctcggaggctattacgctgctgtcgcaagatcgacgaggggagaaaaatgaaaacagtgcacagggaacaatggagggcaaatgggactcttttagaaccggatccactgatacgtcaggccaaggagaaatgaccacaagctctgaaaagtggagagctcccccagacggcaaagccagctgccccggcacctctgcacagtccttttctgaatctgcccctcaccgtgctccccacctgcacgccgtcctcagaacagattgccttgcctgacctcctgaggccgacggagatggtgatgtgacctcctttgccctccatcactgtgcctcccacacctctgcgcagctcgttcattctctctccctccactctgacttaagggaagaggaattttaaaaccaacctcatcccttcccacctcctcaggaaactcactcctttgcttaccctctctccacttttaaaaataacgatataaatgcccc

SEQ ID NO: 229035 - DNA, 478 bp, Homo sapiens
ccacaggccagcattcatcttcccagtctgaccctctcggaggctattacgctgctgtcgcaagatcgacgaggggagaaaaatgaaaacagtgcacagggaacaatggagggcaaatgggactcttttagaaccggatccactgatacgtcaggccaaggagaaatgaccacaagctctgaaaagtggagagctcccccagacggcaaagccaggtgagtgggcttccccactgggctgcccacagtaagaggccaggctggtggggatagaagggtgtctgtctgcagaaggctgggcagcctaggccccacaaaatgagaggaaggttactgaggtcattgctgcccctgcctcagttaaaaaattagaaatcctccccacccagctctgtttgtctccccacaaagcattgcagaagaaaacacggaagccgccagcactattatgcattcatgattccagcttcaaccagtcc

SEQ ID NO: 229036 - DNA, 482 bp, Homo sapiens
caggtcttcccgtgttctctgtcataatgcatttccattttacatgccatgaggacagcatttaggccaggcacagtatccatgtgattgatacccagagatgaccttggtccccacgaggctgagaagctgtggagaacaagaccagaccttctcacatggcgataaggagagattggtttgccgggcacagtggctcacgcctgtaaccccagcactttggaaggctcaggcagaaggatcacttgagcccagcagttcaagactagcttgggcaacatagcaagaccccatctctacaaaaaactttttaaaaattagctgggcatggtggtgcatacctgtaatgccagctacttgggaggctgaagctagaggatctcttgagcctaggaggttgaggctgcagtgagccataatcacctcactgcactccagtctaggtgatagtgataccctgtccctcccctcccccaaccgcc

SEQ ID NO: 229037 - DNA, 512 bp, Homo sapiens
cccaatcagcgttacttggtcgaacggcgcgtcaagttgttccctgggaaacgcagaccttctagagaagggcgaaggctgtggttgttctgggtttagctgttcacgccgaagatccccggcctgatggccaaaatggaggctatttttcgcgggcattatcactcagacaccacgcactgaattattcgtcctcacccgagactcagtttgcccaccagagcgtagtatcgcccccatctgtcaccatagcgactagtggattggagctgactcgttgccatggttgccatagtgatattctctggtagtcccgctgtgttgtgcccaggactcccactggggactgaccccaatcccgttgccatggaaactgggcctaatattgcctggcgattgggccgagattttcccctcccctctttcctcaaagacactgcagctccttccctgtcttcccaagcaaggtttgttatgcccggtcttaaatagagtccagcaaacagcctcaa

SEQ ID NO: 229038 - DNA, 540 bp, Homo sapiens
ctcagaaaccaaacctattcctgaatagcccctttctcttcagccaatttaagcaatcagtagactgttttgtatatgcaacattaactcatttggaagatttatgcttatgctgttgctctgactgagctggtcagaggattttagaagtttccaggcgaatgggtaaaatgtagggagtaagcacactttgaagtgaactgtgccatcataggatcaatgtattcaaatagacactggagaagacatttccactgtttcccatactagttacatttcattgacaatcccatggcttcaataggtgagactctactgtgtcagaaggtagaacaatgagcttcagtcttcttgaacttctcttgtgaaacctgtttccttcctggctttattaaaaaattatgtcttctgtttttggaaaagtagctgtcagaggattagagacaattcattgaattggattacttgttgtcacaaatattataatagtattgtagagcacagaccaacggagagctgttcccatttgctaggatgttg

SEQ ID NO: 229039 - DNA, 552 bp, Homo sapiens
cagttctccgtcttttggctttagcagatctgcttcatttctcctccccacaaagcctggactttgttctgggggtatccctgtttgcagtgaagctttttcactcagtgctcaatctgagcccaactccaccccacatctctgattcatagacttttgtgactgccttgaccagtagagtatggcagaagatgctctgtaacttcccaggctagatctagaaaatgccacgcatttctgccttgctctcctgcgacatccactcttagaacccagttgctgtgctaaaaagaactcacagaccacgtggagtggagcagatgggtcagtgtcccaggtggcagcccgtgtcggcctcagacctgcacgtgaggatgcccaccagagggttcctgccaccaccgtcaagtcaccccagccttaatcttccagccggcgcctcaggcattatgggcagaggtaaactgtctccatgatgccctttccaaatttctgacccacagaatccatggctataataaaatggctgtcttatgtgctcaattatggggt

SEQ ID NO: 229040 - DNA, 663 bp, Homo sapiens
ctttcaggccattgtctctcaagcagaaccttaactgagtgttcacatggccattccacccttcagttgggccagctgcttccagatgagagagagtccatgataagactagcgatttccacgggcccaaggattgtaagaaagataaatcttcatcttccatcacagtgagaaagtggagttcgaagatgtcatcagcccaggtcacacagatggtggagaccagtgtggagcccgggagtgggctgagcagagcatctggactttgagcttccatcagaccctgagatagtcacctgtcctggctgcctggtgaccctggtgtgctaacgtggcacttatcttgctctatggaggcccctgggccccctaaacaccagaacccagttgctgtgctaaaaagaactcacagaccacgtggagtggagcagatgggtcagtgtcccaggtggcagcccgtgtcggcctcagacctgcacgtgaggatgcccaccagagggttcctgccaccaccgtcaagtcaccccagccttaatcttccagccggcgcctcaggcattatgggcagaggtaaactgtctccatgatgccctttccaaatttctgacccacagaatccatggctataataaaatggctgtcttatgtgctcaattatggggt

SEQ ID NO: 229041 - DNA, 592 bp, Homo sapiens
agaggatcaactatgaagacttggttaatgtttacatcaggcacagttcttagagaaggtacaaagtacaggactgtcagctgcattttctgcaaccttaaataaatgagagacttcaaataaacttgttatatcacttgattactaaaaaataagtttatgcctttcatctgataattgtttttggttaatctaggtttaagcatgtagaacttatatttttaatatttaaaaattttcatgattttcttatataagtgtcaaatgcagcatcaatcgtgtgaaactaatgaatctctgtaagtagtgtctgatggcataaaaaaggaaactcttgattgtcttgaactacatgcattgaataacagatgtaagaagatgtgctcttgccctcctatgtgtattagtgtgtatgagctttatatttcatatacacaaacaaatatgtatcgttgtactgattataaaactgtagtacaatattcccagccagtcacaatcctgaatataccttgattttctgccctcttacataggtcccacttaacattaattttgagttttattagcaatataactgaagctgattgtc

SEQ ID NO: 229042 - DNA, 578 bp, Homo sapiens
caatacaagggacttatatgggcctgttcatgtctgtaaagttggcatgtctggaatctgattctgacatgccgagaattggtgttacatgaaagggcacactaaccaaaataaattagagcttaggaaaagagatatatgtagacaaagtgtggactttatcttgactttgtggatcaagtcctggaataaattactccacttctttcccagaagaactttacaaataagagaattcaccagaatttgtggaaatctctctctcataacctcacttaagagcagaattgaaacttgggccaagaataaattacacattgtaagactttattcagggtcttacagcaaaatagtaggacttcaatacactgtttagctcaaagctgtgatatgtcggcctgacttcatccaaaaggctatagaccagattttattttgccttgaaaagctttcaccttcaggaactgtggaaaattctgtgtaatcttctgaaatgactcagaccccaggtaatccttaagagagtagttctctgtcacccttggctgtgctaatcaagaaataaaatgtgggatgtg

SEQ ID NO: 229043 - DNA, 759 bp, Homo sapiens
tcagagagaactgagaactcttctaattggattcattgggtttctcttcactaatcctcacccaacagtgctcattaagaagcttaaagccatcaacttttttccccctagcctcatgtagcgtgatacctgattctgaaatggtctttaaagaccctcacaccagctaatggcatcaccctcgaggggctcagttttcccacgctgaccagtgggggttttccagcttagagcatcatgtttacctgctcgcggggacatggaatgagatggaatgtcctctcctcccaaggccgtttggattcctgactgtggtgctgtagtagcaggagacagggctttagccagctgtgtcctggttaagttacattccccatctggtaatcctttcgtattttatttggagttactcctagccagtttttgtcaggcgtgggagagacaggcagggtgtgaagagggtatttggggtgaggcttacccggtacatctaaatcagtgagcctcaaccctggctgtatattaaagtctctcatgtgattctaatgcacagccaagacggaggagaagtgctctgaattgggagaagcaatagcaagcagggctgagagcagcaggggagccaggtcgggtggcggtggagagccttgcctcgggaggctggggcgtggagttcccgtcccacccatcactcctgcatgaccttcggcaactctgttaccccaccagtgaagtggacagtaaggggccgtaactttc

SEQ ID NO: 229044 - DNA, 305 bp, Homo sapiens
ctcacggcagtttagggtctctggtatctcccgctgagctgctctgttcccggcttagaggaccaggagaagagggagctggaggctggagcctgtaacaccgtggctcgtctcgctctggatggtggtggcaacagagatggcagtgcggctggagtgttaggagggtggcctgagcagtaggattggggctggagcagtaagatggcagccggagcggtttttctggcattgtctgcccagctgctccaagccagactgatgaaggaggagtcccctgtggtgagctggaggttggagcctga

SEQ ID NO: 229045 - DNA, 314 bp, Homo sapiens
catctcacatgaccaagcaatgggacatgtctcttcttacctcatgaaacaccctgccgcaccccgcccccttctgccaccaccaagtgatcatccagctgacacttgaggaactttgatgatgaggagttcatcagtcattggtcagactattaaatctttccacagcttagtgagtttattatagttttcttgatgcataattctgcctgctacagagatagaattacttaaggatgtttgaaatacaggtatacctcagagatactgcaggtttggttccagaccaccataataaagtgaatataacaata

SEQ ID NO: 229046 - DNA, 436 bp, Homo sapiens
cgcagtatgggctccaggatcactttaaactagaacatcactgtcccatgttgaccatgatcaccttaaactagagtgtcaccgcctcatgttgaccgtaaccaccttaaactagagcgtcactgccccacgttgaccatgaccgccttagaatgtcaaaacgccatgttgaccgtgactgccttaaactagagcatcgccgccccaggttgaccataaccaccttaaactagagtgtcactccccatgttgaccataaccaccttaaactagaacatcactgtcccatgttgaccatgacgcccttagagtgtcaaaaccccacgttgaccatgacgtccttagagtgtcaaaaccccacgttgaccatgactgccttaaactagagcatcgccaccccaggttgaccataaccaccttttcttcttgactttta

SEQ ID NO: 229047 - DNA, 467 bp, Homo sapiens
ggggcctaatgatgtcaaagggcaccatctctcttagtttcattctcaagtaggcactctatgtaagagtggagtaggcagctccagacttaggttcttactagtttagtatctctacaggaagagtgttcctcttccttgttcttataaatgtctgagaggctgaccttcactttcatggtggggaaagggattagccttgcttgaagctttgcactaagagtagggaaaatccagggggttaccagaaaaggggagattgctgccggaccagcaaaaatgatatttttatgtcacccagaagggcggaaacatgtaacaagggtgatgggcctgcttcaggcctgggtcagctgagtccagcctccacatgggactggagaactgggtcagctgtctttgtttgggtctcaactcgaatttgaagaaaatgtaattgtaggatttctgaaacaagtttttctcac

SEQ ID NO: 229048 - DNA, 1207 bp, Homo sapiens
cttctcaccaacaaccaattctacagcaaactgtctatcctacaatttaactcaagtctgatacatcctggagtttagggcagaccccacaggttaagggcttagtcccacaagactgccccctacttcacatgccagttgcaaattccaggttgtgatctatcttctgaccagctacctataaatcagtgttatcacagcctccttcttgggttcaaaaatttgctaggatggctcacaaaactcagggatacatttaagtttatcattttactataaaggatattacaaaggatacagataaatagctggatggaaggaatacatagggaaaatatgtgaaaaggggcacagagcttccatgacctcagtgattgcatcaccctccaaacattttcatgtgttcagctttccacaagctcttcaaaccatgtcgttttgggtttttatgggggctttattacgtaggtgtgattgattatgtcagtgaccattggtgagcagctcaactttcagcctgtcctgtcctcagaggtctaggaaggggcctgctggttccaatcctttaatcacatggttggtttcccaggcagacaggtcccatcttgaggctatccaggagcccaccaggattctccccattagaacaaaagatgctcctatcacccaggaaatttcagggatttaggaattctgtttaagacacttgtagtacttaggagattacagaaagttttaggagctcaatgtcaggaaccagggttaaagaccaaatattagaatagaagattcttttagtgtctttttacaaggattttaggagttctatgtcaggaaccagggacacagaccaataagtatttctttttaattcacaattacgaaaatatatttgtagataattttcagaaaagtatgaggcagccttattttgagtacaccttgtgtgtaggagactgtttcaggcactggaatgaaacagagtatgggaaatttagtttcccaggtggaagatagaaaataagcaaacatgaaattgaagaatacttttataaggaaacaggccgacaaggacaagttatacagtacaaactaaacatgttttgtggtggccccaagtgaatagacacagatgaatttggtcttgaatgactgcctcaaggaagtgaatttgaagcagtattttcaaagtgaggtccatggcttt

SEQ ID NO: 229049 - DNA, 465 bp, Homo sapiens
cacacacacacacacacacacacacaccccactctgctacaaccacaacaaacactttgttgttcttcaaatgcaccaagctctcttcagcagtgttttgtagtgcgtataggacatctttgaaatattctggatatttaacctttgtcttcttggcatgttaaaaatatcttctggcggctgggcgcggtggctcacgcctgtaatcccagcactttgggaggccgaggcgggcagatcacgaggtcaggagatcgagaccatcctggctaacacggtgaatccccgtctctactaaaaatacaaaaaattagccgggcatggtggcgggcgcctgtagtcccagctacttgggagactgaggcaggagaatggcgtgaacctgggaggcggagctggcagtgagccgagattgcaccactgcactctagcctgggtgacagagtgagactgtctcaaaaaaag

SEQ ID NO: 229050 - DNA, 320 bp, Homo sapiens
cctcattaatcaaaatatgtataactggatgttatgcaggttctctgaaaaagttaccagaagcttttagtagaaaaatgctaacaatagaatttcatgacacaaaaattagtcagacatcttctggctttgaaaacgatatgtggcatttttaactgccatgagtcataagacgtggcgatcttttgtatactccaccaactttccatttcagcactgcatttcactatataatcatttttaagaaatgttaggtaacaattcacagtcaaatttaaattaaaatccaactatgtcactacaaaagcaaataacaaagg

SEQ ID NO: 229051 - DNA, 969 bp, Homo sapiens
tcaaaatggaattttttttattatataagtcgtatgtgctcactgcaaaaacctcaaacaatagaagcacagtttaaagcagtaagtgaaagtagctgaaaataaccctcttagcagttcatttcctcccagatcccttctgagcttgtgagaccattctctgcgctgtttaatatttgcagtttagaagacaattcctgtgagagaatgaattagagaatcaagtgtatctgagtttctttggcttctggctcctctgagtgggggcactacacatcatctgagaaacacccccaaatcagggcacacttggtataaattccattgaatcatgactctgaagagatcctggccacggtgaaaactgagggcagaaaatgcatcagccagtcatcatccaggcagcccatccctcacccatctttctgctactcaggacatcatgctgggccccacgggacatggccaaggaaacacagtctctccctgcagcttgtcctaacaacaggacagccacgcacccagctcccatgggcgagggcccaggagccctcagactcctccctcacacatcagtctccaagcctcaagggaataaatgaagtaatgaaataaggtagctatcacatgtcacacagtacaactcgagagttttaagtgatcaacacatgttagagtttaataatgataagtgaggctgggtgcagtggctcacgcctgtaatcccagcactttgggaggctgaggcgggtggatcacttgaagtcaggaatttgggaccagcctggccaacacagtgaaaccccggctctactaaaagtacaaaaattagctaggcgtggtggcaggcacctgtaatcccagctacttgggaggctgaggcaggagaattgcttgaacccaggaggtggaggttgcagcgagctgagattgcactccagcctgggtgacagagcaagactctgtctc

SEQ ID NO: 229052 - DNA, 419 bp, Homo sapiens
acaaacataagctcagcttacaaaagcatgaaatttgagctggtgaaactattgcagatttgccaaggtgaaaccactaaatttactaaatttaaatttggggaatttaactttgatgggttcctatataagccagtactgtttaaatcaggaaatggggggaaacacaggtatattcttagtaaattaaaactttcaagctgagtgtgatggcgcatgcctgtagtcccagctgccagggtggctgaggcaggaggtggcttaagccaggagtctggggctgtagccagctaccagcccacttgtgagtagccaatgtactctggcccaaggaacaaagcaagaccccatctcaaaaacaaaaacgccaacaaaaactttcatggccttacctgatcattcttaccggcacaaacagt

SEQ ID NO: 229053 - DNA, 522 bp, Homo sapiens
taaacatacacagtttaaaaataataaaatgaaaaatagacaccatgatgaaaccagtggaaagaaagctacgatcaaaacaattgattttagaacaacaaatattaccaaagataaagctgatcatttcacagtgctaaagtggtttgttgtttaagagaatatgacgatctggttcaagagcttcaaaatgcatagagcaaaaactgatagaattacaataaaaaagagagaaatctgcaactatagttagagattttaatttctttctgtccatgactgataaaagtagacagaaatcattaagtatatagaatacttggatgacactatcaactaaactgacctggttgacatttatagcacactttacccataaacaaaaatcacacttttttttcccaaatgtatgtaggacacttatcaatataaatcataatccaagccataaaacaagtctcaatacttaaaagaagtcaattcttataaagcataatttccgaataccataaaactaaactg

SEQ ID NO: 229054 - DNA, 190 bp, Homo sapiens
actaaaaaataaaaatgctggggttgcatgttaagaaataactggaactaacctgcttaatggactcctcatagatcccttggcagaaagtcatgttctctttagcttgagaagggtactagtcactgattggtgacataagtttatgccacattgatggaatattttagctgctctttatgaactgatc

SEQ ID NO: 229055 - DNA, 354 bp, Homo sapiens
aggtatacttgacccagtctccaagcctcagattggatcaagacacagcctgggctgcaaggaaggtgtgtgcactaaagaagcgtgagccgctgtgcccggccagccctgggattttaaaacaagtacctactatgcgtcaggcactgggctctggagataccatggtaaaccagggggacaacttctttgcttttgtggtgcttatcttctcattggaaagacagaaaataaatgagtaacagaatgttgggtagtgatgagtgctgcaaaaggaaaagcccagctagggggctggggcatgtgtgtgtagtgtgtgtgcatgcgtgtgcatgcatatgtgcattaagaaaa

SEQ ID NO: 229056 - DNA, 520 bp, Homo sapiens
cccatgggaattatcctcatatccctggctgcaaccacagtcactgttgtgctctttgttggattgggcttcattgtgaaagagtgtttcctgcctccattaaatccatccaccagggttatttatcatccccatgtcatggactacagtacaccataaagaggaccccagcagtgactacagttggttctagaaaaaggagacccctcatccgcctctgcaagactatacagcatgatgtgtatcctcaggcctccactcctccgccctagtctggagccctgggaccaccacatgaggaaggcagctggcccctggaataagcatgtggaggacactcagaaggatgcccatctgctctgagtgtctcctaattctgcctgaccttggttacttcctctggacaatcgcctttacctatctaccaggttttgaggaattacacacagctcaggtataagagatattcggtaagtctgatcaaatcaataaagcaaattttatctgtttttgtctggga

SEQ ID NO: 229057 - DNA, 417 bp, Homo sapiens
ctcgtgtttctcgtcacttctctggaggaaagagcagagtgagggagctacaaacaagctttagatgtagacagtctaggttcaaatcccagattagagatctgatcttgaacaagttgtttaactttatctcctttggtttccactctgtatcacagtggttacgatgctcggaactcagacttaccttgttttagttttagccccaccacttctaacttgtagaagttacttgtttgtgtttcactttttaatctacaaaatggggataattgcactatcctcataaaatgaaatgcgttaacatatgtaaagcttttagaaacatacctgtcacacagtctgtgctcaataaatggtggctatcattactattattttcacaattgccatcaataaaattgaggttataataaa

SEQ ID NO: 229058 - DNA, 652 bp, Homo sapiens
atccttgattcacagaagtttttaatattgatgaggtcctgcttagtctgtgttttgttttgttgcttgtgcttttggtgttatatccaagaaatttttgccaaatccaaagtcatgaagctttgccctctgtttccttctgagttttatagttttaggacttaaatttaggttttcgacccatttttagttaatttttgcaagtggtataagggaggggtccagcgttattgtttcacgtgtagatatacagttttctgagtaccatttgatgaaaaggctgtccattgaattgcttttgcaacttttatttgggcatatttatgtgagtctgttactggttctatattttactccattgatctatgtgtctattcctctgctaatactgtcttaaatatggtagctatatagtaagccttaacactgagtagatagatttctcccctttttttgttctttttcaaaattgtcactggtttgtttttattttttactttatgcagataatctgtactatactttggtttcatgtatcaagtagtttgttccaagttgtgctttaagcagaacaaataaattttcatattgttctttgtgttaatctgcaatataaacctataccaaattctattttgtgtatttgtttatt

SEQ ID NO: 229059 - DNA, 432 bp, Homo sapiens
cctgggtgacagagcaagactccatctcaaaaaaaaaaaaaaaaaaaaaaggcagagtgcaaattcccctggacttgagtgggcatgagtctccccaacagtgtggagggcccacagctgctccccctgctcccttggatctgcacctctgggtaggttctgtaccaagtgggctgagcccttgagccagggccagctccctccaacctccacatctccagggaggatgcggtctggctcttccaccttcagtgatgctccagatgtaatcccaggagggtgtccacacctagttacaggagtctgagagcctggtgcttcctcagggcccctgagcctcctgggctccaagtgcttgctcctgtgcgcgaagttgcagcagccgcaggtcctgtgctctgggagcacacaggatgattgaggtgagactga

SEQ ID NO: 229060 - DNA, 393 bp, Homo sapiens
ttggctctctctcctgtagcacactggccaggccctggagctcaggctgtcgctgatcacacccagctcttgagagcaaactgaccaccctctccaagggacccacctggaaacttctgcgatccattctattcgttcagactgtaggctgagagtccctttaaactgcactgggctgctatctcttagcatgtatgatttgagtgttcctttaagtgctctacaaaagccagaaagcaggcaggggaaatcctaggtctaagaaattaggaaagctttctatttttgttgggtaagtttgattctgcaaatcattttataaaaatacactgagaaagtagtctagcacacttgctacatttttaacattcctaaagttgcccacagtactta

SEQ ID NO: 229061 - DNA, 944 bp, Homo sapiens
catttctcaaactccccacctcaggtgatccacccgcctcgacctcacaaagtgctgggattacaggcgtgagccacctcacccggccccaaaccctcatttctactagggccctgcactctaggatacggtgctgcagccaacatttagaatgggaggtgacaaggtatctcccaagaggagaagggagcgaggcaagggcaggaagaagaggcaaagcttgaaagttgatagaaactcctcacaaaagctccaaagccagggaaacccaactcagagagcgggagatgtgggggtgtgcttgtgtctagcccccttcattccctctgggtggcccccgctgccctcagagcccttcgggtcttcatgccctcctgaaggacttccttccccgaccaccacagtcctcactgtctgtcctcggattctggatccccctactttcctgggtttgctcctggtgcaggttatttccacgggggccatctcaggttccccagggtagccccctcaccaccccacccggcccccagacctgcccacacttgttgaaccaaaccaagcaccgaggtctccccacacaagcagagctgggggcctgatcctcctggtacctgcacttcctcttgcccatcgggtcctcgaccaaagcccagcccctttcctacctctgctgccacgcgggacagcccagaccccatccaatcccagggatgggtgtccctacctacctgccggcagcagaagacagccgagcagcccaccggggctccttctgcagatgagggaaagcccggataaggcccccaaggtcacaaagcgggctcctggggcgacgggccgagcgcctcccgccccccagggggcgtccggagccgcctcctcctgcagagacctagacgatgacagcccctcctggatgggtgtgtcctgggggcggccgc

SEQ ID NO: 229062 - DNA, 530 bp, Homo sapiens
  misc_feature (488)..(488): n is a, c, g, or t
  misc_feature (516)..(516): n is a, c, g, or t
  misc_feature (523)..(523): n is a, c, g, or t
attgacattatttccttttattttttcctaaatccattttgggaattctgaatacaatctaaatgatctgcaggtttccatttcaagatactgggcagctccacaaaccacaaacactaaacccctccttaccagtcttgtgctgggtgctaagcacatggtaaagaatgggacatagttcctgcaacaaagtaacatgcagcctaagggagaaacagatcagatctaaaagaccctgagtaggccggactctgtggctcacgcctgtaatcccagatgctgtttctctcttggaatccactttccactctacatgtccagccatagtggattacttgtactcctacaaaaagcctctaattctttgtattttggtgttccttctgtcataacctgctactcttttccctcctgggtgacggtcttcatccatagcttaaatattccctgctctaataagacttactggtgggttcttggccttgtangactaataaaagtagtgtgtagtagctnatattancaggcct

SEQ ID NO: 229063 - DNA, 528 bp, Homo sapiens
tgggagagaggggagtctttttatgttgcccaaactggggtgcagggactagtcacaggggcaattatagggtactacagcttcaaactggtggtctaaagggatccttttgcctcaggctccccaaaagctgggattacaggtacatgccagggcgtttggctccaatcctttaatttcaaatgggaaggattacatataattctctcaaaggttatactgcttttatcttaaataaacataaaaagagcgcaaagccaccgttttttttacaaatatccattatgaactcaaatggggactttgcaaacttcaaaaatgtatcaaaccctaacctgggatctttagggccattgatcaattttgggcatacagtaagcactcaataaaagttgttgaatgcatgaaggaatgcataaatgttctttttggatatttagccttactttcccgtcattcagcttagatgacctgagaagcacttcctcaaaataaccctttggctcaccatgagaagaatgcctggca

SEQ ID NO: 229064 - DNA, 517 bp, Homo sapiens
ctaagtgagaaaccatgttgtacatcctgatttaatcatagtgagtcaccaaaagttcttgatacaataaccatttatgagtaccttctgtgtacaaagcactttactaaggataccaaggggtaaattttcagtaaataaatatccaataagtagtacctatcagtaaatatgatcttgcctcctaatttaccttcgcttcctagtcacagtcactgttttggaggctacttgccatggcataaatttatataaatattgccaggaattcattgtatcagagttgaagttttaaaactaaggattctgatacttgtctaagctcatgattcatcagaaagtcatcctgtctattcaacttgcacttttcttgaagattatcacttgaatctcaagaaaaatatttcaaggcctcagcatatctgaaaatgccagccattgagttcaatgtcctgattggagtgatttgggtacaacttggccaaaaaacaagagtacaatttggcaaaaaaaaaaa

SEQ ID NO: 229065 - DNA, 189 bp, Homo sapiens
aaatgtttattaagcctgacaaaattcaaaagagagaagacacaactcactaatatcaaaaataaaatgagggtcatcactaaaggtattacagtgataataagagaatactatgaacaatttacactcatacatttgaaaacttagaagaaatggaccactcacaaactaataaaattcaactaaggt

SEQ ID NO: 229066 - DNA, 393 bp, Homo sapiens
ttggaaatggaggcatggtgggtgtgttgggggagggcttatggaatgcaggcaatattctatttcttgacatgggtgatggtttaggtgagaattgcttaattcgtatcaaaactgtaaataatgttttacatatttttctatatattatattgcacagtaaaattgctaaacatctatctatctatctatctatctatctatctatctatctatctagttatctatctatcttatagtaaatctactaaaaggacatgtcaaaatgttagtagtagctatttggaggtgacatgactatgggtgatattgttctttattttttctctatatgtcctaaatattcttgtatgtgcatataataatttcataattaaaaaaaaacacgtttta

SEQ ID NO: 229067 - DNA, 420 bp, Homo sapiens
aggcggaggagagcccccaggttttttgcgacgtgaccgtgagccacgtagctgcttatcttgcatgagttagaatctcttcagtctacacaccgcttgggccagcccatctactcgtctggttggaattataaatgactcccagatctttatttccgacccagaatctctcctgagcgggcgactcgctatccagccgccccctttgctgtcgatttggaagtcactcgttcaacagctgttcattgcgcctccctgtgccaggcattttgatcggtgctagtggtaaaggggatgggcaaggttcctgcctttagggcactcacagtctagcggggagactaactgtaatcaaataagcatactaagacatgtacaacctcaaacttaaataaaggaactgaagttataggaacttca

SEQ ID NO: 229068 - DNA, 353 bp, Homo sapiens
actttatcttttataaattaaaattttgatttctatatactttttcctgttttatgactatttcacatcatctcttcgatttatgggtggactcttctttaatatatctaggagaatattaactagagcttctttttacatgttcttctactgcccacattaccaagtccagtaattgttttctttcttattatggcctattttgcctttcctcaaatgttggcaattttttgtttggttatttgcgtttatcgaggaatggctggctgactaggtagctggtgagggttttctttgcattggataggtttcttgactatagctcctcacctatgaatatgagggctaagtga

SEQ ID NO: 229069 - DNA, 412 bp, Homo sapiens
aacttcatccaagccacatttcatccagtgcttcgggaaacctgtgaatcgtgcatgcttttgtgtgctgctgttacttttctcccctctggctctctgtctggcactttttccttgggaatcctttgaaataaatctttattgattctactgattacattcactcctggcatttttgacagccaggattgttaagtttctgaacagtaccaacattctcctctcatccttacctccgtctccctttctgagtaacaaataataaatagcacaaagtttttaagaacggtccaggccgggcgcggtggctcacgcctgtaatcccagcactttgggaggccgaggcgggtggatcatgaggtcaggagatcgagaccatcctggctaacaaggtgaaacaccgtctctacta

SEQ ID NO: 229070 - DNA, 433 bp, Homo sapiens
caggtctctcttgaggtcagaatgaatgttattgacattattgtttgtattgtggtaaggtatacataatggaaaatgtaccattttggctggacatggtggctcacgcctgtaatcccagcactttgggaggccaaggtgggcgcatcacctgaggtcaggagttcgagaccagcctgccaacatggtgaaacctcatctctactaaaaatacaaaaattagccgggcgtggtggtgggtgcctgtagtcccagctacttgggagactgaggcaggagaatcacctgaacccaggaagcagaagttgcagggagccgagatggccccactacaccccagcctgggtgacagagcgagactccgtctcagtaaataaataaataaataaaaataataaaataaaatgtaccattttaaccatttttaagtgta

SEQ ID NO: 229071 - DNA, 446 bp, Homo sapiens
catgataaagaggacatctccagatgggggacatgacagactacccagcaaatgattttggagaaaacgcctatacatttgaaaattaattatggttctatttcacactctacccaaagacaaatttcagatggaccgaagatctaaacataacagccaaaacaaagtattgggtaaaatctatgtgaatatttttgaatctcaggaagaggaggtgatcctagtgcatagcacaaaaccccaaaggcataaagaaaaagatggacaagaaggaaatccaatgtttttcagtttttaaaggaaaaataactaaccactgaagaaaagccaatatatatacagggagaaaaactttaagatatatcaacaattaataccctaaaatgtgaagtattccaatgaatttgtaaaaaaattaaacactctattaaaactttaacagtgta

SEQ ID NO: 229072 - DNA, 287 bp, Homo sapiens
tgaatattttcctgaatattctgaatatcatcctgaattgctgaatcctgaatcatccatcaatcctgaatatcattcatgaattgtgcttcatctgacttcctaaagataatggtttatagttcaaagtttaaaaagcagtttatctaaaagaatgcttgaaaattactgaagctaaaattaatcatcctacatttaagcaagcaatttaaaaacttgttttcaatttccaggttatttttaagatgtaaaatgacaatttccattgtatgtttctcttctactaa

SEQ ID NO: 229073 - DNA, 450 bp, Homo sapiens
tatctctaaaaaaaaaaaaaaaaaaaggaaatccagcctggatatggaggtctgttctatggacacattacttaatattaaagggtaagtattaatagtaataataacagcagctgacacatagtgctttctgtatgcaaagcactgttctaaatgttttatgtgtatttatatatatttgattctcataacaactctatgaggtaaatactattattatctccattttatagatgacgaagctagggcactgagagctccagtgatttgcctgaggtttccccatcattaagtggtggagccaggtttcaaactcaggcagtttgcctttcagtccatgctgttaatcactgtgccatgttgctgctcattcactccaagaagattaatgactagagtccctatcagcaggaccaaaataaaatgactctcccaaggagctcagaaatg

SEQ ID NO: 229074 - DNA, 392 bp, Homo sapiens
caccctccttgcaagaaaaatgaattccttggctatactcactaggagttgtacaccttttgccaacctctggaattgactgcatttttaggggaagtttccttttctctgttggtttacttctacagggtatacttctgatttagtggtatcactttcagagtgatgccttgatattacccatgcttggaacgtgttgtttggagtaaaagtgattttttttctcttcattctgaaaatcttttaaggtgattcaaaaattaatagtttgggaatagacacagtggctcatatctgtaatcttagtgctttgggaggctgaggtcgggggatcacttcaggccaggagttcaagaccggcctgtgcagcattgggaggcatcgtctctaca

SEQ ID NO: 229075 - DNA, 363 bp, Homo sapiens
accttcttttccaattttaataataaatgggcaagtgcaacagccacagcctgaagagggcatggtgacctggagtttggagctctcaagagtgagagtctgggtcacctcaccagataagccacctagatgaggaaaggagcagaccaaggctgaggggcatctacaatgggtggtagaaaaaggagacaatgagcacctctgcaggtgtgagaccagccacagcttcagggcatgttgtttgtccttttaaccctcttatcataattttccccaaaaaaagagattaaacaggttcctggatgaactttcccagatggagcagacttactatgcagagcaaacggatccaaaaaaccaaaa

SEQ ID NO: 229076 - DNA, 448 bp, Homo sapiens
caaacttatgctgagaaaaattccaccttcctgtttttaattgctctacattttaccccaattacaaacatcaaactgtgttcattatggaatgtatggaaaatatgtaagtatttaaagcagaaataacaacaacaatattaattctgctttctacaaaacaccatcagtttttagtgtatttccttagtcttttctatttagacatgctaacagatgggaagtatagtcatatttttatatacttaagattatatgcagtattgtatcctgatttttttccacttccttcataagtgtttctccacatcatcaaaaccttttatgtagtttctttatgctatgtatacagtataatttaggtatactttcctttatatttaaacattgatattgcttttacttcctgccattgtaaaaactgttgtgataaacatctttctgcata

SEQ ID NO: 229077 - DNA, 347 bp, Homo sapiens
tgaggggagttcgagcttttgctttcatcaggcagaacaaatttccgaggaatcaaactgacttcaaacattagcaattagaaaccaagaatccgctggcttgaagaacttttaatccctaaccatttccaaatgggtaaatctagggtcagtatatatcgtagctagtctgttaaaaaggaaagtcatcctgtgggatcgtgacgtggaggatccctgggtgcctaagaggcagggacgctgacgcccagaaagcgggcattgcccaccgagacaaagaaaagcaaatgattgtccttcccgctgctcttggggattaaaaaacaatgaacgaattcttttattaa

SEQ ID NO: 229078 - DNA, 506 bp, Homo sapiens
ggcaccctccacttttaaagtattctatcctaccactgccagactccaccttaagtcccaatctggtgtgatttccacatgactgaacaccattccagagagctcatctctagctggcacccctggttggcctcctctgttctaacattcctaagcatggaccactcatacctgcatgtttcacatttccctgagggctggcatctcgtacctcctccaccaggtttttgagcaagagcttctttcacttcaaccccctctggggagactctgtaagcaggcctatgggaacaaacagcatctttgtcctcaccctttacatccaagtacatctgaagatatctgttataaagagagtggatttctaaactttggaaattggaaatttccttagtccaataatcctttaggggcactatgggtcatcctggctgtatccccatctcttcagattgcccactaacctagatcaatgggcctactaaagcagcttttgttctaataac

SEQ ID NO: 229079 - DNA, 451 bp, Homo sapiens
catgtgttttttcattttcatcattttctagctgtttttagttgtagtttctatcttgtcataaaatcaagaagttgggccaggcatggtggctcacgcctgtaatcccagcactttgggaggccgaggtgggcggatcacgaggtcaggagatcgagaccatggtgaaaccccgtctctactaaaaaaaattagccaggcgcagtggtgggtgcctgtagtcccagctactggggaggctgaggcaggagaatggcgtgaacccgggaggcggagcttgcagtgagccgggatcgcaccacagcactccagcctgggccacagagcaagactccatctcaaaaaaaaaatcgaggttggtgttcttgttttcattttcaagtgtttgttttctattcttgtagtctattatacagccaataatgtaaaaaataaacttacattaagtata

SEQ ID NO: 229080 - DNA, 296 bp, Homo sapiens
ataggagatactgcatccatattggtataaataaataaatgaataaatggaaaggatgaggattggaatgcacatatcatttctacttaactccctcattaaacacttattaattacaaacggaaaagactaactttcagcagagaatcctgacaccatctcgatgaagataaaatgagcatcattagaaatgaaacaaatcaattagttgggtgtgctggtgtgtaagttccagatattcaggaggcggaggcaagaggatcacttgagcccaggagtttaagaccagcctggac

SEQ ID NO: 229081 - DNA, 382 bp, Homo sapiens
ttggggccagttctccccctcagcctggaagcctcagtggcatgtcggatctgggaggcaaggcagccggtgtggtggctgcaacccagggctgcaagtcagcaggccatcatcaagctgctcccttttggtggtgggcttctctgagcccagtttcttcacatgtaaatggaaaatggggtgctcacatgtgttttgtcagtgtctgggggctgttttggggctccagtgacagcctgtgcatggagagctgtgaaaggctgagggcagcggagagggcccttccctgaggctcaagtctggttcctcagactctgaagtttcttgcatctgtccttttgccacagagcacttaggggtggctgaggggagcacagaacct

SEQ ID NO: 229082 - DNA, 370 bp, Homo sapiens
cccgggttcacgtgattctcctgtctcagcctcccgagttcccgagtagctgggattacaggcacacgccaccatgcctggctaatttttggtatttttactagaggcggggtttcacggtgttggccagactggcctcgaactcctgacgttgtgatccgcccacctccacctcccaaagtgctgggaccacaggcgtgagccactgcaccggccacccttcaacttctttaaaaagtcatgttggtttggtttcatttcaaactattctatccctctttaaaggtatttgaatgtagaacattgttaagaaaatgaacgaggatcttttctacatgagcgccatattctaacaaacttatcaaactgc

SEQ ID NO: 229083 - DNA, 211 bp, Homo sapiens
ataaggactggaagtttgacagcagggagaaagtactaggaattcaaagcagtactctcttccaactcaagggaagtaacattttaagagaaaaaggagtctggatgtgcctatattttatccaaacaagtgtgtttctcaaagatataatttgggagccctgctttgtactataacacattacaataaaaagccaaagataagagtataa

SEQ ID NO: 229084 - DNA, 516 bp, Homo sapiens
ctcatctctacaaaaaaaattaaaaagttattcggcatgcccttgtattcccagctactcaggaggctgaggtaggaggatcacttgagtctggaaggttgaagctgccgtgagctgtgatcacaccactgtactccagcctgggtggcagaatgagaccctgtctcaaataaataaataaataataaaatttttaaaaatcataaaatttgaagcagttgagcattttaatatgaaatgtgagaccattgcacattttaatattagtttaaggaattaatgtcatcttttcaggtgtgatgatgctgtggttacacagtgctttaaagtgtttagcctttaatcctacatactgaaatgctgctggaggaaatcacatcatgtctgggatttgcttttccacaggggtgggtatagtatgtgtggatcaggcgaaatgagattagccctgagctgaagctggtaatgagaactcattgtatgcttttgtctgctttggtaaatgttaaaaactct

SEQ ID NO: 229085 - DNA, 263 bp, Homo sapiens
actggctttgaagtctggctgtatcattgtttaaccagtaaccttgagtaaaccacttaaccagcctagacctgtttgctcgtctgtaacgtgaacatgtctgtgcacatggtaaggattaaatgaagtggctgtgatacagtcttatgggcgtatagtaggtatcagataaatggccattccatccttattcttttccaattctgctaatataaaaatgatgtcaagcgattctcctgcctcagcctcctgagtagctggga

SEQ ID NO: 229086 - DNA, 603 bp, Homo sapiens
ctcagtccgaagacttagctctttggggaagccattctgacatccctgacttccccaggctgagtgaggtgcccttatgctgcattccaaagacactttgaataccttttggtactcacgcttcactcagatcccccaccagattgagctccttgaacccaggaactatatcttccttttctttacatccccagggcctagcctgggacatggcacaccacagccaccccataaatctgtcttctcagcagtttcagcccatgagtcagctatcctcaagcagaaaaaggaaatcagcaaagagctattagggtgtggcacttccatttaattctacacatttattaagtatctactgttgtgccaagcactgctggtgtttattcagagataaaaaagacgaggtccctgatctcagagctcacagtctggcaaggtaaagaccctatggacaggtaactgacaggtagcatcagatgctctgaaggtacagaggagggaggggtccattcttcctgcaactggagttagtggtgcagtggtgccagtgcagttggagttagtggtgccagggaaatccttgcagagagggggttcatttca

SEQ ID NO: 229087 - DNA, 251 bp, Homo sapiens
taattccaaagcagagtccacagtgggtcttgacatcaatgtaaggggtcaaggccatcttttttactaaaggaagacagagcagaccagagcacagcagatggcgagtacgaggatgatctgagaaacttcaatttcagggtttgagtttgacgtgtgtgtttgtgtacatgcacacgcaggccacatcccattgtaaaatgtatttaatgaacgctgaggattaaataagactctgaaagcccctagag

SEQ ID NO: 229088 - DNA, 381 bp, Homo sapiens
agctgaggagaggagtatcggagatgagcccagctggaagatgcttcctgggagggcctgggggggccatcaggaggcccccagctagaaggaagctctccccactgtagatgaaaatggcttccagctcttctcactagggctctgtgggtgggggctacaccgatggggccaagaagggaaggtcacagaaactcaggacggaccccggcccctctctcctccccacaccaacctggaccttgctgtcagagcccctggtgtgaccatcccacagcaaaaacatccagaccagcccagtggcaagggacccccaccacccctcttctgaggagaccgcttttcccaccaacggaaataaaagcaccgcaaaccagggaa

SEQ ID NO: 229089 - DNA, 425 bp, Homo sapiens
cttgaccctttctgttactgcaacttttctttgaaagcagaccaaagtaaactgccttaagaagagccaaatcattgtgataatgacacatggcaggaaggatcattttgagggttatttgacataatatgtgctgtcagcacagtgcctcacacagggtaagccctcaataatgtccttgttattgatcagtagtagccaagatgtcacagcttactccctgtgatctcaaatcaggactcaatcctgagaatctggcaattgcttaaattgtagccttcgtctgccccatgtaaatagttgctgtgtatgttattctgttggtactttgcacaaaaatattttctcaattttttaaaaaattgttttccaaactgagaatggtattaatatggatttatgtaaataaagggctcagagataaa

SEQ ID NO: 229090 - DNA, 479 bp, Homo sapiens
ataattagcacatttacgaatcaatgtgtaatggtcacatgtagattatttgcttatataatctccttcatatttgtttacataaaatctccttcctaccttaattaaaaatgtatgcattgaaaatgatggtcatgaagactaacaggaagaaacaagcttataaaaaaagtatagttttatttacctaattattataactattaaaatatgtatttgaaataagatcggaagggggatattcagaagtgatagttatgtttcagtattatagatgatagttataatgtttactctaagtgaattataacactgttatattaccataaataaaaagtgagtacatgatgaaatctggctccttgtccaaaatggaagacttatggatatgtaaacatattttcattaatttataaccataatgaaggcaaagtctctttactaagtatttgagctacatataagtttacagaggatta

SEQ ID NO: 229091 - DNA, 363 bp, Homo sapiens
agttctagtgccctctccttccccattctgtgcggaggcccagcctgccccaggcctgcccacaggggctgccagggaccaaggcctggctctggattagaggtcaccagaccacagatgatttgcacaccatttttttcaggacttgtattatgtggaaaagtgtccacggtcaggggctacagacatgtttctcaggctgtctttgattttctgctctctctctctctctctctctatctctctcgcctacaaataaatgaggacctgatttcccaagagatctgggtctctttcttcttcccgcggctctgtcaacagtggcctggggcctgtgaaagcgggcccttctccctgtctaat

SEQ ID NO: 229092 - DNA, 376 bp, Homo sapiens
tctaaagatatgattagactttgttaataatgttcaacttttcacaaagatggtgagtgccatcttaaaacttattggagagtggttttatatttagatttatataactggttatgtgaatatatttaaatactggggaaattccttcactgtctcaaaaccatgcaagattcacatatattttgtgtttatttgcttcttaaaggccagggttgaagataaggtagcaatgtttactttatatttttggccttaactatgccaatctaattagaattccctgtatttaaaatggttccttttacttattgaatggtattttagtgtggtttatgtgtaatatcaaataaagattatttaacacttaaaaaaataa

SEQ ID NO: 229093 - DNA, 478 bp, Homo sapiens
agttgccttttgattgagttcttgcaaatctcacaacgactttattttgaacaatactgtttggggatgatgcattagtttgaaacaacttcagttgtagctgtcatctgataaaattgcttcacagggaaggaaatttaacacggatctagtcattattcttgttagattgaatgtgtgaattgtaattgtaaacaggcatgataattattactttaaaaactaaaaacagtgaatagttagttgtggaggttactaaaggatggtttttttttaaataaaactttcagcattatgcaaatgggcatatggcttaggataaaacttccagaagtagcatcacatttaaattctcaagcaacttaataatatggggctctgaaaaactggttaaggttactccaaaaatggccctgggtctgacaaagattctaacttaaagatgcttatgaagactttgagtaaaatcatttcataa

SEQ ID NO: 229094 - DNA, 898 bp, Homo sapiens
gcatgagccagcacccctggcctaaatcctcttcatgtctccaaagtccttgcctttctttcctgtcctataaccacctttcctgtcctatatcctgtccttgcccttctttcctatcctatatccacttggctattagtgctcatgtgactttgtgtaaagcagagataattggaaggcaatcattggacctctttttcgtcattatcctccccatccagtttaggttctcattctttcatttggttctccttcttccattgtgggcattataaatgatgcctataatccacccacaccaacactgtacatgtttctactgatccatgtcacctgcttgaagaccctggctccttgctgggcacaggaccaagtctgtaccttgacattcaaagattttcaggctgtgcttccactttcccggaactcttcctccaccggtcctgcctctgcagcatcgtgagtctctcctggggtccaaacccaccaatccctgcctccagccttgcccaccaccctatcccttacccctccccaccatcagcctcccaaccacccttccaggctttagacccacttcatccactgacaacagagctcacatgggctgggctggtatcttcctttagttttgtctgaagatcaaactgtgggagaaatgttatgtatgaaggcctagctgtagtctcaatgcagtgccaggaaataaacttcaattcataactctgccataagggatttgttctttccatttgtcatcacggctatgatcctgagagggatcctcttatagcaaagaatggtgccagaagagaaccagggtgaattgtccggtcgacagttctaatttcttaccggcatacctttgggcttcctgagcaagcctgccctccccagc

SEQ ID NO: 229095 - DNA, 496 bp, Homo sapiens
tttggattctagaattatggccctatgcccaacttcaactgaaatgaaatgatacaaagaactccacaaataactgtcaatccttggatacagtttatatatttcataattccaattagatatcatcgctttgagtccctgccttaccctatttcagtattacccaaataaatagacacaactatctgacagctatagcgtttgacttatggcttataaatcagctttattatttcattttcagctctgtttgattgaaaccctttttggtcaatttatataattctttttggagcaatttttcctcctttgttatataatcattttagagcacgttccaaacattaccaaatccagattttaggtatcaaaagtcaatactcttgatattagtatctgtgtctcattatgttgactcttcatgtacatctcactactttttaaaaaatatttttatttgtaatttttttggtatgttgtaagtgtatatatttat

SEQ ID NO: 229096 - DNA, 90 bp, Homo sapiens
aaataatctttaggtttaatgagacctcaagaactagaccagcttgaagcatgccatcttacctagttacttaagaagctagtttttcct

SEQ ID NO: 229097 - DNA, 207 bp, Homo sapiens
cataggaaatcaggtatacctggtctcacaggaagaggctgtttataatctagattcaaggccagccaatatatatgctggtgactgaccagtcaaaattttgatggctcaccttgaaacacaactataaatagatggttataggtttcagaccttcaaggtcatatggactgggagacaaaacagtggctaatttggaccagtggc

SEQ ID NO: 229098 - DNA, 417 bp, Homo sapiens
attatagaattagtaagttaacattgatgatgtgttatctagtctatatatcttactacattttcaccagttataccactaatgttctacatagcaaaagaaagcttttcttggtccagcagacaagctgggtttatgagttgtatttatttctcatgtgtttttagtctcctttaaaatggaatgatttgtcaatctttgtcttttcataactttgacattgaaagagtactgggcaattttttgtagaatgaccttaaatttacctaatgtttcctcatgactagattcacattaggcatttttgcagcaaactccacagaagtaatgttgtatcctactcagtgtgtcatatcaggaggcaaatgatttgtatatatcctagcttgtgatattaaattttttcacttggttaaa

SEQ ID NO: 229099 - DNA, 947 bp, Homo sapiens
caagatcaaacaaatcatgggtctgattgagattagtgaacagccatccttgttcttaattcaagtggagaattacttgaacatctcagagatgactagtgcttttatttttttaaatatgtttaaattttaattaaatatatagggacggggtcttgtcatcttgcccaggctggtttggaactcctgggctcaagtgattctcctgtttcagcctcccaaagtgctgagattacagacggagccaccatgcctggcctagagtacttttagagtttagtctcatttcagttactatctacatttatcatcttttgccagtgagtattaaaacatcaagaactaaatggtttgaccctaaaacctccacttaatcccagttacctatgaggaatacactattagaacagagagcagaagcatgattagtttcttttagagccccctctgatttttattgaacttgctcctactcctcttgagcttggcgtatgcataggaatgtttattttacctgttttaagtgacgtttacttggaagcatttgagtagtttataaatacatggtgtcatagtattggcttgtgtcaggaagacttgcttaccacaaagcagtgaagtctcagtggaaagctggcccctggtctacagagtgacccagagctgggtcatggctggttcaagagcgtctcacattcgctgtctatcttatactgtctggatcttgagtttttgcatgtgataagccatccactttttgggaatatatatgctgtctctgtcactgctatctgggattcagtttctagtttctgaccatagctcctcactcctaccttgtaggctcctagctcagtccctttctctccttctggatatttagttaaaagccttgccatcagatcaaaccggaaacaaaacttgatttgagcaaggtctgcatgtgt

SEQ ID NO: 229100 - DNA, 892 bp, Homo sapiens
caagatcaaacaaatcatgggtctgattgagattagtgaacagccatccttgttcttaattcaagtggagaattacttgaacatctcagagatgactagtgcttttatttttttaaatatgtttaaattttaattaaatatatagggacggggtcttgtcatcttgcccaggctggtttggaactcctgggctcaagtgattctcctgtttcagcctcccaaagtgctgagattacagacggagccaccatgcctggcctagagtacttttagagtttagtctcatttcagttactatctacatttatcatcttttgccagtgagtattaaaacatcaagaactaaatggtttgaccagcagaagcatgattagtttcttttagagccccctctgatttttattgaacttgctcctactcctcttgagcttggcgtatgcataggaatgtttattttacctgttttaagtgacgtttacttggaagcatttgagtagtttataaatacatggtgtcatagtattggcttgtgtcaggaagacttgcttaccacaaagcagtgaagtctcagtggaaagctggcccctggtctacagagtgacccagagctgggtcatggctggttcaagagcgtctcacattcgctgtctatcttatactgtctggatcttgagtttttgcatgtgataagccatccactttttgggaatatatatgctgtctctgtcactgctatctgggattcagtttctagtttctgaccatagctcctcactcctaccttgtaggctcctagctcagtccctttctctccttctggatatttagttaaaagccttgccatcagatcaaaccggaaacaaaacttgatttgagcaaggtctgcatgtgt

SEQ ID NO: 229101 - DNA, 317 bp, Homo sapiens
ctggccaagagaagagaagatggagcggccattttgatcatgcctagtcccagaatatatcagctgtgaaaataagtgaaagaaagattttcttatctccaacatttctgggaaggggtgtgtctgtggattttatgttactggaaagagacaatccagtagtccactttgtcaggagtgtttcaaacaacatctgtgaacccactggacttcaagctcctacaggctagagatttggtctatttcatctgcattgtgaaaggtcctggagactgagaatcaggaattactagactataatggatgagatttataaa

SEQ ID NO: 229102 - DNA, 663 bp, Homo sapiens
ctgaaatttccaaagggagctcttgccggtgcttaaaaccaaaactcctggacacttagaaaattccatgaatctagcacaaaatatccattcttgcccaagtgtatcccctttctctccagcttaatcttttttttttttttttttttaaagcccaggccaagggtacttttaactggaaactggggaggagggaagaacactagcagggagctaagaggcaggttgctgggtaagccatcctgctcctacctggtgcctgtatctacattgctgagtgctgtgcgccagtgcctttccttcatctgcagatggagcccatctctttccacctgggtgaggagaccctctgctactccaggggtaaaccttaaagaaggtgtcttgaagagcccaaaggacactcacgtgctaaggtgtccattttatgcatctttaaaatattttatttaaaaaaaaaaatagccctgccctgtcttagtgccactaacggcccagttccatccattctgaatggaaaagcggagactgccagcactttccttggtcttccctttgtctcccatgatgtggtgttccctcatccctcccatccatttcactgtgtgtggatggatagcagagggtaccacgcattccttgatgcagtcctgtgtgattcca

SEQ ID NO: 229103 - DNA, 452 bp, Homo sapiens
acaggcaggtggacctgggccttggggaggcagtcctgccccagcaggacccttgacccaggggaggcctgtgcccttttctctttctctccaccctgcccttgcggttgtggggacaggcacgcacgagtccctatcttccaaatggaaagaatagggtggaaggagctgggagcagtggctcacatctgtaatccgagcactttgggaggctgaggtgggaggatcgcttgagtccaggagtttgaggccagcctgggcaacatagggagactttgtctctacaaaaaataaacaaaactggccaggcttagtggcatgcacctgtagtctcagctacttgggaggctgaggtgggaggatcatctgagcctggcaggcggaggtttctgtgagctgtgattgtgccactgcactacagcctgagcagcagagtgagaccctctgtcaag

SEQ ID NO: 229104 - DNA, 231 bp, Homo sapiens
agctggatgaccacagtaacaataagaagctgcctaccagaagtgtttccatgacaacagttgggtactgtgggatactgaatttcctccccaagaactgaatagagaggcatgccagtgttttgaaatacattataaagcttttcatattttgtactctagataagccttctattttcctatttaaattaacttgggaaattgctaaagagtgaaattactttggggtgg

SEQ ID NO: 229105 - DNA, 174 bp, Homo sapiens
ttgtaacctacaaaattgtcatctaaagcagtgattcccagtctatcgcagaacaagaaaaatatggaaaaacggatgtttctgagattcatgtttttaacaacacaattgtaatagggcattgtacttgaccaaataaactggcagtcttttgttggtccttttttaaaaaaa

SEQ ID NO: 229106 - DNA, 698 bp, Homo sapiens
cctgccaagcccttcctctcttctgttctgctctcctggaaagttctggacttctctggcccagggcctcaggggactggccagccctgctcctgtgggcactgggcagagggacaaggcggaccacctgagcctgctggagggccggtatcccagggcagtagtgattagggaatgtcactctggccacatcccagcctgggcgggcctctatggggaggtccccgtttgatttggtttggttgtccacagtcagagccaagctctgggcatggagtctgggatggcaccctgaccccttgccttacaggactttgggcagccttctttggcactgtgcctcatctgtaacaagagaggaacagcgggctgggtaggacttggacagataggcactgtcgtggggacctgcagcctggccacaccatcacgggctctgagtcatctcctaccctctcccttgtagtcacagcccaggagaattctgctgggggtgggcagaggtctttgccatctgccccctacgtggctggctggcagatcaccgtggctctctctcctgggaccttgggcagtgtgtgaggtggtggggccaagaggagaattcatttttggaacagtcttgaagtgttcggaaaattgctttcatgtgctgaggaggccctgcggaggcttccagactgagctgcctgctcaag

SEQ ID NO: 229107 - DNA, 819 bp, Homo sapiens
cgtacgcattcagagatcgcattctttttttgcatccagttgtcctcactggcctgtgacgcaggttgccctacttgatggatggatgagaagagaaggagagggatgggaagcttgggtcgtacttcagggttaaggatcccagccaaagggctttcctagaaagactctctggtccgtcaccgcttttgtcaatcttcagtgttacatgttcttcatctttttttccttgtaaagtaatgatcggcaggtacttctaatttgcctgcagaatatgtattctagactctttcatatatgaatatttctaacagaagcaaaatctgttaattattctttatcttagtactaagcatctttattagctagcactcaagagctaaacctttaaaaaagtaagaggccaggcacagtgtctcacgcctataatcccacaactatgggagactgaagcaggaattgcttgaggctaggagtcagagaccagcatgggcaacatagcaagactctgtctctacagaaaacttaaaaaattagctgggtgtggtgacacatacctgtagcccctgcttctcaggagaatcccttgtgcccaggagtttgaggctgcagtgagtcatgatcgtgccactgcactccatcctgggtggtaaagcaagaacctatctcttagaaaaaaaaaaaaaaaaagccaaaaaattaatttgaaaacacaggtgtttgtatgagggagtacttactcgtgtgcttctgcttgttcaccaaactataaatgatatcagcagtttccaaacatagagtgacacaggttgtgaatgg

SEQ ID NO: 229108 - DNA, 601 bp, Homo sapiens
tactttacataaagactgggaagcatccaccagcaaaagcccagatggagaggggaggggtggttcacttcttgtctctgccacatcactcaatcttgtagaatattaggtttctcatttgtcaaaagaagacagcctcatcaagttttaaaggtgcatagtatgtataattttaaacttgaaggccaggcacagtgtctcacgcctataatcccacaactatgggagactgaagcaggaattgcttgaggctaggagtcagagaccagcatgggcaacatagcaagactctgtctctacagaaaacttaaaaaattagctgggtgtggtgacacatacctgtagcccctgcttctcaggagaatcccttgtgcccaggagtttgaggctgcagtgagtcatgatcgtgccactgcactccatcctgggtggtaaagcaagaacctatctcttagaaaaaaaaaaaaaaaaagccaaaaaattaatttgaaaacacaggtgtttgtatgagggagtacttactcgtgtgcttctgcttgttcaccaaactataaatgatatcagcagtttccaaacatagagtgacacaggttgtgaatgg

SEQ ID NO: 229109 - DNA, 218 bp, Homo sapiens
ttaacttctaaagaactttgtgggataaatacagttattttatagatgaagaaactgaagcacagagaagttaagtgctttgtccagggtaacagctcagatatggcagagtcaggatttgaaactagaccctcacataccttaactgctgtgctgtggcagtgtttttcatactgtaggttgggaccagccttctcttatgccctcaccccctgcca

SEQ ID NO: 229110 - DNA, 612 bp, Homo sapiens
aaagatggagtcttgctctgttgccaggctggagtgcagtggcacaatcttggctcactgcagtctccgcctcccgggttcaagtgattctcctgcctcagcctcccgagtagctgggattacaggcgcccgccatcacgtacccagctaatttttgtatttttagtaaagacggggtttcaccatgttggtcaggatggtctcgatctcctgacctcaggtgatccgcccgccttggcctcccaaagtgctgggattacaggcgtaagccaccgcacccagcccatatttgttataactatcttttgggaaaggatgccattcctaaaattaactcccttctggcaaatttctccctgccaggtacctaacctccccagcatgatgtttttctaccatttgccttttggattcctagaagtattttatttggatgtgactggtttgaatttggagcttttagagcaagacatttggaaagatagcatgtgagtgaatttatgtatggaatgaatgacatgtgagaaaactcttgttagacatgatgtttcctatacagaagaaaagatacaaacttgattgcttcagtaaaaacacttttagagattgtgt

SEQ ID NO: 229111 - DNA, 603 bp, Homo sapiens
gtgaatcagagtataaatcaaacaaggctggccaaacatgctgaagtagaggaataggtatgtgaggatgcattatgcttctctacttttgtatgtttacaatttcctataatagatatctgtgaatttgcttagtatgctttctgtaagcaaacatggatgaagcagcacatgaaaaagaattttaaccaacaaactagcagaaaataatgtgacagacgacttttagaggctttggagaaactgaatgctaaaggtgctgtacagccagccccagtctttctgacattctggcagtgtctttctcaattgcagctcctcatctgagccactgtccagaaaataatttgagtaactttaatcctcaattctcccaaggatagtaccattctagatcttactaatttattagctacaatggataccttagggggggattaaggcctacttttctagtgaaatcccagttgagaatggctgctaaaaactgagtaacattagactgaaaaaaagggaatattgtataaagttgtactttaaaaaagagaaaaagatgtgtctaagtgactatcagatagcaatgtaatgctccctaattgtaaa

SEQ ID NO: 229112 - DNA, 464 bp, Homo sapiens
attttgcccgcaccaatgtcgtggagttcttcccctatgttttattctggtagttttatagtttcaagtcttatgtttaagtttttaatccattttgagttgatttttgtgcatgatgtaaaataaagttttaatttttttcttctacatctggataaccaagtttcccagcctcatttattaagtagactatcctttccccattgtgtattcttggcatctttgtcaaaaatcaattgaccataaatgtgtttttgtttctaggccttctatcctgatccattggtcagtgagtctgcttttatgccagtcctaggcatgagtcttctttcatttctgatattgatcgttatgtcctctcttattcttgattagcatggtcagaatatttttaattttattgatttgtttaaaagaataagtttttgccagcttctgcgaaataggaagaacctggctgtatt

SEQ ID NO: 229113 - DNA, 381 bp, Homo sapiens
aatttcatttaaatcttgcaatactcttgagagatattatcattccctttttaccaaaaaaaggctgaatggccaagatcacataaaatcacataaataatagaagtcaaaagtatgactttaacccatctagtgttataagaaccacataatcgtcaataatttgagagtatcttaattaattaaattaaaaaaattaataaaaattttttcaaaagatgtattcaagttatcaatttgaagaaaaatgaacatattacttagaaacagccctggattagagtcccaattatatcacttaataattgtgtggtttaggtaagccatgtaaagttgctgtactacttaaatttaaaataaagacaattttacccaaacata

SEQ ID NO: 229114 - DNA, 468 bp, Homo sapiens
aacagaaggtctgtttgtttagatattaactagtagtaggtaacggtcagctgactcatggtgagatccataaccttaagggattctagcttaacttattcctacttatttttttgaactccttcaatgaatatgaattcctccaatgaattgactggtggtgtagtcctctaatttttctcttctttgataactgttgttttaaagttcagagttgagtgaattttaacatagactttaactatctttttcttctcctccagcataggaactttttccttaaaacatcatagccttttcttgatgcaactactcatattctaccatgtgctcaagggaacgtacttatttactatcttctaacattttaattctagttgaatgtattttctttacccagctttctctacttacccctttttatctttttgtccttttttaaataaaaattaaagtggttttgtgtaa

SEQ ID NO: 229115 - DNA, 653 bp, Homo sapiens
attcaatcaattgtctggtatttgtttttttatgggagccaatcacccaccatctctgaaattatgccaaagggtaactaggacctgattctaagctctgttaattagacagtagcctcaacagagataaagtaattcaaataagaaaacaccatatcagagactacataaatgggaaaaaaaaaggaaataaaaatttaataactactatgtagcacacccatatatactggaatttgatccccctaactccttgtagttgttgcttttatcttcatctggacagatgctgctgctgcaactcgggttaaatagctgatgagtgacagaagtggaactggagcccattactgcctaggtcccaagcccatgagcctctcactatgttgccttgtttctctccaaattcacagaatcctacttagagacaaattaagaaaaaaaaaatctcatctttattcatcctgccatttcccattgtgaaaaaatacaagcacatagtgtctgataatatccatttctcagatgtttttctagctctcccagctaatgaccatttaattccttttttattttcacaataattattgttcatatcagatttagtattgcttcaatcatggtgctgcttgtagcactatcattttactctc

SEQ ID NO: 229116 - DNA, 381 bp, Homo sapiens
ccttgaaataaattagcagtcacttaaattattcccattttagagatgaggcttaggaaactttaataacttgccctttaataagttcatcctcgctaacaattggcagaaccaggattgaacccaatccacctgagtccctctgacagtgtcctcggtgaggaggaggtctccaggccagggcccagtggtgagaacagaagaagcagaaccacaaactgtcttatgctggcctaacatagagaacctccatggtttatcacaaacagcaaaggcaaaagaatgcctattttcctagttacaagacagatttcaccacaatgcaatactacttactacttcaccacaatgcgattcatacccttaggatggctataatta

SEQ ID NO: 229117 - DNA, 211 bp, Homo sapiens
ctgtttccccactgagtgaagcccaccctggcacccagcacggtgtggggtcagggaagccctgcgaggaggacctgcccgctgggcattaggggaacaggagcccctccccacggctcacacacaggcaggcccagaacaggcaaccaaaacatattccaagatacacctactaagtacccatagaaataaaaaaatatgtattttgcga

SEQ ID NO: 229118 - DNA, 455 bp, Homo sapiens
gagtcatggaatgaccattctcgttatgtcatctgacattgttgataaatgttgtcattttctttttatgtgtgttgtcctgtttatgcagcatagcagggatgaccactgcagagctaaaagactggcatgcaggaaccatgagccttcccctggcatccccaggataggttgacggactcaggggtctggtaggctggccagggcaaatccagggagatgacgttttggtgcgtttattgtgataatgtttcctcctgcctatcacctcctcgtttgtctggcaaactgctgttcatccttcaatactgaatgcttggtgggaatataaattagtacaacctctacggaaaacagtatagagatttcttaaagagctaaaagtagatctactacttgacacagcaatcccactactgagtatctacccaaagtaaaaggagtcattacataaa

SEQ ID NO: 229119 - DNA, 432 bp, Homo sapiens
aaaaagatagtccaaacagggcggttgagaattgtcttccagaattcagattcttaaatctgttggttactttctccttttatttcagtaaatttatattttatgagctattttttagaacttattactagtaatcttaatatatgcatggcaatatggagagtgctcaactgcctgtacaaactcatgcagtaagctctctaccatggtgaaaagaaatcctcaacctaccagttttctactgctagagaaaactcatggtaagatatatttagtgtcataagttacagtttttcttatttttaattatcactcatttcctcagaaaatatttactcatcctttatgtgatcataaaaacttgctggacttcaagattgtggaccaagcacagtatattactcttcctttctaaaataaaaaaagattaaa

SEQ ID NO: 229120 - DNA, 232 bp, Homo sapiens
ctcccccacttgcagttggcttgatccacctttcatccgcatccctaactccagctgcaagaagcttttgctgcttcctcgccacttcaccatcagatttctcttgcttggttttgttggttgatttggtcgggttgtttttcttattgtagtaagagaaacagtgtccttccttgcattggccacatcacatttttcctgtactcaccccactcgttagggctgacatcct

SEQ ID NO: 229121 - DNA, 436 bp, Homo sapiens
tgttgacttgtgctttttaaaaatccttcttaagaaaacaatcatagttatatgtttggctagtcaagtccatgccattataatgagtttgcatcagatttatttgagtgtgttaaaagggaaacaggctgggcatggtaatcctaacactttgggaaactgtaattccagcacctgtaatcccagcactttgggaggttgagacaggaggattgcacaagcccaggagtttgagaccagcctgagcaacatagtgagaccccatctttacaaaaaataaaaataattagctgggtgtggtagtgtgttcttgtattccccactatttgggaggttgaggcaggaggatcacttgagtctgggaggttgaggctgcagtgagccgtgattgcaccactgcactccagtctgggtgacagagcaagaccctgcctca

SEQ ID NO: 229122 - DNA, 784 bp, Homo sapiens
gctaaaccatggcactggctgtttctgggaagtagggcctattaaagcatgggccaaggagacggtattgtctccttcaaaagaaaatacatctctcctggggcggggtggggggtctttctaggcccccaaatagctttttgtctttctcagcctctgatgtgtgtttatatggggtcttactatgctgtccaggctggtctcaaactcctgggctcaggagatcctcccatctccgcctctcaaagtgctgggattgctggcgtgagcaactgtgcccagcctctctcttctttttttctgaaccctatctctgatctctctgtctctgtctcatcatctctatgtatctctgtcactttctgcttttattcccgtgagtccctttctgggtctctgtctctggttgtgattttcctttattacttaactctccctcaggttgtttccaaacattcttaggagaaatctgagtagcaccaagcccctcgcagctgactgctgtgtgatgttggggtgagctgtctgctctttgggccttgactcttctctgtctgtaaaatcagatgcagtaactagtacaagcaggcaggggtcccagcactggggagtattttaaaggtgggttcctccagttccacacccacaagctgtgggtcagaatctcagagaaagacgaccgggcgcgatggcttatgcctgtaatcccacactttgggaggcccagtgggtggatcacctgggtttggagtttgagaccagcatggccagctgtgaaaccccg

SEQ ID NO: 229123 - DNA, 733 bp, Homo sapiens
gctaaaccatggcactggctgtttctgggaagtagggcctattaaagcatgggccaaggagacggtattgtctccttcaaaagaaaatacatctctcctggggcggggtggggggtctttctaggcccccaaatagctttttgtctttctcagcctctgatgtgtgtttatatggggtcttactatgctgtccaggctggtctcaaactcctgggctcaggagatcctcccatctccgcctctcaaagtgctgggattgctggcgtgagcaactgtgcccagcctctctcttctttttttctgaaccctatctctgatctctctgtctctgtctcatcatctctatgtatctctgtcactttctgcttttattcccgtgagtccctttctgggtctctgtctctggttgtgattttcctttattacttaactctccctcaggttgtttccaaacattcttaggagaaatctgagtagcaccaagcccctcgcagctgactgctgtgtgatgttggggtgagctgtctgctctttgggccttgactcttctctgtctggagtattttaaaggtgggttcctccagttccacacccacaagctgtgggtcagaatctcagagaaagacgaccgggcgcgatggcttatgcctgtaatcccacactttgggaggcccagtgggtggatcacctgggtttggagtttgagaccagcatggccagctgtgaaaccccg

SEQ ID NO: 229124 - DNA, 712 bp, Homo sapiens
gctaaaccatggcactggctgtttctgggaagtagggcctattaaagcatgggccaaggagacggtattgtctccttcaaaagaaaatacatctctcctggggcggggtggggggtctttctaggcccccaaatagctttttgtctttctcagcctctgatgtgtgtttatctctctctgcattttttttaaattaataaaaacttttttttaaataaagatggggtcttactatgctgtccaggctggtctcaaactcctgggctcaggagatcctcccatctccgcctctcaaagtgctgggattgctggcgtgagcaactgtgcccagcctctctcttctttttttctgaaccctatctctgatctctctgtctctgtctcatcatctctatgtatctctgtcactttctgcttttattcccgtgagtccctttctgggtctctgtctctggttgtgattttcctttattacttaactctccctcaggttgtttccaaacattcttaggagaaatctgagtagcaccaagcccctcgcagctgactgctgtgtgatgttggggtgagctgtctgctctttgggccttgactcttctctgtctgtaaaatcagatgcagtaactagtacaagcaggcaggggtcccagcactgggggagtattttgaccaccggccgcgaaggcttatgcccggtattcccctttgggcg

SEQ ID NO: 229125 - DNA, 710 bp, Homo sapiens
gctaaaccatggcactggctgtttctgggaagtagggcctattaaagcatgggccaaggagacggtattgtctccttcaaaagaaaatacatctctcctggggcggggtggggggtctttctaggcccccaaatagctttttgtctttctcagcctctgatgtgtgtttatctctctctgcattttttttaaattaataaaaacttttttttaaataaagatggggtcttactatgctgtccaggctggtctcaaactcctgggctcaggagatcctcccatctccgcctctcaaagtgctgggattgctggcgtgagcaactgtgcccagcctctctcttctttttttctgaaccctatctctgatctctctgtctctgtctcatcatctctatgtatctctgtcactttctgcttttattcccgtgagtccctttctgggtctctgtctctggttgtgattttcctttattacttaactctccctcaggttgtttccaaacattcttaggagaaatctgagtagcaccaagcccctcgcagctgactgctgtgtgatgttggggtgagctgtctgctctttgggccttgactcttctctgtctgggattttaaggatgggacctccaggtcccaaccaccagccgggggttcggaccctcagaggaccaaccggacgccgtggaattattcccttcactccccctttg

SEQ ID NO: 229126 - DNA, 546 bp, Homo sapiens
  misc_feature (546)..(546): n is a, c, g, or t
gctaaaccatggcactggctgtttctgggaagtagggcctattaaagcatgggccaaggagacggtattgtctccttcaaaagaaaatacatctctcctggggcggggtggggggtctttctaggcccccaaatagctttttgtctttctcagcctctgatgtgtgtttatctctctctgcattttttttaaattaataaaaacttttttttaaataaagatggggtcttactatgctgtccaggctggtctcaaactcctgggctcaggagatcctcccatctccgcctctcaaagtgctgggattgctggcgtgagcaactgtgcccagcctctctcttctttttttctgaaccctatctctgatctctctgtctctgtctcatcatctctatgtatctctgtcactttctgcttttattcccgtgagtccctttctgggtctctgtctctggttgtgattttcctttattacttaactctccctcaggttgttttccatttcttaggaggaggcggcctgttctctgggctctgtttctttcn

SEQ ID NO: 229127 - DNA, 529 bp, Homo sapiens
cattttaaaagaatgacccatgattattctgctgcatggccctgtaaattaagatggaaaggcccttcctgtcccggcttgaatcctcttgtcttgagaaataataaccccccagggccatctccattaagtttccattaccaggccatgcagcagaggcagtgttacctgaaatacaacttctactcagaacaatttctgaatcctgaagattgaacatgcctgagaggaggagcacctctctgggctctcagtagcttgttcattacgcggggtttcagactttcaaaacgactcacttgccctttaaaaaatgtcctcttttatgtatgcgctcactcattccatcagtcagccaacagctgtattttagactccttgtccataaaattatgccatgtgtatttgagatcatgatattacaaaaatagtttccttggaggaactcacagtctattaggggcaagacatgaaacaaaaaccatgtaaagctgaaaaaacaaatagaataaaagagaaaacacttaga

SEQ ID NO: 229128 - DNA, 374 bp, Homo sapiens
ataatgtctttctaaagctttcatgtaagtatgattttgtgtataaacaactatgggctattgtttttgcacttgtacttcattattttgtgaattgtttaagtgagataattgcagtaagtgtatctcagtctggtttgggaacagacacaacttatgcctggactggtgggagcagagtgcagtgttgcaccacagacaggatcagttcatggcagcggggatagagattaatcattaatctgactaggagttttaaattagccggaagatctgttaagagtttatgggttttttccgggaggcggaggttgcagtgagccaagattgcgccactgcactccagcctgagcgacagagtaagactccgtctc

SEQ ID NO: 229129 - DNA, 531 bp, Homo sapiens
ccagaatgagatgtctccacacacagagagctgcagccgatgccggccggtgacttgggacttggatgcttaacaggaggctccccctctcttgggaggtagagagcagtgaggaaggggactcagcctccatgcctcccgccagcccagctgcgcccgaatcacctccctcctgaaaggatgtcagcctctgcttggacaccgtggagacagggccctccttgtgcttcagaagcatcaacgtgtcagaaaatcatcttcacgccaagtctggaaaaaatggctttgaggttgtgcacacaaaggaaggagggagagccccaggtgtcgcggaggaccatgcggctgacagagccagcagggcggtggcgtgtgagccgtgctctggatatataaggatctgacgctgctggcaatgtctgagctctatgctcgcccatctgtcggctgctatcatcaccgggtgggattagcggagatccactctttcatatttaaatcttcacaagagaatgaatcacttttataata

SEQ ID NO: 229130 - DNA, 377 bp, Homo sapiens
tgacctcatgatccgcctgcctcggcctcccaaagtgctgggattacaggtgcgagccaccacacctgacctgtagttttctatactggagctttgacatcttttattagacggtatttcatatttttggacagtattataagtggcatattcaaagttttaaattttttttttaactttttgaggctgtctaaagaaatgcaattgatttcctctcctgcttttctttgttttttttgttttgttttttgagacacagtctcactctgtcgcccaggctggagtgcagtggtgcgatcttggctcactgcagcctttgccttctgggttcaagcgattctcctacctatctccccttttatactaataattttata

SEQ ID NO: 229131 - DNA, 372 bp, Homo sapiens
tcttgaatattcatagctcctcctgtaacctgtaattacatatatctggctaaccatttcagtttgaattcctgtcttactcttccctttctggaagtgtctgtctctgcgctctgtgggaggctatgcttcccagaccatcaaaatgggcacctggcaggctgtaacccttcataaaaaataaagtctaccttcttaatttataaattgtatgatttaagttaacaaaagacatgtttcaagtcatgaccttgccgcaatggaattttagtgcatcatttattctctgagcttcattagcaaaatgtgatgtgcgtaagcatcacctaggaagctgctaaaatgcagattctgattgagtaggtctgggtg

SEQ ID NO: 229132 - DNA, 426 bp, Homo sapiens
gttctgagtagtgtaatgaaccttgagtcattttactagattctccctggaacgtgaatcctcccattgtccatcggacccatgctgtatacgccacttccctgttagccacttagtagctgatcagatcaggtgggacagtatcctagtgcttatgttcaaggaatccttattttacttttattatattgttatagctagctatatagctagctataacaatatattattagctattctattagttttaataaaaaactgtattagtttaaaatagttattagtaactactattattatcatcgtttgagagagtcttactctgtcacccagggtggagtgcatgatcttcgctcactgcaacctcctcctccttggttcaagcaattctcctgcctcagcctcccgagtagctgggattacagg

SEQ ID NO: 229133 - DNA, 531 bp, Homo sapiens
gttactctgtttcatcattatcacctcccttacactcctggaggtcagcagtccaaaatcaggtcccctacactaacttcaaggtgtctgcagggctggttccatctggagactctaggggagaacccatttccttgctgtttccagctcctggtggccacctgcattccttggcttgtggccccttcctccatcttcaaagtgcatcacccaatctctgctccctcaccacatcaccgtctccccttctgtagtcaaatgttcctctgtctcctttttataagcattcttattatcatatttatggcccacgaggataatccaggataatcccccatctcaagattcttaatcatgtccacaaagttccctttgccatgtaaggtcttattcacaggttccagggattaggatgtagacactctagagggtcattattaactcaccacacaagtattcgagaattttctctgtattctggctttatcatttgttttgattaaagaatatatatttaaaataaacttttat

SEQ ID NO: 229134 - DNA, 575 bp, Homo sapiens
aagggaagatggggttcacctcacaatgctaaaggtgaaaaggggagtgccgaccctgccctttgttttggcatttttatttccatactttgtggtttgtatgtgcccagttaaacggatgtacagattagataatctggctttaactccaaccttcacgagatgcacacatgccttaaaaagattcttacaaagaaactagaattaggagacaattctgacaacacaaaaacaagtgaacaaaaatcaaatgactgacctgacgtgtccactaggcttgatatgagcttggtcaactaaaacatgagacagaatgaatgaccatctggtcaggttggataagaagtaacttttggcaaaatctctgaagtctggatttacacttcgtggaaggaatcttgacctttccccaagtatattatgccttgagataataatcctgtataaggccgcataagcaaaacgacatttgaaaatgagtttcatctttagctcatccttttacaaatttctattccttgtgcatgattgaagtgtacacattttttagttaaaatataagcatatagaaggca

SEQ ID NO: 229135 - DNA, 424 bp, Homo sapiens
aatcgtttaagcccaggagttggagaccagcctgaacaacgttgtaagaccccacctctacaaagtccgtatcctttgacccagcaaataattagtaattatcctaaataattaagactacatagatggctgtacaacaatagctgtcatttattgagtgcctactatgtattaaacactgctctagcactttacaagtattatcctatttatccttgtaacaaccctgtgtattacagtacacacgattcttttttagagacggagtctcactctgttgccaggctagaatgcagtggcgcaatcttggctcactgcaactttggaggcctcagcctcccgagtagctgggactacaggcacgcaccaccacgcccagctaatttttatagtatacgctatgattatttccattttacagatg

SEQ ID NO: 229136 - DNA, 407 bp, Homo sapiens
acatctaagcagggaatgctgtggccgatgaataggcatggtgggggtcccctcacgaggattccggtgaatatgaggtactagtaattacagacttctctacttccttctatgatttaggagataaataaaattcaagatacctcaggctctcagcaagtcacaagaaaacaagaaaacatgatgctgtctgagcaactggtacaggaagcctggacgcattgctgaggaaatcagaacttctttgcaaaagatggtgacaatctgtggccaagatgctgccgggagatgattacaggcacaggagaggagtttcaggcaggtcagtgagttcatgtgtatttcagatgaaggggttgtcatccacgtcaatatttaaataaattcttcctggtgcctaagtgaaa

SEQ ID NO: 229137 - DNA, 1761 bp, Homo sapiens
  misc_feature (1524)..(1524): n is a, c, g, or t
  misc_feature (1527)..(1527): n is a, c, g, or t
  misc_feature (1533)..(1536): n is a, c, g, or t
  misc_feature (1547)..(1547): n is a, c, g, or t
  misc_feature (1556)..(1557): n is a, c, g, or t
  misc_feature (1562)..(1562): n is a, c, g, or t
  misc_feature (1570)..(1570): n is a, c, g, or t
  misc_feature (1577)..(1577): n is a, c, g, or t
  misc_feature (1582)..(1582): n is a, c, g, or t
gagctgatgtccactaatagaaagaatagaaagatctgattatttcctttttgccagtgtgtagtcaccttggtaaaaggccataggtccctttggaaaaggctgggagaaagatttaccttataaatgtttggcggtggagtggagttcttccacaatagtacctactctccccttcattcaaagagttctgggtctgtaaaccagctcaggtctggtaattgattgaggggatatgactctatttttatgtttcaagttagacttgttcatttgacctacaactcttccacttctacaaagcaagtcagaatttgctagacttcccagctgtttcacttccaggaacaccatgatcaactagtcagcataggtctctgagtcagactattttgactgctgtttcaactccattgtccattatggtaaccacacccgccttgcttttggtggtttattgccaccacttggctgccaccaacctggggcccaattacccccattgcacttaggttttccaacttgatggcagcagtttccacatccttgacatctattctcacagatattcctcaaattgctgtctgtctgtttaaattggaaaaatcatttagttcttttgaagtgtagcgcaccttctcatgggtcatactttgtacttcacctttcagggcttgctgggatttgagtccagttatcagttgataaggaaagtgggatgggggtgggtcctgaagagaatcagtggggtcttccatgacagctgcctcaggggaggccattacagttttctcgggcaaagcagggttaacctgctcaaacatgggttggggggtgcagttgcttcttctgacaaagaagactcgttggaatttaggggttcagtgtccccatcttcgtcatgatcttcccatatgtccccaaagcaattttcaaagtcctattccttcccaatctatgcccccactttaacagcagatactctgcaaggtttggaatttaacttgcattgcaattcagacctcgcaggatgaagattcttggtttggttttctgcagtctcagctctgaggctgtaggagataaggatttctttctaggaaggcatagaaactttcaggtcatttatgctgcatctgagtgggaattcaaatccctcaactccttttctttcccactttgtccagcccaattaggagcaaccagccaagttcattatgcccattagtttgacggaaatgttctacgttatcaaatacgtggtcacccagaaccttgcctatcataattatttgattaggagtatctaatagtgatatttttgtgtatctctattaccacatcacaccgatgactatcagtgctttattcactattggaactagagtcattagtgcttctaaatctagtcatttagagaaccaattccagaaacccccaaaccaattcagagaatttattcttaaaattctgttcctggctgggcattgtcttatgcctataattccagcactttgggaggcnaangtgggnnnntcacttgaggncaggagttnnagacnagcctggncaacatngtganaccctgtctctactaaaaaaatacaaaaattagccaggcatcgtggtgcatgcctgtatttccagcttcttgggaggctgaggtgggaaaatcgcttgaatctgagaggcagagtttgcagtgggctgagatcgcaccactggactccagcctgaacatcacagactgagaatttgtct

SEQ ID NO: 229138 - DNA, 338 bp, Homo sapiens
cggccgcccctgacaaggcccaggactcggtcgaggcctggctagcggaccgaggcggagtcaggcccaaggccctgcttgctctcctgcctctccctccctcggagaactgtccagtcttttaagggggctttcacagactgaaccgttcttctttcctgaccctcctctatgaatcattctcaaaggactagagcaacccggctcttccccgcccatctatgaaccagccgctaaatggactgcaattccctgcatgcaatggggctatcccgctcttccatctaatttactggcgtgccgaatggcatgctgggattggtagtcatccagccgga

SEQ ID NO: 229139 - DNA, 474 bp, Homo sapiens
aatcactttaagcaggctatgtgtgacgaacttgttcacgagccctcaaccttggcttttattgacctcacctggggagcttacaaatgatgatggctgggctctcttacccagagattttgatttacttgaacctgtgtgggtctgagaggttttaaaagcaccagtgatagttcagacgatgaagttcttcaagggatcaagctcaaatggaggacaagaaaaaactatactaaggtgaggaacatcaacattcaacaggataatttttgaggaaaccaggtcagcacttgatattgggagtgccatacacatcaaattagaagtctcagaaagagtggtaagaaaactgatcaaagatggaactttatgggaaacatctagggaagaaaagtcaaaaagggcttacagagggagtttttaggagaaactaacacaaaaacaaaagcaaaatcatagttgtttttgattaaa

SEQ ID NO: 229140 - DNA, 427 bp, Homo sapiens
gacccagaacataagcagataatagaataaaagcataaaaaaagaatactgcattccatatattcaaacaaataagtaacaacataagaatggtataagaaagacccaaatcaaatattcagagataaaaagtacaatgtatgtgatttaaaaaatacaccatataagattatctgattattaagctttagtgattttgaacacataacaattaaaactatccaaaacaaaacatctaaaataattttcaaaaatgtcataaatgaactatggaacaactttaagtagcctaatatgcatttaattggagtctctagaaaggggtggatagaaaatacatatgaagaaataatgaatgaaaaatttccaaacctgattaaaactataaaaccacacatatacaagtagttccatgaaacccaaggac

SEQ ID NO: 229141 - DNA, 571 bp, Homo sapiens
atggatcgtcccatcttctgatcagttatgctttaataaggtgtgaaatgaagggggaaggaaggaaatggctgaaatattataaggctgggtaatatttccacctaaaatgctagaagagacaaagaggttaatgaaaagctgagtctctatggttgaagcagtcgaaacaagttctttttgcactcacaaatagtgtagttctccaaggagctggaaggaatgctgaaacccttgggagaacagatttggagggaaccccatctcttagcctgtgtcttctgcagatatttaacttctggaacaacttgaaaggaacaactcatcttgtggccaaggtccatcccaagacattttgaaagcataggttcaagttcaaccattaatccagacatttcaacaagtgtctgtaattgctccaataaatagaaaacttgtaaatcagactgaagacctaaccctgacatttcttgaaaatggccacccccagtatttaacatactgaacataatatggtcaaaatattgtttgtaacttatatcttctgagccctaaaaatacaaatatcttt

SEQ ID NO: 229142 - DNA, 274 bp, Homo sapiens
ctgcacgagggcagacgctgccttctcaaccattacattcctagcacggaagcacagggcctggcagaaattagcgcttgatcaatgtttgttgaaatcaatggataactgcctgcttgaatgaatgttgaaaacaactgttttgcaagcgccacaatgtgatgtgtctgactcctatgccatgttcacaaggagtcgagagcctggaagctttgcacactactgcctggaagatctgattctttggaaataaaatatatatatatattctgca

SEQ ID NO: 229143 - DNA, 462 bp, Homo sapiens
cagttaccatggcttggtccaagcagtgacttctgttcatgggctctggaattgagtggccaaaaatctggaatccctacagtagggagagtagccttgtccctgccccactacaagtctgttcatatgaagacatacaaagccgtcgcctctaatcagtgttcaaagggtcgattgtgcaactcacattcctccagagaaattcccccagcttgtgagatctccaagagggaacacgtattcctggcatccaacttcccctggtgctccccctgacctgcctcattccaggagttccctctccagagaccctgtgtgcccacacgagcagacttttagaaaatggcctacagttcaaaggccctgcattgctttatggccttggaaatgtggggaaagtgtcagatgaagaatttctatcctcctcacctcctccctgtctccaataaatgcataccaaga

SEQ ID NO: 229144 - DNA, 461 bp, Homo sapiens
gcaggagaggtacttccaggggctccattagatgatcactgcctgtccacagccgccagccccttcatgacagcataccatcaagagttttctaaataggagctttccaaaaacaacaccacaaagtgcatccctcttctcttagtgattgtccgtggagtggccaagggtagacttgggtagcaagagtataataactttttatttttggaaacaaaaagcaagtctacttattggcagctaaaatgctggcataggccagagagaaaagttcagattacatggctttccaatgcccttgtttttgtaaaccaacccctggggcaatggctttggcaaatctctcagtagttgcctttgaggaaatctaccagaagtcttattcttttgttttgaaatgtggatatcagttgtaaaaaaatgaaacaaaaagcaataaaataaaacaatcctttcagtga

SEQ ID NO: 229145 - DNA, 366 bp, Homo sapiens
gggacttgcttgttgaacttaactgatcaaggtcaacatcttgcttttggtgtaaaaatgagatgcagcttgcaagctgagatgggagatgaattcagcctgtggaaaaatagaagacactgccatattgctggagtgcagaaaaaatgtcagcacagaataagttacagcttgatcctggtagccgattcaatgcttctcccatctcatttattcggtctcaaccccttactagctgtatcattttagggaagtcagtcttatttattttccagcaatggtcagctgtttgagtgtaggaaaaggacagagtaagaaaggacaggtatttgaatttaagtagggctggggtcatgtgagacaagt

SEQ ID NO: 229146 - DNA, 372 bp, Homo sapiens
tctcaaggtgtggcagaaacggtcagacagatttgcattcaaatccagcctctgctgcagacagccaggaatcttaggcaaatgcctttgacctttctaggcttccacttcctcatccacaaaatggaaagtacaatgtcagattttgttatgaaaattaagtgagagaacactaatacacatacacacacacatatacatatacatatgagtgtgtatatacatttttaatttttcaacctcaaagttctttgtatctgtcatattatttatagattattactgccatcgaatattacttccatgtcaaaatttaatacaagaattgaaacaaaatacattgagttaaaaagaaattgaacaagagtacgc

SEQ ID NO: 229147 - DNA, 702 bp, Homo sapiens
caggagaatcgcttgaacccagcagggcagaggttgcagtgagccaggatcgcgccacttcactccagcctgggcgaaagagtgaaactccgtccaaaaaaaaaaaaaaaattagccaggtgtgatgacacatacctgtaatcccaggtactcaggaggctgaggcgagaggattgcttgaaccaaggagtttgaagttgcaataagctatgatgattgcaccactgcactccaggctgggtaacagagtatgaccctgtctcaaaaacgaaacaaaaacaaaaacaaaaaacaaacttgagttgcatatgaccatagcaaatatggttttgaggctttgctattttttaactttatattatttaatctaaaaatctatattaccaagacctgattgtatattctgtatcactcaattactaaaagatacttgaaaatagtgtaaaatactaatacattaatgaaatgttattagtgatataaagtactaatacatgaatgattctaatgtttagaatcaccagtaactaataacaacttgtcatataacatatgcaattagaataaagcttccatttaacatttgcctaattcccaactcttggcctgttcaaactatatttaatttgtaatcctttatctagcttagcaaaattatttggtattcaaatcattcataccttttcctgttgtccaccaaat

SEQ ID NO: 229148 - DNA, 598 bp, Homo sapiens
agaatgtactgtcaagcttggtgtgttctatgaagctctggagtcaattttggcttggtcatctttatccgtgtgtccctgggaatgttacttaatttctctgtgtgtgtgtggtttttttgtttgtttgtttttatgtttttgtggttttttttttttttttttttttggtttttggtacacctccaaagtcagaaaaataatgtctcactcaaaattatctcaaaagggttacatgtgataatatagtaccttgtgaatgttatcattattatgatgctttaaagtgtttaatgtaaaacactggcaaacgctctttatgaagaaaattctggcatcaatttccccagagaaaaagcctacttagaaaaatgtaagataagcatagggaatgaggggaagtgataccaagtagtgatgtttaggatggctttcttctgagtcaaataaaaccatcatagaatgatcagaatgatgtgatggaagcaaaaaccaataggaacagcctaattcttactagagtaatagagtaagcaaattatttaaagttttcttatgtgagaaattgtgaagattccagcctgtaaagtaatagtat

SEQ ID NO: 229149 - DNA, 625 bp, Homo sapiens
cagccattgctctgatggtgctctggatgtttagagatgtacactatctcctcccaaagggaccaatccatggtgatgtctgaccggcacagactacccatcagagacctgtgttggtcctagtgggtgcagagggcatgcagccaggcctgcagagaaagcttcagatcaagtccacaggaagactctgcctcaatagggggcctgacagcagcaaagactcatgacagctcaaagttctgggaatagaaacccccagctatcttccatcaggggcagagataggcttccacccactctgacaggctgcagggctagttctggaagaaccaatgtgctgcctacaccagatgactcacactcaggcacttgagtgagcctcctgtcactccctgcaagagggtagggagggacaaggagcccagttctctttgccttgagccttaggctcaatagtcagacttaaataacacacaatataaatcttaacagggccaagcacagtgactcacacatgtaatcccagcactttgggaggccaaggcaggagggttgcttgaggccaggagttcaagaccagcctgcacaatatagcaagaccctgtttctattttaaaaattaaac

SEQ ID NO: 229150 - DNA, 126 bp, Homo sapiens
ggaaacctgtactttttgagctcactgccccttccactattctctctataagtctccatggccaacccctgtggcattaattggtgttctctatcctgatacctctcaaagacatcctaacccctt

SEQ ID NO: 229151 - DNA, 1303 bp, Homo sapiens
aagcaaacagtaaatatcattagggcaatcatttcagagcttctttccagtcacaatttgcttatataagcagctaatttaatctcaattcaattgaagagacattttgagtacatcctgcatggcaggccctgatatacttcctaggcactagggaaacaagcagactagaagttcccattgattaaaatttagtcctttccttcaaagagctcatgcaggggggaaataggtaaacagtcactgtacactatggctatgaaataatccatcagagctcataaacggcacacccagtctttcttgtggaacacatgttaatataattagatgggaaaaggattcacaaggatgatatctggcgtgaagattttgttaaatcaaatgctataaaaatttaaagtaccacccttactaaacatcaatctggttagggaagaggcaaaagtacaaatcctctaattacccacaaaagattagaattcccaataatcagtgaaaaaatgttagtatagagattttccaacttaaaaatgagttgatggtgggaataccaagacacatttctcccaacagtgttataaaatattggtaaattctatgagtagctccactcccaagcctacttatccataatatgctaaaatgccattttttatgaaacccagctaataatatagttcagttaattaacagagaaaaactcaattaaaagtggtttttatatataatgaacaatggttcttatgcttaaggaaaagctgtttaattaaaggaatgaaaaggattaaatgaaacaagctagacatgtatatgtactaggcactttataagcattatacaaatttaatcctcacagccacctaagatatatttcttaaaagaataaagacagagagatataaatatggaatcacaaaagaatataaatagggcacgagttcatttttgcaagctttcaataatcatattttttaaatttcactctaagtctatggctcctccctcccatttacttctctattaaattcaggatggacaattctaaactattgctattgggaaaatgtgatgtttccattgcatctgagtgtcattcattcactcaacaaatgtttattgagctcctaaatgctaactgccttaggacaagtaaataacatacaaaaggagtttacaattaagaaaactaaacaagcagatcacaatcttgttgctagaatagatgaaatacagtatgtacaaggcaccatcaatttgtaagatgaaaagctaagaaaaagaatttgtaagatgaaaaact

SEQ ID NO: 229152 - DNA, 529 bp, Homo sapiens
aataaaggaaattggatgtggggtacatgagaatgctgtactatttttgcaacttttcttaaatctaaaactcttataaaatttaaaaataaaaagaaatgtggagttattattattattttttggctcaggatttgacccagagctatggtctggcagaattttctcagaggaggaatactggctagtacaagtcattcaaattactgtgtttttctatgatttctccacaaattaagttgctttaataatgcataatgtaacttaattcagcagttttgcttcctttgctgagtaagtatagactataattatagagaatgtaaaatggtgatataaagtcaaaatacacaacttcttaaaatcacttagatatgttctttattgaagctgtgcacattaacccagcagaccccactagcaaatttatgatatgttgatgtcatgtacattcataaataagattattttacttaatactgggcctgttacttttgttaggagtaatacagcatttaaacaacctcca

SEQ ID NO: 229153 - DNA, 478 bp, Homo sapiens
gtctcaaaaaaaaaaaacaaaaacaaaaacaaaaaagaatgagacctagatccatctttaatgaatccatgaccttaaaacgttaaagtttctgagctacaattttctaattgttgaagagtattgtagtaccagtagctgtgataacaaagatgccctgaaattgatttattaaaaaattagtataaaatggtagctgttttcatttttacatttgctattttatttgcctttattcataaatctctctttgatagacagcaataagctagaagttatgcaatcacttcctaactgcgttatatcccctaaacgtgagcagctaaggcacattatataccaccaggtattgaatataccacaaggaattaagggaattttcacaagccttggagccaggcaaagtgagcatacagaaattattatttgatttacaagaatgctcaaataatgagtattctattttaagtctttacta

SEQ ID NO: 229154 - DNA, 371 bp, Homo sapiens
ctattctatatttgaagtatccagagtaggtctagaatacatttttaaattcattctgcccaaatgtctaagttaggttattagctcctaagggtttaacatctgaaatctgtaggtattagaaaaggcattagaatagctccagattaaagagtgctggcacctatttcaatggtgagttattggagagtagataagtttcttaatgtgaaagccttggtctttcttaatttttggataaaaacttaacctgctgggcacaatggctcatgcctgtaatcccagcactttgggaggccacgactggagaatcgcttgagcccaggggttcgagaccagcctgggcaaaatagggagatttcatctctgca

SEQ ID NO: 229155 - DNA, 834 bp, Homo sapiens
gcatttctgaatgatgaccatgccatatgtccatagtagaagcagccataaccagagtcaatgtctcagacaatgagatgtctcatagtggactctggccatgtaaatcccaggactaacctgtgaactgatgaagttcttggttaaatttagaaaagatttggccttgagagctgaatttgaaaaccaggtcgttgtgatgtagaaaattgttcatgcgctggttggagattttgctaaggttgaacactgctttcaggtatgagtccagggtactggaatagggaagatggaacaacatgttagtgggtgacacagttattggcaaacaattaccttccttttaccactgacctgtccaactggatgctgccctggtggctgaaggcacacttcatgatgctgtccagggtcatcagggagacatgttgaaagagctccagacgtgagttttgggcaatgtgttcctcccatttgttctggggcaggggatgaatatcatgatcatacacatgcccatcttttcccaatttctaagttattttatgtcccttttagagtttgctggggtttgaaaatataaagtgtacaaaatgaatttgccttattatgacaaccatataaaataaaacaccttgtcagtactgaaaatgatactgtgccttagatgctatttgtgactttgtaagggtggggaaatagctatttttccctctttttcaagtttcattagtacaatttatatgacttttatcatggaaaaactaagctgacaaaacatggaataaaaaataaataagaattcaaaaacatctgtagagagcataaataaac

SEQ ID NO: 229156 - DNA, 555 bp, Homo sapiens
agaaatataaaattttactcagatgtctacttcctgatggcatgaaattcttaattgttttgaaaccaaagtagaaaagcagacaaacgaaaaatactagcaaatcagattctgttatctttcacccaacagagacaagatctctataaaccagcagtccttccccaaatacgtagtatacaaaccgcttcatgtctgtcattttcgtcaaccctggggtccttcaaatgccttttgttccttctcatttacttcaccttgacttttcaagacatattggttatactacacagttggttacatttgaagtatttcatgtaaattacaaaagtatatgaataatgtgaattcatttttgtttatatatgtatatgcatgcatacacatacacacacactcctatagagtgaacatttggctgaatatactgccaaattgttaaacaatagtcatttctagctggtggaattacaggaaaatttgtgtttctgattatatatttctatagcatttaaattttttgcaagtcagcgtgcatttcttagataagcaaaa

SEQ ID NO: 229157 - DNA, 422 bp, Homo sapiens
ggtttcatgttgaggtgagctgtgtttgtagtctgaagcattttaccaggctgaggggaacagcatgtgcaaaagcatgaaggtgtgagtaaggtttgtgtgggggtggagcaagttcagtatgacccgaggatagtttgcaaaagaggcctttgattgtatagtgtagcactcagtaaatagtgttggcgcctgaaatcaatgactgtacatcccaaactaatctcaaagctatttccttttggtgtgggtttggttttgttgttaattttgaaatatacttttgaacactgaaatctctgaaactgctaagatctctagaagtgtaattgggaaagaaacttgcttgtagctttaacaaaataagaaactcttcccaaataaaacttattttgaagtttgaaaatatatacttttggtga

SEQ ID NO: 229158 - DNA, 518 bp, Homo sapiens
tacaagaaagccctacaccctagaatggaacacttagttccctggctgctattctgtgtagaagcaaatttaaagtggtacaagaaaaaaaatccaatcagacaaaggaattcgtcagattttaatgcatgagattctagccagtgtctgtatgagactgtctttaaaggttgttggtatggaaaatgtttgaaagaacgtaggatttatttcagaaataaaattcaaaagagcatcttgtaaagctggagttaacaatcctccatggttggagggctttagagctggggttctgtatgtgggttataccactagtttatttgaaaagaaacgcatacatgttttttccttggaaacaagactgcagaaaattgcaatgatctagtccttgaaaaaggcgattgctctcaagctgttattaaggtactaaactgcactttgaagtgaaaatacatagaggtcctaggtgagctcttggacactctggaaataaatgacttcctaaattggccttctaa

SEQ ID NO: 229159 - DNA, 376 bp, Homo sapiens
aacaatttcatactcaggagttgacagaactcccacactggcatgcagagtaagagctatggcagtaggaaaggccaaggggaagtccctgaaactgctccctgctccaagatagtaaatcaaaaccaagatcccatcctggagtatatgacagatattaatgccaccttcaaatactcacgtaatgcaggagtaatagactctgtcatatcccatttattcagtagggcaaaaactggatgcattatgatagatgttaatggactatcacaaacttagccaagtgtagtctcatttgtagctgctgtgccagatatggtgtctttactaaaggagattaacacagcttgagatatatcatatgtggctatcgaac

SEQ ID NO: 229160 - DNA, 552 bp, Homo sapiens
tggctcatgcctataattccagcaccttgggaagccaaggcaggctcacttgagcccagttagaggttacagtgagctgtgaacacaccactgcactccagcctgggtgacagaacaagtccctgtcacaaaaaacaagctccttaataggtgatatgatttggccctgtgccccacccaaatctcatctcaaattgtaatccccacgtgtggagggagggacctggtgagaggtgactggatcatgggggtggtttcctccatgctgttctcgtgatagagttctcagagatctgatggtttaaaacttcaccctttgtgctctctctcgcctgccaccctgtaagacatgccttgcttccccttccaccataattttaagtttcctgatgcctccccagccatgcggaactatgagtcaattaaaatctctttttcttaattacccagtctcaggtagttctttatagcagtgtgaaaacagactaatacaatgggttagaatcagcattaggggccgggcactgtggctcacacctgtaatcccagcac

SEQ ID NO: 229161 - DNA, 271 bp, Homo sapiens
ttcagatggggtataagcttctcaagtcccttaaaattcactttgggggatagaggctgaagatgtgaattcaacctctatgaattcaggatatttggaagaaactctttttagcttttccttgttttggttttggtttttaaaatgctcttcttcctccttacctggccacccgtttctggagaatttggatgtggatctttctttttactaggtataattactgatacacaacattcccaaaacattaataaatatttaatgtacaaat

SEQ ID NO: 229162 - DNA, 300 bp, Homo sapiens
atgctttaattaaggaggatttgatggactctttaacactacccagtttaaggaaagctagtaagccttttaagggaactattatgcatatgtcctttgggtaaggctatgattttggcaaagaacaaaagaatgcctgtgaattccctttttcagtttttcatcctgaccagcactccttaaacacatttatttataatttcttctaaaaagaaagtgtgtgtgtatgtatccactgataaatttgggagtcaggtagtggagggcaggcatttagctacatctggaagaattaataaa

SEQ ID NO: 229163 - DNA, 444 bp, Homo sapiens
aaatttttattttccaagtatacttcagtaaagctgggaaaaaacacatttaagaaaaaaacacatttaagaaatatatactccatataaacttcattacggcaggtatagttatctgctttgctcactactgtatctcagggctgagaagccctaagataagctcttataaaaggatgaaatatggagtataggataaaacatattagacttgaaattttcacagctgtacatacaagtctagtatagttttcagggctttataattaggtattcacttttgcttttttgggaaggagactcaacaggagatgaaatgtgtgtttcctgtgttgcatgttcctgcacaggtacttcgaggacagtagatcttcccaccccttctaaatactctgtgtgtgtacatttttgagattacatatttggattttatgttttttttaa

SEQ ID NO: 229164 - DNA, 430 bp, Homo sapiens
acacattagcataatgtggattttccaagctacttttatacatgaaataatataagctgtaatgagtgaaagtaagcacggatttttcagcagtactttccagaaattttgatggaagatcagctttttgtagctggagaagttggattaaaaaatgaccacagagaaattgaaagatgtccagtagaaggtctgtagacttcattccaattcagcatatccatgaggtcaccaagaaattaagtcaccaagaagttaatttcctcaagaaaggacccttgaagaaagttgctattattaagtcgattagggtgtagtggcaggaaaaaaagtaaggactgatttctaagaaacataaaaatgaaaacattaaagaaaaaccctaaatttcattgaagaataaattgtgggactgagccacagaacaaaa

SEQ ID NO: 229165 - DNA, 475 bp, Homo sapiens
ctcagtctttaagaggttgaagagagtggcctagtcccttcagccctttttgccatgtgaggacacagcaacaaggctctatctatgaagcagagagtgggccttcactggacaccaaatctactaacaccttgatcttggacttcccagcctccagaactgtgagagatattttcctattatttataaattgccccatctgaggtattttgttatagcagcctgaacagactgagacacattggaaagacattttgtttgtttccttttaagaagaaatgctattttcttccattagtattgctgctgtgtaaacaacagggacttctgcagcctttggtcattatgaggaaaagagtctgcctaatgaggaaatgtgcatggaggaagtagaaacaagagatggggaaatggccttggtacattgtttgagctcctggatttagccatacctgaagcagtattactctttcag

SEQ ID NO: 229166 - DNA, 516 bp, Homo sapiens
agccctgctgacgcctcgcgggtccctctctttcagtgaatgagttcacggtgatcaggaagaagttcaagtgtccgtactgcagcttctcggccatgcaccagtgcatcctcaagcgacacatgcgctcgcacacgggagagcggccctacccctgcgagatctgcgggaagaagttcacgcggcgcgagcacatgaagcgccacacgctggtccacagcaaggacaagaagtatgtgtgcaaggtgtgcagccgcgtcttcatgtccgccgccagcgtgggcatcaggcatggctccaggcgccacggtgtgtgcaccgactgtgctggccgcggcatggccgggcccctggaccatggcggcggaggcggcgagggctctccagaggcgctgttcccaggcgacgggccctatctggaggaccctgaggacccacgaggggaggcggaggagctgggcgaggacgacgagggcctggcccctgaggatgcgctgttggcggacgacaaggatg

SEQ ID NO: 229167 - DNA, 233 bp, Homo sapiens
tctaaattaattttatcttatttaagaagcttataatgctcctatttatgaataacaggctatgtgggggatatttcccaccacttcacgaattattttttccaggtactttcttgcaaaaatcctacttactattgtccttaaaccaaatgacttaagaagaattttatacgagctctgatcagattgactcaaggctccagagaaactcaaagctccatgacatgatttct

SEQ ID NO: 229168 - DNA, 754 bp, Homo sapiens
atttcaataaatttgtgctttcattgcttcattccttcgttgctttgtgtgttttgtccaattctttgttcaaaacaccaagaacctggatgactcatagtcaagatcctctaccagtaacacttgaactttctggtttgtcctgaacatccctctttcttaaacaaccagtcgttttattctaggccaaaattttaccatacaagaatatttctcatatacaattatcttccttctaacttttcttgccagaaataccttttataactttctttacattgcttttatttaacgattacttttaccttgtttcataagttttaaatagccttgaattagataaaaaattattttcctttaaataagaacacatttctttttttagaaaaatatttttctgtaattttttttttttcttgagacagagtcttgctctgtcacccaggctggagtgcagtggcacaatcttggctcactgcaagttctgcctcccgggttcacgccatcctcctgcctcagcctccagggtagctgggactagaggtgcacaccaccacgcctggctaattttttgtatttttagtagagacggggtttcactgtgttagccaggatgatctcgatctcctgactatgatctgtctgcctcagcctcccaaagtgctgggattacaggtgtgagccactgcacctggcctaatattttaaattggaaatgacccagatgtttaatgagtacctattatttaactta

SEQ ID NO: 229169 - DNA, 466 bp, Homo sapiens
ggggtgataaagaaatgaaattgaaatgcagttagttttgagaatggtagttggcttttgcaaatttgttttcaggtgatcattataaaatccccccacccgcaccaatcacatccactgtgatgtggagaaagggctcatggcactgcactggggcaccgcgttggggtcacacctgccactcacggcccgccatgtccgtgttgcagaggaggagacccacccggtggacttgagctcgctctccagtaagctactcccaggcttcaccacgctgggcttcaaagacgagagaagaaacaaagtcacctttctctccagtgccactactgcgctttcgatgcagaataattcagcatttggcgacttgaagtcggacgagttggagctgctctactcagcctacggagatgagacaggcgtgcagtgtgcgccgagatggacacccgctccgggagccagtgtt

SEQ ID NO: 229170 - DNA, 451 bp, Homo sapiens
gccgcaagattaggattatgggaggggcctgagttctgctaaaatgtgggcatagttttcataatccctttctgctcaggagtcatgtggccagaggtcacaatgtttgtgacttccccaattgctcctatagataacatcacattgtggaacctaagattgttcttttgagatgtttttcagactgaccccactggactcatgactcatggactcagctggtcctgtggccctacccagaagtggactcagcacacgaggaccatttcccacactcctgtgatttcatccccaattattcagcagtaccctttccatagccccttgcccaccaagttgtccataaaaaccctagcctctgagcttttggggagatggagttgagtaataactccatctactgcatggctggccttgtgtcaattaaacttttttctttactgcaataaca

SEQ ID NO: 229171 - DNA, 195 bp, Homo sapiens
tggcttcaagtgacttgtgtttatattgtatggcaatttgagtgtagcgttacatggaaagtgcttaaagaggtacggggacaagtgccttaaacccttataggaagcccttaggataaaatttacattttattttattttatattttatattttattttattttaatttaatttaattttattttattttatta

SEQ ID NO: 229172 - DNA, 313 bp, Homo sapiens
acattataacattataacatgcaataaaggtaagtactaagtgagattttataaaactgattttttagtcagcagtttaggttgctgttgattgcaaattactagtattatttagtgcccttgaaacttctgaagttggaggtttcaattgttagttactccctgctttccttcaatagaaaatgtgtagtaaaggttatttataaaagactaattgtatccaaagctaaatggtcttattatagagtttgtataggatttattttcacttgcacgggtaggttctcaaaatgtatttgaatgtgaatgactt

SEQ ID NO: 229173 - DNA, 377 bp, Homo sapiens
ttctagttatttggaaatccgaggcaggtggatcatttagttctggctatgccagtcaggtgtctgcactaagtttgccatcagtatggtgacttcccaggagctgggaaccaccaggttgcctgaggaggggggagccagcccaggtcagaaacagagcaggtcaaaactcccatgctgatcagtagtgggactgcacctgtgaatagccactgcgcttcagccaggacaacatagcaagacctcgtcttaaaaagtggacaaaaaggcagtggcttacacctgtaatcccagcattttgggaggccaaggcaggaggatcccttaaggctaggagtttgaaaccagcctgatcaacattgaaatcctatctctac

SEQ ID NO: 229174 - DNA, 654 bp, Homo sapiens
agaggctagctgagcttcaataccctgtcttcacaaaaaaataaaaaaaatcagctgggcatggtggtatgtaccctagccccagctactcaggaggctgagatgggaagatagcttaaacctgggaggtcaaggcttcagtgagccgagatcgcgccactgcactccaacctcagcaacagagtgaggaacctgtctcaaaaaaaaaaaaaacacacacaaaaaaaacacccatgctttattaataattactcaaacccagaaattacccaaatgtctaccaaatggagactggataaacaaactgtggtacattcacaccatgaaacgatacggagtgataaaaaagaatgaactactgatacatacactaccatggatgaatctctaaagctttatattaagtgagagaagccagacactaaaggctatatgacatcctagaaaagactaaatcatagtaacaaatatcacactggtgaccaatggttgccagggtctagaggtggggaaaagggacttaactgcaaaagggcacgtgggaactatttcaggtcattaaaatcactctatctagattgtggtgatggtaccgtgctatatggtcatatacatttttcaaaagtcgtgaaccatcaccaaaagggtgaattt

SEQ ID NO: 229175 - DNA, 487 bp, Homo sapiens
gcttagttagcaacagagagggtaaatatctgctttaaagatcacaatgtctgatggctatgaaacagatgagaagttttgagaagatgacatcaatatggtgttgattggtttcatgtggctttgagcttttctgccactgggaagatcactactgtacatagtttacatatgattcatgtgtgatgccagattgcagcttcttgctgtatcttaagtgtacttggtattctgattcaagagtgagatcttgaagctttggcaaatagaattgcctaattttcatttgtccactaagcaatgcatgcagttaaaaaaatgaaaacaataccaaacctccttcttttgcagtgaaggagcccaaaacaagttactctctttccgtctctctctttaacttagaatattggttattttgtattctcacacatgtaaaattcctttcctttaatgcatatgttctcaataaaaaagaattttccactga

SEQ ID NO: 229176 - DNA, 437 bp, Homo sapiens
tataacaggcgcctccttgaccgtccatgatattgcaaatatgtggtgccaaaagcttatgtgtacttcgtcaaactgaccatggcagctggacgtctccaagcagccacacatgtgaaggcggaactcacccaggccagcctaacaggcctgggaatttccaaagtaaattatcaagaaagccgaggctatgaaacccacaagtttaaaatgggcagggggctaattgtctctgaagtttaaatggcttgtttataaaaggcttctccagcattcgtattttttccccatttcttgaaaactacattccacttgaaaggagtgagagggaaacgcaggcgccctgtgagccttgtgagtttgccgttgagctctgcttcctttcaagatcttcacttctgggagagctcctcagtgaaagaaataaatttgagtta

SEQ ID NO: 229177 - DNA, 1634 bp, Homo sapiens
gcgcagcacaagaattcagtaaagttacaaaagtacaagactgacacacaaaaatcagttgtatttatatataccagcaattaacaatctgaaaaggaaattaagaaaacaatttcatttgcaatagcatataaaggatctaggaataaatttaaccaaggatgtgaaagacttgtataatgaaactacaaaacattgctgaaagaaattaaaaaagacataaataaatggacagacaccctgtgttcacggattagaagacaatatagttaaagatggtgatactatacaaaatgatctacagattcaacacaatttctgtcaaaattccaacagccttttcttgtagaaatggaaatctaatcctcaaattcacatggaatttcaagaagaccccaactgtcaaaaacaatagtgaaaaagaagaacaaaattggagaagtcacttctaattttcaaaatttacaaaaattactatagtaatcagagcaatgcggtactggcataagaacagacatgtaggccaatgaaatagaattgagagtccagaaataaacctatacatatgattaaataatttttgagaagagtaccaagaccattcaataggtaaaagtctcttcaacaaatgatgctgggataactggacatcaacatgtaaaagaatgaaatcagaccctacctcacggcatacacaaaagttaacttaaaaatggaacaataacctaaatagaaaagttaaattgatagaactcttagaagaaaacttagggatacatctgtatgcccttggttatttatgacaatggactcttacatgacaccaaaagcccaaccatcaaaagacaaagcagatacattggattttatcaaaatttaaaacttggcacaggcttgagcatccaaatcagaaaatccaagatccaaaatgctccaatagaaaatctgaacttgagcaccaacatgacacacaacaaaaatgctcatttgaacattttggagttcagatttgggaggcttaactggtaagtataattcaaagttccaatatctgaaaaaattcaaagcccttctggtcccaagcatttcggataagagatactatactcaatctgtacatcatagaacattatcaaggagcaaaaaaggcaacctataggagaaaatatctgcatatcatggatctggacaagggtctaatttctaaaatatataaagaactctaataaatcaacaaaaaaacaagcaatccaataaaaaatgagcaaagaacttgaataaacatttctccaaagatacacaaatagccaataagcatatgaaaagatgttccacattattaatcattagggaaatgcaaatgtaatccataatgaggtatcatgtcactcccggtaggatgcctcctcaaaaagttaaacaaagatttccacatgactcagcaattccattcctagtatacagccaaaagaaatgaaaacaggtactcaaaaaaatacttctgcacaaatattcatagcagcagtactcataatagccaaaaggtggatacagcccaaatgttcatcaatggataaataaacaaactgtgatatttccatgcaatggaatgttattcagtcataaaaggggat

SEQ ID NO: 229178 - DNA, 319 bp, Homo sapiens
cgattttaagagttttacttaaatgtcatcttcacagtgatgcctgatctgaccactgtacttaaaattgtaactccctaactttttaaaacttccttgttctcattatttttctaaagtacaatacacattctaacacagtatttttttcttactaacattgtcttttacctcccccaccccacccagaggtatactccctatacgaaggaatttttatctggttgttctttgttttatctctggtgcctagaatgacatctggtcataacacatgcttattaaatatatgctgaatgaataaatgaacgaactgcca

SEQ ID NO: 229179 - DNA, 563 bp, Homo sapiens
atgttttgagcaatcaaccaaaattgttccttttcttttcctgtagatgttctgacagatttgcagggctttcggctcactgtgctagtatgtaaaaaggtgttgtttacacgaggcaaagagaaaacatgctattcagacagttgccaaatagaataattatagcacaaatactgtaaaggtgcctggcaccagcaacctgagaaagtgttaaaaaaaaaaaaaaaaaagtgttacaagatttaaaaaaaaacatctttgctaatttttttgtcctgttgaacattcatggaattgttaatatgacttatatagacccacacaggttttatttttgtgtctttaaaataaaagtccaaaatatttaaattttatggtcaaatatgcagtcaacagctgctactttttctttatatattaaatttctcatatgtcttttattgttctaataaacctaagcttgtgtgacctccagtgcatattagaccattcactgtatgaaagaaaacatgttgaataaatttgtgagtttttaataaaaatagaaaatctgatgtttagat

SEQ ID NO: 229180 - DNA, 433 bp, Homo sapiens
ggacaggagacagggagacattgggtaggagagggcagttccttggcaaaggccccactctcaagcgtggaaatccacagcctggaaacccacagccctcagtgagaaaaagtgtttctgtttttgtacccaaaaagttgccttttggtacactacacttccctatcctgtacccatataaaccctgaaccctgggctccaaaaggagatgagcaagcagaacaacggcagaatggcagagcagaaaagaagagaagaagcatctgaatgtcaagaggagcacagctggggacaatcagagagatcagctgctggaccgccaaaccctaggggaagatcattttcccactctgtcccccttccagctccccattcatcctgctgagagctacctccaccactcaataaaaccctgcattcattcttcaagtcc

SEQ ID NO: 229181 - DNA, 430 bp, Homo sapiens
tgctcatcaagatctctgggagtttaaagctatatggtgccagtctttacccacagacactaggattaaattgatctgggtaccacctgggcatgaggattattttttccatgctccccaggtgaattctaatgagcacccaagacaagaaccagtgttctagagcagtgagcctcacactttaatgtgcacaccaatcacgtggagatcttgtcaaaatgcagattctcagtcagtggtctggagtggggctccagatgctacatttctatcaagctccctggtaatgctggggtagcaggtctgccaaccatacttttactattccaggcccttaggtatacatagatgtacatacttttttcccctaaaaattagatccaatcatagtcctgttttacaacgtgcttttttaattcaatgatccatc

SEQ ID NO: 229182 - DNA, 543 bp, Homo sapiens
taggctagatttcctaggggcctcccagctctctctgtctctgtgaccccgacccccacgtggcccatgcaagccccatcaggaagcagcctgtctcttgcctgtcagccacctgctgcttctttacattttccactggaaacagagaggggggaagtccggcagtactccaaaagatggcaggaaaagcaaacaaccctgctgtggaatgcagaaagttccccttctgcaaacctcctttccttattaggaactataatcctgcaaagataggtcttaatctctgcaactctgggcacagtcagggagagcctcctcgcctctggcctctggcactcctccttcctggcagcctatccatctgaaatactctcctcaccctgcctggctccttgcctgcccaagttcccccagcattcttcctattaaagagcatgtgtctggaataaaaaatataatacatacacagcatgttgacaaagagggtgtttgaattttcagtaatgctgttgctgggtggtggggttttacaggatttttaaa

SEQ ID NO: 229183 - DNA, 694 bp, Homo sapiens
cagataaagaatacgtgggctgggtgtggtggctcccgcctgtaatctcagcactttgggaggcgaaggtgggcagattacctgaggtcaggagttcaagaccaccctggccaacatggtgaaatcctgtctctactaaaaacacaaaagtgagctgagcgtaatggcgcatgcctgtagtcccagctactctcaggaggctgaggcaggagaatcgcttaaacccgggaagcagaggttgcagtgagctgagattgcgccacaacactccagcccaggcaacagagtaagactccgtctcagaaaaaaaaatggaccaggagagatattagtgctggttgggtggctccaaaggcagacactgttgggggactgctgcattaggtgactcctggagccttcaagtcttcaattttctttaggtttcatggggagtgaggcccttcaggctgctgagtgttacaagaaagttctccgctttcctgcctcactgagcagtctaaaggaggtgaggtgagctttctgctggcattacttctggcaccatctgcttttccctaaggccaaagtttccctgggatctaggggtttaggccactcaaaacacaattttcggccgggtgcgaaggctcacgcctgtaatcccagcactttgggaggctgaggcagggggatcacttgaggtcaggagttc

SEQ ID NO: 229184 - DNA, 846 bp, Homo sapiens
tgtcaggcgcataaacagtgtctagtttaaacttgctgcgctcctggtaattctgagtggcacggggtggcctttccacgtaagctgcatgggcccctcgggaacacagttgcgctgacctggaggaaagctctgctgtgatttgcccggagctgcagtactgacatgcgggcgtcagggtgtgcagcaccttggagccaccggcctctcaggtgtctgagctttcatttgctgctcatagatgacgtgaatgcattagagatgggtctcgctgtttcccaggctggagtgcagtcactattcacaggcatgatcatagctcactgcagcctcgaagtcctgggcccagcaaccctcccgcctcagcctcccgggccactgcatgcatggcggatgatgcttttaaaggctggtaaataaatccagtgttgaggcccttgcctcggtgctgacagtggaggttggccttctccagagcctttgtggcctgacagagccctgcccacggttcaggactcagcatagctgccacctcaacccaggtactttggtcccgcctggcagtgtgagatggtaaccagatggggcgaaacctgtgggtgccatggcagagcctggtgggtgctagcacggggctggtgcttaggtggcaccgagatcccaaagcacagagcttggagtttggtgggaacttactccctgggcaggggccagcgctgctgtgggccgttcaggccagggttccttccatccttccagctctcccctgccccaccgggtgctctccacgctgcctggtccttgggagcccacccccaagctagttccgggttgggcaccctctgc

SEQ ID NO: 229185 - DNA, 360 bp, Homo sapiens
gtgctgggattacaggcatgagtcactgcacctggtccttaactttttactaaactgtcaaatatttatacaacttttcagactctcaccagcattgtatgtggttaataacttttcaatgatcaaatatttttgctcaacattttccttaaccttgaaattatttgataatattgaatatcagcccttctttgaaatgcttgttcttgacttcatgatagaactctgttgtcttctttctattttgccaagttatctctatatgcctctttttacatatcactaatatattcagtttcaaatatcttctattctcataatttgtcactactattaaaatttatagactatgagttaaat

SEQ ID NO: 229186 - DNA, 158 bp, Homo sapiens
gtgtgcccctcagggcaaaggcagccatggtaaccctgccaactcatgccttaaaaattcatcgttgtttaatgcagtcgatgtgtctggtacacttaaaagtttcttgcagggagtggggtgggaggaggaggaggatgcggaacttgtttttctgg

SEQ ID NO: 229187 - DNA, 1196 bp, Homo sapiens
ctcaggtgatccacccgtctcggcctcccaaagtgctgggattacaggcatgagccagcgcgcccggccagaaaatttaaaattattttgaactgcatgaaagtaaaaacacaatatatcaaaatgtatacgatgcagctaaagccatgctcagagacaaatttacagctttaacacttttttgttttcttttgtttttgagatggagtctcgctctgtcgcctaagctggagtgcagtggtgtgatctcggctcactgcaacctccgccaaccgggttcaagtgattctcctgcctcagtcacctgagtagctgggactacaggcgcccaccaccaagcctggctaatttttgtatttttagtagagacggggtttcaccatgttggtgtggctggtctcgaactcctgacctcatgatccgcccccttggcctcccaaagtgctgggattacaggcgtgagccaccgcacccggccagctataacacttttatcagaaaagaacagtctccaataaccaaatcttcactgttgtggaacacctagcagtatttaaagaaaagaacatgtttagacaagtgtctgtatagttcgaagatatacaggttcacaccgtggagacaacactggttttgagcagagccacaaatagaaattttggttcctggggcaagcacctaatataccttcagatcaacttggaaatgcatgatgtgactcacagatgagtgttggtaacagatgcattactaacaacatcaaccatttggtggcttcttagatgtgaaaatcagtgtctaaaggctgcttgaaggagagttgacgataaatgcaaccaattacaaaactgcacaatcttcaaaagtaactatttttttttgtagacagggtctcactctatagattgctacagtaagtttaaatattgttaaaatgcccagactacccaaagcaatctacagattcaatgcaatccctatcaaaataccaatgacattcttcacagaaatagacaaaacaatcctaaaatgtatgtggaaccacaaaatcataccgggaaattctccagcacattgagcttggcaaagatttcttaagtaatactccagaagcataggcaaccaaagcaaaaacggacaaataggatcacatcaagttaaaaagcttctgcacaacaaaggaaatgatcgacaaa

SEQ ID NO: 229188 - DNA, 822 bp, Homo sapiens
gcatggcattctttctcaactcagagtccaaccacttacgcctatctctaggctcagggttgtttaaagagaaatctgtaaatgactgcaaagtgactctgtatttgtcttagagaagaaaataatgaggcctttgaaacaggtagtgaggtttatgcctacatttattcagtaagtattgaactcccttctcttttctcagccttatagtaggaatgtgtccccattgatgaaaaagtgtgtctatgtgctcaaggaatgtacagaatgcagataattttatgatttaaaagtttcagcgagacagggcactgtgaatcacacctgtaatttcagcattctgggaggctaaggcgggaggattgcttgagcccaggagttcaggaccaatctgggcaatataggaaggccccatctctacaaaaaattttataaaagttagccatgtatcatggtgcatgcctgtagtcccagctacctggggggctgaggtgggaggatcgcttgagcctcagaggtcgaggctgcagtgaactgtgattgcgccactgcactctaccctgggcaacagagcgagattccatctcaaaaaaaaaaaaggataaaaagtttgatgattccattcattgagaggaaactgaaaaataacaaaaatgtgggtgatattctgtatgtaaattgaaacttcaggataagttgaaatttttgaaagatgcctaaagcaattaggtggtttcataaatgagacaacatcacttaatggtagtttttgtaacatatttttaacttaagttttctcatgtaaatagtctctgtattgaa

SEQ ID NO: 229189 - DNA, 985 bp, Homo sapiens
agtagagacgaggtttcaccatgttggccaggctggtctggaacttctgacctcaggtgatccacctgcctcagcctcccaaagtgctgggattacaggcatgagccactgcacccagtcctcatttagatttattaaactttcatggttcgagctttccatatgttttgtttgtgacatggtctctctggagtacactggtacaagccttgaactcctgggcttaaatgaccctcccaccccagcctcccaaagtactgggattacaggtgtgagccactgtgcttggcttcccctgctcctcagattcttcaggtagaaacttaagttattgatttgagcctccctttttcttaatccaaagctaaaaacttttgagtgttgcttttttacatctcataaatttggatatattggggttttgtttgcatttagtttaaaattctttttttttttttttttgagaacggagtctcactcctgttgctcaggctggagtgcagtggcataatcctggctcactgcaacctccgcctcccaagttcaagcgattctccctacctcagcctcccgagtagctgggattacaggcacatgccaccatgcccagctaattttgtatttttagtagagacagggtttcacatgttggccaggctggtctccaactcctgacctcaggtgatccacccacctagacctcccaaagtgccaggattacaggcgtgagccaccgagcccggcccagtttaaaatattttctaatttcctttgtgatttcttccttgttacatgggttatttagaagtgtattaggctccatgtatttgaggatttcccaagtctttttctgttgttgatttctaatttaatttcattatttcatttttttttttatttaccaaggcttgttttatgtcccaaaatggtgtcttttagtggatgttccatgttcacttgagtagaatgtgtagtctgctgtcat

SEQ ID NO: 229190 - DNA, 444 bp, Homo sapiens
tggtcttaaactcctggcctcaggtgatctgcccgccttggcctcccaaagtgttgggattataggcatgagccactgtgtctggccatgagtttttatggagctcctgttgtgttccaaggaattctctgcaacttaggacagatgggagatgagtaaagagggttctttctagccttaaggaaatttgaagcaaggagaggacagacaggaatcagaggttcacggaagaactgataaagatttgtgtatgccacatttggcttctgtaggaaaaagcctctatatgtatcatttaataaatagctaagcgcggtggctcacgcctgtaatgccagcactttgggagaccgaggagggaggatcgcttgggtccaggagtttgagatcagcctgggcaatacaaaaaataaaaaattgaagtttctcatttctacaaaaaaa

SEQ ID NO: 229191 - DNA, 648 bp, Homo sapiens
gcaagactgtgtggccttgacatgggccagggaacagggcccgtccccaggcatagtcccggctgaggacaccactgtcagcacagacagtgcagctgagccactagcacatggagtcacctctggccttcaaggcccaggtctttagataataacttaactcttttgaccaattgtcaattggccatgtacatctcccacgtactgagtgatgtctcgtgtcccgaacatgtatcaaaccagctgcaccccaaccctctcgggccacacatgttctcaggatctcctgggacggcatcatgggccttccgtcactcatatttggctcagaatcactctccaagtattttacagggtttcactcttttcctcgacaacccccagcgggcagctactgttgggggctctgagaccgccggcctgcagggtatggttctcccgaagctgcatgttcagacacaattggaggccgtgcttccaagggggtggagtgagggccctcaagaaaggccaactcaggaatttccaacgtgacccacagcgtctgagctattgaggaggggtcacccgaagaagccgctgggcttgggtgagaacagatgttcctctggccttcttgcctggggctgctcctgaaaccacctttgc

SEQ ID NO: 229192 - DNA, 471 bp, Homo sapiens
gacagtcaaaagaagaatccataagacgctacctctgaaaaacaaaggagtagggctttcaattatttgactaatgatcaacatctgccatctcaaatgtcactgtcctctggtattatctcaagacattcatgttaaaaacaatttttggtgaaggcaaagctaaaatacgtcatctacttctagattagtataactataacagatttagtaaccctaaatgagattctagaaaatatttaagcagtgaaaataccttcagaaaatagacatctgacattcagttccaaacaatgaagtacaaaaatatttattaaggataaattacaaggcagcaatgtagattgctttatatatggagatatataaagaagtccactgttataaaatattttagttggcaaggaaataagacagatcattctacctttgttaactggtatgagacagatataaaagtcacaaaagaga

SEQ ID NO: 229193 - DNA, 602 bp, Homo sapiens
attcctaataaactttcttttctcacaggataattatttctattctatatttaagaaagtcagaacttaaactattttagacaccacaattagaaaccaacagattttacgctaacgaaataaatcagaaatgttatcagttcccccatgtagaagttccctcttggttctgttttgatctttataatttattccaagttcacacctctcagctctatataccttgagcagtacagacgtcccccagtaacctcaggggattggttacaggatctcttgcggggatgctcaagtccctgatataaaatggcatagtatttgcataaaagcctacatgtatcctcccacatattttaagtaatctgtagattacttgtaatacctaacacaatgtaaatgctgtattgttttttgtttttattatttttattgttatattgtcattttttgttgttgctttttctaaatattttcaacctgtgataggtgtaacctgctgatacaaaacccatgggtatggagggctggctgtacctggttgggaataacaaaattctgtgccaatggaaggaacactatcaggcagtccctgaggccctgag

SEQ ID NO: 229194 - DNA, 363 bp, Homo sapiens
atcctgtaaaacaggtacagtactataattaccctcatcatatagatgaggaaaatggaacacctgtgataaataaacttgctcaattctcccatttagcaaatagcactggtgagatttgaaccaggcagtctgaggccaaagcttgtgctgttactaacattcttgccttcctacagcctgtctttgaaatgactccgtgatttctccacatggaaatatggcaaagtgtttttgatggcccacatccatggacctactgagattttataattttaacataaatttgccttcatctttgagcctctggtctaccccttgaaggccatgagtctgacaataaaagcattatactgttaaata

SEQ ID NO: 229195 - DNA, 449 bp, Homo sapiens
ctcagcagggattcacacccagatctgtcagccttgtggacagctgtgctgtccagaaaaggctgggtctcctctgtgtatgtactggggggtgtggggagtggggagggcatctttgggtggtcttggtgcaggcaacctgcacagaaggggctggagctttaaggggcggctctgaagccttgagtcttcatttcagtctttggaatgtcactttgaccccatttccctctgccttagtgaagacaacaaacatgccccaatacacgcagtctgtgcttctcactctcctgcctgtctggaagattcgggtgtgtttccccaagtgtcatcagggtacatgagatgggattttaaatgaaatgtttttaaaattgattgtaaatggataacatactagtgtgataaatgtttcctcttcaaaataaattcattgtaagtaaaaacat

SEQ ID NO: 229196 - DNA, 977 bp, Homo sapiens
tgagatggagtttcactcttgttgcccaggctggagtgcaatggcacgatctcggttcactgcaacctctgcctcctgggttcaagtgattctcctgcctcagcctcccaagtagctaggattacaggcatgtgccaccacgcccggctaattttgtatttttagtagagacgggggtttcttcatgttggtgaggttggtctcgaactcctgacctcaggtgattcatccgcttcggcatcccaaagtgttgggattacagccgtgagccaccacgcccagcctgctttcatttttaacagtacacattgaaatacagaaaaggtgagaggaagcaactttcattgtatcgtagcaataaactccacactgggtgacatctacctagaaatcccttccctctaaccaggccatgatgggaacctttgctgcctgcccttggagaaccccggattggcttccctgggactcaggtctggtggcaggagggcagcagtgtgcccccaccatccctcatggcctgccgccagcagggccataatggcaggactttgatttgacttccagccccacatgaggaggggggctaccaagccaggtgcagtgtttgtggccctttatttaagttgttttcttatattattctgcatataaacaatgacgtttaaatggaaaaaacaacaacaacgaaaacctccattgggtggagccacactttaaatgaaaatttctctttgactatgctcagaaaaaaaaatagaattttgaatatatttagcagttgttgtctatttttaactaactccatatgctgccagtatcgacttcatgacatttgccaaaataaaattttatttttgcctttataagattttcttggaaaaaatgaaatgaatattttgcaagaaaaagttaatttaaaaatgtaatggtttgcaaaaaaaatgtgatgtacagattaaaatattaacctgaaa

SEQ ID NO: 229197 - DNA, 566 bp, Homo sapiens
agtaaaagagaaggctaggaacatggctgtaggtttggtactagaagaaaagtgggacctattccgacttcctgatcctgtgatttttttctttttttgagattcacacacacacacacacacaaactatgcacaagtttgcttccatgttgtatagcaagagtttaaatatttctgagttaatgatgccaaactgtgctccgattatatcagcatatttacatgatccttgaacaccacatatagattcctatactacacatttaagcaaaatcacctcctgacttcacaatgaaagagacctattggattaaaaagtggtttctagtaaaccccaaagagatactgttactaaattactaaatttaaaggcaaaatagtattcactaaactgatttttctgtcttattttccttatttggcataatcattaaccaacttctagtaaatggaagcattctcacaatttaagtttttttagggggaaacacacaatttataaatactgtcaagtgaagaacagattcctgaatactaaaagacccatgcatatccttgtatgtaaa

SEQ ID NO: 229198 - DNA, 405 bp, Homo sapiens
caaaaaactgcagttatgattaaaatgacacataggacacacaggaaaacatattcaacagaaagccaatgggttcaattatttctttttttctctaatttcaaaaatgtttaagaatttatatctgggcgcagtggctaacacctgtaatcccagcactttgggagcccgaggcggcagatcacttgaggccagaagtttgagaccagcctggccaacatggtgtaaccctgtttctgctaaaaatacaaaatttagccaggcttagtgccgcttgcctgtaatcccagctactggggaggctgaggcaggacaatcacttgaatctgggaggtagaggttgcagtgagccaagatggtgctgctgcactccaacctgggtgacagagcgagactccgtctcca

SEQ ID NO: 229199 - DNA, 421 bp, Homo sapiens
tgaattccctctataaaactgcatttgtactactgtaaacactagtcaggaaaaattaaatccacatacttcctaagacctttgagcagtactgggtgaagtctagcaaacaacagggaaattaataaacagctctcattaagccacatacactaatcaaactacaaatctcatgggcctattttggcccacaaggtgctgatatgctagagaggtgctacgaaactaagaagtaagctaggcacagcaatgcttgcttctaaatcattcctgcaagacagaaatactaactgaacatccagttgcattacaaactttctggacagcatcctctacttcatctctcaggtcgtcttcagagtccattccctttgtcttgatcttttctcttttatttgattcatcttgatgaagcatctga

SEQ ID NO: 229200 - DNA, 653 bp, Homo sapiens
cagagtgttatgaaaggaaattataggagaatggggtaaaggacagtctctctgaggagctgacttcagctgttacctgaaagataggaaagagtcagccgctcaaacagcttccctgtagcgagcattgtaagcaccaggcagtaaagagactgatgtgtactaggaactagtagatacccaaggtaggaagaagaaagcaagccagaattttccctggttttctggaaaaggaaggaggcatgagaaggcattggactgggattcatgtccccacactgcatctcaggtaacctgtagactccctgaagcagggaccagttttcttgttcaatgctctgacgcccagcagagcatttagaccataggaggcacttaaacatatttgctggataacacataaatgaattttaacttgtattctcatttgcttctttgtcaaatttaattgaaaaactcagagcctcagagttagaagggatattgcgagtcagcttgtctggtcccccatctgtttgcgtaaatcccctctgcaacgtgcgtggcaaagacccgacagcctcgactttctgagcacttccagggaggagggctcatttcctttggacccagttcagcaccttaaaaaattattttgtaaagactgccatgca

SEQ ID NO: 229201 - DNA, 644 bp, Homo sapiens
aaaaaaaaggtaaagctgttgctacttgccagcttttctttttgccttttgctgatagatggcactttttttgctggcactgttatcaactttattaatagatttaaaagtactgacaatttttcaagccacaaaaggtttaaaaatctttggaacttcttgtcatacttctggttttctgctttcctgaggccgttgtcccatagagtactgtcaatacagtgttgagaagtgaatgggagttaaactagctccctaatatgccatcagtggcttccagtccatttccttgaggggtctaatcttgggctttggggagattacttagagatttatacaggtgagtagtgaaatttgcccagggatttgagttgtactttttagccttacggattttagctaactccagagaaaatgcgaaagagaaacgttggttcaagacagacagccctcaacgaagaattatcttcataagcttgctttcatcctgtttctcagagagttccaggccagtgtcagaccttccgtggctctggacaatattaatagttcatgaatgagctacaaaaattcctgatggatgcaattgtatgagcctatagtcccggctacttaggaagctgaggcaggaggattgcttgagc

SEQ ID NO: 229202 - DNA, 437 bp, Homo sapiens
ttcagggaacctggcacacaaatcaaagtgttgtctttctgtttggaagggaagccttcttctttaaaaagtaacctgacatcaccagccctggccggaattgttgatgcccagatagagttggcctcccccaggctcatctgtcctgagtacccttctcctctgctatgtagcatgacccaatctactccctttcccagggtaggactagggcagcctctccagattcttctttgttactcccattgcaacaaaacaatgtggtgggctcagaatgaaggtcgacattgcttttctgcttttcagcaactgtctattgctgtttctggggcttctgagagaaagatttgtgggaccctcagaattcactcctccccagggcagaaccttcagtaaattctgttggtggtgttccatccaacatttcttgatcagct

SEQ ID NO: 229203 - DNA, 448 bp, Homo sapiens
ctttactgtagcataatttataatcatgaaaaatatggagccattaaaatgttctaacactagggaactggttacatacaaaatattcatccacttgataaaacactacatagctgtcagaaatgatgctcactcaatgactgggttaacgtggaaaatgttgattgtattattaggtggaaaagagcaaggactttcttaccttttacctaaggggaaacacatctctcaaacttgtgtgtaggaaaacaaaaccccttaaaggaatacagcaaggtcacaatgcagctgtttatttagaggtaaatttggtgattccttcccctcttctttctgcctttctgtgtttttcaagttttcagttatgcacattacagttttataaaatagaaggaatatagataataaatatttacatcaaatctaaaataaaatgtttaaaaagagg

SEQ ID NO: 229204 - DNA, 392 bp, Homo sapiens
aacagcaagactgaccctgtctctaaaaataaataaaggtagaatttttgataagttggatgtgggctatgaaagaggactccttttttttttaggtgaaagcagctggaagaatagtttccatactgataatggggaaaataggatcaggctttgtgtgtagctgtggtccctgagcaattgggtaagaattcagagaaagctctgggctgaagatttaaatttggcagttagcagcatgtagctggtatttaaggccataagactggatgaaatagcttgggggcatgtagatagagagggctgggaactgaactctagagaactcataaagttatgagcttggtttggttggttatatagaaggaactggcaaagatgacaggagggcc

SEQ ID NO: 229205 - DNA, 341 bp, Homo sapiens
aagtgagatttttgacatagtttaaggaattggtgtgccaaaatctttttataaagcatttctgaaaatcctacctcaaattgtgcaatctcttaattatttaatccattgactagttctgtgcagttcagataaagcatcataattcaaccgcaaagtcagtgtagtgttctattaaacatccatatagaaaactgaaggataagggattttgaagacaacatacaaggttaaactagtattttaaaattgaagtaggcctcctaaatgtaataattgcatatctgacttagttaatacttcaaatatagtcaaatcttattaaactgtactaatataat

SEQ ID NO: 229206 - DNA, 202 bp, Homo sapiens
aagatcacctcagaagatcacctctttgctgtctttggtacaacataaaagaatctagagggcacttctaatgattcagatcccttaagaaacacaaaaaaaggtgccatctacctcttacttgtactgtaggagaaatgtgacttgtgtgtgtgtgagagatgagtggtgagtcatcaccacggtaagagctacagtttta

SEQ ID NO: 229207 - DNA, 319 bp, Homo sapiens
aaattttgttttcctgattcaaaggactggatgccaacctcagaactcaagaggtaaatgggctaatttatctgatttctattcattagacctgcaaaaataaatcagagtatttgagaaatgggtacagccattagtgaagctatgtgaatactgtggcaagtcaaggatgtggtaggaggaaaggaagaagcagaactagaacatttcctatgtggggcttaaaaaaataaaaacgtggaataatttcagtgtcaaaaggaaaacaaatttgagagtctcttcagtttgccagttctacaaaaaaaaaaaaaagttc

SEQ ID NO: 229208 - DNA, 417 bp, Homo sapiens
tttcctccttcatgtagaatttgtaatcaagagcccaattttgtcatttggaaatactaattatctaatcacggcatgctgtataacgtacttgtctgcccaattagctaggacaattattaaaattcagaggcctaattatgtctcaatttaatgctggcaaacttgcatacagagcagtaattaaaatcctctctttccctctgcctttagggcaggggatgattaggccctgtcagggggtgtactgaaccaaaccagtgaagcgtattgtgcaacatgaccctgcattgttaagtgtgtcaacatattaacctgaattcccttcagcccccacataatcacatttggtggaagaatgaaggagctaaaacatgaagcatttttttaaaaaaacataaattcattttaattaaa

SEQ ID NO: 229209 - DNA, 717 bp, Homo sapiens
aatctgggtaattcagttcttggagcatttttggggactgtgctctttgggggacatagcccatcccttgagtttacatctagtggggagaggtggataaggtatgtatgccaaggtaagatgttgaggttattgccacaagagaaacacaaagtcctgtgggatccagtggcgagaaggggaaggccaacaatgggttgttttatttcccaagtaccaaagagaagaaatatttttttgcaaatcccatgtgatgttttgtttcttctctgtttagttggaaatgtgttcttggccaatgcctctttttttaaaattttttaaaaggtaatggctatgccttctttttttttgagatggagtattttctcttgttgcccaggctggagtgcaatggcatgatcttggctcactgcaacctctatcttccgggttcaagcgattcttctgcctcagcctcaagtagctgggattacaggcatgcgccaccacgctcggctaattttgtatttttagtagagacagggtttctccatgttggtcaggctggtctcgagctcccgatgtcaggtgatccgcccgctttggcctcccaaagtgctgagattataggcgtgactcaccgtgtctggcagctacatcttaagatatttcagttgtctcatgttaacagaaaaattaatgcagtcatgttttcaggcttgggaatatgtacct

SEQ ID NO: 229210 - DNA, 549 bp, Homo sapiens
taaccctctttcaaaattaagatttgtttaagtgtgtttaaataattttatcctggttggatatttttataattctatatattcttttaaaaacctataatatatctgattgatctgatgtaaaaacaagaagaaattctagcttcaaaggccaaaatgcatataaaggtcataatttcacaatagcaactacagaaacacattgaaggcattgggtctttctcctgttgcttctggagaaagaagaagaaggataaatgaaggaaacggaggacgcatggcatttccctaatccattttttgtagcaactctgacaggcgagcttgcaatggaaaattgtgcctgatccttgattcttgaaacaaatttccccaaaataaacttttactttagtgatgggattaaactcagtaaaaacagtcaaggattagtgaagaagactccatattctatcagaggatttgtaaaaaattctaattctttgacactttaatttgtggaatgggccaggtgtggtggctcacacctgtaatcctagcactttggga

SEQ ID NO: 229211 - DNA, 482 bp, Homo sapiens
ttgattaaagaaaatgattggaataatactcattctttgaaatttattgagactccttgtggtatagtacagagtagatttttgtgattttcccatatattcttggaaagaacgtatattctctacttgttgagctattctttataactttgactatttttgtctgcttgaactatcagttactttcagcattgtgtcaaaatttccaactaccattacagtgtcatgcatcatttaataaggagggtacgttctgagaaatgggtgccgattttgctgttgtgaaatcatcatagagtgtacttacataaacctaggtggtatagcctgctacacacctaggctatatggtatagcctgttgctcccaggctacaaacctgtacagcatgttattgtgctgaatactgtaggcagttgtaacacaagggtaagtattgtgtgtctaaacatatctagatgtagaaaagatacagtaaaaaa

SEQ ID NO: 229212 - DNA, 549 bp, Homo sapiens
cactggcttgacggctttctctgaaaccctctgattccgcctggcccatccacactgtcccttcccggccagggctcatctcctatgcctggaccaaacagcgtagtctccagtctccctgatctccccacacgtggccccacccatcctctgaagcagccccaggaggcagcagtgacttcacacttctagtgcccggccctcccggccctcctctctgggcttgcttgccagggtcctcccaacctgactgctgcctcccacctcctctccgcccctggagctctccagccgcagccgcggggcctgcttgggattctcctctgctggcatcatccctgcctgcctcagccttcccaggcccaatcctgcccgatctcacctcttcccgcccagccacctggtcgggtcccgaccagcatctgccttcaaacctggagtccttccctgagtgcttgcggtgcactgtgaggaaggaaatcaatgtaaggattatgacccacattttttaaaaataaaaagattaaggagaacagcatagagtagaaa

SEQ ID NO: 229213 - DNA, 448 bp, Homo sapiens
atattttacttcatcaaaatagccctcaatggcagccgtaattgaatggttttgttttttaaatttctaattctctaaatcttcattggtcaatgttttaggacatggtaaggatctttgttcaaatgtgtatgcgtgtcaatgtgtgaatgcctacgcatgatttaattcttccagttgataattggaagataatgagtcaatcagacatatttaccaattaacttttctgtaagaattcataaactagacatgtgagtcctgaggaaagaaaaagaatacaacccttgccctaaagaacacgacgtgtcagaattatataaaatttggcagggtgtagtggcacacacctgtagtcccagctactcaggaggctgaggtggggaaatcgcttgagtctaggaattcgagaccagcgagggcaacatagcaagttgctgtctctaaa

SEQ ID NO: 229214 - DNA, 475 bp, Homo sapiens
aaatagttgcacagcattgtgaataattccactgaatagtacacttaaaaataattaagatggtgcattttatgttctgtatattttaccacaatttaaaagtttgcttcaaactgtgcctcaaatctgcctacccagtgttcttatgctgaaagttttctgcacaagagtcacttgtcaagtcatttctgaagataacatcttgtcatttcttgattgtggaaatggatcaaaaatgcttcattaaatgcttatagcacctttaccaaaatctgaaatgagtgaaaactaatggctacatttatatcctgagttctaaagataaattggagactccttgaaacttagaattgtaatgccttcatgttttataagattatgtcttgttattcttaatgacaatttagaaaaaaaaatggtttttaaaatttaacagatagtccagaccatggatgtaaattggagagagaattaa

SEQ ID NO: 229215 - DNA, 357 bp, Homo sapiens
aggtagcccatggactgcagtcttaaacgacgtccaaagcaggactcagccggatcaatcagctgtggtgatagtttttcccagtgattgactctaaagtactccagaaaatccaatatgaagtatttcacaagaaaggcagtcttataaagaacagatgtactaaacggattgtactgctcacaaacaccaaactgaaatacagttaatagagagcagcaaacaagtttgaagacccaaaagagaacatttttaaagaagctgtaccatgtgaaagagacatcatttgtcacagcattgagaacagaattgtagaggggtcatggggataaaaatgcatatctgagaaaacttcat

SEQ ID NO: 229216 - DNA, 315 bp, Homo sapiens
aggcgtgagaatccggaactggcaatgcactgtctcctattggtcaatgcaaaatgtttaatttgcatatataacacaaggcggggccctccggtgaggtcacgtggctatgaaccactgaagaagaccccggcgcaggggtgcggccggagctccagtggcgcaatcggttagcgcgcggtacttatatgacagtgcgagcggagcaatgccgaggttgtgagttcgatcctcacctggagcactttttttccccatcagtttttataaacttacacatctaataaaccaaccaaaacatctacatcaaaaaaa

SEQ ID NO: 229217 - DNA, 437 bp, Homo sapiens
gatttttcacacaagctctatttgtccaactgtcccagtgcttctgatggaccagtcactgattcttcctctgatcccctgactctcccttctagatgttcactccctgagatccttcctcatctgtgagatctgaatcctatagtaaatttttatcctcataatactcatagtggctctgcttccctgaaacacctgggcctacacacacttctttgcatggcggttcttgcctcatcacttaagtctcagtttaaatgtcacttcacagagtccccttctcttatgacccttagtaaaataaccactctttccccagactctctctctggtagtggtagtggttccagtgtgtgtaccttatggagttgatgaaaatatttagaacttacatttttgtctaaaaaacaagaaaaaactgaaaattgactgtaaat

SEQ ID NO: 229218 - DNA, 301 bp, Homo sapiens
ggggaattttaattttatttaattttagttcaatttaaataaccaaatgtgaatactggttaccatattggataatgtagatttaggccctcatttataaatatgagctaagcagactaaactttttaggaaaatagaaaccatgaaacgcatgctagaaaccctcccatgcccagttaagagaggtaatgtaagtcacagaagagtacttttaaaaacccgaaacccgaagtatcctaaattatatccttaatgattcaaatagctttcaaagtccaaaaaccagcaaacactgctgttg

SEQ ID NO: 229219 - DNA, 525 bp, Homo sapiens
tcagagcgcggttagttctgcgctcaatctatcctcggcgtgggaggtcccgccccttccggcctgtgattggtctgcccgagctcctcgcagccgcattggctgtcaatatcaaccaatcacctgctgtttagccccggggctctctgggagatgtagtcccgctccccagtttcccgcgggagcttttcgcgtctctgtgtgcccaggatccggaagtgtaagcctaagtggcccctctaaggaaaagtcacagcgccaagttcgtgctgatctcgacacgctgtgtggtgtcgagcctgaaattttagttccgttttgctgttgacttgcgctgggcaagacagttaacctctcagtctccacactctacaaacaagaatgataggatggtagtaattagaattttttagggttgtagtaggcgttaaatgagatcgtttgaccgcgctatgaaaactctgaattaccatatgggggtgttaattgtaacttattgacagtaaacatatattgagcacctac

SEQ ID NO: 229220 - DNA, 364 bp, Homo sapiens
tactgctcagatgagccgagcctgaatttgggagtggttgttacagagcattaccctggcaataactgactgatgcagagatgtaaatagacatcactggtggagcccccaggaaagctctttaacagaagacagactcagctggcaggtttcccgtctccttgaatgaagacaggctcaatgcttggaggggtgagaggaggcagccatcttacaaccacaggtcacaggaagacactaaacaaggccgtgtggaaagacagaaggagcctccatccctcagcaccacagagacattgtatcagcctagaaatgcctaaatctgaacttcctcttacctaagaaaaataaaacctcaatttga

SEQ ID NO: 229221 - DNA, 464 bp, Homo sapiens
  misc_feature (30)..(30): n is a, c, g, or t
  misc_feature (132)..(132): n is a, c, g, or t
  misc_feature (142)..(142): n is a, c, g, or t
cagtaaggctgtttgctttcttatttgtgntattcaaagaagagagacaggaatacttgattggaggatcagtcagcatacatacaacattcatcaatataagttccccatcttatatgggtgtagttggtnggcaccccangaacaactacaatagtgacgttaaagatcactgtaggccaggcgcggtggctcattcctgtaatcccagcactttgggaggctgaggcaggcggatcacctgaagtcaggagatcgagaccatcctgaccaacatggtgaaaccctgtctctactaaaaatacaaaaattagccgggcgtggtggcgggtgcctgtagtcccagctactcgggaggctgaggcaggagaatcgcttgaacccgggaggcagaggttgcagtgagccgagatcacaccactgcactccagcccgggcgacaagagcaaaactccatctcaaga

SEQ ID NO: 229222 - DNA, 401 bp, Homo sapiens
tgttcatatccttgttagtccctgtgtgtctggattggtttgtatgaccaatagaataaagaagaagtgatcatgtgtgaatacagagactagatcataaaaggcattgttacttccctcttggtcactctctttagaatagtttcttttgagggaagccagctgttatgccaagtagccttctggagtctcttgtgacaaggaactgtggcctcctgacaatagtcagtgaggaactgagcctctagccaacagccacatgaaagatgccatgttagaggtgaatcctccatccccagtcaaatcataactgcagccctggccagcaacttggctacaacctatggaaggccctaagccagaaccacccaggttcctggccctcagaaactgcacggagg

SEQ ID NO: 229223 - DNA, 369 bp, Homo sapiens
ctcaaaaaaaaaaaaaaaaaaaaaatcactgagacatactgccaaggacagatggagttagggggcttaaagatcctctataccagccgggtgcggtggctcacgcctataatcccagtactttgggaggccgaggcaggcagatcaagaggtcaggagatcaagaccatcctggctaacacggtgaaaccccatctctactaaaaatacaaaaaaattagccaggcgtggtggtgggtgcctgtagtcccagccactcgggaggctgaggcaggagaatggtgtgaacccgggaggtggagcttgcagtgagccgagatcacgccactgcattccagcctgggggacagagcgagactctgtctcaaa

SEQ ID NO: 229224 - DNA, 509 bp, Homo sapiens
ctgctttcttcttttctatgcgcaagccccaccacagtgtcttctagccagcattcaaggcccctgaatgtgtcactcagtcgggcgtgtgagcatttccctgcgtttttggttagcagctgatgaggggagatgagtagaggaaggagtgggatcagaggatggctgcttcccttctgtgaggtcccgcacagtcagtgctatttgtaggcacatggagcctcaaggctcaccaatatgcccagcctcccatgggggctgtgcagctctcttcctcaggtctcccagggaccctgtgggatccgcctgcccacacctgccagcctgtggcatgacacatttgtggcagtgtgtaaactttaccctaaagttgggctactgcaaaataaaatgaaagtccactgaattaatcaagcagaaacgtaaggagcttagtctaaagtaaaaattttaagtgaagagactggtggcatttggaaactctgaataatgcattttcctcatgtcag

SEQ ID NO: 229225 - DNA, 408 bp, Homo sapiens
atctgacttttaaaaaaaattatctgaccttgagttatagtgccccaaagtaagcaaagttccaaacacacagtatcatcagaattgagttaaaattatcaccaggggcttaatttctgaaattaaaaaggaaatgttatttccttatgaaaagaaaaggaaccaaaaatgaacttcaaggtagctgatttctgtctatgttaagacttaggtaatgggagaaagggaaaaggaaggacagaattaggagaggagcagtgtttaacaattgcgggtgcaagactcaagttttttagaatccattagcagagaaccctatttctcccattaactgctgtccttttaaatcctggcaccagctctgaggactgcagggtccatagctagtgccccactctacccagttta

SEQ ID NO: 229226 - DNA, 489 bp, Homo sapiens
acatgttttacttatttattggcattggcatttaaacacaattctgaaacatttttaaaatgcagaaaggtttccagagtagtacaagaacttctattaaatatctatcccatgcccaataatgtcctttatagcaaagggcccaatccaggatcacattttgcactcaattaccatgtctctctagtctccttcaacctggaacagttcttcgggatttcttgactttcatgatcttgattttttttttttttttttttttttttgagacagggtctcactctgtcacccaggaccatattgaattcctggactcaagaaatcctctcacgtcagcctcccaaattgctgggattatagccggaagtcaccgtgcccggccgtcatgaccttgatatttttaaagattacaggctggtcattttattttgttcttcaatttgggattgcctgatgtttcctcctgattagatccaatttaggtatctt

SEQ ID NO: 229227 - DNA, 427 bp, Homo sapiens
agaaccaaaattctgtcacaagttgtttccttgattttggtgacaagtgacaatgggcggatgccaagagtatgctaagaattgagacaaacatctctccatccctggcccttactaccagttagatgacagtcatcaattttgctgactctggatctgtttcctttgctggaactctcagataatcttatagctccaaaacccagctcatatcagagaaacagaatagtacctgcctgacttggtttttagctcaggtggtatctggcaatcataaatatttcattaacataacatttgcaaaaaaagaaatacatgttttgtatgtatagttttgtaaatcactgcaaactctttctgaaagcaagcagggtacaaataattaaagtaaaataaaataatttggaagctgaacaagaacaataaa

SEQ ID NO: 229228 - DNA, 730 bp, Homo sapiens
ctgcctgggttcttattctgcctccaccatttattctgtaactttaggacaatatgtttagcctctctgtgtctcagtttcctcttctacgaaatgttattctgatgacacttcttcaggagctctgtgaggattaaatgagatgctacatgtaaaaggcttaggaaatgttagccacttaattctactttggaaaattttaatcattgctgttttttatctcaactgttttggcactgtaactagcacatagtaactactcagtaagtagttaaatgaatatcgtaagtattcaatatacttctgttagtacagagcagtataatagtcagaatttaggaattaaagcggtcgtatgcctggtttcctagttattggagggttggaagttcagtcattcttgtcactttcacaaagagttcttctgtctgtagctcccctctcactgcaggattgtaagtgctttgcaatgtccaggcctcctgcctctaagtgcttcacacactctcagttcccctctgctttctctcactttgcattactttctgggtcatcagagatgaggtagaggtgataagaggaaaccaaggactgggatttgaaataaaactatgccctcttgagcaagtcacttaacctctctagtcctaagcatccttccctacagaatgggaataatatcttcccacataagatttgtggtagtggatcaaatagggtacagcatggg

SEQ ID NO: 229229 - DNA, 357 bp, Homo sapiens
gctttttatttaaattagcaatctaaatgaaacagcacaggatattaattgtatttggacaactgagttccttcccgcccctatcctcccaaccccccaactacacaaatttgatcaaaatcttttagagagggggttagggataaattttcaatgaaagagactgtggaaatcggaataagagatataataaagaatgcagccataacggccaaaagagtttctgtattagagagcctgtccaggattgaagttcagtcctgaaacccaggactgcagttgtcatttgaatataaagcggaaagcagtagaaaatacttgggaagggatttgaaagtggaccaagactggtgtaaa

SEQ ID NO: 229230 - DNA, 291 bp, Homo sapiens
tgagctactagaatttaggatttcaacatgttttgaggagggtcgcttgagtccagaagatcaaggctgtggcgagctgtgattgcaccactgcactccagcctgggcaatagagcaagccctgtctcaaaaaaaaaaaaaaaaaaagtcatctcctttgtcttctgattccgtgagctctcatagaaaggaagtgaagcagtgaaagcatccccccaaaagggagttttcaaaaccagcctaagcaacatagcaagaccttgcctttagaaagtatttaaatttgaagga

SEQ ID NO: 229231 - DNA, 701 bp, Homo sapiens
gaaacatttccagacagaagatatgtaaaagaattccaagatgagagataaggatttcaacagggcagtgacatgatcagatttggctttaaaatagtaatcctgggagcaatatggaaaacagagaagagcccagtgaacactgtaagactagcaacactgaatatttcaagagagaaatgaaggtggtttgatgttgagtaacagacaataaagagaaaactggagagtctagcaacagatgatgtagggagaaaaaaagaacttataagaataattctcaggtttcagtatgatagtgattatcaactgaatgatagtgattatgagctcatttggacatgccaagtttgaagtacttcagagaatgaaggctccattaactagacaaatgcatatatgagtctgaatctcaggaaatgaagctagagacacaatttgggaatcatctgcacagaggcacatgaagctacataaggtgaagagagtgtaccatgagaagaacaactaggactaaaccccaagaatgcctctatttaaggggggatggtgggggcagttagtagtcattgaaggaggaggagaggctaagaaacagatagaaggtaggtaggaggcatacaaagagagttctttgttacagaaatcaaggaaacatgttagaagaacgaaggaatgaccaactgtggcaaacgctgctt

SEQ ID NO: 229232 - DNA, 376 bp, Homo sapiens
gacatttccagaataaagaatggggaaaagcagactaggttttcaataccctttcagtagaaaactgccccataaactcattggctacctacttcttaatccccaataactgtttttatgtgcgcatccccacccccataataggcttgactcccaccctccaatacaaacactgggctttctccagagcagatcaggccaaaagcaagggctgggacaggaaatacacttacagggagaagagctgggtctgaatgactccttgaaagataatccttcatgtattcactctaaaacacgaatctagcacttactatgtgttctggtaccattctagcactggggatgcaataaaaatcaaataagacgtggttct

SEQ ID NO: 229233 - DNA, 422 bp, Homo sapiens
tcagagcaattctgctcaaaatttgggatatcaagaagaatgaaattactaatcttttttgtcatcctccttactgttatccccagatatttgtatgtttctattttcccacttacaatttagatcacttgtaaacatacatacaatggagttttggcaaattttgagcttaccgtgtggattaccttctggttgctgtcagtgttttccaaaactcacacataatgtgaaagaaaagaacaaaattgggtagcaatcattgtatggtccagccatgaaataatgggttttataacttcctctaaactaaactagaataagaaaaaatcataaataagattacaatttggggcaacccactcgggtccccttccacactgtggaagctttgttctttcactcttcgcaataaatttgcagca

SEQ ID NO: 229234 - DNA, 204 bp, Homo sapiens
gggacagacacgctgatgcacatgggagtagtggatcctcatttacactctggaagggaattgtggagagggaggtatagatgaggggatggaagggaagggcaccggcaaatattgttgatagcgagggaagggcggtattgtgatcggctttgactgtcagcctaaggaatttgaatttcattctagagatccaggggaggt

SEQ ID NO: 229235 - DNA, 513 bp, Homo sapiens
attaattccccccccccctggtgccacacacacatttttgaacagccagatctcaggagaactcactcactgtcgtgaggacagcacccagggtatggtgccagaccattcatgagatatccaccccatgacccaaccacctcccaccaggccccacctccgacactggggattacgactcaacatgagatctggcggggacaaatgtccaaaccatcccagtctccctcacgttctcccagcggacattggcgagccgctgcccagcgtcaggtgctgggcactgagatggtgaggacccctgcccagccctcaggagctctctgactgtgtaaagagctgagtcatgatcaatcaaaggtactccgctggagggatgcgttagggcccagaaaagggagttgcttgctcgccttagggtggagttggtaaggggaggtttcccagagttaagttgaagccaggttctgagggatgagtaggagtttgacaggcagaagaagcaactcgagc

SEQ ID NO: 229236 - DNA, 481 bp, Homo sapiens
atggaatgtgcaaaggtatatgaaagtgccttgctaaaatcctagtgcgtggttggcactcattaactgtgctgtatttctcccatgttttagatgactgggccttcagagaacttgccgcaattttcaggaaatgtgtgagctaagggtatctctgttttcacttgcttctgattttgtcccttctctaattgctccactctaggtgtctttgtttcttatcttcattgtaggcctaagcactgaccaggcaaggcagagagtgaagccataaagagaagtcagcaaggcagttgggcccccgggaggaagggggtgggcaggtctcattctatttgtacaggtgcattgtaatgctgcctgtggtgtgaacattttccacttcattactcctggccctggcccaggccctgtctgctcccctggcccctgccttggtttaatttcagcagttcctggcctttggaaggcagcagtcaca

SEQ ID NO: 229237 - DNA, 307 bp, Homo sapiens
ggaattagcaagaacacttcccaggagtaggggaatctccaattgttcaactccccaaggcctaccttaaaggcacaaacattaaagtttgtcattgtttcctcctcttccaactcccccttgctcgttacccatcccacatttatcctgttcctcttgcaagtataaacacggggataaagatgctgtgttgcagttttcagcttttggttacctatatcagttctgtaacatagagtatcaaagttaatatgaatgatgattttgactggcttgactagggatagccattggtaaaacataacgt

SEQ ID NO: 229238 - DNA, 623 bp, Homo sapiens
tgaagttattcctaacattgacccaaacatgcatcccccatttgggcatagctttagcttacaccttgcttacagcctgggtgtatcttcagagaccagaattttattgatatataaaaaaaaaatctgccaaccgaaaacctttgtagctgcttcctgtttgagcagcatggttttctaaaatgcatcttggaggggctgtcaatagggcagcatttctgctgcagacgctgagcccctggtcctaggtgccagagttccccaggtccctgtctccacctggttttctttccagtctcagcagtgttcagactttcccagcagatatttttctttgttggtgacttttccataccatggaatgattagcaaatgcatttctgctgtctttgaaggatgctattccaaaacaggatcaggaagaacccttagtttcctttcagaataaacaagaagctagaaaggggtttctaagaggccactcctctgaatcgagatgaagcctaggttgggggtgctaagagtatgggttaccttcccccttttactcaacttttccttttaacgtggctatggccacccctggcttaatgctaaaactcataggacaaaatgtacttaaa

SEQ ID NO: 229239 - DNA, 524 bp, Homo sapiens
tacaggcgcccgccaccacgcccggctaattttttgtattttttagtagtgatggggtatcaccgtgttagccaggatggtctccatctcctgacctcgtgatccgtctgcctcagcctcccaaagtgctgggattacaggcgtgagccaccgcacccgaccaagttacccatcgtttttatctcctactgcctagcacagtgagtgcttatcacatgaaaggtactgatttttttaaaatgaatctaacattcatttttaaaaaagcctaccctttcatccaattattttttctcttcccagctgttttcttctcccccacctctgattttttaacttcttaatttctttttctttttcttttcttttttctttttttgagacgacagagtcttactctattgcccaggctggtctcaaactcctgacctcaggtgatccacctgcttccacctcctgaagtgctgggattacaggtgtgagccaccgtgcctggccagcttcttaatttcttgaaattgttg

SEQ ID NO: 229240 - DNA, 388 bp, Homo sapiens
aataagaaggtgatagacctggagtgagaatccacccaattcatgtcaatcggagacaaatttgcaatatcctgtgattcctgaactggctgtggtcactgatcacttctgtcctggaggaactagagacattcaagacaaataaggactcatctagtcccctgattaaaggacttttcatagaggctgcattaagggccaaattatgtacaatgtgctctctgagatggggatgtgtaaatagccgtcaaaatgtcatctgggcagaaatttgtttgggaggataaatttatgttcaggggtgaggggtgaatacaatagaaatttgtattttgcagagggaaatgtgggttccatggtgggtagaaataaaatagattagtagaat

SEQ ID NO: 229241 - DNA, 758 bp, Homo sapiens
acaaaaacaattaaactgaaaagtgtattgtgcgttattgtgttaagcactatacatacattatgctgtttaatcatggtacttcttgaagtagttatttttctctttgttttaccaaaaaactctgaggcttagagatgtttaaaataactttttcaaagttatacatttgtaagtaagaaggctaaccctgatcacctctcaagcatatttgtaatcctgtgtaaaatctagttggctgtgttcaaaatggtaagactagagtgtgtcttggaagcctcaagcagttcagtccatcttgcctcatacctctgtctgcctggatcccaggtccaaatgcaggctcccaaagtgttgagattacaggtgtgagccactatgccttgcccctatttttttcttttgtttcaattgacaaataattgtagatattgatggggtacgtatgatgttttgatacatatagtgtttagtgatcagatcagggtacttttgtatcctttaacaaatctttccctatccctcccttcctcaagcccttcccatcctctctcatcacgtttttataagtcctttgtagagctcttatttcatgctgaacaaacttctctgcagccacacttcttcataaattactcagtctcctcactttagttgaaaagtagtttaggtgtggtggcccataggttgagagaggattgcttgaggccaggagttcaacaccagtctgggcaacgtagtgagagctcatctctaca

SEQ ID NO: 229242 - DNA, 274 bp, Homo sapiens
agctggtcagcgggagtggctgtgtccctgctctagggtgctctggaagcccttcctgttcccttccctccgtggccgacctggagctctgacatggtggctgaggtgtgggctgcatcctgggccataagacgaggctcccaccttaagaatgggagaaccatgagtgggaagaagcgtgggtccccgaagacttcatgaagctaaattacctgctcgggacagtctgcttcagagacttctttaacttaaaaaataaaatctcgagtgtttg

SEQ ID NO: 229243 - DNA, 739 bp, Homo sapiens
ggatcacttgaggtcaggagtgaaaccccatctccactaagaatacaaaaattagctggcagtggtggcttgcacgtgtaatcccaactactcaggaggctgaggcgggagaatcccttgaccctgagaggcggaggctgcagtgaaccgagatcacaccactgcatttcagcctggcaacagagtgagaattcgcctcaatttaaaaaaaagaagaatgaacccagtagctatgaagatgatgagctggaaagattttatatcacatacccaaacttagtcttaggcctctattctctttatctgcaacacctttcttctgagaagttactgtttctcactcagaaaagcctcaccctttcctgtgagcctaagaaataattaaaagttagaatttaaaaggctcccttaaagtaaaaattttaagtacaaaaagatattacatcaagtaagtaaaaacttttaaaaagttggccaggcatggtggctcacgcatgtaatcccagcactttgggaggccaaggcaggagtttgagaccagcctgggtaacatagtgagaccccatctctacaaacatccagaatagccaggcacagtggttacatgcctgtagttccagctacttgggaggctgaggtgggaggatcacttgagcccagatgattgaggctgcagtgagccttggtcacaccactgcactcagcctgggcgattgagtgagaccctgtctcaaaaaat

SEQ ID NO: 229244 - DNA, 430 bp, Homo sapiens
ggtctgggatccaaaacccagattgcaggatccttgttatacaagaggagttacattgctttctctgaaacagaaaggaagaaagaaaatttagacacaaatcatcttaaaggcattagcagaagaatgaggttagtctctccaacccaagagatcttggtttccttagggaaaaatcagaaaatggttgagtcaaccaaggataaataggaacagacatttccaccattatcttggattctacctctgctctttccgcaatccaccaagccccgtaaacttgccagaagttacattgtgtctgcagttataatgtttaaaacatgctctcacttgaccccaggattctcattagctgggttaccctctccaacctcatcagcagacaagaagcttggcaaaaacaaattaaacttttaaaattacccaa

SEQ ID NO: 229245 - DNA, 971 bp, Homo sapiens
acagtggtgtttgttgtgaggattaaaagagtgaaggtgtggcgagcatttggaatagcacctagtgatagtataatagcatttggtaaatgttattggatattattatatggtacatccatcagcgtgtagagcgtgtatctttgtgtgcagagcctgtgtgagtgcgtgtgtgttctcactatgtgcacccctgtggatgtgtgtgacacacagtgcacatatctgtgtctagaggggttgcccatgtctctatgtgtgatcaacccaggcccacacgcttcctggggtgcccacaagcatggtttcctaatggcttcatctcctgcccctcaagttctgttctttccatctccccatgtcaccctcctgccttggctcccagcccagcctgcacatggcctgtccctcccaacccctccagcctgcccccacctcctgccattgctcgaaataccttcagggatgttcaggcttttgccctgccattctcccggtctggagcatcctcacttcctcttatctgggccaacttccactcctgcatggattctgactgaaatgttgcctcctctggaccgtcctcaatctctcaggtcccctgcattgccctcatcctgcagccctcttccgcatggtgccagcagctacctgctcccctgcgtaggtgcagatgcacctaagttgggagccctgtggctggggctcactcccatggcctccctaactcccgtcctggctgagcccattgtggtccacacaatcctgtcctctgtggctcctgagagtcttggaccctcaattcccttgctgaaggtggaaaggctgtctcaggggtggggccagccctcagacacctggtcatcacacacctggttatcaggcacccgtccatgccccagcatgatgtagtggagggtggggtagtaaagggatagtttgggtgaagtcagtgagtcagctggctctgc

SEQ ID NO: 229246 - DNA, 502 bp, Homo sapiens
ccacgtaaagacgttaggtcaaggtgtagcccatgaggtggcaagaaatgggctacattttctaccccagaaaactacgatagcccttatgaaacttaagggtcgaaggtggatttagcagtaaactgagagtagagtgcttagttggacagggtcagaactgcgtggaggatcccgctggttgcagcatggagccctcagagtgtatggagcccgtggccaagcagactagaatatttgacatgatttctgtgggtgctgtaaggccctgggtggcgtgagggggaaggtgtgtgtgtggggtggcagggaggagaaggaatctgctctgtgcttattcttgtccccgtttcttttgcagcctgcccacggcttcaacctgcctccagccccacctgctccaagcagacagatggggcgagtgtagggagtgtgtttaaaagaaaaaagaaacaaaaagtctctctcttttttttttttgaagtacccagaccttttcagg

SEQ ID NO: 229247 - DNA, 417 bp, Homo sapiens
gttactagagaagtttctctgaacgtgtagagcacatcatagctcactgcagccttgaactcctcagctcaagcgatcctccctcctcagcctctgaatttcctccttggcaggaaccaggagactagtggctgcactcagttaaaggaacagctgcaaatgggaagataagaaagagaataagaggaaataaggtcagtatgtcctggcacagcccacacctggctgtggctgagaattcacccttatgtagaaacagtggccaagataaggggctagtgccccaaagtatctaaatcatcacatagctgacaacttcccaaagacggaggaagccacacagagctccttagaactccagcaccttccacagttcctgcttcagaaaaggagcttaataaatgttatctgaattga

SEQ ID NO: 229248 - DNA, 483 bp, Homo sapiens
attcggcacgaggagcgcctggaatctgcgcccgagtcacacacaaacacacacgcacacataatcccaaaacaaccaccacgcgcagccagcccctgctcgctgaaatcattctgaaagccaatggaggtatctcacagcaacaagagggaaggaggcgaatgaagaggcgcccgggtcggagctgcaagctggaagaaaagaatgctcgctactgccccagcccacgaccctggcaagctggggatggggtggaacggagcggagtggctcttaggacacccaattttcttggagtgccggtgaaaaaaggcagaaacgggagcgagcagagaaacagccttctgcagcccgcactggcctctcccccatcctcctttccccaggcttcccgtcgccccggggtctcccactcgggctgcagggacttcttctcgcgtttattttagctcttccaaaatagaaataaaaaatacaaacaca

SEQ ID NO: 229249 - DNA, 358 bp, Homo sapiens
ccctttaacttgatttgagattagtaaatccaagaataaactccattaggcaaaaagtcttatagagagtaatgggtttgtttaatcccttctcatttactagggaatgaagctgagcagcaactaggtaatggcttgaactaaattaggtgagatggggagtgacagttttaatttaccgtagagtaccctgggattaagcttctagtcaaaccaagtcccatggagctttctcttcacctatgcatcgattcattcctttccatttcatttctagtatacaaagaccaatccagtgttactttctaccagcttgccttgctatatactaatacatgattaccctaggatttcctaa

SEQ ID NO: 229250 - DNA, 532 bp, Homo sapiens
ccttaccaagtccacacttacacaaacaggtgaattaaatatttcacaaaataatacttactttcaccatgcgagatactattattttctttttttcctttagaaatagggtcttgctgccacccctgcgtgcagtagtccaatcacagctcattgcagcctccaactcctgggctcaagtgatcctcccgcctctgcctccacctccccaggagctggaactacaagacccaatattggtccgtgatctgatgatgttcacggtcaagacggaagcaaaaaaagcacacaccgcgcgccctcggtcactaatcacgcggagtatacgcgaggagggcccgcagctaagcgacggcgggcggccgagcttcctccacggccggggaggtgggcaaggcctccgggccgcagccccgggtacgagcggaggctccgaggcccccggtagccagtcagaatttattttaagggaaatggaaagctgcggcaggctttgggaggaggggcaggattaaaagagaaagtgtgctca

SEQ ID NO: 229251 - DNA, 862 bp, Homo sapiens
ctaatttttgtatttttagtagagatggggtttcgctatgttggccaggctggtcttgaactcctggcctcatgtgatctccctgccttggtctcccaaagtgtcaggattacaggcgtgaaccactgtgcccagcctggaagtttgtaccgtggagctaattctattcacctttttattttttccccacgagcagattcaagttgccctggatatatgcttgctggagctaattctaactagacaagttgctacaaaagacaagcaaatatcaactgcatgagtgttagctcatccttgtctcaacaatgtctcactctgtcgcccaggctggagtgcagtggcgcaacctcggctcactgcaagctccgcctcccgggttcacgccattctcctgcctcagcctcccgagtagctgggactataggtgcccgccaccacacctggctaattttttgtatttttagtagagatggggtttcaccttgttagccagaatggtctcgatctcctgaccttgtgatccacctgcctcggcctcccaaagtgctgggattacgggcatgagccactgtgcctggccgaaacctactgtttctaaaaggtctgttagtaacctctagtctttggcaactaagaattttaagaaatattcaataattctttaacttgacagcttaagaaaccaggttgtgaaatagtggtttttaagagggttcttatgtggctgatactttaggtgccattaaataaaatattagtacacataaaataatctaaaatcccaaaagataagctttagtgttatgaaaacaaaatttagttaacatatattaagaaaatgcttagtattaagtaaacc

SEQ ID NO: 229252 - DNA, 394 bp, Homo sapiens
ataattcttgtgtgatggcagtcagagactgattataatcaggggagagagaagaacttcctggggacacagtgcttcactatagattccctgcctctaattctcaatacagaaatctttgcaagagtactttcatggatgtcaatgacaacaattaagcttgaagagcatgagaagacattttaatcagaagctaattaagaacaatgggggcatatgtatcactgattgtgtctcaagtactctgactgatctggaagattattccattaatatatggatgtaaacagacaccaacattttctcaggatgaggcaacttcactttgaaggttccacctccaaatctggcatttatttattagatgacaaataaaaatgagcaacatttacct

SEQ ID NO: 229253 - DNA, 3157 bp, Homo sapiens
  misc_feature (363)..(363): n is a, c, g, or t
  misc_feature (393)..(393): n is a, c, g, or t
  misc_feature (1521)..(1521): n is a, c, g, or t
  misc_feature (1832)..(1832): n is a, c, g, or t
  misc_feature (1850)..(1850): n is a, c, g, or t
  misc_feature (1875)..(1875): n is a, c, g, or t
  misc_feature (2491)..(2491): n is a, c, g, or t
  misc_feature (2719)..(2719): n is a, c, g, or t
gagtttttctattttattgatagttttgtccttcattatttccttcctaatcgttttttgaaggttgattggctgttatttttctagcttcttgagctggaagcactaattttttgccttttaaatttctattattcattacatgtctttgtaagtacccacaagtcttgacatgtgttggaaaaggcggtctcatgcacacagcctttccaccccttctcaccaaataaaaatgggccttgggcctgaaacactttcttaccaagcgatagagtcctcacagcctgtgctggacctgtcactctgtgtgaaatatttttccctgttttacactcagtgtgtcctcctttgctctgcttcagnatgtgtgtcatatgtcacctggctcacctncagtatctccccattgggaaggggatggagggacagggttggtctgctgtagcccaagaagggtgtgtgtagaccagttgttggcatcagctgctgggaggaacttgctcaccatgggataccaacacctattactgaagctgatcttgctttgtctcctctctgtgtaagtaaagcgttgttccatgcagtgcttgactgtgcatcgtgttttctttggtgactatgataccaagatacaatgaacagaagttctaagacttctactcctgatattaggtgacagataccacttgcttgacaatatgtgtttattatcattcagttcaaaatgttttctaattgccattgtggtggttttttctttatctcactcattttacatatgtatttgattcatttccaatgagttgatgcatatttaattttttaaaaaaattgttataaaaacataaaaatttattatcttaaccggttttatttggtgtgtgtgttattgctatctagctcatatccactgtagtttgagatgatactctaagtgattttcatcctttgatatttgttgaggcttgctttataatgaagcccatagtcaattttggtaatgttttgtgtagtcttgaaaagaatgtatgttcttggccaggcacagcccagcactttgggagcctgaggtgggcagactgtttgattccaggaattcaagattagtctggccaaccctgtctctacaaaaaaaatgcaaaaagttagtggtgatgcatgccttagtcccagctactcgggtggctgaggtgggaggattgcttcagcctgggaggttgaggctgcagtgagctgtgattgtgtcactgcactgcagcctgggtgaacagagtgggaccctctctcaaaaaaaggtaagaaaagaatattctgttgttgagtgtagtgttctgtgtatgtcagttaagttgaatttttaattttgttgtttagagctcttactacataatgatttttctctgctaaaaaaaaatgaggtcttggaaaaaaatagtgtcatctataagcattaaaaaaattaaaaatgaggtcctgaatggtgtgctcaaatttccaacatttattatgggatttgtttanttctgtaagtttttgctctatatcttttgaagctgtattgttggatacatgcacatttagaatttttatatcttcttggtggatcaatcccttagtcattataaaatgtccctccttatctttagtaatatttcattaaggtctattttatttgatatgagatagctacctcagcttccttctctatgtcttttgtaagcagcatatagagttgtcctttcatatccatgacttctgcatccatggattcaagcaactgcagattgaaaatattaagagaaaaaaaagatggttgtttctgtactgaacangtgcagatattttttctngtcattattccttaatacagtatancaactatttacataacatctacattgattaggtattagaagtaatctagtgatgatttaaagtatatggcagaatataaataggttatggcaaatactacatcattctatacaacaggctttcagaacgtgtaaaataatatgaacaaaaaaatttaaatcaaaatataacaggcttgagcatttgtagattttggcattgttgcgggggtgggatcctgcaccgaatccccctcggataccaaggggatacagtgggaccatttgcagatcctctagagtgctctctcctgtctgtctccctgtctttccgctttaatactctgtcctgcatactctagctgttttgatatcctccgatgctcagtttatctcaattaatgaagtccacacaagctccatctggattctctttccctttgctgggacctgagaattctctcaagacattaagccggggcagtcatagagttcacgttgtttgtttcccatctctcagggatcactgttctctctaaagtccattgtcttaaaaattgtcatttcatatgttttgtctggtttttatttgtgggagaggggttgtttcaagtaaaagggtaaaatcctgtccccantactttgccttggccaagagtgaaagtggcccattagatgatttttatcagtgattttcaaccttttctacagggttagaattctttgttcaagtaaaatcttatccccaagtgtcatgtgtatgtgaaataaatgagggcaagatggtggtagtgtagtatatgtgcacatgtgcctttgtatgtgttggggatatagcagagcttttttgctgacttggattcctnttcccattccttgagggctttatagcccaatttgaaagtcactaatatagagagtacaaataggtatataaaaaagtaagcaaatgagaaaataagccagttattagttacagaggaaacaaactatccaggaaaggaaatttacagtatatctcattttggggtttggaaggatgtgtacaaaatagtgtaattgaaaattgataaaataaaaaatcttatatacttatattgggtaaaggaagataggagaagtgacagagcgagagagagagagtgtttatgtgtgaaggaaataagaaagctcagtcttataagaagtctcagataatgtgtagactttacagaaaagcagtttaagaatggtatttaaaaataaggaattaaataacatgagagttgaaaggtagtttagggggaggtctattgttgattgat

SEQ ID NO: 229254 - DNA, 502 bp, Homo sapiens
tatgcatacatctaaggttcaggacgccctggtccagagatctgtcattcatccatctcagaccttcctggtcgcaaccagcttcttcccttctcaggggccgccacagtcacactagtcctctaatcatgggtggacccagcgcaaaaagcctcacacagaatgtcacaagatccctgtgcacgtggctgcgctcctgcaaacgtggcaatcacacgggtccaggtggcctctcacatttaagccacatcacgtatcacccccacaggggccactgcgggagtggcggcgctcgccgcatgagccccacgcgggcatatagaacagccattctcaaaaagcctcaaaaccgtttcaccacccagcgcggtggctcacacctgtcatccaatactttggccactgagacgggaggatcgcttgagcccaggagttcgagaccaccagcctgggcaacatagcgagaccctgtctttaccaaaaaaataaaaataaaataaat

SEQ ID NO: 229255 - DNA, 736 bp, Homo sapiens
cagcatggcccgcctgcacccgccccggtcccaggctgcaacttctcccccagcagctgtcctcccggcagcaaccaccagagggcgtctgtgagcgcctgggtcagggcctgtccctcttctgcccacagctctctgtgagtcccactgtcctcagggtcaaatcccctaagtcctccccatggcccaccaggccctgcacgacctgccctcccctcctccctctactccagccacacaggcctcctccctgttcttccaacacaacatgccaggtgtggtcctgccccagggctttggcactacttgtccctccccattggcctggaatgctctgacatcctgcaggtgtcagggccacgtcacctcctccaagaagccctccctggcttcctgccctggctgtccaggtttctctgagcgttcacctttacacaccacccacgccggtaccaaccacatgttcacctctgtgactattaacacggctggctctgccccaggcccagaccggctgtggtttccaggccctgggcctctacaggcgtgaatgctgtgatgctgtggtctagaaccatccatgtctgaaccctgagttctgtgggtctgggttacacggactcggggctcccttccagctgggaccacccccgatatatttctgtacggtgtcttcagcactgcacacatggacccaacgtttgttgagtgaataaacgaagtgctcagtggaaga

SEQ ID NO: 229256 - DNA, 678 bp, Homo sapiens
cagcatggcccgcctgcacccgccccggtcccaggctgcaacttctcccccagcagctgtcctcccggcagcaaccaccagagggcgtctgtgagcgcctgggtcagggcctgtccctcttctgcccacagctctctgtgagtcccactgtcctcagggtcaaatcccctaagtcctccccatggcccaccaggccctgcacgacctgccctcccctcctccctctactccagccacacaggcctcctccctgttcttccaacacaacatgccaggtgtggtcctgccccagggctttggcactacttgtccctccccattggcctggaatgctctgacatcctgcaggtgtcagggccacgtcacctcctccaagaagccctccctggcttcctgccctggctgtccaggtttctctgagcgttcacctttacacaccacccacgccggtaccaaccacatgttcacctctgtgactattaacacggctggctctgccccaggcccagaccggctgtggtttccaggccctgggcctctacaggcgtgaatgctgtgatgctgtggtctagaaccatccatgtctgaaccctgagttctgtgggtctgggttacacggactcggggctcccttccagctgggaccacccctcgtgcgggatcctctaatcgaccgca

SEQ ID NO: 229257 - DNA, 445 bp, Homo sapiens
ctatcagttagggtccttgaccataaggacagaaagcaggactcactggaaggcacctgggctgaggaaagagtgctcacagagcctactggagactggggcaccaggctcaggccaacaggagccaagggggcatctgagggcaaggaagcatggtgcaagaggatagcaaacatcacacaaccggaacagcccgtgcagggccgctgctgcaggggatggctttgcactggctcaggttcaaggcctgcaagacacagcccactgagctgagctccgtctggcctgggcaggcaaggaaggaccttgcttctaggcagccatgtggaaggcaggaatcctccaaccaccagctacaccccgctggagggagaaaatactctggtgagaaatcagggtactattggggaagagaaataaataaataataaacacgacaatacta

SEQ ID NO: 229258 - DNA, 485 bp, Homo sapiens
ggaattaactctataaggaagtattctgataatggctttcaattataggacatatctaataacatgattacatactctcttaatagtgtagcactatagttgttatttatttcccacactgaacaaatataattatcatatacaccctttccattattagctctctccatttttaatgcagtttgctacccagaatttaaacattccttttttgctgctgttttaatttgaaataagaatggtagcccccaggtcccctaacagtgggtgctgatttcacagtgggcttactgctcttcaagagtatctcagtgttgagtccagccacccaagggagactggttcttcactgtgcatcatggccttttaatgccattttgcttttttatcatccaatcagcagatgttctttcttcattcacgttgaaagcacttcgctatggaaacgagtaaagttcattgtcttattttttgtttgttttgtt

SEQ ID NO: 229259 - DNA, 546 bp, Homo sapiens
agagggtctgggctggggtggtgcgaggagtgagcagtgggcttgggagaaggaggcggcgctcggtgagcccaggtgggctcatttctaaccctggaaatccggaattggccccgcgggcctggagccagacccctcagggaggcggtcgggaaagctcgcgggcgctccaaggcggtgggcgtgggggtggtgtccggtggccccgggcggctccggccacagctaatgtcccggtgctgtgtgcatggggtggaagcgtcacgtggagtaattcggtcgccgcttggaggcggtggcgctggcgtgggtcccaggcttgggcatcgccttgcgccgcgcgccagggtcgtgggtcgggggctccctgaggccagaggctacaggggcgcggggaagacagctggggtcgccgcgccaggatgtggggctgctggcaggtgacacccgcccgtggagccgaaatcaacaggcggtcgcccttcactctcacccgcaggcgctggccagacgcgggtagctgagtcccgcgcggaagggcggccg

SEQ ID NO: 229260 - DNA, 517 bp, Homo sapiens
caataacaaattaagttggtgcgagctttaccctctgagtcctcggaatcatttttaaaacataaaggtttccagaactcacagctgtgaacttaactgttctcaagggggtatctttgattgattttcctaactcttctacgataatcggccttttcccctcttctgcttcctctcgttctggcagccgatgctcacatccataacagtgtctgtttccctggattttcccatcccagggccacgcagagtgcagctcccctacacggccacggcattctgtccctctgtcgcgtggccatgcgtggctcagtgccgtgggagcctctccgtgtctgaggccgagggcaggctggtgccccattcgctctgtgcctcacaggcggccctgatgctctgtgctccaaatctctgcaggactggatttcggccgggacagaggaggctgtgcccccacccacgttgttcccagtgcccacgcaccttgtcaactggaataaatttggtttccctgcaa

SEQ ID NO: 229261 - DNA, 386 bp, Homo sapiens
tcaggccccagctcatctcccggctgcccagggagggcagagccgccttcaccggggccagcgcctcctggggaggggccaggcaggaaccccatgcatgcagtgttgggtgggtacttcgtgtaccggccgggatgctggggtgtggggccccggccacgtgagctgccctgtgcgcgagcccgggttggtccgcgaggccctgtgggctcccaggtgcttccccgctctggggtcaagaggtggcaccggggtcgggaagtcggggagccctagctcccatcgcctgcacctgtacctgcaccgtggctgcccgggccagattcttggcctcctggttctccagctgagctttgtcatttccatgcgtggcgttcccacgcatt

SEQ ID NO: 229262 - DNA, 463 bp, Homo sapiens
tgttacgtatctatccgtttgcccattactcaatccgtccatcaatccatcttttctgtatatatatttcaaagtaaatagcagacatctggatgtctccctatatacttttaaattcttatctttagagtttaatatttgtctaaaatatcattgttttgataacgacttttcccagcttctatctcccatgttcttttgctccaatccattgtcttccctacctctgttgtagtctgagattatcatcagtcccactcaagtctgatcctgaatccttcataaaaggcaactgtaatgcccagctaatttttgtatttttaatagagacagggtttcaccatgttggccaggatggtctcgatctcctgaccttgtaatccacccaacttgggtgtgaatagaacttggatatgcagcctgggcaatatagtgacacgcccccatttcttaaaaaaaatgt

SEQ ID NO: 229263 - DNA, 496 bp, Homo sapiens
aattgttggatcatatggtaattctatttttaattttttaggaaaacttgatatcgttttccatagtgactacaccattttacatgcctactaacagtccacaagggctcgaatttctccaagtcctcaccaacatctgttgctttctgttttcctgatagtggctattctaataggcataaggtaataacttaatgtaattttgatttgcatttccctaacaattaggatgttaagtatattttcatgtgcttgtgggccatttgtagttcttctttggagaaatgtctattcaagtctcttgctcattttacatcaggttatttgctttttgttgttattattgaacttagggcttctttatatattctggatattaatccttcatcagatacatggtttgaaaatttttttttccattctgtaagttgccttttcatgctgtcaattattcccttgctgtgcagaagtattaaagtttgatgtagtcccattt

SEQ ID NO: 229264 - DNA, 1304 bp, Homo sapiens
ttcaaagtactgagaggttgatgggactgttcgattagctcctctgagaagaagagaaaaggttcttggacctctccctgtttcttccttagaataatttggatgggatttgtgatgcaggaaagcctaagggaaaaagaatattcattctgtgtggtgaaaattttttgaaaaaaaaattgccttcttcaaacaagggtgtcattctgatatttatgaggactgttgttctcactatgaaggcatctgttattgaaatgttccttgttttgctggtgactggagtacattcaaacaaagaaacggcaaagaagattaaaaggcccaagttcactgtgcctcagatcaactgcgatgtcaaagccggaaagatcatcgatcctgagttcattgtgaaatgtccagcaggatgccaagaccccaaataccatgtttatggcactgacgtgtatgcatcctactccagtgtgtgtggcgctgccgtacacagtggtgtgcttgataattcaggagggaaaatacttgttcggaaggttgctggacagtctggttacaaagggagttattccaacggtgtccaatcgttatccctaccacgatggagagaatcctttatcgtcttagaaagtaaacccaaaaagggtgtaacctacccatcagctcttacatactcatcatcgaaaagtccagctgcccaagcaggtgagaccacaaaagcctatcagaggccacctattccagggacaactgcacagccggtcactctgatgcagcttctggctgtcactgtagctgtggccacccccaccaccttgccaaggccatccccttctgctgcttctaccaccagcatccccagaccacaatcagtgggccacaggagccaggagatggatctctggtccactgccacctacacaagcagccaaaacaggcccagagctgatccaggtatccaaaggcaagatccttcaggagctgccttccagaaacctgttggagcggatgtcagcctgggacttgttccaaaagaagaattgagcacacagtctttggagccagtatccctgggagatccaaactgcaaaattgacttgtcgtttttaattgatgggagcaccagcattggcaaacggcgattccgaatccagaagcagctcctggctgatgttgcccaagctcttgacattggccctgccggtccactgatgggtgttgtccagtatggggacaaccggtattcatttaacttagaaaaaagaattccgagattggagaaggcatgagaaattctccgagggggg

SEQ ID NO: 229265 - DNA, 1273 bp, Homo sapiens
ttcaaagtactgagaggttgatgggactgttcgattagctcctctgagaagaagagaaaaggttcttggacctctccctgtttcttccttagaataatttggatgggatttgtgatgcaggaaagcctaagggaaaaagaatattcattctgtgtggtgaaaattttttgaaaaaaaaattgccttcttcaaacaagggtgtcattctgatatttatgaggactgttgttctcactatgaaggcatctgttattgaaatgttccttgttttgctggtgactggagtacattcaaacaaagaaacggcaaagaagattaaaaggcccaagttcactgtgcctcagatcaactgcgatgtcaaagccggaaagatcatcgatcctgagttcattgtgaaatgtccagcaggatgccaagaccccaaataccatgtttatggcactgacgtgtatgcatcctactccagtgtgtgtggcgctgccgtacacagtggtgtgcttgataattcaggagggaaaatacttgttcggaaggttgctggacagtctggttacaaagggagttattccaacggtgtccaatcgttatccctaccacgatggagagaatcctttatcgtcttagaaagtaaacccaaaaagggtgtaacctacccatcagctcttacatactcatcatcgaaaagtccagctgcccaagcaggcaagtgctcacgtgtgattgaatctaaaccttctgagtccatgaacacgcgacgtgttttgggagatagcggagaaattaacatcttaaccggtcaagctccactggctctggcaatattttaacagatgccaggaacatgggcacagaaatcaatgagatcagatggctggggctgaagaatgaaagctttattttttgtttttgcaattccgagattgtgtctctatatttgtgtcattttcattcagattgactgttgccttgagttttaatgtattgttgctttagaaaatgacatgacattctgtccggaaatgtttcctggcagctaaaaggaaaaagctgtatctacttaggtatgaaatgaagagaagcaaagagaacgaggtggtttatgtgataacagcaagctgctcatccaaataacccaggccaaaaatacactgtctacaaggttgtgccaactcagctttcatgtgaaccacaaaagggagtatcggtagacctcaggccaagaaaatacctttttccaggtttctgtgttaaatcaagaactgtactatgcatt

SEQ ID NO: 229266 - DNA, 428 bp, Homo sapiens
cagaagaaaggaaattgcttcccaacattttattagactagcatattccagagacccaaatttgacatggcattaaaagaaatgaaaattactgactgatactcctcctaaaagtagatgcaaaaactcctaaggaaataacatgaggccgggcacggtggctcatgcctgtaaacccagcactttgggaggctgaggtgggtagatcatgaggtcaggagatcaagactgtcctggctaacaagattaaatctcgtctccactaaaaataccaaaaattagcagggcgtggtggtgggcacctgtagtcccagcttctcaggaggctgaggcaggagaatcgcttgaaccctcagaggcagaggttgcagtgagcagagatccagccactgcactccagcctggcaacagagccagactccatctca

SEQ ID NO: 229267 - DNA, 588 bp, Homo sapiens
attccaaaggctttcattcaaacagttgctgcattgtaatgttaagtatgagatactaattcataaaaatttaccaccatagtaaatctccctgataccatcactcttaaacctttagaaatgctacagcatctagcttctctagatcaataatcacagaggcttaagtgctgacctcataaagataaagagttcccatgatttacacattacgtgctttcataaatatctatatataaaagcctattttcctcttggactatattacaaaagtaagtatgcattttcataagattcaaacccagctctaaatgtaagaagccaaattaagaatgtagcaatgtatgaatgaggaaggaagccattactaacccctctgtgcaaaactccctgtcatctaaggtaggaataagatatttatcttgaacacataagggaatatgtcatagaaagggagacagggaggttgaggcaggtgactggcttgagctcagaagttcaagagcagcctgggcaacgtggcaaaaccctgtctctacaaaagctgaggtgggaggatcgcttgaatctgggaggttgaggcagcag

SEQ ID NO: 229268 - DNA, 479 bp, Homo sapiens
ttcccatcattcgctcctgttacactctagcactgtgttctagcttcagtgagaaacctgactctactccctgccctgcctggccactatcactgccccttccagaccaccctccttgcaggagtgaacttcaaaaaatgtatattaacattgattttaaaattttgcaataaaaccttatcaaagaaattaaaattagccaggcacagtgggtcatgcctgtaatcccagcactttgggaggcaaggtggactaatcacctgaggtcaggagttcaagagcagcctggccaacatggtgaaaccccatctctactaaaaatacaaaaattaggtgtggtggcacacacctgtagtcccagctactcaggaggctgaggcaggagaactgcttgaacccaggaggcggaggttacagcgaatggagattgtaccactgcactccagcctaggtgatagagtgagactctgtctcaaaaa

SEQ ID NO: 229269 - DNA, 753 bp, Homo sapiens
gaaggcctgtattattaatgcccttgccgggaacagctgcaccctgccaggttgtcatgtgagacctctgaaaagctcagagctacaaggcccacagctctcctgggcccactgggtcaggtgggaaatatgatcctacagaaactgcaggcagccaaggagggcggaaggcaacttggaaggaactgatcagtctcacgcaggagacacagccgtcctctgagcgcctcaggagggctaattccatcccgtgcctccaggggcctgctgtatttgaagatcttttagcctgagggattttatcacatcatataaaagacacataaaataaaaatgaagatattaataatcagtttaataatatttagagagccattattccttgtagtggtcactatcctcatcacttgaaatagttttaattttcagtacaagcctttgaagtgaatgggacttgttattgccatttaatagataagaaaacagtctcggccgggcgtggtggctcatgcctgtaatcccagcactttgggaggccaaggtgggaggatcacctgaggtcaggagttcgagaccagcctggccatggtgaaaccccatctttactaaaaatacaaaaattagccaggcgtggtggcgcacacctgtaatcccagctacttgggaggctgaggctagagaatcgcttgaacccaggaggcagaggttgcagtgagctgagatcatgccactgcactccagcctgggtgacag

SEQ ID NO: 229270 - DNA, 427 bp, Homo sapiens
gagaagacgacagaagggtaacataggagaagagtgggaactatcatcaccttttagattaaaacagtggtcccatttcttgctggaacgaacactgcgactaatgttcactcccttcatctggatatgttagtgaggtgtgcacagacgattaagattttcccattttcggctgcgcgcggtggctcatgcctgtaatcccagcactttgggaggctgaggtgggggatcatctgaggtcaggagttcaagaccagcctggccaacatggggaaaacccatctctgctgaaaatacaaaaattagccacatgtggtggtgggcacctgtaatcctagctactcagcaggctgaggcaggagaatcacttgaacctggaggcggaggttgcaatgagccaagatcgcgccactgcactccagactgg

SEQ ID NO: 229271 - DNA, 545 bp, Homo sapiens
tcgggctccagccagaccttgtctggagctggctttttgctttatcacagcaaatggtggactcagtaagagagtggccgtactgagcctcattagtaatcacagcagtgagacactacttcacacccaccaggttgtcagaaccttaataatgtgacaatgtcaagtactattgaaatggggcaaccagtactacttgcatacactgttgctaggagtgccagtcagcacaaccactttggaaagcaatttaccaggcatcacctaataaagttgaatatgcacacatcttaacattcagcaagtccacgcctaggctgatactggagaatttctttcatgtcttccccagaggcatgtgccagagtgtttttaattgcaaaaccaagtatccattgacaataaaatggataaaacaaattgtgatagagccatacaatagaacactactcatcagtgaaaatgaatgacctacaaatgtatttttcatgagtaaatctcaaaactataacatttgagtaaaaaaaaaaaaaaaagcaagtcag

SEQ ID NO: 229272 - DNA, 321 bp, Homo sapiens
tttttaagaaattgagactttccataaaaatctaggtttccagtctgtctccagaaatgagaagcctgggcctgccgtctctcctgacatcagttagctggaactagttgtgcactagctgggtcccccgcagtccacctgcttcctgtcacctctccgacatgaggcagggaggcagggccatttgtcactccatgagcactgctgtttgtagtaggggagaagtgttttgcttctctgtgtctcagtttatcagagtagaaaatcaaagatagatggagaaggcctctcaggaaaccctggcagaaacgaaggaatttc

SEQ ID NO: 229273 - DNA, 630 bp, Homo sapiens
gcatgatcttcacttatacgtggaattttaaaaagttgaactcatagaagcagagagtagaatgttgattagcagaggtcggagggggagatatagggaaagggagatattggtcaaagatgttggtttcagacattttagagatctgttgcacagtatggtgaccatacatttcaaaatagccagaagactagattttaaacattttcaccacaaaaaagggtaagtaggtgaggtgttggatatgtaagtttgattaatctttctgcaatgcgtacatatatcgaaacatcacattgtaccccataaacatgtataatgattgtctgtttaaaaaagtttatatttcatcctgagttcaaaacccgtaactgaattaagtgactgctggtgggaaccaggtaaaccttccattcagcttaacttttgagatgagcttggcatttcttgatgttgctaggggaaaaacctcaggagttgtgttgtaacaggaagttaagagtaagattgctgatttcattcattagttcagtgagtttctgtaatgaagaatatatgtgtacccataagagtcaatatgcatgtttactttgtaaagaaaaaagcatttcataacgaatgacttgaatt

SEQ ID NO: 229274 - DNA, 575 bp, Homo sapiens
gctgacttaagtgatgatgctgagttgacttcattccagccacaagtaggcaagcttccatggcctctgaaatttcctcaaaaaaatagagaaaattccccttgggtttaaatagagtgatccttcacctagcatgggatggaattcctgcctgtccctaatgggcaaaactatggtggatgaggatggctgtattgcagcagcccattactacatttaaggaagactggggagtggggtccctgaaagttggaggcagacttgagggatcaaccacagaccagtccttaaggagactcctgtgggatggagaaggtggccctgatgtgttgacagtcaatgacagaccattcaacacccagttgtcattagaagtaaataatgtggcaaaaatgtcaccccctccccaatgtccacctcagtcccatctcagagtggggatctgcaatacagtagaaagattcagtgccaccccaaagacacccatatacaataggaggcaagtctgttggtgtcaaattcacttatatcatgaacatcctgcatgtcaaaatctctagtttctcccataagtg

SEQ ID NO: 229275 - DNA, 687 bp, Homo sapiens
taccctgcataatcaacaagaatgtcagctattccaataataaaatgcttttcacaatcaatttaaaaattgcccattttggcctttctggcagcccacagaatccaccctccgttgtcctcttgtttagagagctggctagctcattcctcaggaatgacccatgtcccaggagctcaggaatcacacatcccctagaggttattctgaagtccatgtggtgctctagtggcagcaacttctccatttgccctctgtgttcctgccattaggccataacccggtctggtcaaagacttgccattttgtttggacaaagttgcaatttaaatgtttggatccagagcttgcagtaggaatgttccagaaatacttagtttagctttttgaatgcaaaggttgaatgcacttggaaaggcctagaatagaaattaagcaagagcacttctttcttaacaagtgatctgttcataactatggatggcagtagagcaagaggacgcaaactggtgaacaaagtcacaaatgccttagaaactaggtgacatttgagccagatgtgaaagagtgtgacttgagaggaattcgcatagaggagaaagaatctagcattaaaatcagacaggcctgagatcaaattccagttttgatgcatattagctctctgaccataaacaagttctttaa

SEQ ID NO: 229276 - DNA, 259 bp, Homo sapiens
ctggcacgaggagaccctcagtgacatgtcctctgaagagtcccctggggacctccggcttcatggatctgtcgtccaccatgtggcgtttcagtctcacagacacccctgttcttgctgggaatctttctgccagctacaaaagactgtgtccatgacccctttctcactgttttcacaaaatccttctccagaaccacagagggttttatttttaaccaaatattaaatgagagccatggccttggagtgaaacaca

SEQ ID NO: 229277 - DNA, 532 bp, Homo sapiens
ttccgtaacgctgcctgcgggacgctcatcattccagatcgtcctctcacgtgagtcttcagttcactttcttttctgcttaaggtcctttaagttcgatttttctccaggaatcgcagcatgtcctggtgtgccatgtccacagtccactcctgggtacaggtgatcctaccccgtggtttccaaaggcagcctctccactcacctctgtgccctctttctttcaaacgggggtcgtcttttggtccctgggtaatttaacatttgctggagtttttcttaaaaaatgagattgatttccttttctagaatcatgtttatttgaattacgtttattcaaatcatgtatatttggcaccaacatacctttaagcagagtagttcaaactcttgttttatatggaaattgtttgatgaagtgatttgctccccagaacataaacgccccatgagagcaggaaccatgtctgttttttctacttctgtacccttcatatgcccaataaatgcttgttgacggggtgaatgcact

SEQ ID NO: 229278 - DNA, 521 bp, Homo sapiens
gcttcctttgctgcagcatgagagaatctgcagcaccacagtcagaagccagcacagctcagtgctatcaggagatgaggctcagttcttggtttgaaagagaagggtgcaacatgcatctaattttccagcttgcagagggtgtgggggctgcctgagggactggtttctgtctcacctggctcagagtggtgaaagaaatagcatactttggatgcctgggagctacagagagcaaaggagagcttagcaacttgttgcagcaccaataaccttcagtacaacagacaggcaccagagatagcaagagactacaagctcctgaaaaagaaattcataaacctctctaactgggaaattatatgcacaaggctagagaagacacatctccagaaaaagattgagaggccctcagaattctgatgcaggctgattggtgatgatctccccttctcttgaaggtactcaaaaaaggtaaagagaagtagctggctttttaaattcccaagtctcaaaaaaaa

SEQ ID NO: 229279 - DNA, 437 bp, Homo sapiens
aagatttaggtggggacacagagccaaatcatatcattctgaccctgacccctctcaaatgtcatctttatcaaatttcaaaacacaattatgcttttccaacagttccccaaagtcttaactcatttcagcattaactcaaaagtccaagtccggctgggtgcgatggctcatgcctgtaatcccagcactttgggaggctgaggcaggtggatcacgaggtcaggagatcaagaccatcttggctaacacggtgaaaccccatctctactaaaaatacaaaaaattagccaggcacagtggcgggcgcctgtaatcccagctactcaggaggctgaggcaggagaatggtgtgagcccaggaggcggagcttgcagtgagccgagatagcaccactgcagtccggcctgggcaaaagagcgagattccgtctcaa

SEQ ID NO: 229280 - DNA, 324 bp, Homo sapiens
taacacctgccactctgggaagagaatgactgtgggtcttgggcagagcctatagccttcatcagcctgttcactgaccaactgcacagcagtgacaggggcatggcagtggcacagaggaatagtggaagcacatccctgagacagcctctctgcagccccagctccagcagcctgcatcccagatttatggatggtacctggtaaagcaatgatgcaaactcaatgtgaaatccaagtacatcatcatctatctctgtatttggtttggggttttattaatgacagagaatgtgattaaacaaagtttatactgtaactaac

SEQ ID NO: 229281 - DNA, 517 bp, Homo sapiens
ttaaagcataacaatgattaaatttgatggccagttagcttttatattctctgctagacaaagcaacaaaatagaaaggccttatcttcatttttaactctagtagaagggttggcataaaatcaagacttactttgtccacagtgacctcaagacacaggcgaagggatttttcagatcaccgcaacagcccagtgttgccccactcttgtggtacctgcatcctcctatgtgcttctccaattacaagacagggtgagagagatgtggagggttttgaatcagcaattaaaatagccctgctaattttaagaagcaggacagtacctagaaagagtataactagaaatctctaccataaggcactatcagagactgctactggagtgtatatttggttataatatttgttgaaaacatatatcaggatctttaaaactgtttataggctgtgatccactaatatcccttccataaatgttttgggataatgataaaaaaaaaatcaatgcttaaa

SEQ ID NO: 229282 - DNA, 857 bp, Homo sapiens
cttttgcaggaattagtactgaaattaatattaatcaatggcaaggaagaccagagcagaggatagtcctgtgacaaatggtcacaagcttctcccagctgtgaaatgtctttccttcataagtgactatttccattccctttcatgtatttgccttgtctggaagactttgattatgtgcttcttaggacacatataaagtccttactttgtatttggggcccagagaagtttagcaatttgcttaagctcacatagctagttagcagcagagctgggcctaaaatcttggaccatttccaaatccagtgtttgctttactgtatcacactgtgcaacgcttgtgttgatcactgtgagtacttaatatactagatttctaacagcagcctatttgcttctgattgccgactagttcacttcaattcatatttatcttaactgaaaaccactccttctgacggctcgtctgttgtctatagaaaatgagttggtgggctcattctagccctgttggacagccgaacccatcacaacaaatcaatgccaaaaatggcatttcaagaggaaaacatagcatttatttagtacccccaacagagtagctcaaagtgatttgaaaatgtctcattaatcctcataacacccctgtgggataataataatattattataacgtttaggcgtagaactgtggcaaagccaacagcttctctgagcatgtgcaggatttcctcatatttcagtctgcaatactagagcctgactaaaaccgtcaggtttgcaaacagcaagggtaaataaatcttggtgtttggcctttctgtgttgctctaggcatagtttgtgtttcctac

SEQ ID NO: 229283 - DNA, 322 bp, Homo sapiens
ggtggtgaatgtgaccaccaaaccctcctccagttttaaacaacagagctgctggtcaccaggttaggaagtgctgtgtaaaagactgtgtggatgtatgtggataatgatcagttttattattttatttatttttattgagatctagtcttgctctgttgcccagggctgtgtttctgggaggcatccctggtgattcgtcgtgggccgctctgctccttttgggcatcccattaacacttattctggatcgacttatccacttccctgctgatggacgctacgtcaccgttccctccatttactagtataaggtcgacgc

SEQ ID NO: 229284 - DNA, 465 bp, Homo sapiens
ttttaaaagcaagccgaacgtcacacatggagagatgactgagatgaaaggacagcaggataagttagaggaaagttggatgatatcaaaaaggattgcaggaaaactaaaattcaagaatagcattaaaatccattttggaggatgacctttaaaaaagcttgcctggaatgtgacaaaaaagaacagagtaacagacgaagaggatcatagcaggcagagaacacaaagctgggtcagagacacagtggaaatatcctttctcccttttcttttcttgacattattttggttttgttagaggtgaggctggtgttagagaggccaaattttgacgatgatgaaaaagccgagggcactggggggtttgggctccaacatccttattccactgaaccacgaccctcaactgcctatccctagacatttcattatgtgagcaaaataaacacctattttaagtca

SEQ ID NO: 229285 - DNA, 488 bp, Homo sapiens
agctaatttttttgtatttttagtagagatggggtttcaccatgttagccaggatggtctcgatctgctgacctcgtgatccacctgcctcagcctcccaaaggcctgggattacagacatgagccaccacacccagcccaaaatctgaaactttttgagagctgacatgacactcaagaggtcatgctcaaaggaaagactcattggagcacttcagatttcagagcttcagattagggatgttcaactgctaagtataatgcaaatattccaaaatctggaagagtctggaattcaaaacacttctggtcccaagcataaaggatatccaacctgtatcatttatttgaaaagtccatattttccccagatttaagaaaccatcttcatcatatacacaatttttatatgtctttgagtctatttctggattttcttttttttctttttttttttgagcctgggtgacagggtgagactccatctc

SEQ ID NO: 229286 - DNA, 307 bp, Homo sapiens
ctgtttgatccaactttttgatagaaactcttttccaggttaaagaggttttcttttatgcctagcttaccaagaattttaatcataagtgagtaaatgttgcaatttatcaaaaaaattgtgcatcagttagacaaacatttttcttttaatctgttaatgttgtgtaaaagatcagtagattttctgatattcaaccattcttctatccttgtactaaacccaacttgatcaatatgaaaatgactaaattcagctgactaatatttttgtatctctattcgtaagtaaatttggactataatta

SEQ ID NO: 229287 - DNA, 471 bp, Homo sapiens
cccagaagtcagtattttgcaagggtgaaaggagtaggactttctactgccccttgaatttctctgccagcaaactaatggccactgcagtttttagctctgagcaccctcttctcaagtttctccttgcacttcatttcttttctcccctttttcttttccttggcaaacagttctactctagagccatcttttccgattcctctcctagcgccactcccaaatatcctctggttactaaaccctcaggctcatctcacatatctgaaccagtctcaaaactttagctggctgggactcctcccctcccacctcccactctgtctggggtcaccagggctacctgttatcattaaataagccccctttccattctcaatttgtcaccctggcccaggtcctcaccatatcaccaccactttcccatctgcctcctcttgctggagagctgcctctctcctcctggcacgc

SEQ ID NO: 229288 - DNA, 408 bp, Homo sapiens
ccagcattcctggatttattgtgcaccatttatggctccacagtccactagatgaaattgtaaagactcaatatggtggctctccagggactttcccttttcttctcccttagcatcagagatgacccgtcagcgttgcaagcagttctgtggtagcacatcaagtattctgtcacagcaggaaaggctggataaacatcaagggactgccaagaccagacttctcattcagtctgagtaggaggaaagaggacaggttgttggagagttggtttaaagatgaattatgggctgggtgcggtggctcacgcctgtaatctcagcactttgggaggccgaggcaggcagatcacgaggtcaggagagttcgagaccagcctgaccaacatggcgaaaccccatctctac

SEQ ID NO: 229289 - DNA, 333 bp, Homo sapiens
caactaaaaatacaaaaattagccaagtgtggtggcatgcacctgtagtcccagctactggggaggctgaggcaggacaatcacttgaacccgggaggtggaggttgcagtgagccgagattgcgccactgcactccagcctgggtgacagagcaagatttcgtttcaaaaaagtaaataaataaatcaaaacagcaccagcagcttttttcctcctatctcctctccttccttcatttaaactcaccaggagctaatggaggtgccggtgaagatacagggctcattttgaaaatggaaatagaagaaagaataagaaaattcttttttgag

SEQ ID NO: 229290 - DNA, 421 bp, Homo sapiens
ctcactaatgaagtgaaacttatattgaggcctataggagagatgagggaacaaactgtacatacctggtgggagaacattgttaaaatcacaattaacctcctcacatcaggactggtgccttccacctatagtgaatagcagagaggaatgtgatgagtagctgttgaccatgaatagacataatatcaaagacatttcgcagtcttgggttctttattaaactgagatgttaaggtcattctggctattttgcttttttgccattcatcaataatttttggttttagcagcaataatatggaatctggttcttgatttattatacatatatacatgttgcaaatcaaaatcaagtcctttataagtactggtgcttaaaataaaggcagatatgtcgcaactagcctacaattgcttt

SEQ ID NO: 229291 - DNA, 2125 bp, Homo sapiens
  misc_feature (1046)..(1046): n is a, c, g, or t
  misc_feature (1606)..(1606): n is a, c, g, or t
  misc_feature (2021)..(2021): n is a, c, g, or t
gaaaaatatgaataagggctaccaattgttttagttttaatcaaaactaaaaatatacatctatgtctttactgatttaaactcacataaaactgccttccaaaataaatgcagaattgggcacttatttgttctcatgtctgtcctctcagagccaataagctgtaaaaaactctcaaaataaaactctgttttattttctgttttgccccggtttctatcacataagtgctcaataatatatgctttacataaatgctgaatgaggaacatatatatctatataaactggggagcaatgcaagactggaagaatgtcttgatgtgttggagaagttgaagaagagattgtgggatagctatgacacatagattgagctacaccacgaatctctccatgtaacccaggaacccaaggatatgtgatgagatgtttgtggaagcaggaattaaaaggaagatttcttttaataatgccttgcagttgcgcagtgatttagaccttccaaaaacacttttaattatattatctcatttgatcctcaaaacaatcgtgggaaataggcaccccagtcattattatccccattttgcagatgaagaaactgagatagagctttaagtatcttgcccaaggttaaataagtaattagtgagctgagacaaaccccccactatttctgtcctcttactcagtctcactccactgtacctttgtgcaacaatgtgaagcacatccaagatgatatttagtgtggggacctctgcgtagagggacaccagtttcttgtcacttccatattagcacagaacaagctgacccactgtaactaggaaacataagtgaatacattcttttaatttaaaatttttttgagagcctgttctctacaaagcacatactaggctctgcggcaatgcagaaataaataaaacctagtccctgttctttggagatcacagagcagtgaggcaggccaacatacaaataacataactacaacagagataaagcacagggatatgggaaagtagagagcactggnattaattttgagtccactttcctctcatccagtccccagcctgaaagatatgaactgtggtggcccacacagcgggactgtaaaccatgtgacaagagtcatttcttaccccttattcatgtttgtaaactccacagtagttggttctttgccttgcatagagtatgtgctcaataaagacctactttctgaaaggttcacagagttcagcccaacacaggacaagttctagaaggcaagaagttaacctcaagattcaaagtagctctgagaattaagaaccagccagacccttccactgagcctagacccaattaattacctctgctctaattaagggaatcagtaatgtaagtaattgtaatatgggcgatatagtttgcctgtgtccccacccaatatcttattttgaattgtaatccccatgtgtcaagggagagaccaggtggaggtaattgaatcatgggggcggtttctcccatgctgttctcctgataatgagcgagttcacgagatctgatggttttatgtgtttggtagttcctcctgcattaattttncttcatgctgccttatgaagaaggtaccttgcttccccctttgccttctgccatgattgttaagtttcctgaggccttcccagccatgctaaactgtgagtcagttaacctgtttcctttataaattacccagtcttgggcagttctttacagcactgtgaagacagactaatacagtgggcttgttgacatagttttgcccttttatgaatgtgattatctcaattttattatgttaaggaaggacacagtggcccacacctgtaatcccaacactttgggagtccaaggcagaaggatggcttgagcccaggagttcaagaccaggctgggccacaaagtgagaccctgtctctacaaaaaattaaaaaactaactgggcatggtgatgcatgtctctagtcccagctactcnggaggctgaggtgggaggaccacttgatcccaggaggttgaggctgcagtgaaccatgttaccactgctgcatttcagctcgggtgacagagcaagaccctgtc

SEQ ID NO: 229292 - DNA, 260 bp, Homo sapiens
gggtatgtaggttttcttttggggtaggtgaatggagaagaaggtacggtagaagtcaagtttttagggcagaagatctggtccaaaataggaaatagaggaaggggaacacaaagaaaggatagttcaaaatccctacttcaatatgggggtcccccaaactcatgttttacatcctttttgcctggttcagaactttctgtaaagatgctttggccatttttctctcaatacaaaaaagtttgtaaacaataaaaccc

SEQ ID NO: 229293 - DNA, 440 bp, Homo sapiens
aaaattaatacaagatggagaaagcattaaaagagtaaatcacagaagaaactttaaaatactttaaaaaaatcttagctctaaaatggcacctcttttgagtatccgtcactttgataagaaaaaagaaaaaaggcaccttctgatttgaattctagctgactttcaaagaatagacactattcaaactattccagaccatataaaaagatgagatagcataagcttaattgaaaaccttatttcaaaatactataaaaatttaaaactatacattttctctttaaaaattctaagtgaaatatggaaaaatcaacaggctcgtaaaagcataaaacatgaacaactggggtttatttcaggaatggaggataggtcaacattcaaaaatcttataactgactgcatcaagaaattaaaagagaaacgatatgattata

SEQ ID NO: 229294 - DNA, 554 bp, Homo sapiens
aaaggttgtagaatttatccttcttcatctatgtattggctaggctgggagggtgtgtggccatgagaatgtgcttctcagatctctgactgaggaaattgtaatttaccagcagtccagctgctgagttctgaaatccatcctgagctttgaaatccattgccctttactccgaggtctgtacttcccatacgctgctcatagccaataactgagcccaacggggattttaggacaggactgttcctgggataagtgatactcttccgatgggtgactttgactcaaggactcctcaatggccttgccaaactttccttagaacttcattgcagtctgagacacttccaccttgaacaccttccctctgtccttcactcagggtcaggcctgcgtcactgtgcgatggctctctcagtcttccccttccatttcctctcataataaattttttatttattatatattaatatatatattatataatatatatataatataattattatatatattaataaattatgtttttcataataaatttattgcatttt

SEQ ID NO: 229295 - DNA, 341 bp, Homo sapiens
acttatttagagctcttagggtgccatttttaacataaagaaaaccaaatgttaaatgcatagaattatgcttaaatacactttactaatgtcaaaagaaatttgagttctgaaatgccgtgacaacttcaaaccagtatcagtagtctgaatgtgtaattgacacaaaaattgagtatattctttagctgctgcacaacccaatcatgtggcagcagggctcttaataggatctccaggcctaacttctagaagatctctgattcagtttggagaaagccctaaaatctttattgaaaaacaacaacaacaaaaaaaaccccaaaaactaattctgttgt

SEQ ID NO: 229296 - DNA, 372 bp, Homo sapiens
tcatcaactaacacctgaaatgcctcagcaccatctgtctccaacattaaacaaaacccacgagattccaggagaaagaaaataggaaatttaatgatgaacttaacctgagtaacttgataaatgttacctttgtggctagccattcaccagcaagtccctaaaatgacctgaaacctgaagagtgtttcacccatgaaagggtttgctctctctgggcatggctacccagcacatatgttagtcaactttctttcccttgcagggccccttggaaaactagtttgaatcattcattaactcagctccactccttccctttcccatggaccatagtttctttgagcaattaaaacttataagacaccaaaa

SEQ ID NO: 229297 - DNA, 473 bp, Homo sapiens
acaagctactctgtctcttcccattgctttaattctagggtttctgagtgaccaaaatgggaaggaaaaaaaaaacctcatctcacagaggagaactgcatgcaataaaagattcaaaagttggaaagtagcttcaaactgctgctggctcccagctgctgttacagggtgggaaggtgttaggaaatgttgtttgttagaagctccttttactgtagaatttaatagcgaatccttccccaatgcctattcagttgccttttggccgttaagctctaagttctttggtaaagagttaatataattaaacatttttactgttttctattttggagtaacttggtgctgatcttccttccctttccccagctgcccaacaagccaccctttaaacaccaaagacaactggttttaaatgcttgaaaaaaattttattgaggagatggatcttgattaaaatcttttcatcatca

SEQ ID NO: 229298 - DNA, 448 bp, Homo sapiens
ccgcctgcggcgccgagggactggttctgggctcctagtcccagcagagccgtgggcaggtcctgacccgggtccgcgattgcctcatccggcgccgccttctaggggcctgggcgcctcctccgagtctagagtcccacacagaacagccctggactctgggcctctccgtccgagccagctagcagttcatttcaagtgagagaaagggacgttaggattgtttctcccactgattgtggaaggacagtgcaagtttgggggactggataaatgtcattagtgggcccagccacacaggctgtaaaggatgtgggcatgcgcaaaagtcgcactaattgtttctaaaaacatatttgtagccacgttttaatgtatcagtataatgctctagaacggtagttctcaactctgacggcacatagaataagccgggaagctttaaaaa

SEQ ID NO: 229299 - DNA, 401 bp, Homo sapiens
ctgcacctgtaggaagggaggcccaggctcctgcactacgcggtgtgatgattcaggttaaaagggagtgtttgcttttttgttttgttttgtttacttgaggcagagtctcgctctgtcgcccaggctagagtgcagtggcttgatctcggctcactgcaacctcctccaaagggagtgttttctaatgatgccttttagatagtcatgagaagggctaccttgtaagcatttgatttgtcagaaattattagaaaatatactattgataaggaactccggcaggtgcacactttgggaggctgaggctagagaattgcttgagcctgggagttcaagaccagcctgggttccatgacaaaaccccatctctacaagaaatacacaaattagccaagcat

SEQ ID NO: 229300 - DNA, 451 bp, Homo sapiens
acacttggatcaaatgaacaatgctgggatctctaaggataaagatcttaaaagtcctgagataaagaatcccgcacccattggtacttctaacttgtcttgctttttgtctgatttctggctgatgcaggggactaaaactcactgccacgcgaaaactacctgaaccaaactatgacatctcacctgatatgtgagatgcaactgttataattattttaaacctcaattcagcattaactagccttttaatgtaaacacttacacatgatgatgactagaaacagcatactctctggccgtctgtccagatagatcttgagaagatacatcaatattttgctcaagtagaaggctgactatacttgctgatccacaacatacagcaagtatgagagcagttctaaaatgacagagataggaactgtaataaagttatttttaaagctaa

SEQ ID NO: 229301 - DNA, 164 bp, Homo sapiens
aacagaaggaaaaattcatcccttcgtggttgcttctcccttttggccaggcaccctgcctcaggcctgtaaccccagcactttgagaggtcgaggcaggcgactcacttgaggccagtagtttgataccagcttggccaacatagtgaaaccacctctccagt

SEQ ID NO: 229302 - DNA, 673 bp, Homo sapiens
ctctagcctgggtgacagaggtcgaccgtgtctcaaaaaaaaaaaaaaaaaaaaaaaaaaaaatactattataccgctgttcagttagcaggaattaaaaagtttggcaattgttgttgaaaaagttaagcaacagaaactctctcatacccttctgatgggagtgcacattacagctgctttgggaaatagtttggctttagagtataagctagcaatcatacttctaggtatgtacaccagagaaacacatgcctaaagtgattgagatagctgtaccagaaaaatcttaagtcgtgtttatatttgctccaaagcagagaccaccctcggggatgagaatggataactaaattatggtatatttactgagtagaatattacacagcaatgaaaataaactacagacacagcaacaacaaaaaaggcaaagaaaaaagcaagacaagaatatatgtagtatgattttgttattttcatctgcttctggtttttatataagttatgtttggtagggctgcacacctaggtgataaatctctaaagaaaagtttggaaatgataaaccataaaagttaaagcacagtagctcatgcctgtaatcccagcactttgggaggctgagatgggaggatcacttgagcccaggagttccagaccagtctaggcaaca

SEQ ID NO: 229303 - DNA, 339 bp, Homo sapiens
tggtcagcgcgactggcgttgataacgctggtccctacaaagcctcctgctggctgttaagagctttccttctttgggcagagaggataaaaaagcaccatgactgtcctttctctggaaaggacacacgtcacacgctcacagcacaaaaacgccacttcttcctttttctggtgtcaagttttacaataaacctcaactgaataagcaaagaaacaaaaacaaaaataccaacaactacccaactcaacctctctctctttttttttttctgtgtagatttttaagagaatcaggtttactgatgtggaatttatatccaataaaattgaatacaaa

SEQ ID NO: 229304 - DNA, 451 bp, Homo sapiens
agctccaagtagaatttgggatttctatgaatttctcatagtcttaacaggcaacgactaagtgacagagcccaggggtcctgggtttcagcatgtgccgtgcatagcaacagggagagcagaggtgtcaggggagagaaatgagccccagtctcatcatgtggcagtaattggggatgcaccttttcttatattaatagagatgaacaaacactgctccagcacattcacatttgaatcttcctgaaaaccgtgctttcccattttgcagatgcagaaactgaggctccaagagcagaagtgacaccgaagtcacctagcccgtaagtgaccctaaattttatgctgctgcttcccttttcttgtgtgtcccttatttcaagaaatagacccaaggtgcaggtccatttcctacctagacatgcaaacctgacagagacaaaaaaaaaaa

SEQ ID NO: 229305 - DNA, 504 bp, Homo sapiens
aagccggggcaggggccgccgtgagagagcggaggaggagggtgtgaggcgcaaccgggtctgtttcacgctgaaacgctagggccgtgctttccgctaggcagctgcgcagagcaaccgctcctccgctgggcgcgcttcgctgctggggagggacaggcagggatgcctggtgcaagcgatccctcggccccggggcggcccagcctcgccgagctccattagttggcatccgaaacatctggcaggggctcaggctggggccccagggacgaagccagtttggtgagggcccgcgctatgctgtccaggtggccgttcatggtccgcagctccaccaggatgtccccgacgtgggcctccaagctcgccgcagcggcgggccgggctcggggcggcggggatgtacccgcgtccacggtgccctcctccctgcccgcagtgctggggcgcggggcgcggctcctttccgggccctcggccggtgccaggacgggcggcggc

SEQ ID NO: 229306 - DNA, 586 bp, Homo sapiens
agtggttctatcccttaataataactatcactgaagtaggtgttattcctgtagaaatgcaagttatagtccttgcagagcacacagctccggccctgaattacacccaagttgctctccatttgctaactaataaggttaatcagatcaggaaggtggtgcagcaaaactgtatggccgcacacatagttacaactgcccaaggtggcacctgtgcccttgcagggacacagtgttgtacatttatccctaacaaccaccataacataacagcagccttacaaggggtgtcacaggagattaaggtgattgaacaccttaccgaggaccccctgcagagatagtgggtgcctctggggctctggcctacattgggctctaataatcatgggtagcacatcaggaatattagtggtaggttgttgctctctgtggcctatgggtccaaggtgctgccctatgcacacagatctgcactagaagaactccctcagcctagggggtggaatgtaaggcctgtgggccaagcctgtttatcaaactatgtgcccaaaacttatatataaagcctgtgtgtgtatatcaa

SEQ ID NO: 229307 - DNA, 233 bp, Homo sapiens
tttcattttatatcactttctctgggaatcttctatcctgaaagttttgattaggcttagttctaatagcttcattgcaccctctaatagactattgtagaacttattattctaagatgtactaagaaatttatttttctgacctttctcactcttgtttcctccaacaagaccaagattgtcttgttcagtgttgatttcctagcatctggaacatgtccggcataagaagc

SEQ ID NO: 229308 - DNA, 260 bp, Homo sapiens
ttccaagctgccgtccatgtgctgcccaatgaagctgcaacacgtgaacctctgtggaaggcgcccaccttttctccagtccttctctcactgagtgccctatcaaaatggaagaatccctgaatgaacccatttcaagtttgaattgtggtaaaatattgcaatcccaagtgttggttgcctacagcttcctactgattttggctggtgtctaaaaagaaggtacccccaaaataaaataaaaataaaaacaaggccca

SEQ ID NO: 229309 - DNA, 473 bp, Homo sapiens
tgaagccagaactcactggcctggaagcttctctgaacactttgcaggccgaggcatggttgtaacctgtttgtagcacccagtctgagaagctaggcttgaatgtaggccagactaaatatttgaaagtttaaaaacaccatatatatggtatcattttaattaaacgactgacattgtgattaaacaaaggaatgaaaatagcagttcctaagggctccgatgactactgcagcaatagaaataaacaattcctgttactcactcttacaccacattttagcccacatacatcaaactcagttttaggcaccaagactcactcaggcccaagaaggtagtaaggaattcctactctgcacattgcaagtttaagtttacgggcatccagtgccaaaatgtcacaagctaacctgcagaaactgaatgaccatggaatgctgaaattccaaaagaaaaacgtcgcgcggccg

SEQ ID NO: 229310 - DNA, 574 bp, Homo sapiens
cccaattaggagcaaccagccaagttcattatgcccattagtttgacggaaatgttctacgttatcaaatacgtggtcacccagaaccttgcctatcataattatttgattaggagtatctaatagtgatatttttgtgtatctctattaccacatcacaccgatgactatcagtgctttattcactattggaactagagtcattagtgcttctaaatctagtcatttagagaaccaattccagaaacccccaaaccaattcagagaatttattcttaaaattctgttcctggctgggcattgtcttatgcctataattccagcactttgggaggctaatgtgggacagtcacttgaggccaggagtttgagaccagcctgggcaacatagtgagaccctgtctctactaaaaaaatacaaaaattagccaggcatcgtggtgcatgcctgtatttccagcttcttgggaggctgaggtgggaaaatcgcttgaatctgagaggcagagtttgcagtgggctgagatcgcaccactggactccagcctgaacatcacagactgagaatttgtct

SEQ ID NO: 229311 - DNA, 158 bp, Homo sapiens
cctcaaggctggaaacccccaagctaggcagcagcagttgtcaagcatgctgttatggctgtgaagggattctgggtcctttattactcataattgtgtttcactttgagaaacaaaattcgaggctgaacaacatagtgagacctcatctctactga

SEQ ID NO: 229312 - DNA, 437 bp, Homo sapiens
aagggacagggagggaggaaaagctgattgaccagccccgaagcacaaggaccacttgtctgcctcagggttcatcccccaaatacctttttccacctgagaagtaggagtgatattcctgacttcatatgattgttatgatatattgttttattaatttataaacttattcattcatcacataggcttttatttattgagcacctcttatgtgccaggttcatgctagacaccaaggatgcctgtgtttgtgacagttcctgtcttccagaaagtgatcaacaaatattgattattatggctaacaaaaataataatctagttcttactcacaagtagagagtgacctgtccccggaagagattgagcagaaatttgagaatcattctttagggaagtcatgcatgagattctattaaatagcatgttcaaacaga

SEQ ID NO: 229313 - DNA, 498 bp, Homo sapiens
cctaggttacatgtctatccctgaggtgggagaaataagaatgtatgattgatggataaaggagggagacgaaggtaaagagagtttatgtccagaaagtctaagggatgctgtgtaggcaaaacaagatttcccttcatgtagtaatagttagcattgatggatgtttagtggtttctctggaaactatgcctaagtaaatttgttattaattctaaggagatagacctctattaataagaagctctttgtatctgtatgatacacttatcataagatttctttatttgtaaaacaaagaaataatgtacttgaggttagggtagttctttgattgtctgtgatgttacttagaaatgtcctttgattcatatgcatctaatttacgttgcagcgttgaggtgtagtttagagactatgttgggtgttgtcttgttccgagagtttattactaaataccatggttaggctgcggcagacaataaaacagtctgagag

SEQ ID NO: 229314 - DNA, 380 bp, Homo sapiens
cggggtgcgtgctcaaaccagaattgtttgatcccaaaccctagggcctctccatcatttactatcatagttcgtaggagagtcttcaggctggaagtgaaggttgcctggattccggatctgctctgtcttgtggccccccagcacaaagctcttgcatctcaacctcagtagccttactcttgtagcacagatgggactgtcactctcatggctggcttcttgggatactttctttccatgttgaatccagttctgcctttctttggggtgcctcgtcaatcagggcaatatttatgaaatcatacaggtgttcaatacatttttagatttaggtctaaaaacccaggctgactcgcacttggtgtttcaaaaaaaaa

SEQ ID NO: 229315 - DNA, 505 bp, Homo sapiens
catggggtacccagccataaaagatcagggagacgagaagcaattgcagttaagaactgagaaggaggggtagcaaagcagaaggaaaatcagcacaggggttccccagatgccaagttaagtgatgctcactgataactttgaaaagaactgtttcaatagtgtgttaacaatgaaagcctgattggattgagtacaagagaaaatgggacctctcatttcctaggaaaggaaaaaaaccaaaaaactggaaacagcaagtaggaacaacctggtgaattttgctacaaaggtagcaaagaaacagggctgcagctgaaaagggatgtcagtcaagaaaagggttttttgtttgtttgtttgtttcttttaataaaggatacaggccgggcttggtgactcatacctgtaatcccacacttggggaggccaaggtggacagatcacttgaggtcgggagtttaagaccagcctggccaacatggtgaaaccctgtctctactaa

SEQ ID NO: 229316 - DNA, 648 bp, Homo sapiens
aaatacaatggtactccaacaggcttctaaaacagcactaagtccttcatttattgaaggaggagccaaggttattctcaatcaatcgtaaagcaagttcataggaggaataaattgcataccaagaaaaaaagcaatcaagagttaagtacttagagctgttaacactgagtgttatacaaagtaagtctgtacctcaaagaatctacaatcaagaagcccggccgggcgcggtggctcgcgcctgtaatcccagcactttgggaggccgaggcaggcggatcacgaggtcaggacattgaaaccatcctgactaacacagtgaaaccccgtctctactaaaactacaaaaaattagctgggtgtggtgatgggggcctgtagtgccagctactcgggaggctgaggcaggagaatctcttgaacccgggaggcggaggctgcaatgagccgagattgcgccactgcactccagcctggacgacaagagtgaaacgccatatgaagaaagctctcaaaaaaaaaaaaggaaaggaaaaagctctcagccaggtgcggtgactcacacctgtaatcctagcactttgggaggctgaggccagaggtttgagaccggcctgggcaacacaatgagaaacccccatctct

SEQ ID NO: 229317 - DNA, 337 bp, Homo sapiens
ctccatcatctgttgtgggtcacttgtgctttctgattttaacacccatgttgctgaagtcatttctccaattcatgatccatgaaactacttcagcagtgaaaatggcacccctcaggttcaagtcaacacttttatatttccctctaggtcaagatccaagctatggaagaaatcaggatatgtcaattttctagagcagccaagttttctaaaagtctacctagccatgtagttatgtagcctcactctcacttaaacaaagaaaattaaaaagcacaccagaaaagacttttcttgttaaaaacacatgtttattgtagaaaatatagtaagg

SEQ ID NO: 229318 - DNA, 224 bp, Homo sapiens
gggcaaagggcaaccattcattgagagctgttgagtaagaaagcgacatagaggtgaacatagggaggaggatcccggctgcacgtttaggttggaaaagcaagaacaacacctggaattggaggatatttgtaaaaggagggaagaaggctgtgatggttaataattgagtgtcaacttgactggattgaaggatgcaaagtactgttcttgggtgtgtctgt

SEQ ID NO: 229319 - DNA, 601 bp, Homo sapiens
tgtggtgaccaaagccaatcactctttcattcgacaaatgtgtatgagcacctaccatgtgtgctgtgctctgcactgggatcccagcaataaacaacacagaaacaagacaggttatactgtagagaaggagacactagacaaatatttgttggtcaacagaatttgtggaagccaggcaggactctaagtgaggacaaatgacaagaagagggagaatttagaaaataagatatcagtgaaacgactattataggaaaaaggtgtttaatggattcattcagcaggtaatttattgaatatccactgatacaaatgtattcccaggtattagggatataccagtaaataaagcaaagtcctttcccttgtagagcttatattctatcatttagaggcatttttgaaaagcaaagcacctaatattggatgaagcccatctgtgggaggacagcagtgaaggagttaaaatgcttctagggctccaggctttgttgaaacagatggtttctttgcactagggaatgtttttaagagggattagaggactgggctgaggaaggcctgagacctctttccctcacgccatagcacacacacc

SEQ ID NO: 229320 - DNA, 324 bp, Homo sapiens
cccaccaccctggaagattttaacactctgtccttagtgttctcttggcattttgcatttacctttattatagaacttggctgtttaaattttaattttttgcaggacgaaccggagagtgaggtcatttatacgcagaacattgcgtctcctctctttaatttagcattttattctctgaggtcctagctatatggtactttatggtgatgaagtacagccacaccattctgcctttgtgtggccattgcatgacctctccaaatgaaatcatttcttctatagagaaaaaaaagtgaggatcagagacattattaactaagt

SEQ ID NO: 229321 - DNA, 389 bp, Homo sapiens
actctactttcatgaaagcattttgtaggaaagcagtctaatgaaatggttaggccaaattttcgattccaacacccttttatacttacgctattgtctctgataacattagattcacatacatgtgtgcttgtatatatacatgtatacacatacatgcattcaaatatgcacacatattcaccccacagggttcttgagatactaatggagggtaaagtgtgaaaaacctggagcctttgacaagaactctggaaaaggcttaaaagaggttggatgttgtggctcatgcctgtaatcccagcacttggaaaaggctgaggcatgaggatcacttgagctaaggagttcaggactcctccaggcaacatagtgagacttgtctctac

SEQ ID NO: 229322 - DNA, 776 bp, Homo sapiens
ccaggatccctcatcgctggccttcagctttctcatctgccctcaaccacagaaccctgggaggaggctccctcagtggctcgtgcactcttgcaggccctgtgaacatatatacttcctggtgggaagagcaagggagcctctggtggaaagcagccccagggtccaagaaccacacagccctgcattagggcccccagggagggagaagaccaaggtcatgcttttgaacctggatgccagaagagaacagctgtggggaaaagcatgcctggaaccaagaaaaacatgtttaccaggggccattcctcacaccagctgcaggcagggtcaggaaagccacaggctgcactgtagttgcaaccttgcatgcggacgcaaggctcagaatgttcctcaaagatcctaaaatgttcccagagtcaggctgagtccattcaaatgttcactcaccctggccacactcactacacctgacttccctgtatcatgagttagagaaatagtatagagtctggttgatgctggcaggtgggagggaatgggataggaaggagagagagagagagcaagaaagaaggctgtttgggtttttgtctataacatatgtatatacactcatcaagtccattatttaaaacctctttcatggtttcaatttcctgtggaccacttttcatgcccattttaagttccttgaaggcgaggagatacatgtgtatctgccagcttcactgtgccttatatcttaggcaatcaataaatattagtaaatc

SEQ ID NO: 229323 - DNA, 198 bp, Homo sapiens
ctgggagaaataacaggaataagactcactctccatccagcaggcactcaggggctagtggggctggaggtgaagaacagacaagtaaacagaaccttctagcacagcggcttcttaccagtgcgagccccctgctcctgtgtttgagaaacaatgggcatgtcctctctgcccaagagctcttgtcagaattgttta

SEQ ID NO: 229324 - DNA, 81 bp, Homo sapiens
actcttaaataaaaattatgagaggctattgatttgggctaagatcttgtactaggtcccaatagtccaacctaaactgga

SEQ ID NO: 229325 - DNA, 509 bp, Homo sapiens
tcaggatggctctaatgatcctcatctccaactttcaactttcaactttcaacacggctgtaatgatcctcatctccaactttccttgtagtccccttccacactgaaccaggtttagtctgcaagtgaccatacaagtgatggcgtgggtcttctaaggctaggtcatgaaaggcagcacagtgcctcttctactctgctcccttggatcagccactctgggagaatccagaagccatgtcatctggatattcaaggagctgtctagagagttccacatgaaaagtactgagacttcttggaaaaacagccataaacagcaaactaataacacgagtgagtcatctcggaagctgatttgcagccacagtaaaatcttaagatgactgtggtcctggcgagatctcatgagaaatccagagccataactgcccagctaagccactcctgatttcctgattcccagaaaccataagataataaattgttattttaagccaaaaaataaa

SEQ ID NO: 229326 - DNA, 545 bp, Homo sapiens
cttttctttttttttttttttttgaatgaccatataatctggacttactaactttaggtaacagtaagttaaaagatagaataaggtttcatattacaggaattcaaaaattgaccatataataaatgatgaagaaaactaacaataaacaggacaatgttcaaatagctcattggggccaaaagatcagcgtatatcctgcatcatctttcatgcaatgtctcagctttttttccctcaaacataaaggcagattaatacaaattagccttatttagaatattcatttacgtttccttctgaaattgatacttgagtggaagatgtattaataactcgtggtttctactgaaatttaagattccaccagatgatgctcagatttagacgatgctagagtaagacactactgggtgatgatttcaaagtatgagctgcaggtaaaatctaaaaggacatacataataacaaatgttttctaatttaaaagacatatagtaaatatccatgaattaactcacacaacctacttacaaacaaaacta

SEQ ID NO: 229327 - DNA, 560 bp, Homo sapiens
aagggggatgaaacttgtggggtgagccatttgggctgaggaggagggaggttggagctgagaaatgtggagacaatttccctttagaaggactgaatctccctgcctctctggggtgcggcagccagcaggatccaatggtgtatatgtctccccagctccccattcagtgatatcatgtcagtagcttgaaattatccgtggtgggagtattatgtcatggaaattggcaaatggaaacttttattggagattcaattgttaaacttttaccagcacaacactgccctgccttcagagtcaatgaccctatccaagtttaatccatctgtccactgtctccaacacgatctttataaaacacacctgacaacattacccttttattcagttttttaaaagataagtttccagctcatcggggtggctttaaaggccatttctcctctggacctcacccaacttttcaaatcacttttcctacccctacctctaaatgctactcaaactccagccatcctgaataataagacttttgaaaagtagattatgggctgggc

SEQ ID NO: 229328 - DNA, 566 bp, Homo sapiens
ctaaaggtttataatctctgcagaagtttctaattcaacagttcctttgggaaggtgcatagcaaagatgccttattcatcagcacagcaatagatctaacgttcccgccaggggtactggtcagcgttggttctttagaaagcctgtgtagaatcgattaaaaattgctcagcacttactacagccattttcaaccaagaaaaaaataattttcgggactcacttatattccacagtttaaatatggacaattaataggtcaaggtccaggctggaaggggaccacttcgaatcttgaatgcaggggcaaacagctcaagacaccatggctgatgaagacgctatgtacacgctttccagtatgaaaaccaatgagctacatggggctggcgaacacttgaaaggtggtgagttagagttgagatgtgctggacgtgtaaaataatacatcctggagtttgaagacttttgtataaaattacttaagatatctgaatttttcaaatgtcgattttttgttgaaatgatatttgaacagattggattaaataaaatgtattattaa

SEQ ID NO: 229329 - DNA, 1170 bp, Homo sapiens
ggacatcccagcaagtccctcagtggagtcagccagtgcaaggcgagtgagggacccccagagacatgaatgggtctcagatagtgtgtgagtggatgaagcagcaaaaacacacgctgctaattaattgatttatgtcgagctcaaagtagtccacatcaaaaagactgtttggggctgcaggaattcagtggataattgcaggcaaggcaagggaaggtggaccagaaaggtgaggaggacgctcccttcgagggtggagagagtaagactggcattgcacatgggtgggggggcccgtcgaggcccctctttgcttctgagagtctgttttcatcgacagtcttctactaaatgtacatagcagcttttcagggcaagggtcaccgggattcgtctttatgcctccccagcccgggagccaccacctccaccagacccatccacacagttgaatctcatctcaagttctctggtgcccgaccccccacgcacaccgtgctggtctgggcatctcacctgcatccgcacaagtgcctcaggagggtggagtgtctggtgctcggcgctggaggctcagcccacactgtgccgggcagtcgcaggcctcccagatgaatgaagcatgaatgaatcccgatcctgttatcacagcttctccccacgcatcccaggcagaatgttgtgcaaaaaccacaccaggattcgtacatgccagaggactgaacttctgcgtgttgcagataattcatcttcctgaatcactgtggatctaccatgtggttaaccacggaataaacatgggggagagcgtaagcgctgtcctagcagaaacttatgcttcttccgttacccttaaaaagtaaagggtacggatttcataattgtgtttctcttgtaaatgagactctcatggaaaaatcagccatgtaggcgatagatttgtatacctttagattaaaatgtcacttcgattatttcaagtgtaaaagtgtttcagcttttttgaggtataattgctacacaaagagctgcacacatttcatgtgtgcactttggtgagacttgacctgagcaaacacccatgaaaccatcaccaaatcaaagcaatcgaggaattccacacttgctgggggcttccttgcacctgtgcccgtggtgagaacacag

SEQ ID NO: 229330 - DNA, 768 bp, Homo sapiens
taagttacagtcttttgacaagtttacacttcattctcaggaaaggctgatcatggaaaacaggagattttgccttcaggaaaaaaaatgaatatgcttatggaaggaaacatgtgactaaatatgtgggaaatagtgactgagtggcggctgagtaaacagggtagcatccttttagctggttgtgctttgactaactgatctgttctttcttacttgtagaagattccaagcaagaaagtattcagcagtggctggactctggattctttgtctctgcaaatgaaaactttcaacaagtcattgatcgcactggtaagacaagagaagcagttatgctttgggaagctgagtaggagatatattcaaatatctacgtgaataaatcttcttaaaatgagcattatcagaggcttctagaaatgatcagccctcaaaaactatccagctcaatctcttcatttgacatatgactgcgacaaaaatgataggtgcttccccagcagcaggttaagggccgaacccagggctcttgccatatcatcaatggctcagagtatagcataaactcactgggttctatgaagacatttgcaaggatgtagttatgaaaatgaaattgtttaattttccccatcctgtattatacttttatttctgaatctagattttttctattctttggtctcaaaattgcacttacattctctctttctaataatgcacttgttctcaagaagaataaatgtctgaattctaaagcaaaaa

SEQ ID NO: 229331 - DNA, 537 bp, Homo sapiens
tttagcaaataatggtagcttttacttgaagctttaaaatatcaattttaaaaaaacaattttaaaataacaatttgttttcaactatatatgcagttttaataaaaatattagataattcgattacaagagttcttgacttacattcctgccattagcaaagacagtcaacaatgtcttaagagccaccaaacatatcaatctctagatatggtctaaacctaaggttattttaaaaactaagaacagtgagtgtgtagaaactcttcaattatctggattaatcagcttttatcctgcctgtatagaatcaatgtcttcctcctatgaattccacagtttagtaattatgaaaggcagagaattcatttttccttcctaggtatccataaaccaagcttctctaacccatagcccaggatggctttcaatgcagcccaacacaaattcataaatttcttcaagtgtatttcatgtgtggtccaagacaattctttcaacatggcccagagaagacaaaagattggacatccctgg

SEQ ID NO: 229332 - DNA, 413 bp, Homo sapiens
taaaaacaaagcatttaacttgaattagaaaaaaacttggtcacaatataatcccccaatttatggaacaggcaaacatactgtaaaactatccaaatttcatgcataagtatgacaactctgtttcccttcttttttctttttagagacaggcttttgctctgttgcccagtttgtagcatagtggcccgatcatagctcactgcagccttgaactcctaggcttaagcaatcttcctgcctcagcctcccaagtaggtgggaccacaggcatgtgctaccatgcccagctaattttttaaaaaaatattttgtagagacagggtcttgacatgttgcccaggctggtctcgaactcctggtctcaagcaatcctcctgccttgacctcccctcgtgccgaatcctgcaggc

SEQ ID NO: 229333 - DNA, 468 bp, Homo sapiens
tctgagtcagcacagtacaggcgagaacctaagaaggacagtacagtaaggtgaaagaactaggcttttagtattttatgtattagacttaaaaataaaaaatataagcttaagaagctcataagaaatgagcttacaataaaattctgaacattttgacctcctgcctccacaaacactcttgccttaggaccatagctgttacaggaatgcttttccttccagcttctgccaattttaagtgaaatccctttatggactcttcattttttaccttgctggagatcatctctcccttctttgagccagtagcactttgtatacttcgtttatctgtgtcacattttatgttagattgtattttttagagactctggttgatattttttttgtatatctaccctctatttccacaagaccaagaacgagatcttatataaattaggtgcccaataaatacaaactatg

SEQ ID NO: 229334 - DNA, 496 bp, Homo sapiens
gagataaaatattctgagctcattaatgtgaaaaacaaaactgcatataaatagatacatatttatgggtgcatatatggaaatgtaaaggtatagagaaaggtctggagcagtggtgtacaataaaaatgtaatgtgaactacacatgtaattttaaatttcctgatggccacattaaaaagaacaggagaaattaatacattttatttaacccaatatattcaaaatgttatttcaacaggtaatcgatataaaattatgagatatttttactttcttccttcatacccagtctttgaaatccatgtgtaatttatatgaacagaacagctcacttgggactggctgtatttcaagtgcccagtagccacgtgtactaatgaatccggtcttagactgtgcaggtctggaaggacacacccccaaactattcccatgagtcacaacaaattgagaaggtggaaggtgtgaataaaaactttgtatttttttaaa

SEQ ID NO: 229335 - DNA, 650 bp, Homo sapiens
ctatgtgaagattgtgcctgcttcctctttgccttccaccatgattggaagtttcctgagaccttcccagcagcagaagcctatacagtctcgacagttccccagctatcccccagtggcttggagattcccatttcaagagtgtagagttctacccagaaggtggctgcgtggacagtgactacattctcagctccatgcctatttgggtgaggccctgtgatgaatggtcatcagtggaatatgagcagaagtgttatgtgtcagaagaagacatgccttctccatcctttcttttcccctaccctctggtttgtgttggtttccagggtgtccttgggaggggtttgggccataatttcaaaagacacagtgctaaataccacaatcccaaatgttgaaatctggaaagatcaaaatctctaaaggaaggcacacatttaagatggcaaagccactgtgcctttgtccctaaataagagtggggcaactgtgcctttcaccactctgctgttaaccagttatacacacaatgaactgttacgttagcaaaaaaaatgtttcttgtaaaggccactgaaattgtggagtttgtctgttacagtaactagcagtactctaactaaaatgagcgtctttcataatagaga

SEQ ID NO: 229336 - DNA, 701 bp, Homo sapiens
ctatgtgaagattgtgcctgcttcctctttgccttccaccatgattggaagtttcctgagaccttcccagcagcagaagcctatacagtctcgacagaactgtgagcagattaaacctcttttcttaataaattacccagtctcagagttccccagctatcccccagtggcttggagattcccatttcaagagtgtagagttctacccagaaggtggctgcgtggacagtgactacattctcagctccatgcctatttgggtgaggccctgtgatgaatggtcatcagtggaatatgagcagaagtgttatgtgtcagaagaagacatgccttctccatcctttcttttcccctaccctctggtttgtgttggtttccagggtgtccttgggaggggtttgggccataatttcaaaagacacagtgctaaataccacaatcccaaatgttgaaatctggaaagatcaaaatctctaaaggaaggcacacatttaagatggcaaagccactgtgcctttgtccctaaataagagtggggcaactgtgcctttcaccactctgctgttaaccagttatacacacaatgaactgttacgttagcaaaaaaaatgtttcttgtaaaggccactgaaattgtggagtttgtctgttacagtaactagcagtactctaactaaaatgagcgtctttcataatagaga

SEQ ID NO: 229337 - DNA, 360 bp, Homo sapiens
ctgaggttgacatttccgggttcatacaacaaggatgggcatgattgtgaggcctccccacccacatggaatgagttccccagctatcccccagtggcttggagattcccatttcaagagtgtagagttctacccagaaggtggctgcgtggacagtgactacattctcagctccatgcatggtctgaggccttcactcctcacccttcctggatgtggttgcgccagagggccttcagggatgatttagtgagcagatggtaccaggaaaaccaagggtattgcatccagctgtgtgtacccagattggtgaattcaagcctctgatctaggatctgaaataaaaatcagaataagcga

SEQ ID NO: 229338 - DNA, 690 bp, Homo sapiens
ctatgtgaagattgtgcctgcttcctctttgccttccaccatgattggaagtttcctgagaccttcccagcagcagaagcctatacagtctcgacagttccccagctatcccccagtggcttggagattcccatttcaagagtgtagagttctacccagaaggtggctgcgtggacagtgactacattctcagctccatgcatggtctgaggccttcactcctcacccttcctggatgtggttgcgccagaggtgagtaggagaaagaatgcttgagaatttatcttgacaactcctcctcatcctaggctttgcactttctctgtccctgaaacttcaaggtgttgttcctcttaatatttcaaagacccgaaaggaaaggaagttttgcccacaaagcagctcccacagcaaatgatgaatgctccaagtgctttctggggggaaaaaaaacgctgaataaatccccacagaaaaagaaataaatctctgtgacatctgctaatgtctgccatttccttaaacacctctacctgtccagtttccgtacctcttttcccggccttcagggatgatttagtgagcagatggtaccaggaaaaccaagggtattgcatccagctgtgtgtacccagattggtgaattcaagcctctgatctaggatctgaaataaaaatcagaataagcga

SEQ ID NO: 229339 - DNA, 238 bp, Homo sapiens
ttgcctcaagaatttaaagaatggaatgctttggccaatgaaatgattgcatgtctatatctatatagatgtgctatagctatttactccttaaattctgtaatcccagaacttaagagaatcatttgaggccaggggttagagaccagcctgatcaacgagcaagacaatgtttctacaaaaaaatttaaaaattaggccagatgcaatggctcatgcctgtaattccagtactttg

SEQ ID NO: 229340 - DNA, 493 bp, Homo sapiens
tttgctgttactaataagcaatcgatgttgtgcttgacttcttgagcagatgtaaagtcatcatgagatgtttccttgtttctgtgtggttcttgtgtttaataaaatggtgacttccttttgttggcatcagttctgtaattcagatgatctttttactgctttgtatccatccaagttgtgaaatcaactataagctgctcctttcagcttgccagtgatgtggaattcttaccatatgaacgttccccagggtttttgtaagcctctttaacctctggatgcactctattgacagcttccgagttgtgataagtatctaccttttatttcaacttggagatttcttgaacttataaaattacatttgctttggaacaaatactttagagtgcactgagatggcaggttcatgaattccccagaactttcataggaaatggagaatgcaaaggtcatgtaaatatagttgtagtaatgtcttcactgattg

SEQ ID NO: 229341 - DNA, 296 bp, Homo sapiens
caaattagggcagatgggaggcagggatagggaggagggcacctattcaaaagatgttatggaaatagaatcaagagaatgtcttggctgggatgataggggtaacatcattaacaatgaattttaagattaccaggagtctggtggtgctttgacgaaaattagcaataatgcagaaagagaaatttttttagaagagaagataattaaatgctgtttttaacatacatgtggagttcaggtgggatatgggtggaggcatctggaaattcaggagtggagtccaggatagagat

SEQ ID NO: 229342 - DNA, 581 bp, Homo sapiens
gttatcttaagatatctttattttggtttttttctcttgaaattgagtcctgtttttctgtttgtttgcatatggagtaattttttatagcatactcagaattgtggatgataccttgtagggactcttgattctgttatcttcctctaaagaatgttgactttttgttttgtaaaagttaaagctgactaattacactgaacttgttgagtgtctcggtttttcccttagtctagttgaatctattagaccaggtccacagtcctggtacatagtctatacttttaaggcatggcccttctgagatttcagtgggaagtctgaaatatgtactaagacctctaactaagtggaactcaaactccaaattctacccctatgccttgggtagtagctgaaatctctgatcagcttttcaactttccttttgtgggtttctgcagacatcttggagtctcccatacattgtcaattcagggatcagccaaggattttaagggagtctatatgcatatatggggcttcccctttttggctcttttacccatctcttttattccatcattttaatcttatttacc

SEQ ID NO: 229343 - DNA, 547 bp, Homo sapiens
agcgatgtggggtctagtcttgaccctgaacctaacccactctgtgacccagcctcaggcctcggtcttttcagctacaaaaatgcaaggaaggaataaaattagacaatggcaaatattggtgaggttatggggaaatgcattctctggatttgtctttaaactggaaatattcatgacatgtgccagataatcctatgtcttggtctctaccctagaaaaatatttgcacatgtactcaggaaggctgtctcttgcgggaccatatctaataacaaaccactgaaaagagctcaagggctgtccatagggaatgaatgaatacaatggggtctatctacataacgggtcactgcatcacagaaggaataagcaagatctatgcatgcagagaaatggatagagctctaaaatatattaagtaaaagtagaaagttgcacaataatgcatacaatataatacaatttttgtaacatgttaagcagaactgtggattttctgtgattacattcaaacagaacataaaagcattttttaaaaaataac

SEQ ID NO: 229344 - DNA, 438 bp, Homo sapiens
tatagataactgcattttattacacattgaagctttgtggcaactgtgtcaaggaagtctattggcaccattttttttaacagcttgtgctcaattcctgtttctatcacattttggtaattctcacaatatttcaaaccttttcattattattatatcttttatggtgatctgtgatcggtgattcttaatgatactattgtaattgttttgggacgccatgaaccatgctcatataatatagcaaacttaattggtaaatattgtgttctgactactccaccaactggctgcttttttatctctttctctctaattgtggtttcctgttccctgagacacaacaatattgaaattaggccaggtaataacctaattaattggcttgattcaattaggcctctaactaatgatgatggtctctaactatttaagtga

SEQ ID NO: 229345 - DNA, 388 bp, Homo sapiens
agaggaaagtgcttctggagtcagacctgggtcaaattccatctttgctacttcctagctgggggaccttgcatagatcacgtagtgtggtgaggattaaatgagatgatgtttgtaaggagaaatgtgcaaaaggaacataggacattctaccgggaatcatttccactggaaaaacatggttagactgggttattgaaggacatgatagcaacttttccagagatgatgaaaaatactcctgtattttcaccagacatgttaggagatcctaacttgtttgagctggttggcgctcattataaaatctccttttaggaggggtaatgaaggtgtcctaaagattgcaatgccctgcaggagagcacccaagcctggtcaacagagc

SEQ ID NO: 229346 - DNA, 387 bp, Homo sapiens
agaggaaagtgcttctggagtcagacctgggtcaaattccatctttgctacttcctagctgggggaccttgcatagatcacgtagcttctctgatcctctatttcctcaactataaattggagatgacactatcagttttgtggtgaggattaaatgagatgatgtttgtaaggagaaatgtgcaaaaggaacataggacattctaccgggaatcatttccaagatgatgaaaaatactcctgtattttcaccagacatgttaggagatcctaacttgtttgagctggttggcgctcattataaaatctccttttaggaggggtaatgaaggtgtcctaaagattgcaatgccctgcaggagagcacccaagcctggtcaacagagc

SEQ ID NO: 229347 - DNA, 96 bp, Homo sapiens
ttctttatttttttattttttgcctgtgcatatccaatcacttcagcagcattgttgaaacggctatggtttctctatcgaattgcttttgtgcct

SEQ ID NO: 229348 - DNA, 535 bp, Homo sapiens
ctcagttgtcacttgaattcctgctaacaccccaatacatgtggaaaggttgctcttagttatagagccctgttatgttggagctggaaggtctttagccatcaagcccagaatcttaatttctcagatgaaaaagccatgacccagaaagtttaagtgatttactcaagatctcagagtctgtacattagagagagctgggcttgatttagccaaaaattattgtggcccactttagggatttaccctcagatgttgtcatcacaaaatgtatgtatcaaatgtgaaactgccacttcgttgccagggcattcttttagcaaataaccttaaacgttggaattgcccttatgaggagatgatggtacttcagcagtgcccctcagagcccgtttagatgattttgcagagctttctgttttaaacacttctgtctgaagtgtttagtgtgatgctataggttaggcaaaaatatagtaacagcaacatgacaacaacaacaaaacaaccaacatggataaacaaatgaacctta

SEQ ID NO: 229349 - DNA, 481 bp, Homo sapiens
acacagtgagaccatctctacaaaaaaataaaaattaaaaatatattttttaaaaaatctaaagaccctctgttaatttagctgttggaaccacaacagtggttgtcttctaatcatcccagaggactcaactgagattcaatcttcttcatgtgtctctggaattcatagtcagaagactgggatggagtcaatgagatcccattcaattatgtctgccattttcccctctcaaaaggacctatgagactacaggcctccgtccagaactaacctgcaacttcagaggtgtaggaaaggaatgagacagctatacaatgcttttttttttctcttttcctctgtaccccaataaaacaatctgctttacaggttagatataaagagtacaaaatttgttttaaaaatacgaaggttgttattgggagctgtaagtcttcaaccatatttcatatcttgtaagggtactattagcctccag

SEQ ID NO: 229350 - DNA, 490 bp, Homo sapiens
ccataaaggcctttcaaatacaaacatgcacacatgcgcgcgcacacacacacacacatacatcttggatgttagccttttagttgagctgactcttaaccattgaacacttaaaaaaaagctttttaaaaaatcttattgctatatttcagctaggacaaaatgctgctaaacgaactgtgatcgcacaaattatatgatttctgagcccttaaatgtaagcagaaattaacaccagctggtgttaatgctacctttagtcatttaaagggaatgtgcaagacagaatcccaaaccagtttcttactagtgatgggtctcaggctgtagactgctctctaccatcttagaaacagaaaaacaaaaaaacagataactcatcttccctgttggaagacagctcaaactctataaaggagttacttgccttccatcatcacagaggcaggaaaaacttgtcttccttgtgttggaaacaagcaaaactcca

SEQ ID NO: 229351 - DNA, 649 bp, Homo sapiens
tgatagatgaaaatatgatcttgatggaatacaggacagacataagattagattttttgaaagagaatttgtacagtacaagttttattaactatttattatgaaggcttgagcttatcctactaccttaacaatgacataactgacaaaaaaatatatgcagcataattttacagaaattggatgacagacagctctggaatgtgaccctaatgcaaacaaaaaaacaaacaaacaaaaatcttgtgtttcacaattaacctactctcctcctggaggtttagtgaagaaaagaaatagaagatataaataaaaatcaatattaactttttgagatgaaaaatgcagtactttaaatgagataattaagtgtagaggtaaagctcagttactttaaaggcatagcagtagaatctgtcaaaaaggaggcatggaatgaaatgaacctctgatacttggagtaccagaagaaggaagaggagagttaatgaaaatatttgaagaaataatatctggtgattttctgaattagattaaaacaaaacaaaaaaatttatgaattcaagaagctcaataaatttcaggcagcataaacatgaatatatatttaaaaccacaacaaaacacatcattataaaatttctgagaa

SEQ ID NO: 229352 - DNA, 571 bp, Homo sapiens
tggacggggctggtatgaaagattggaactacgcggaactccaaattcatagttggttctcaccattaaacatttgctgatttctggggacagataggaattctaataggcatagctggcaaagtgaagggaagtctcccacagtctcatattacttgaaaaacaaagttccattaaaaagaagaagatggctgtcaacaaattagtaataggcaaatggtggataggaagcaggactaaattgcagctcccactcagacagagagtagcttgtggagactcacattgtgaacttttgctcccagaactactgcaggaacatatgaggaaagatgagagaatccacagactctttgaaggaagcagattgctcctgcagggcctgggagacaaccaaacactgggtccttagggagaggtgccagaggaattggaaaaaggccacaggcagaaggaaggctccagctaaacttgattgacccatcatttggatgacccgaaaccacagatgcaatagaagaatggaacaaatttgtacattttgtcaataaaaactttatcttcaaaaaca

SEQ ID NO: 229353 - DNA, 483 bp, Homo sapiens
tttctaccatcattatagtatagccaccaatttctactgagtatttatctactatatggcaggtcaagtctgcattctgggataaagtgttgacacaatcttgaatcagtgcctaaggagttcacaagtccagagaggggatagcgcatagagaagataaagcagatgtccatccaaagacttgtatgtgaatgttcatagcaactttatttgtaatagccaaaacctgaaagcaacccaaatgtatgttaagaagcgaatggatacataaattgtggcatatgcatacaatgggatacccagcaataaaaaggaatgaactattcaaagataagagagctgaagaagagtgaaaataaagaaacttctgcaaagccacacatgtaattgacccatcatttggatgacccgaaaccacagatgcaatagaagaatggaacaaatttgtacattttgtcaataaaaactttatcttcaaaaaca

SEQ ID NO: 229354 - DNA, 384 bp, Homo sapiens
tattacagtaggaacagaggcaacagcaacatgggtggctggcagtgatagaaaggattttagttttgatacatggaatttgacatgctttttgaaaatcttcagatggtgatgtacaaactactgcaggaacatatgaggaaagatgagagaatccacagactctttgaaggaagcagattgctcctgcagggcctgggagacaaccaaacactgggtccttagggagaggtgccagaggaattggaaaaaggccacaggcagaaggaaggctccagctaaacttgattgacccatcatttggatgacccgaaaccacagatgcaatagaagaatggaacaaatttgtacattttgtcaataaaaactttatcttcaaaaaca

SEQ ID NO: 229355 - DNA, 710 bp, Homo sapiens
ttatagactgtaaatatcccataatggccatttggtaatttagttaataatagctctagttttggatgtttcattttttcaggttttttgctctttcacgttttgtctagtacagattttaagtctttttttcctggctaccctttgcaagttttactgtctttgctagataatggcttttgtatttattttgacgtgtcttatgttttcagtgtggccaacccagtataccaaaattgccttgaatatggtttctgtgatgagagagactatgttccaaaaatcctgttggtagagacatttcttttattcttatggagggttaaagataaatttcattccaaatctctaaatttagaaaaacagtaatgtcctctgttggttaaaaatcctcacctttcttctggcattaagactcaataatgggggctgggcacggtggctcatgcctgtaatcccagcactttgggagaccgaggtgggcggatcacctgaggttgggagtttgagaccagcctgaccaacgtggagaaacctcgtctctactaaaaatacaaaattagccaggcgtgatcgcgcgtgcctttaatcccagctgctcaggaggctgaggctggagaattgcttgaacctgggaggcaaaggttgaagtaagcagagatcgcaccattgcactccagcctgggcgacgagagcgaaactccctctca

SEQ ID NO: 229356 - DNA, 507 bp, Homo sapiens
gcctccttgttttcttgaatattccagatatgcccactatggaacctttgcacccattgttctgtctgccaggaaaagctcttctggatatttgtatggctaacttcctttcctcctttatgtacttgatcaaatgtcatcttttcagtgaggccctaaccatttaaaaattgaaagcttcctcctcccatggctctccgcttattctgttcaatatttttccataacatttatcaatttttaacgcatatatcgtatatatgatatagatagatagtgcatgtctgtgcttctcccagctctcccactagaatgtaagttccgtgaggacagtgatttttgattcaataaggtgtacctcaaatgcccagaacagtgactagtatgtagtgtgcattcaataaatatctcttgaatgattggttcatgactgacaaaggagttgaaacccagtttgaaaaatgcttgtctgatagctagactcaatccttaattttttatttgagg

SEQ ID NO: 229357 - DNA, 488 bp, Homo sapiens
gggctcggccagcgtagtcattgcccatggaatctcaaacactgggttgcttttcaccgaggccacgcgccagcactcctgaagcctcctctcctccagcggatcgtggcccgcggcttctcgccctcgcttgcacgctttgcccaagaactcttcccggggcagagaagttgtggaaacaagcggctggcccgacggcggagaaagcgggctgcggggctgcaggtcagcgtgatggaagagaggaatgcgcacggcgggtggaataaacgcgcatgggtgtgaggacggagctacccgaggggctgaacgcgcggagcatcggagtgagggagcgacccctaaggacgccttctaagggctcacaggcccaaacacagcggggcagccttgatcggcgccccagccagaaaggcggggacagagccctcactccctctcctccccaaaagaaaataatgcaacgagacggaagacttctcgcccgg

SEQ ID NO: 229358 - DNA, 443 bp, Homo sapiens
agcgtaaaaaataccaaactaacaaaccaaccttcttgatgataaataactcatttacaatgtgatttagatctttcccttcatattgtgttgagtcagtttttactgcttggggtacctaagactttaactatttaactactatgcacatcccagtgaaagtagactgttggtgttatattcacttctacagtggggagaaatgtatgttagcatatttttattgcaatactggtattttgagtacataaaataaatatatatatataatggagtgtgtatatatgtgagagagtgtgtgacagggtcttgctttttcacccaggctgaggtaggaggatcacttgagcctggaaggtcttggccacagtgaactgtgattgtgccactgcagtccagcatgggcaacaagagtgagaccctgtctcaaaacaaataaataa

SEQ ID NO: 229359 - DNA, 513 bp, Homo sapiens
tccccagcagagcgtgacaaggatcggaggctggggtggtggaggcgcttgtaggtggggtccaaaccgtcctgcctgtcccattctgtcttgttctttactacccgggtctccccggcgggggatgggtggtctatcccagcccagcggtcctcagagcgacctcgagtgccttcttcccccgtgagtgaggcttctgccctcacccggtctgggccatctcctaccccgcctgtgccctccgaccctctgccctgcgccgctcggtgtcccagcctttcaattcggcaaacatacgttgcgcgcccactgagtgccagcgctgagccagcctcaccccgccgcctctcccccccgccacccgccccttcccggccggcccggcctgtcggctccgtgacagcagccgccgaagccccggccccgcgggagcggccagagaggagccgccgcatggctggctccgacactggcctccccggcggctccaggggcaacgaagggtggcggccg

SEQ ID NO: 229360 - DNA, 798 bp, Homo sapiens
tgatgttatacacagttattccatctaaactctggaaagtggagttgggggaagggacattaagaataattctcaattatttattggcaaataagccaacaattccagagtctgaaaactgcttgatctcttttttaagcaacaagcaatatgatctctgtgagcccatcattactgttcatttcttacaggagaggaatgacacacttccgcctttaattgccaaattatccccaattctgaattagtggaatataatttaatatgattttattatgattaatcctgagtcattctctcccaggtaatgctgggctaggataaaaagaaatctgaattacattaaaataatttaattattccaagagaaaaggtgacagaatgttttaagtgggtgcgtaattcagagagcctagatgcagataagctgaataaagcatttaattcagcacattcatattttaacttgatcatcttgaacagttcaggcatcacaggttactagaatacacatttgctgtgtagctgggacagttacatttccaacagggagaagggggaggctaatgaatgtacaaatgctagcaacaactgtctcccgtcctctgcaagggtaagctaacttcccgtgtaatttaccacaaatgatatggtcacggcgctcactgtgccctcaagtgagagaagactgttctgaacaccagtaccaaccacagagactgacacctagtaggttctcaaagatcgatcaagtccataaagccatgaataaatattatatttctccacttgcctaga

SEQ ID NO: 229361 - DNA, 417 bp, Homo sapiens
ctccaaattatccattgtctttgtagttagagacagaagtgcccttctggtttttttagcttttaaaatgtgtgacctttgattctgtgagcatctgcaaacctagagtaaaagatgggaatgcagtttgtgcaactgggaagtaattctgaaacttgatatgagaaaaaaattgtccttagaggtgatcctggtttgcagtatgcgttgggtgaggtctatcctgggggcgagaagttagactcaaagattatctttgggtttggagggaagaaaggcaagcatgaatgttttgtctcggtgtggtgggctcacacctcaaagtggccagcactttgagaggccaaggcaagaggatcacctgaacccaggagttcaagactagcctgggcaacatggtgaaaccccatctctacc

SEQ ID NO: 229362 - DNA, 481 bp, Homo sapiens
aaatttccttaataaggagtttttattaataccagttcttcacatagtcctccaaaaaatagaagaggagggaatacttcccagcttcttctgtgaagctagtattatcctgataaccagtaccaaagacatgacaagaaaactacaagccagtatcctttatgaatacagatatgaaaacccttaacaaagtactaacaaaccaaatccagcaacatatacaaaggattatataacatgaccaagtgaaattgattccaggaatgattgatttaacatctgaaaataaatcagtgttaagataccatatcaatagaacaaaggaggccaggcgcccggtggctcatgcctgtaatccctgcatttgggaggctgaggcacaggaatcgcttgaacccgggaggtggaggttgtagggagctgagatggcgccactgcactccagcctgggcaacagagactgcatctcaaaaaaaaaaaa

SEQ ID NO: 229363 - DNA, 650 bp, Homo sapiens
gtgagtagaaatttgtataaagaaaaagacgtcttcactgattgcaagtggttcactatttcttgaagacaaagtttggtagtagtggggaagaagggttgaaaggaagtaggcaatgacaggatgacatttttgtctatttgtctactgttatatttctgacacctagaacagtgattggcacatactagatattcagtaaatacttgatgaatgaacagaatgaatgaatgaagaataaacggggccaaaccatgaaggccctgatgtgccttgtaaatacgtttatccattgaagaatatttaacaagaggtgacatcagacttgttttttggaaaaattagtctgccagaagtctggtggttagaaagagtgggctcaggcaaggaaaccagattgagaaagctgttgtaacaatctaagcaagagaacttaaaggcctgacttaagatattaatattggcattgacaatagtgctggaaatgagagaatttaagagatatttggaagataaaatatacagtactaaatggttgcttgtctatggagagagagagaaagagaaagagaaagagagatgactcccatgtttctggcttgagcacataagtgaagagctattctattattaataactaattaaagagt

SEQ ID NO: 229364 - DNA, 619 bp, Homo sapiens
gagatttgggtacatccatcatctgagcagtatacatcgtactcaatttgtagtcttttttctgtcaccctcctcccactgtttcccccaatcccccaaagtccattgtatcattcttatgcctttgcatcctcatagcttaggtcccactatgaatgagaaaatacaatgtttggtttcctgttcctgagttacttcacttggaataacggtctccaatttcatctaggttgctgtgaataccattagttcattccctttatggctgaatagtattccatgatatatatatataccacagtttctttatccactcattgattgatgggcatttgggctgattccatatcttttcatgagaattataaaggtttgaaagtggaataactcttagggcataatggatataaattgtatattgataaatgacgtgacgtgaagccaggatgagtaagtactactaagtcatgaaattgtgtcattaaaaagatactatgtcattatataagaaagtttttactttattacatttttatcatggtcaaatagcaaattataatttatgtgaggtgaaagaaaatgaaaaagggttttcactagaaacaattttttttttact

SEQ ID NO: 229365 - DNA, 504 bp, Homo sapiens
catttattgaacaggtcagtactgaataaatgtttggaaataaatgttgagtctagttgagttgaattctcttgtgcctaggagcaaacatgccaaacgcccatcactggacagtgggaaggtggaggctgtttgagtgtggcaggggtgtgttggaagaatgtggagctgactgtgaggggccctggactttgtgaatgcactgatgtgtcctaggagtcagagtccatttgtgggatagatgtaaactggtctttgtatactgacgcagaaatgcccatcaaatctgtgatcagagaccattctatgtgctcctgagtcataacacaagtcagaaatccaggaacattttggaagtgcataaaggtacagaagttgttccaggctctgggaaatctcttgtttacagcaagcagataagagctgtggttttcctcctaattgttctgtgaactgtcatccagtaatgtgtaactttgtcaaattaaagaattggaagcagga

SEQ ID NO: 229366 - DNA, 496 bp, Homo sapiens
ctgatatttaatagtaagattttaaacccagagcaagaccctgtcttaataaatggtaagatcttagaactggagcagacctaaaagtttctatggcccagtcacctaaagcaactggggagtgtagcggttaggtgtgacttcccttattctcaggagctagttagtgccagtcccagaaaaaaagaatatgggcttttccagaaacctttggagagaagtggccccacatctgccagtgctcttgacctttagctcagtcctgcctgtcatccctgccgtgcatttcttaactgccttgcagagaccttaagcccacccatatttacctctgtcttcattatcccttggagtaggaaagctactcttggtggtggtggtggttttaatccagattggtgtattctggaggtacaagaagcctacctgtgcacccctggtgcggtggcaggtcacttcccttgctgtggggcaaggcttgtctgctccatcccac

SEQ ID NO: 229367 - DNA, 449 bp, Homo sapiens
gatatcatagcatttattaagagggtcctgtgaggtaggagagtattagccccattttacggatgaacacactgaggctcaaaaatgtggcttgcataaggcctctgggtgggggaagggccacattcccccttttctcagcttatggcatttaattaatagtggccactttttttctgagtatggattcttgacacctcaggaaatactgaagctaaaaaatagagtatattatgctgacacatattctttctcaaaacactcttgatttgttaaccattcctaatgagagcagccactaaagaacggaagtctgcattgctgttattaccacgcatttaataatttgctgttggtgaatggatagcagctgtgatacatccagtttctaccagaatcatatgtgcatataataaatgtatatggtatgcctgttcatgtaacactta

SEQ ID NO: 229368 - DNA, 351 bp, Homo sapiens
tgatgttgtattggggtgtgcgtggcaggatccaaagctccttatagtggattttcctaaaaatctccactaaaatctttcaagtccaacccttataaagccttctgtgaattctcatcccctaaagcagagttgatcattccttcctacctcccacaatgtcctttgaatatatttccattaaattatgcaattatctcattacaatacttttattttttgaatttatgacctgtgagcttttggaggtcagaagtttctgctgttctgtgcgctgctgaatccccattgcctaagcgctgtccccagcatgtggcaaacacagattaatgcttgttgaagaaagaccag

SEQ ID NO: 229369 - DNA, 436 bp, Homo sapiens
attttttcaaatctcagttttattctcattccagcatcctaatgctttccctttggatttttttttctaatcttgagaagtttgtgttttcagtgtagtaataacaataatagtgttcttagcacacgcgttacgccaagggcttttaaaagatacttttcataaaccaactcacttaattctcacaacaacttttgaagtagtccactttctaatcctcattttacagataaggaaactgaggcacacaaggtcagctaacctgcccgaggtctctagctagtgactggaagaggtgttctctggatattatttgaatctcagtctcgctatatttcttcgtcatgactgtaactttccccctgtatttctaaatattttaatctcttgatcatatagcatacgttgatttaataaatcacttttacatgcatta

SEQ ID NO: 229370 - DNA, 461 bp, Homo sapiens
gtcccatcccccaactccaatcattctgaccttggcctgccaaggctgtgagggccgggccttccgaggatacccgccctgggaagcacgggctgagggggtgaggacgcactaggggtatggcgaagggctccaatgccccaggctgcggactcccttagtccttgcagttgcttccgtgtgccccgccctgagtccccatccctccttgccctgccccctgctccatccctcccctgcgccccgccccctgtccccatccctcccctgcgccccgccccctgtccccatccctcccctgcgcctgagtcctccccagggcaggggtaaaagacctggccacaagaaccggagcggtggtgacgccaggtcagcaagtgaaagctctccaattccgtcccgcccgcgggccgcgtgactggcagcggccaatcggaggcaaaagcgggttgttccaaaaa

SEQ ID NO: 229371 - DNA, 204 bp, Homo sapiens
agtggtaggaacattggcagcagaaggccgtatgggataccatggtctacgtttccttacaaggtcccagcttagtgccacagtcatttaaaaatcacttggggaaaacatctgtctccctgagtgtttccaaaactgctttctggaaccattttagattacattgccactgccagcagcctaagactcagggttgctatggca

SEQ ID NO: 229372 - DNA, 358 bp, Homo sapiens
gtgtgtcttcctggggctgatcctagtgttagaatcaaggatacaggaacgttctcagcccccttagccatgactccacctgctgtcctcccagtgtcctatattcctcaggctcagagccccaggccccagcacctcacctttctttgttgaagtccccaaggcctgaccattcacctggggactctgctctctctgttcctgctcatcacatctgggctgtcaacctgtggccgtgttacccaatctgagcctcaggtttgtctcttgtgcaaacttaggacagggaatagaataggctcatgatggacaggcggaggtgagatggggtgagagaaacgcaagagccaaaaggagg

SEQ ID NO: 229373 - DNA, 879 bp, Homo sapiens
aggcattttactaaccaatactcattaagcatagcgtggattcatatgacatcaaggagctattttatttggtaaaacgaaaaagcacaagaatgaacgaacgcaagaactgaaacagtggagacacctagaatgacttgtctaagatctaaatcattttgttgtcttcccagcgtacttattatcctgatcattgtcatcagcattgtttgggtccttttagcacagatttctcaaaatgggtaactccataacagttggaagcttacgaattcatataatttgtaagaggtcaatttggaagtacctatctattttaaaattccaataacctgggaatttcatcccatgtctagagtcttttatgtaaaatatttccacaattaggagaaatatgtgcatggggattttctatgtagcggtgttttgatagaatagaaaattgggataaaccaaatttccatcacgaaggaaatagtaatatgctgaataataatacagcgaatattatgcaggctttaaacatcaaaaaagagttcaacttctgacttccgatgatggtgttgaagcaggtcactgctggtttacatttgattttcatgtgggaactctggaagtccgccttagtgattttacatgtggctaaattgagctaatgacaagctgttcgaagtatggcaaaatggaactttaaaacagtatcttgtcaacaaccaagaggacctgtttcacataaagcccacgcattcatctgcctgtccatcattctgtctgtccacacgggcatcattcgttagtggaactgagtgcccgctgtcgagctgacaagcccataacctccctgttcctagtcacacattaattcttcaacaagtccct

SEQ ID NO: 229374 - DNA, 391 bp, Homo sapiens
cacacacacacacacacacacacacacaaatttgctgggcgtggtggtatgtgcctgtagtccaaactacttgggaggctgaggcatgagaatcacttgaacctgggaggcagaagttgcagtgagcagagatcacagcactgcagcactgcacttcagcctgggtgacagagtgagactctgtcttaaaaaaaaaaaaaaaaattcccctaaaaactaagagtacaataagattgtaacacaaaggataaatgcttcaggtgatagatatcccatttctcctgatataagcattgcctgcctgtatcaaaatctcatgtaacccataaatatacatacctactatgtacccaaaaaattaaaaataaagattaataaataaataaaaaca

SEQ ID NO: 229375 - DNA, 476 bp, Homo sapiens
caaaaatctgttaatattcatttttaaaacactttggctttaaaagaacttaaaatgctacataagtcatccaatgtaccccaagtctttgaagtcaaatacttcaaagctaaatttgttaaatgggaacacacaaagacatagattggtgataatccagcttgggagaaaggacccaagatctcgctgtcctggtggtgaatccaggtttcataggctcatgtggaggatgtatgttgtggatccatgccattgtaaatgtatgtaattaagttcttttcctaaaccaaatgtgtttatatgaatattatatattattttcatttgttggcataacttagagctctgcaatttctacaaaatatgtcaaataaattttagtgatacaaaaaaataaaattgtacatggttgtatggccaacatgtaaatttcaacctgtgcacctaaagtaaataaaataaagtttttaagtttt

SEQ ID NO: 229376 - DNA, 446 bp, Homo sapiens
ttatacattcaacaagtatatttaagatggtctacttatatatactaatcaagatttgtagtctgtacaaccagaattttaagttcagctcagctcctaggaaaatacatgtatagaacaaatatgcttatgaaagacctctagagagccagaacactcaaatcaggaaaacaagccaaatcagtaaagtcaaggacttgcaggtagatagataaatatgtagggagagaaaaagagaaacagagagagagagagagacataaatttaagcaattaaatacaatggcacagtttattccataatatggaatttattattcattaatagcaatcatttacaaatcatacaaagcatcagtaatttggaatctagttgtcactaaggaagacaggaactcaagaaaactcagataaaaaaaaaaccctcaaaatatgtgttgtgaact

SEQ ID NO: 229377 - DNA, 320 bp, Homo sapiens
cagtagcccctgtgtccctgtcgtcccgcgagggattggaggccctggctccgggcggtcccgaggtcccgccgccctcctcccctgcgcagaggacgtggctccccgctatccgtgcggctcgtggtgtcctagtgaaatgagggcgcactggcgcccgacgtgccttggcgacacgggcggcgccgcgccccgcttcgtgcgtcccgtccccgccgtgccctcagctgggcctcgtggctgggccgccctctgtatttgtatttggattcctacgtttgtacttctaatacaaataaatgcacatgttgtcagaaata

SEQ ID NO: 229378 - DNA, 700 bp, Homo sapiens
aatgtaccaactcaaatgaaaacgtgcctactacatggcatggaagaaacaggcttcttgtcttatctcgcacagtctgcccacgcaaaccatctgtccagccaaaccaaaatagcactgtgcttccagcctctgcaccctggctcctgccttgtcgctggcttgaaccaccctcccccaactctctgcttaatgaaacttaatcatcctttaatccgaagctcaactgtcctgtcttctatattgccttcctgattattacagcaggaagtaatttctcttgctcgaaatgcagttaattaaaaaaatgggcgactttggtgccatcatactctgccttggattgtagtgttttgttggtgaattttatctccccaagtaagctgtgggcctgaagaaggcagcaactgtatttcacacatcttagtattcctcacagtcttgcgtatgatgtaagctaaatatttattgaatgagtcaatgaaagtgattttcagtgttgagagctgaattcagaaccccacaatctgatctccatgtttcttctaccaagtcattctgaaagcaatgcagtttctactatgatttgcctctttgtaagccaatcacggttgaaaataggctgtttcatatggtgcagtctaacccaatgcatatggaactgtttggacagaataaaatagtttaaatggctgagctt

SEQ ID NO: 229379 - DNA, 403 bp, Homo sapiens
gtgagccactgcacccggccagattaccattttaattcatgtctttcactgggagaaagtcatacttcggtgttttaattgttctataaaataaaaattaaaagtggtttgggcacctgaggaaggggtacagatgcgtgtgtgtgtgtgtgtgtgtgtgtgtgtgcgcgcgcgcacacctggggacacacgtgcacacagtgtaagaaaagcagatgcagagttgagttctcacgtcctactccaacacagagtagcccctgatacaggccacccatcatccagttgatgacatggtgagtgaccaagatgggtgcatctgaggctctttagatgtgagcttgttggacatacacagtggctcctgaatgaccgtcacctagactggtagagagaggccgtg

SEQ ID NO: 229380 - DNA, 319 bp, Homo sapiens
cagcttgaagtgactgagacaaatgtcctcacttgaggatgaggcatcagcattatcatggaaggactaccaatgatcatggtgactttttttcttctttatttctttaaactgacaaaaattgtatatatggtgtacaaggtactgttttgaaatatgtattgtgttgggaatatggattggggaatggctaaatcaagctaattaacatagacattacctcacatatttatttgtggtgagaacacctaaaatctactctcttagcaattttcatgtactacattgctgtgaattatagtcattgtgttgtacatta

SEQ ID NO: 229381 - DNA, 442 bp, Homo sapiens
gtgaggaacccaagtcatctggaggagtaacatgtaggcaccaggtcaactgtcccagctgagcccagcctgcaagtcatcatagcccaagtgccagacacgagcgaaaaagcctctgggtgttccagcccacagccattcgaatcttccccactgaggcctcagacatcatggaactgagacaagccatcccctttggtgcccatctaaattcctgagacagtgaatccgagagcataatggatggtagtggttttatgcaacgggtttgggatgtttattccatagcaacagataactggaagagcctcagaacagcaatcaaagatgtctgaccgtgaagcatctggaatacaagaagatgaaactgaggaacgctttgcatcagtaaagtagcaaagtcatgatttttcccaatacagaagctcttggaacactcgcg

SEQ ID NO: 229382 - DNA, 380 bp, Homo sapiens
ggctagtgctgcacattccggccagcccctcctcaagaccccattcccaagccccttctcagctccctcgggccggcagagcgggcttttgtcaagtaaaatgctgttgaaggcccacgggcatgactgcacccctcactaattggtcattggtttggggaggacaccactgtcccagtggaaccttgagcacaccttggagccctcctgttcctctccggacctgtgccaaactgtgagtggcacagagcaaggactgtatgtgttctcttctttgttgcatactcagttccttgaccacagtgccaagcacacagcgagcactccctgtgtatctgctgagtaaataaacgaatgaacaaacccaacacaaaaaaaaa

SEQ ID NO: 229383 - DNA, 419 bp, Homo sapiens
gggatgccaccaccctctctagcgacgctctcctgtgtcaccgtaaccagaggtgtcgactgagtgccgggagccaaacaaaggagcatctgtccctctcggcatgaggattcctggcaccgaggattaattgccaagttaccaggcttgccatcatgaagaggcatcttattctcggcagggaatattgtgttcttccctctccttgctgtgagaatgtggtcccgggatgatcatacgtgtggcatcatcagagagaacaccatggccaggcatcctcggactgcggggagtttcccagcattcaagactgaaatgcagccatccgcagacacccagcagcccacaccaccaggccccaaccacagaggtcagcgccacgcagggcccagcggaccgatggtcccattctcagctca

SEQ ID NO: 229384 - DNA, 610 bp, Homo sapiens
agaccacaaatctttgaggaaaaatggatgaagatcagtcttctgtaactgctttctgctgacagaggggtggtgttggttctgtgagtattggcctcttgctagctctcagggcaggagggtgactctttgggtggtaaaagcagtatctatccaggtccaagggagacaggggcaggattttgccttcttcctgtcccactgatggacattctaggggtcccctttagaagcctgcctcttgggtattgagagaacagtatctctcactgaggatttttatacttatattctttctgatagtcatagttactgaaagtataattggccaggcatggtggcccacgcctgtaatcccagcacattgggaggccaaggtgggcagatcacctgaggtcgggagtttgagaccagcctgagcaacatggagagaccccgtctctactaaaaatacaaaattagccaggcatggtggtgcatgcctgtaatcccagctactcaggaggctgagacaggagaatcgcttgaacctgggaggcggaggttgctgtgagccaagatcatgccactgcactccagctctaggcaacaagagcaaaactccatctta

SEQ ID NO: 229385 - DNA, 364 bp, Homo sapiens
tggcgatggtaatagtgagtgacccttgacattcttttctcaaaatgaaagtctacttttttcccagggttggctctagggagagtataccaatgacattcaaaatatttttaaaaaataattcaaagaaaaagagtcaaaatatggtggagagaatgtgaagggaaaggagtggaaaacattttctttataaacaagaaagaagaaagaacgtataaccaatttaggtttggtgtacttggaagtcaacaagtaaaaaatgtaattcattgccagctctcttgaacattttaatactgataactttaaactttccaggcactgaggtttagaaaacataacagtggcattagatacagctatg

SEQ ID NO: 229386 - DNA, 375 bp, Homo sapiens
gagacggagtctcgctctgtcgcccaggctggagtgcagtggcgggatctcggctcactgcaagctccgcctcccgggttcacgccattctcctgcctcagcctcccaagtagctgggactacaggcgcccgccactatgcccggctaattttttgtatttttagtagagacggggtttcaccgttttagccgggatggtctcgatctcctgacctcgtgatccgcccgcctcggcctcccaatcagttgctcttatctggcagacagactcctgattatccatcaaatcttgaatcctgttctcctctgggaagccctccctgacttcccaagttgacttaagcactctctttttcccccactgtgtcttgcgc

SEQ ID NO: 229387 - DNA, 461 bp, Homo sapiens
aagcacattttcttgttctctgccgtaaaaatataaattcatgcagcttttctgtaggtaacatacaactcaattttaagctgacttaaatagaaaggacatattggctcactttggatttcaggatttgactcagtggctccatagtgtaattaagtgcctaggttttttccatctctttgctctacagtgcacagtgctagcttgttccagggcctagtttccctggtagtatagggaactgccgacagtaattgggttatttgcttcctcagtcataactgctggcagaaataatacctcctcctaaacaatctaataagaattcttggccgggcacggtggctcacacttgtaatcctagcactttgggaggctgaagcaggaggatcacttgcgctcaggagtttgagaccagcctgggcaacatggtgaaagaaaccccatctctacaaaaaata

SEQ ID NO: 229388 - DNA, 450 bp, Homo sapiens
gtacatgaaattaaattcaacatttacattaaatgccttcaaatatggtaaaatggtttcttttggcagtttacctcattatgttttgaatgatttgtctatcatatgaaataacttttataaatatagtaactcaggcctgggcacagcggctcaagtgggaggactgcttaagcaaccgagtttgagaccagcgtggacaacatggggagaccccttctctcccaaaaaatagctgagcatggcagcgcactgctaaaggaaacagagtttctttggtgggtgattaaaatgttctggagttagatagtagtgatggttgcacaaccttgtgaatatattaaggtttccgctctatctaccattcaattgtactctctaaaacgattaattctatagtatatcaattatatctctaaataataaaaacaaaaagaaatggctgggtgc

SEQ ID NO: 229389 - DNA, 212 bp, Homo sapiens
gaggagtgaagactcaaatctaagcaattttactccagtgtccgccacaaatataactctgcatcataatcgaggccatcagtatctctctcaattcagttcgattctgcaagttcaatccttagcttcttcaagcacagggaaagagagggcttttggagaagaaattacctcaggaatcagcccttctgtcgtcttttcgcagcggaata

SEQ ID NO: 229390 - DNA, 320 bp, Homo sapiens
atccagtctgtggctcaatagaaactgtgaagaatcatcttctagaataggcgacttgattagctaatttctaaattatctgacagttgatttcctgcattatcttcactctattcattttttaaaataaagtcataaagaacacagcttataatcattactgcttggggtagagcaataagattttatgttcccacatagtttttgaggcactgactataaagaccaaaaccaaggtcaactgacatcccaaaggccagttacagctaggaagtctttctagagctctaggaggaaaggtgaaaggaagggaaagaaca

SEQ ID NO: 229391 - DNA, 285 bp, Homo sapiens
agggtctgcatttgtgcactctggcttttgtgcacgtgtgtgtgtgtgtgtgtgtgtgtgtgtgcacgtgcatgtatgtataaggccacgtgtccatcttcagcatgtgtgttcatgtctatgtgggctcattgggtctctctgcaaggcgctgggtggaaggggagtgtgaggaagccattagcatgatggtagcctccaaggactcgaaacctggagtcacagcaggaagaagagccctgctgggctcacaaccaattggagctggggcctgggagccctggc

SEQ ID NO: 229392 - DNA, 507 bp, Homo sapiens
gatcctttgggaagacaccgggcactgtctcagcccttccttccagttgttggtggctttcgtgcaggctaaggctttggctcccttagcctgggtcccctatagccttttcactggcttctccaatggtttcgacataaccatcagctagaaatctgggtagcaacagctgttttgggaagctgaggtgtcctttcccctggcccagcccactccctcccatttttttccccagctttattgaggtgtgattaacaaagtagtatgtatttaaggtgtacaaaattttttttttttttttggagacagagtcttgccctgtcactcaggctggagtgcagtggcacgatctcagctcactgcagcctctgcctcctgggctcaagcgatcttctgcctcagccttccgagtagctgggaccacaggcacacgccaccacgcccagctaacttttgtatttttggtggagatggggttttgccattttggccaggctggtcttgaac

SEQ ID NO: 229393 - DNA, 373 bp, Homo sapiens
gataattagagagatgagtaaagaataaaatgtcatatatgcctgaaaacaaagtaagttttgttttctctcctaaaattacccatcagaaaagagagtgctgccttatattgaaatcactaacacaagatgatttctcagttactttatttggacttacttggagaagatatactggcctgaaataaccattgtatttcggatgtaaattcaggctaccaggtagaattaaaatttggtcaaataagatgaggcctgagaattgatccttaaatttttagcattgtctaggtcattggtgatcttgaaagagcaatttacatggagtaattaggaagaaagacttctgggaataggttcagtaaagaacagg

SEQ ID NO: 229394 - DNA, 769 bp, Homo sapiens
actctccccctgctgtcaatggccaggccaacccccctggactcctggccctgctggatgaggagtgctggttcccgaaggccacagacaagtcgtttgtggagaaggtagcccaggagcagggcggccaccccaagttccagcggccgaggcacctgcgggatcaggccgacttcagtgttctccactacgcgggcaaggtcgactacaaggccaacgagtggctgatgaaaaacatggaccctctgaatgacaacgtcgcagccttgctccaccagagcacagaccggctgacggcagagatctggaaagacgtggagggcatcgtggggctggaacaggtgagcagcctgggcgacggcccaccaggtggccgcccccgtcggggtatgttccggacagtgggacagctctacaaggagtccctgagccgcctcatggccacactcagcaacaccaaccccagttttgtccgctgcattgtccccaaccacgagaagagggccgggaagctggagccgcggctggtgctggaccagcttcgctgcaacggggtcctggagggcatccgcatctgtcgccagggcttccccaaccgcatcctcttccaggagttccggcagcgatacgagatcctgacacccaatgccatccccaagggcttcatggatgggaagcaggcctgtgaaaagatgatccaggcgctgactggaccacacaaccagccatcttcgagggatcctctagaacgaccgcagcatcagcagcg

SEQ ID NO: 229395 - DNA, 591 bp, Homo sapiens
actctccccctgctgtcaatggccaggccaacccccctggactcctggccctgctggatgaggagtgctggttcccgaaggccacagacaagtcgtttgtggagaaggtagcccaggagcagggcggccaccccaagttccagcggccgaggcacctgcgggatcaggccgacttcagtgttctccactacgcgggcaaggtcgactacaaggccaacgagtggctgatgaaaaacatggaccctctgaatgacaacgtcgcagccttgctccaccagagcacagaccggctgacggcagagatctggaaagacgtggagggcatcgtggggctggaacaggtgagcagcctgggcgacggcccaccaggtggccgcccccgtcggggtatgttccggacagtgggacagctctacaaggagtccctgagccgcctcatggccacactcagcaacaccaaccccagttttgtccgctgcattgtccccaaccacgagaagagggccgggaagctggagccgcggctggtgctggaccagcttcgctgcaacggggtcctgggaaacggggcgcggccggaaaggcggccgc

SEQ ID NO: 229396 - DNA, 233 bp, Homo sapiens
acataaatttctatttttctgaaactataaatactccaaagaattcttttagacagaactattttcctcttcttggaactacctttgcaaagattagaacactagccgcagctactcaggagactgaacaggagaaccgggagcttgaaccgggaaccagaggttgcagtgagccgagatcgcaccactggactccagcctggtgacagagtgagtctccatctccaaagaaa

SEQ ID NO: 229397 - DNA, 297 bp, Homo sapiens
tcgggaggccgaggcaggagaatggcatgaacctgggaggcggagcttgcaatgagtcaagatcacaccgctgatctctagcctgggtgacagagcgagagtccgtctcaaaaaaaaaaaaaaaaaaaaaaataccaagtgccaggaagaatgaagggagagggtggctcttccctgagtcacctgtcatctttgctgatggatcccacattctcattcagatcagcaaatctttaccaagtgctggcctcacccccttctgccaccctggcctggctggccacatcttcggaggtg

SEQ ID NO: 229398 - DNA, 489 bp, Homo sapiens
agaagcatctagagaaatttgaattaaagaagattctgtgaaatttgcctaagtacagaatgcacatctattttgaattttcttttatttaagacaagtggcagataatttcacagctgtcagttaatgcacataatgaatgccttatcaaaggatgaaagcatgaagttgtattcatgttccccaagtatgtaaaataaattcaaaaggatgtcaagatcttgtatgaaataaaaaatgcaggaacactttggtttagcaatgtgttggggagaggtgggattgaacattcacccttgtctctctataaattaaatcaataggagagtaggcaatgcagtaactgctttatcactcagatttttgcatcagtttctcaggacttttttatatggcatgtctgtttgacatggtggggggcaactttaataaattgctttggaacactttatcttttaaatttactactaaattctatcaatctttagc

SEQ ID NO: 229399 - DNA, 268 bp, Homo sapiens
acaaaagacatcctggaacttaaatgattgaaccaagaaaatcagtaaaagaattaaagacaagcatgatttaactgtggtgaacacaattagtggcctgggaggtcgagcataggaaatatctcaaaacacaaaacaaaaagaaaaaaatatggaaatcacaaaggaaaacacagactaacaggacagactcaagataatgtaaatggagaaaagggaacaaatggagaaaagacaatagtaagaattattgccaatactagggaaa

SEQ ID NO: 229400 - DNA, 705 bp, Homo sapiens
ccaggtttgccgaccttacgggcccttctccgccagccctggctgggtcacccccacgacccgggactcccccgccgttccctcccgggctgcctgcagtgaggtccgctcctgaggcctcagcctcgccgggggtagggccctctcccgccgtcgccgcagctcctttccgtcccggggcctggggggcaccgtcccacgggtgaggtctcaggtgatccgcccacctcggcctcccaaagtgctggaattacaggcatgaaccacggtgcccggctgacacaaggaactttctatgaggtcctaggaatgaaggaaaacaggcaataaggcaagaatcgctgtcgaaggagtctgcgccacctgctcgcacagctcacttgtgccttctgagcctgctggagcccagtgtacatatgccgtctccgcgtgattagagattgctgctgcacgtgcccaatcccgtggcggggctggaacacaaacggggtggtgttccagctgcaaccatgcagatgaagactataccctaggagatggaggaacaacagacaagaaagaaacctgggttcctgaataaccacgtggagccaagcagcttacttatctcaagccactgttgcccacctccagattgaactgtctgcaaacaaatctttacttgatgagaagtttaaatataattaaatctagaatattacatga

SEQ ID NO: 229401 - DNA, 828 bp, Homo sapiens
ccaggtttgccgaccttacgggcccttctccgccagccctggctgggtcacccccacgacccgggactcccccgccgttccctcccgggctgcctgcagtgaggtccgctcctgaggcctcagcctcgccgggggtagggccctctcccgccgtcgccgcagctcctttccgtcccggggcctggggggcaccgtcccacgggtgagggccgcctccagcgcctggcccagccatgcgaacgcctggagcccgcgagctgcagctgcggccctgaaggtgccgcatatcctgccgagtgggtgaagcgtggcactttggaaaacaaatcggtctcaggtgatccgcccacctcggcctcccaaagtgctggaattacaggcatgaaccacggtgcccggctgacacaaggaactttctatgaggtcctaggaatgaaggaaaacaggcaataaggcaagaatcgctgtcgaaggagtctgcgccacctgctcgcacagctcacttgtgccttctgagcctgctggagcccagtgtacatatgccgtctccgcgtgattagagattgctgctgcacgtgcccaatcccgtggcggggctggaacacaaacggggtggtgttccagctgcaaccatgcagatgaagactataccctaggagatggaggaacaacagacaagaaagaaacctgggttcctgaataaccacgtggagccaagcagcttacttatctcaagccactgttgcccacctccagattgaactgtctgcaaacaaatctttacttgatgagaagtttaaatataattaaatctagaatattacatga

SEQ ID NO: 229402 - DNA, 948 bp, Homo sapiens
gcttacaatatacaaaaaacatatttttctctctttcaatcctcccttgcatattttcccccttttaatccacataacaatcctaccaggtattttcatcttgcagatgaaaaaactgaagctcacagaggttaagtaatttgcctaaggtagcacagccaggaagtgggggagtcagaattcaaaaccaggtttgtctatacaaacaaactacgttagggataacgtatctagtgcctgaatctgttttaaatcagatggttctatatttcagcaattattcttcctcccatgaactcatcaaacggctgctgactaaattttattaactatttgttacgcacctattattttcaataaaggcttcagctgtgtagaaataaaacaggcaaactgactttattctaaaatttgacatacagagaattcccaggcatctctgccatccaacactgatgatcataactagattcaactacctattcagacctctagttgtttccacattatcattcatttgtccactcatgagataaacgaagctactttcaccaaaaaccctccctcatgactcctgatagataatacagcagaggaggcctcactgtaaagcaatttacataaaagttataaaagctctttgttatctgtcatgactaggaaatgggctattctagcaaatcaaacatcctggatagcataacgattctattagagggactaccaatttataaggaatttcaatgtgcataatttcactctaaaaattaaaaaaagaaaagcgggtcaggcacggtggctcacacctgtaatcccaacactttgggaggccaaggtaggcagatcacttgagcccaggaggtcgaggctgcagtgaactatgattgtgccactgcgctctaccctgggcaacaaagcaagaccctttctcaaagacaaagggaaaca

SEQ ID NO: 229403 - DNA, 1489 bp, Homo sapiens
aacactacaaaattttcaagcacagcctatcggccatagatagtatcaactagaggcaatgtctttagtttttattatttttgaacctggagcattttctgttggacgttacaggatcttactgctttaaatcatacattattaaaaaaaatgagggtttattctttgaattacccttttgtatgcaggagtgaagactgcttttttagttgaccattcaaaatcgttgaattttagtttttgcagactactaaaatttgcagtgactttttttttgtaaggggggtaaatgaaacatttagcagcctttgaaatcagcaagttgcttagatagtactttagattttgaaactgaatataacagtgttagaaaagtatgtgtaaggaattgtatttacatgcatactagtagtacaatacttatagctgaatttggttggcaaaagtatgttttcattttattacgactgctagtcaggtaagatatggtgggattctttctgtagtgttttcagtgtctgggcaaggggaggagctcgcctgtgttatatgaggggttaataccaataggataggaacagtttttagactgttaattgtgaattttacatttgggtcatcactgttgtgtagatttgttcacctattaaaataatgaaaaccctcatttgagtgtgtgtgtgtggtggatcataggaattgatttgtggagtgatactttcaatagtcactgaagacagaagtttggtatttggtatagtctacaacaaatgcttagtatgtccaggtattttttttttttaagttaaaccaatgttaagctattactggtaaataatttgtaattttagtgcttcgttataggggatgtgaatagttttaatgtcttgttttttcataagcagattaacatgtaaaaatgtaaaattatattaggctttgttatttttaaatacatttatggattggtacgccttctgttcacctcatttcagcttcgctgagagttggtagatttttttatgaactgtatccctctagttccaaagtgccaaaacaaattgactgtatcttaaaaaactactgcataagtaaaattaaaaagcagattgcttctcctgatcttttttgtatttcaaatggaacaaaacttttcttgtaactgtaatttgtaaagtttagatatcagtttacagatgggggaggggagaaggaaggaaatatgggtgaataatatgtgtatgtacatacatatgtgagtctgaggcccaaggatagaatactgtctccaaccttagccagctgtggccatatacttgtagggaagtttccatgcttcttcagctgcttttctgaattaccaaatcactcctgacaacacatattctgccacatgaagacgaactagaatcaatctgataaatctgagatttatcaatcaaatacatcataatttgccaatcatagtaaaatgaaaatagttttgcct

SEQ ID NO: 229404 - DNA, 1136 bp, Homo sapiens
aacactacaaaattttcaagcacagcctatcggccatagatagtatcaactagaggcaatgtctttagtttttattatttttgaacctggagcattttctgttggacgttacaggatcttactgctttaaatcatacattattaaaaaaaatgagggtttattctttgaattacccttttgtatgcaggagtgaagactgcttttttagttgaccattcaaaatcgttgaattttagtttttgcagactactaaaatttgcagtgactttttttttgtaaggggggtaaatgaaacatttagcagcctttgaaatcagcaagttgcttagatagtactttagattttgaaactgaatataacagtgttagaaaagtatgtgtaaggaattgtatttacatgcatactagtagtacaatacttatagctgaatttggttggcaaaagtatgttttcattttattacgactgctagtcaggtaagatatggtgggattctttctgtagtgttttcagtgtctgggcaaggggaggagctcgcctgtgttatatgaggggttaataccaataggataggaacagtttttagactgttaattgtgaattttacatttgggtcatcactgttgtgtagatttgttcacctattaaaataatgaaaaccctcatttgagtgtgtgtgtgtggtggatcataggaattgatttgtggagtgatactttcaatagtcactgaagacagaagtttggtatttggtatagtctacaacaaatgcttagtatgtccaggtattttttttttttaagttaaaccaatgttaagctattactggtaaataatttgtaattttagtgcttcgttataggggatgtgaatagttttaatgtcttgttttttcataagcagattaacatgtaaaaatgtaaaattatattaggctttgttatttttaaatacatttatggattggtacgccttctgttcacctcatttcagcttcgctgagagttggtagatttttttatgaactgtatccctctagttccaaagtgccaaaacaaattgactgtatcttaaaaaactactgcataagtaaaattaaaagtcgacgcggccgcgaatttagtagtagtaggc

SEQ ID NO: 229405 - DNA, 1047 bp, Homo sapiens
tgcgttaggtatgaaagaaaggtcaggaactagcatcccttatgaatgcctaacaatatgccaggttctacaatataccatgttcacataattctaacaatcaccctgtgaaaatatcatccctttataacggatgtatatcagctcaaaaagagtaagtgtatcggggcgtggttgcacacctgtagtcctagctactggggagggtgaagcaggagaatcctttgggctcaggagttcaaggttacattgagctatgattgtgccactgcattccaacctgggcaacagagcaagattcctgtctcttaaaaatatacccaaataggccgagcgcggtggctcagaaatcagagggcgctaggaaatagggcagaatacccacaaacacacactcctaaggaaacaagaggtatggtcctcagtaaaactgaatcagagtggctccaagatgaggggtatccctcacagaaaagagaagtgaaatgctggtatgaaaacagggagactaggtaaaaacttatgaaatgaatgacaagacttgtagctttcttcccccatgaagcgctagaaccctgtcatacaaactcattacctctgccaagcccttcactatggactgaatcatgcctccccaaaatccatatgttgaagccttaatgcccaatgtgactgtatctgaaaataaggcttttcggaggtaactaagattaaatgaggtcaaagggcacagtcccaatccaataaaattggtagctttataaagagaaaaggaagagatttttctttccattataggaaaagtcatgtgagcacacaggaagaaggcagtcacctacagaccaggaaaagagcccttaccagaacctggccatgatggcatgctgacctcaggcttccagccaccagaattataaaaaaattaatttctgttaagtcacccattctatggtattttattatagcagcccgagtgactaagacacccctcctctctccatcattccacccacaaagagacaggaaaattaaaggacatctatctga

SEQ ID NO: 229406 - DNA, 650 bp, Homo sapiens
cagcaccaggctgtggcaggttgggttttgctctgtgctgtgatttctgttggagttggaaagttggctgtgagtcggcccagatgtgaagcggaaacggggaggagggaggtgagtgggcctggctgggtggatggggatctgctcgcctgcacggtttcctctttggtaaagtggggcctgcactcgccccatctagacaggcatgtggggactgaggtgattgattcccagcgtggaggagcatctcgctcagtgccaggcggaccatggcctggaggtggccggcattttcccttctcctgaggggatttattgatcttgtgctgcaggtggtgtggcctgagggcaggtgtggcttgcagagctcatcactggggcaggtgcagggctctggggtgctgagctgtcactggcgaagggcctcaggtcccccccaacagctcccacctgctcagccacagcgtggatgcgtcccgggctccccggccccgggggataccataagcacagaggtggcctctttgaatcaggggcttcccagggagggtctgaggctgggctgcgggattactccttccttgggaagcaggcaggggtggccaggcacagtggctcacgccagtgatctcagccccttgagaggctaa

SEQ ID NO: 229407 - DNA, 351 bp, Homo sapiens
caaaccttgatgctgctgcaggaagcataggctatgacacccatagcacaatgtcagtcacctgtgcactcctcccagagcacgcagacctttctccccaagatatgtaagccctgggtctggagagttacagcttggagatctacctatcttgaggctgcccaaatcttgctctgttcaaaagttccccaactaataaccctttaccaacaaattggaattggctgcctcattctttggtttcccagctccttctgcatttggggtcgctttatgtatacggccctttcacagaacaccccttccctgtgatgcccccagacctcttgcctgcagcagcaccacacctac

SEQ ID NO: 229408 - DNA, 490 bp, Homo sapiens
attaaaataaaatagataaatgtaatgggataaatacttgtagaaaactggtcataatttcataatttagaatataaagttatattaaattaaataatatatatttcattatttgggtattttccaataaatatatattgtaggaaaatattcttgcaaaaaaaagtgtgactttttaaaaaaaaaaaggtgaaaaatttttgtctaattcgaagcttatttaaaggttatatataaaacaaggtaaaaggaaccatgaaataaaaagagatgtaaagttataaaaataaagaggtatttttgtgtgtgtgtggtaagaaagcttaaagagaaataattttatatgagaaagaatcttacatggtaaacttcagtcctaaaataaaatgactggttgtttaaaaaggaggcatattcaggacaaatcagaaagtccaaatattaagttctggtttgcttagggaaaaaaacctgagattaaaaaaaaaaa

SEQ ID NO: 229409 - DNA, 511 bp, Homo sapiens
acatgaagacatttgagaatctaagaaaactattgggctgtctcccaagaaaaatgcgtgtatgtgtactttcatagaactttggcatatgtgttcacataatccctaaaagtaacctctggcctacttattacagtttagaaagggggctaagaattgatgcttggaatttgaaattttactgaaacttttatttataccgtaatttcttttcataagttcaagaaaacctttttatagatattaacattacactcatttcaatatgaaggtgattaaaagactgtaagtgaatactatgcatactgttatgccaataaattagaaaaattaggtgaaagagtggattttctaggaaaatagaagttttgccatagttaagagtattaggttgaaccaaatgacgttgttgcctttgatggtcagaaatagttatatattgtcagtttcatatgattcagcttaattgaagcattaaaatggaagaactttatgtaactaaaaaaaaaaa

SEQ ID NO: 229410 - DNA, 463 bp, Homo sapiens
tcagtccataatagaataaaactagaaatccataccaagaggaactttggaaactatacaaaaacatggaagttaaacatgctcttgaataactattgggtcaatgaagaaattaagatggaaatttaaaaatttcttaaaacaatagaaatggaaacacaacataccaaaacatgtgggatacagcaagagctatggcaagagggaatcttacagtaataaatgcctacatcaaaaaagtggtagaaatattttaaataaaaaatttatcaatgcacctcaaggaactagaaaagcaaaaacaaaccaatccccaaagtagcagacagaaagaaataatgaagagcagagcagaccaaaatgaaacagacaaaaaacaatacaaagggtcaatgaaatgaaaagttgtttcttcaaaaagataaacaaaattgataacccactagcataattaaccaagaaa

SEQ ID NO: 229411 - DNA, 435 bp, Homo sapiens
ctgaatgggttgtagtggacaggcctaaactaagttaaggcagtgagaatctaagctctattctgcctagatgaataaattggcatgttattctaagtgccactggggaactggctttaggcagaagataacactgagagtggcagattagaacaactaaaactctcagtaaactatcgcaagaacaaaaaaccaaacaccgcatattctcactcataggtgggaattgaacaatgagatcacatggacacaggaaggggaatatcacactctggggactgttgtggggtggggggagaggggagggatagcattgggagatatacctaatgctagatgacgagttagtgggtgcagcgcaccagcacggcacatgtatacacatgtaactaacctgcacaatgtgcacatgtaccctaaaacttaaagtataaa

SEQ ID NO: 229412 - DNA, 477 bp, Homo sapiens
gtgtgtaacccaaacctctaacaagacactgaactttaccaccagcccagggggttcctttgtgtccctgccagtcaatctctgctcccacttcccttagaggaaacaactgttttgattttttttctgctgtagattagttcttgcctcttctaaaacttcatttaaatgaaaacatacagaatacattttgggggtgaggattcttttactcagcataatgtttttgaagttaattcatgtgtcgcatgcatcagtaatttgctccttttcctggcagagtaattttccattgtatgaatatactaaagtatgtttactcattctcttattgacggctacttggaatctccccattttttagctctcactaacaaagtttttatgaaccttcttgtgcaagtcttcttgcaaacatatgttttcaattctattgagtaaatatgtaagagaagaattgctgagtcataggatagg

SEQ ID NO: 229413 - DNA, 515 bp, Homo sapiens
aagggcactggtagtgactaggtaattcactggtaattcctggtagtgactaggcagatgaataccttccttgtccttctcgcctcacctcctccaagagaggacactgtatggtgtcaggactagcattttccatcacatccataggggaattacccagcaatggctctcagtgagtctctctgctagcactgtgccccacagcaaattccaaagtcatgtcccaggcaccaccccacccattcgcgatcgtggtgatcaagcctgctttcttgtctcatctcaggagagaatttaaattgctgaggctccagaggaaagggcagcaggcacattctttgggcagccctccatgaacctggattttttcagcagggcttttcactgacattgagtggcagtgcatttaggataaaactttcagaaacactttgagtgcagtttttcagggttgtcattcagtacagaaaaataacacgttttgcccatgtaccctagaacttaaagtataattt

SEQ ID NO: 229414 - DNA, 165 bp, Homo sapiens
taatgttagtttttttccccttctgttgtccttgctcctgttaggacttcctgcttctaatgtgactcctgctatacttggcaaaaaatttgtcatagtgtacatgaaagttacttgtttaatattcactcctcactctccctctatcccttctgtcgtcttctt

SEQ ID NO: 229415 - DNA, 383 bp, Homo sapiens
ctctgcccctccattgggaagtgggggtgccatgagattccagtgagtacatttaaagcgctcagtgcagtgtctggtgggagtcggcccaatatcacaccagaggctgctgtcgtcattgctataacctttgagggtcagccccaggagagcttcaggggtgctggcggcaccacccaccatcagccaaccttgctggggagggttaaacccccatcattgctgggagttgactgggactgttgcagggagtaggcatttggatgcgtgggacgcggtcagttaccagcctcggtggttgggataggtccccacagactgccgccctccccagacagctctcctgagaagggtgtgtgtgtgagcccacctcagagaggatg

SEQ ID NO: 229416 - DNA, 361 bp, Homo sapiens
cacaattaagaccactgatgagttaatttgtgccaatagatcattgagttttagttcagggtatggggtgaagcttcttctgctgtctctgtttgcttgaagagtaacctgagattgcaagggagctgttaattgttactatttgcaaccatttaggtggatgaatcagaattttcttaatatggtacaaaaaactccaaaatatagatatgaatcagatgctgagcctcataaaagaatcaaactctaatccataaactcttatttcacatttttctctttatcaaagaaacctatttacctaacgagtaaatattataaacttgcacttttaaaataaatttgtattaattaaatacct

SEQ ID NO: 229417 - DNA, 416 bp, Homo sapiens
agatcacaaaaacatttaactctgaaacacccttctccgaaaactactggaaggtatctatcaaaatgagaacctaattcaagacaggagaagacagaagaaacagaaactagaagatccaaaacaggacagaagtgaaatgaatctccaggtgatgctgaaggatgatccaaggatgacaactgagcataatgaacaactagtccagtaaggagctgtttgactcaagagacagagattttgaaggatatcattagcaatcctcttaacattgtatcatcttttcaatcatatgaacctattggaggatgtgttctagtaatgccatagagtaaactgaaaaagggcaagttataaaatcccagaaatagcaaacacatccagaataaaaggcaaagaattccaagaatgacagc

SEQ ID NO: 229418 - DNA, 571 bp, Homo sapiens
ggtgtttgtgcagtgacctaatacagagaacacagagttgaagaggagaggaagatagcctgaaacaccccagaaagttctgtcccctgtttagcattaagaaaattatgttacatgttaatgaattacaataataaccaaatcctcataaggaatctggtgagaagctactaatttatacccatactcagagttttaaggtcccacaggtggtaccagcagaactgagcctgtgagccccagccctggagctcactaacagaagttattaattccagggactaaagcctacagtgctccctctgtaaagcccaattttaacgcattgcatgttggatttcattttcgcagaatatattaataaatgtgtacactaagactacagccaaggagcaggtaatgctcaaagggtggcgtgtggccacgtctgtgtgctgggattgcagtcactgtgctttgctcatcggtgctgtttatgtttcctgcaatatctacacattgctttttgttttgttttgccttcttttgcatccagacgaataatattgcaagttatttttaaattattgtt

SEQ ID NO: 229419 - DNA, 982 bp, Homo sapiens
aaaattggaaattctcccccttctcccaaattatccagatttctatgatggatattttaacaaaactctcttaggttttgtgtgtgccctcataatgcccttgctttataattttgattcactttgtaaaccaagaaaaaagtatgtgtatcattatgtaatctacaaaattattaatggcttcatagaatgctgtcttaaggctatgattatttttatccaaccaatttcctatccatagcaattatttccatttaaaaaagaaagttgtgctttcctgctgtaatattggttacagctaaataccatatctgccattcattcatgtttatttacttagcataaattaatggaagaagaattattgaggaaaatagtatgctttatcttaaagtttggtatacatcaccaagttgtcctccaggaaggctgcatgtcttccattcctacttcttacatcttatttaccttttttaatttcataggagaaaacaatatttcgttttttttttttttggtatagtttcattgaaattgaagtttttatatttttcttttcttctttgtcctttttttggttttttttgagatggagtcttgctctgtcgcccaggctggcagtgcagtgggacaatctcggctcactgcaacctctgcctcctaggttcaagcaattcttctgcctcagcctcccgagtagtggggattacaggcacccgccaccatgcctggctaattttgtatttttagtagagatggggtttcaccatgttggccaggctggtcttgaactcctgatgtcatgatctccccacctcggcctcccaaagtgctaggattacaggtgtgagccaccacgtctggcctatatttttattttcatttatttgtgtagatattattttcttttgtgtactgcttttaaaaagtttagagtgatggcatgacatactttaccctgtgttttctgatgagtagaatc

SEQ ID NO: 229420 - DNA, 928 bp, Homo sapiens
aaaattggaaattctcccccttctcccaaattatccagatttctatgatggatattttaacaaaactctcttaggttttgtgtgtgccctcataatgcccttgctttataattttgattcactttgtaaaccaagaaaaaagtatgtgtatcattatgtaatctacaaaattattaatggcttcatagaatgctgtcttaaggctatgattatttttatccaaccaatttcctatccatagcaattatttccatttaaaaaagaaagttgtgctttcctgctgtaatattggttacagctaaataccatatctgccattcattcatgtttatttacttagcataaattaatggaagaagaattattgaggaaaatagtatgctttatcttaaagtttggtatacatcaccaagttgtcctccaggaaggctgcatgtcttccattcctacttcttacatcttatttaccttttttaatttcataggagtttatatttttcttttcttctttgtcctttttttggttttttttgagatggagtcttgctctgtcgcccaggctggcagtgcagtgggacaatctcggctcactgcaacctctgcctcctaggttcaagcaattcttctgcctcagcctcccgagtagtggggattacaggcacccgccaccatgcctggctaattttgtatttttagtagagatggggtttcaccatgttggccaggctggtcttgaactcctgatgtcatgatctccccacctcggcctcccaaagtgctaggattacaggtgtgagccaccacgtctggcctatatttttattttcatttatttgtgtagatattattttcttttgtgtactgcttttaaaaagtttagagtgatggcatgacatactttaccctgtgttttctgatgagtagaatc

SEQ ID NO: 229421 - DNA, 454 bp, Homo sapiens
tggcatcctgctgtttttgcagttagaccaatatatactagaaaatgctgaggaagataaatgtaaagaaaatcagcataattctggaaccctagacagcctgctgattaattaaaaggcttaacgtttctataatgttttagaatgtaaacggactttcatatattcaatctcatttaattcttataacaatcccagaaaatacataaaatagttactgttttactgatatagaaattttggaatcagaatggtatgaacagcaagtggccaggattaaattcacaggtctgcaaacctcatgctgtcttcactatactttacacatgaactgtacctcttcagctctttacccaaatgattctttccttctcaacaggtggttgtgaaaatcatgccctgaacacaatttatgggaaatgaaaattctctgaaggcattcccctgttaccag

SEQ ID NO: 229422 - DNA, 381 bp, Homo sapiens
tgatgagtgtgtctcactgtgcctatgcacagtgtattgtttgcataaaccatatggtttctgctgaacaccattttggagtctggaatttgggtacataccaggcagagaggatgcttatgtgagcaggcccccataaaaaccttgagccttgagtctctaaggagctactgtggttggcaatatttcacatgtgttgtcacaactccttgctggactaattaagcatttcctctgtgactccatgacttcactgggagaggacccttgaaagattgctcatggcttcctccagattcctaacatggacctttatccttgctaattttgctttctatacttttcctgtcataaatcatagctgtgagtataaatatatgc

SEQ ID NO: 229423 - DNA, 525 bp, Homo sapiens
ccaaatttagtaaaaaacaaaataaataaatgtaacctaaccgtgcatcaaattgttaaacggacctaacctacctataatggttaattgtatgtgtcaacttgaccaggctaagggatacccagagagttggtaaaacctcatggctgggtatgtcttcaaggatgtttctggaagaaattagcatttggatcagtggcccaagaagatccaccctcaccacagcgggcaggaatcatccaatcagttgagggcccaaatagaacaaaaaggtggaagaaggacacattctctcttcttgagctgggacgtccatcctcctgcccttggacattggagaagggcaacctgcttctcaggcttttggactccaggacttacaccagccgcccatcctacacttctggggcttcaggatgggagttacacctctcgctcccctggttctcagacctgcagacttggattgaattaaattatattgtaattatattataaaccaatgtattgagttatacactggtt

SEQ ID NO: 229424 - DNA, 438 bp, Homo sapiens
ctccattctgtcccattgttctaccatccaccatgtcaatgctaccctgtcacaatgactgagactttttccttactgtattctcacgtagagcccagtagaataattacagggcttggagtcccatttcttcagggaatataggtggttggaattctgacaccagataaatcaagtatgctggaaaaagaattcctattttaggcaaaagctttattggaagtttgcggcatcctttccgcattgttcattgctgttcagagtgttgctgctgtggtgctataaatgctcccagcagctctcaggttttctttccttccagctagcctccccctaacttcccactccagccaaaaaaagatgcactgtataagtctctgatgagggataaaaatcctttaaagtgtattattaatcttgagctttcagcaaaaaaaa

SEQ ID NO: 229425 - DNA, 430 bp, Homo sapiens
ttagagtaagatagcatagctgagagtctctacaaggcgtcatttttaatgttcagtatggaatgaaaatttaataacatacgaagaagcaggacaatatgatcatgatcaaggggaaaatgggctataaatgctgacccacagatgacccagatgttagaattagcagacacagactttaaaactgctattaaaaatatagtgaaggattgacttaccagaaaaggatggaatgggtgaatcgcagaatctcagcaaatagatggaaactataaagaaaaaccaaattaaaatcctagaactggaaaatatagtatctgcaatgaaaaggtcattgaatgagcttaacaacagaatggacagaacaggaaaaaaatcatttaattcgattgacaatgcactcaataaacttacctaaactgaaatatag

SEQ ID NO: 229426 - DNA, 414 bp, Homo sapiens
aaatgtatattacttaactctactcactgagaaagtcaagaaacaatgaccaaccaagtagctatgagcatttctaatgccccacaccaggactacttgaagaaatagctgtttcaaaagctgtggcaagaataaaagaatataaaaaagacttttaggttcatgtcaaaaggactcaggatccaaattgtagaggctttcactggtacaagatggtacattttacatcagtatggagaaaacctacaatggattgaaacacacaatgtatgttcaattcatattgagttcttaataacaataaaataatatcttgaccctattggcaaaggcgaaggagatgttataatttcaaagtcttgcaaaaaggcaaaaatttcaagcatatatcctgttgttctttttaaactgtgc

SEQ ID NO: 229427 - DNA, 418 bp, Homo sapiens
gcaccagacactcacaaaggtgactttgtgcccgtgaactcggctgcagcccacagtttgggcttgctgccgccggtgcagacaggaaatagctgctctgcggcagcccgaccccgtggccacagagcagcctctgttccttggtaatcgtcaacatctggcaggcacctccacgcccctccgccctcaccacacgctgctggctggaggctcccgtgcaatgccaggtgtgttgggagaggacaggctatacccacaagctgggctggaagtaaggaaatcgctttaaaagcaggaaaacaaattcgcttccccacgctttaaccactggtacctgtaagaggagccctcctgggtcctcccatcaccagagttcagagattctgggatgtgccacttcttcaggaaaaaaaaaaaa

SEQ ID NO: 229428 - DNA, 804 bp, Homo sapiens
caggaggcagctatccaaggtgggttggtagttttctatgtttgtggaggggaaactctcacttgcttcagcatggttcctttttctctggaactgttctgtcaagcctgccgtcctccagcgctaaggaggggctgagggaggaagcactgccttttgttcttttatctgacaggcacaaagcttgaaggctgactgcactggcagccccagattgtgttcccctaaaactgcagctgtcatctgaatttgggcaaagttgtagtttgctcctgagatagaatttccagaagggtgtgtgtgaaagagataattgtgggttgaaagtgtatatttaataagcaattaatctgtcagcttgtggaccaagaggagaaagccttcttctctgtggaatcagtgctttcatacatttcactattaaactgagaaaaactaccacaaaatagttcaatgagcaagactggcattaaaatgttaaaatgagtggttgtgttgagaaacttgaatacttaatgaagtatatgaaaagcagttacagagaggctcacaaagcagtttttacagagttctgatgaaaagcaggttccatgtgtgcagcttttggggaaaagtttttttaacctgagaaaatcatacttaaaatagtaaaaaggtgaagcacgcatttaagaggggatggtgatttatgaaatccactctgcctgtagccagccctccttgacccagtcatttagtgcagaaactaatatggaaagaggtgtggtaagagttgagctttatttcaaaacccattgtgttctt

SEQ ID NO: 229429 - DNA, 841 bp, Homo sapiens
gtggccctgtgagttttccccagcacgacgcttggcttgagttgactcatctccatgtttgtttgccagatgagcaggcagcaagataatgagttctggtgggattttataagaacaataaagaagaggggtctgtagtttttctgaaatagaacaagcttttggttcttgaacaagtatgtcccatggtagaattaatgagttgtatcattccggaaaagccttggctaatatgaaattttgaaagggacttgagatatgattattgcaggtccttctgctttaagaatccctgtgcaaatcaaaaactgataaataatacatctggattaagtggtattggaaagggttttttcgttttacgggaattcactgctgagttccttctctttgtgtgcaggaatatggattgacctgtcttttctttagttgtttaggtgaatggtttatgataattatctatctaagataattcacaaatggcagcaaatacctcatttaatagctgtctacctgtacatttatgggttggacatgtggatttttacaagcaaatagtgaagtagaggtgaggtggaagaagcatggactttggccccccagatttaggttgaagttgccatttcctcactgtgcgacctggaatagttatgtaacctcattagcctgtttccaagtctataaaatgggaatgatagctgggtgtggtggggggcacctgtaataccagctactcgggaggctgagggaggagaatcgcttgaacccaggaggtggaggttgcagtgcgccgagatggcgccactgcactccagcctgggtgacaagagcaaaactccat

SEQ ID NO: 229430 - DNA, 386 bp, Homo sapiens
atgattgggaatctggagttaagggaaaaaaagatgattaaaagtttaattgttcatctgaagagttgatttttttattcctgtaataaagggtacttttagcagtctctgctcatcttgcccatccggctctttttgtggttgtgtaaggttataacttctgtgtctcagtaaacttgtgcatgcccatttttttctctgttactaccttttctcttattttgttttattattttgatgtaaaattacctgttaattttatttgaaatgagaaattttaaggttcacattattcaaattctgtcagatccctacctctgtcatatggtttataatgtgctgggtattttcagacctgcttattaaaaagatgtaaaacaaaataa

SEQ ID NO: 229431 - DNA, 537 bp, Homo sapiens
tagcctcttgaaatagtatgttaggtaatggatttcgagcttttgttattttcctattcatttgaagcagtaaatttctctctcaacactggtttatcagcattccacaagtttattattatttagtgtaaaacatttcctcattttcactttgattgcttcttggaccggtgggttatttaaaagtgtaacattgaatttttatggagttctgatttgcttgttatctttttgatactgacttctagtacacttctgctgtgccaagacatactttgaatgattcaatcctttgcaatttgttgaagcttgctttacatcctacattataatcagttttggtaaaggttccatgtggacttgaaataatgttgtaaccacaattacttttgcaccaacctaataaatacttagttcaaccgtatgtcaattaggtcaggtttgttgactgatttctgtacatcttccctgttcttagtgtttggtcgttatttgtttgcttggttttggtctatttgtatgagaggggtgttaaag

SEQ ID NO: 229432 - DNA, 388 bp, Homo sapiens
ttgtgagtgagccatgtctgccttcagcaggtggcagttgttcagcctggggcttgcacatcagcattggctggagggcctgggagagagtggcagcgagttcccggttcagctcaggatacagggatgactaaggcacagacctgccctcagggagctctctgcttttctagaaaaggggaaacacaggagatgtgtggcaaacatcataaaaggaagaagtaccaggcacacaaggggtgaatgattaatcatttcggatggaggacaggcgcagtggctcacacctgtaatcccagcactttgggaggccaaggcaggaggatcgcttgagcccaggaaggagttcaagaccagcctgaacaacatggcaaaacctgtgtccaca

SEQ ID NO: 229433 - DNA, 604 bp, Homo sapiens
tcttcaccacaaagtatagttgtttgcagaagatcatgccttatttatcttcatatcccaagttttagcacgatgcctaaccttcaagaaacactcaagaattgagttaaatatttcttatgcttctcaagctcctattctaccaccttactacaggtgacatgggccccagtctcactccagaattaaagaatgttataaaatacgaattcctcagcttcccatccccacctggcctctaacctaatctggggactccaagaatgaaatgccttccccttctcctctcatccaaacctaatccctccgcctgtgctctggaccattcctcatacaactcccctgagtccttttagctgtccccttctctcttccagcttcaactttcccccttcagcattcaaaataaatcaagtcactcccatttttgagaacattttttcaatccacacatctcttcttctaggctttctagttccgttcataaggaaacattattggggtatttacgcttttttgtgttatgaaccactgtggtagcccagtgatgcctatagaccccttcacagagtgtttttaaatgcacagaaccacaaagaaataa

SEQ ID NO: 229434 - DNA, 549 bp, Homo sapiens
tactgtttttagcattctatcacatctgtgagtttcgagtgggaagggggaagctttccaactcacttcagtctgctgttgactggaagttcgctggacagttttgttggattaaattgtgtaggtgacatgtcatacctgttaagagatacctgaagcattgctgctttacattgcttccagacatatagtatagagtctaacgaagttttctgtatctcagcatagcaaaggcagggaagcaacacagaaagtcttgatcattcaaggtcgacacaagcaaaatagagagctacaatatttgaagaggtcctgaggaaggaatgaaaatggtgaattatgtagagcagtattactagaatcatgtggacctcctccaacaactctaaggtgctttgtaagcatctttgatcttagacacaccacggaaaatgcagcagatcctaaattgattccatttcagcacaacaatgggatgagaagacaaaatataaattatgagtattgctatagaaaataaaagctggatgttttatacacttgggtttg

SEQ ID NO: 229435 - DNA, 698 bp, Homo sapiens
cagcaagatggggctgattaagagtaagactgtctcctggagtagctgagcatcctgggactcatcagggcccagaaacactagccagccactctctggccagtccacccctgaagttcatttcttccttcccagctgatgtccatccctccatcattccatctgtccattcgtgcattcattcattcagcaagtatctttgaaaacctactaggcgcaagcacggacgatttttttaaaggaggccttaaaagggagtccccatgctgactcttggttgacttgcattttcccaaaatgaaattttcctgtgtcaaattttctttctgaatcaatgataggtttcctagtcccttaaaactggccgttggcaattggaagaagacttttttgaagatttgtgggggaaacattccctttacttttcaggtaacattacttggttaatattcagttactaaatctcttcaagaagtactggctacttccattactattcagagcacagctgatgtgacgcccaggggcttccgtggggcagggatcggggtaggagggatcctgcatgagaggctgtgggtcagacaccagtcagcagggggcgcggtggagcacccattgatttctaggccctcttgggctagcatcgtttcttcccgagtgggagctcaggcccagtgtggatttgaccagtcttc

SEQ ID NO: 229436 - DNA, 644 bp, Homo sapiens
cagcaagatggggctgattaagagtaagactgtctcctggagtagctgagcatcctgggactcatcagggcccagaaacactagccagccactctctggccagtccacccctgaagttcatttcttccttcccagctgatgtccatccctccatcattccatctgtccattcgtgcattcattcattcagcaagtatctttgaaaacctactaggcgcaagcacggacgatttttttaaaggaggccttaaaagggagtccccatgctgactcttggttgacttgcattttcccaaaatgaaattttcctgtgtcaaattttctttctgaatcaatgataggtttcctagtcccttaattccctttacttttcaggtaacattacttggttaatattcagttactaaatctcttcaagaagtactggctacttccattactattcagagcacagctgatgtgacgcccaggggcttccgtggggcagggatcggggtaggagggatcctgcatgagaggctgtgggtcagacaccagtcagcagggggcgcggtggagcacccattgatttctaggccctcttgggctagcatcgtttcttcccgagtgggagctcaggcccagtgtggatttgaccagtcttc

SEQ ID NO: 229437 - DNA, 524 bp, Homo sapiens
ggaagaaccatgggagatgagctgagtctgtcccatggaggctgacttcagactgcatgtcagattctggaagtagctgcagcacagtggagacccatggaaggctgtcttccttgaggtagacaggaggaagacagctctagctttaggtgagtgtgtactaccttgaggtgatatttcacatgcgctacatggaggagttttggagttcagaagattggcagctgaaactctctccatcaggttgtctcactttgtgtatttttaagatctcagtaacataagctaaataattatccctgtgcacaagaaaaacacagttaaagaaatatcctttttacttgctatattactaaatttgaaaattcaagtttttcattaaaaaaaggattcttaaagaaatccaagctttgttagatgtctttgaagcatatcatattgtaaatgtattatggaataaagactataactgaaggttgtattttattacacacacacacacacacctctaggatttaatctag

SEQ ID NO: 229438 - DNA, 387 bp, Homo sapiens
gcacacccattgcctctgctcacagctcactggccagagctcatcacctggcctgcttcaccacgaggggaccaggaagtgtctggaaggccaagagcctgaaatatgcagtgaacggccctaatgacagccacaccacttaccagctcagagaccgtgggcaagttaccttcctctgcctctgctcccttgtctagggcgtggagatgaggtgtccttcctattcacagggttgctgcgaggacagagtgagttggcacacacaagcacagagcgccctgcttggctccgctgaaagaaagttccttctggctgaggtgggcagatcacctgaggtcaggcattcaagaccagcctgaccaatgtggagaaaccccgtctctacta

SEQ ID NO: 229439 - DNA, 242 bp, Homo sapiens
agggtaggggacttattttctgagacagggtctcactctgtcacccaggccaagtgcagcggcactatcgtggctccctgcagcctcaccctcctgggctcaagcgattctcctgcctcagcctcctgagtagctggggttacaggcacaccagcccggcccaggccgcgcctcaccccctgcagccggctcccacgcagggacacccccgagatctacggaaacacagaggccctcaaacg

SEQ ID NO: 229440 - DNA, 396 bp, Homo sapiens
agcagcaactgtgattttttaaaattagctttttattggatccatgtttgttttacagttaggattctgctatggactaaattgtgcacccctggtccccacgctcaaattcatatattcaagccataactcccagtacctccaaatgtaaccataattgaagataaggtttcgaaagaggtgattacattaaaatgatgtcattagggtggggccctacttcaatatgtctggtgtcataagaaagacaacaggagcacaagtgcataaagggacgaccatctgcaagccaaggaggagaggcctcagaagaaccccagactgccagcacttcatctttgacctccagcctccagaactaggagaaaataaatttctattgtttaagccactcat

SEQ ID NO: 229441 - DNA, 401 bp, Homo sapiens
ggctattctgtgctccatgtgtgctccttggtgcagtggcctagagaagagaaggtatgaaaattgttgctttgcaatcagaatttgaactcactccactgtcttcttgacttcttctgccttccagatgcccttctgctttcacagtgagatgtgtcaagataatccaattcttcattcactaatgatggttatccaggagaataattttcaatcactttcgaattagaatgccctttctctttctgtcatacacacacacacacacacacaaattaaaagatttggagaggctgaggcaggaggatcacttggacctggagttcaaggctgcagtgagctattatcacatcactgcactccggtctggacaacagagcaagaccccatttctacaaaaa

SEQ ID NO: 229442 - DNA, 532 bp, Homo sapiens
agtttctttattcctaaatacctaacttggaatcttcatattttctgtcctcaatagtttaactttttaacacctaagtatatagataaatacaaaactttcaaaagattttatcaaaatgactttattttgttataatagttgttacatgaaactatccataatttttcaagataaaacagtgactttcctaaatatacatgtaaagtagtctttactctttcagaaatgaccccttttacaggaatttctccttgaaatgtatatagtaagtttagcaatgtctaaatacttttagtcccaaaacaagatatagccttacaaaatatcttatgatttttgttatgcataattttacaaatatatttaaaatgctctacaaagcagtgctctactatttatactataatcaataaatgctgtgtgaaacttttacaatctggttttcaaatcttttgtttttgcacaactaacaagcaaactgacattttgcaaggctttccaagctgcactggtgattactatatcactt

SEQ ID NO: 229443 - DNA, 275 bp, Homo sapiens
ggttgcagtgagcccagatcatgccacactccagcctgggtgacagagcaaggctttctcaaaaaaaaaaaaaaaaaaaagaacatccgtcgtggacaagactttgcactctttgcatgtattgtcacaactggttgctggaggtattaagcacatcctgtgtaactccattgggagaggactcttggaagctttcacctgattttgccccatgtgacttttcctttcttattttgctttgtatcctgctggaataaatcttagttgttaatatt

SEQ ID NO: 229444 - DNA, 1197 bp, Homo sapiens
gtgataattttcatagtacgtatgttatagttgaatattattaacctaatttaataataaggcaatttataaaatcagtaacaaaactattttctcaggtggttgtgagacaacttcagcaagaagcagctgacagcctaaaaaaattaactatgttagagtctccactggaagtatatcacattatcacattaatttggatgagacacaggtcccaaagaagaaattatttcaagtggaaagtcaagtatgtatggaacttagcatgtcaacggttattctgtagctagttgaattacataacatgttttaggatactaattatggcagaagcttgattttttattttcattacaatgatttatttccattttactatctctataatgtacttatttttttatatagtgactttcattctaccattttgaaaaaccattgcataccttttctcttacaatatgtacccttggaaaagttgagaattatacatcattcctcatagaaaactgacttttgtcctgttaaaacagtatttttaagtaatttttgtattgctctgatgaggcaggccagattaaatcagagaagaatgtttcatggaatgttccagaaaattgtcttatttcttcacttttgtgagtggacacagaatctgtgtctatttatttcacagattctaggttaacttgtacagaaaggccattatactattcttttaaaagtgcatgttttaggttaatttacaaactatttgaaaagttaggcattttctttatcttttatttaaaatatactataaaactgtggaaatatttaaatttgagataacatgtacatcaaaaattgagagttgagaaaattatcttgatcctgcctttggattttaaagacagtttcactgagatatcattcacatttgagagagttcaaccatttaaaatgtacaactgagtatctattagtatattcacagcattttcatcacctgaaaagcaaccccacatctcctaggcatgactgcagccttcctccatgtccctccacctacctctgttgtaggcaaccaccatctatctacttttgtctccatatgtttacctgttctgcttatttcatatacatagaattatacaatacgtagtcctttgtgactggctttttcacttagcataatgttttcagaattcacttagc

SEQ ID NO: 229445 - DNA, 1121 bp, Homo sapiens
gagagagaaagcagaaagagtagtggttgtgagacaacttcagcaagaagcagctgacagcctaaaaaaattaactatgttagagtctccactggaagtatatcacattatcacattaatttggatgagacacaggtcccaaagaagaaattatttcaagtggaaagtcaagtatgtatggaacttagcatgtcaacggttattctgtagctagttgaattacataacatgttttaggatactaattatggcagaagcttgattttttattttcattacaatgatttatttccattttactatctctataatgtacttatttttttatatagtgactttcattctaccattttgaaaaaccattgcataccttttctcttacaatatgtacccttggaaaagttgagaattatacatcattcctcatagaaaactgacttttgtcctgttaaaacagtatttttaagtaatttttgtattgctctgatgaggcaggccagattaaatcagagaagaatgtttcatggaatgttccagaaaattgtcttatttcttcacttttgtgagtggacacagaatctgtgtctatttatttcacagattctaggttaacttgtacagaaaggccattatactattcttttaaaagtgcatgttttaggttaatttacaaactatttgaaaagttaggcattttctttatcttttatttaaaatatactataaaactgtggaaatatttaaatttgagataacatgtacatcaaaaattgagagttgagaaaattatcttgatcctgcctttggattttaaagacagtttcactgagatatcattcacatttgagagagttcaaccatttaaaatgtacaactgagtatctattagtatattcacagcattttcatcacctgaaaagcaaccccacatctcctaggcatgactgcagccttcctccatgtccctccacctacctctgttgtaggcaaccaccatctatctacttttgtctccatatgtttacctgttctgcttatttcatatacatagaattatacaatacgtagtcctttgtgactggctttttcacttagcataatgttttcagaattcacttagc

SEQ ID NO: 229446 - DNA, 851 bp, Homo sapiens
gtagagccaaggactctctttttggccaggctggtctcgaagtcctggcctcaagtgatcctcctgtcttaacttccccagaagtgctgagattacaggtataagccaccatgcctggcctcagagtcaagacttctttcgactgttctttactgatgtggagtttcaacaccaagtaaccagttatggaattaatttgttatcaaattgatagtagagaaatttaatctggtggatttcacatttggtaatttcaggataagcattaccttagtgcacctttgttttccacctgttttgtgttgtgtagcatcagatgctataaatggcaaataaccactgaacaaatttgctttcatggtgctaaaaggaccaggatttaaataaaattgtcatcatctatttatttatttatttatttttggagacaaggtctcgctctgtcttccaggctggagtgataaagtggaacaatcagggctcactgcaacctcgacttgctgggctcaagccattgtcctgcctcagccccccaagtagctgggaccacaggtgtgtgccaccatgcctggctaattgttttgaattttattttattatcattattattatttttgagatggagtcttgctgtgttgcccaggctggagttcagtggcacgatcttggctcactgtaacctctgcctcctgggttcatgcgattctcccgcctcagctttccaagtagccgggattacaggagtacaccaccatacctggccacatggtgaaaccccgtctctactaaaaatacaaaaaaaatgagccggcatggtagcaggtgtctgtatccagtagaggtgagcgaat

SEQ ID NO: 229447 - DNA, 983 bp, Homo sapiens
  misc_feature (119)..(119): n is a, c, g, or t
  misc_feature (123)..(123): n is a, c, g, or t
acctgttattgtgtagtgtagcatcagatgatataaatggcaaataaccactgaacaaatttgcttcatggtgctaaaaggaccaggatttaaataaaattgtcatcatctatttattnattnatttatttttggagacaaggtctcgctctgtcttccaggctggtctcgaagtcctggcctcaagtgatcctcctgtcttaacttccccagaagtgctgagattacaggtataagccaccatgcctggcctcagagtcaagacttctttcgactgttctttactgatgtggagtttcaacaccaagtaaccagttatggaattaatttgttatcaaattgatagtagagaaatttaatctggtggatttcacatttggtaatttcaggataagcattaccttagtgcacctttgttttccacctgttttgtgttgtgtagcatcagatgctataaatggcaaataaccactgaacaaatttgctttcatggtgctaaaaggaccaggatttaaataaaattgtcatcatctatttatttatttatttatttttggagacaaggtctcgctctgtcttccaggctggagtgataaagtggaacaatcagggctcactgcaacctcgacttgctgggctcaagccattgtcctgcctcagccccccaagtagctgggaccacaggtgtgtgccaccatgcctggctaattgttttgaattttattttattatcattattattatttttgagatggagtcttgctgtgttgcccaggctggagttcagtggcacgatcttggctcactgtaacctctgcctcctgggttcatgcgattctcccgcctcagctttccaagtagccgggattacaggagtacaccaccatacctggccacatggtgaaaccccgtctctactaaaaatacaaaaaaaatgagccggcatggtagcaggtgtctgtatccagtagaggtgagcgaat

SEQ ID NO: 229448 - DNA, 868 bp, Homo sapiens
tctctccctctgcttccctcagtgcctcttccatctgtgttttcttcttctcacctttcagagaaaacaaactattatagaaagaggctttgattcaaccacaggttcaagtctcagcttgctgtttattgagtgtgtgaccttcagcagagcatttcgcttcactgggcctttatttcctcatctggtaaacaacgaaaatagctcctccctcctgggttgttgtcaagacacttgagagagtgtacataaagcccctgacacacagtaggccctcagcatacattagtcactcttatccttaaataccctggcagcttgtcagcaactacctctccttttaatggcacttatctttactgatcatctgctagtaatctgcaagtcccttgctctgcctctcttgctggcccccagcacaatatctaagagacagtaagaatggccaaatgattagcctggcatggtagtgcatgcctgtaatcccaactactcaggaggctgaggcaggagaactgcctgaacccgggaggcggaggttgcagtgagccgagatcatggcactgcactccagcctgggcaacagagtgagacaccgtctcaaaaaaaaaaaaaaaaggccaaatgaatgaatgtgccctgtcctgtcagggctctatgaagttaagacacagcacttgtctgtgagaagcaaagagacttgttcgggttgcttccctatctctttacctaaagggtagctattccacagtcttcctcaagatgtcacctataccctcgtgatcaatgcagaacaagatggatgggagttgacatcaaatgaatggcaggcactgtgatggattcccaaaagaacatgtcctaaaac

SEQ ID NO: 229449 - DNA, 2079 bp, Homo sapiens
  misc_feature (580)..(580): n is a, c, g, or t
gagatgggagtctcgctatgttgcccatgctggagtgcagtggcgtgatctcagctcactgcaacctctgcctcccaggttaaagcgattctcctgcctgagccccccagcctcctgagtagctgggattacaggcgcctgccaccacgtctggctaatttttgtattttttagtagagacggggttttaccgtgttgtcaaggctggtctcaaattcctgacctcaggtgatctatctgcttcgcccccccaaagtgctgggattacaggtgtgagccaccgcatccagccaagaatggcctctttaatgtctgtgagctccccaagggcagagacaccctctagtgcctggcaccgcctccagggctgaggaggtgctcaccaagtctgtgatgcaggaatgaagccgtatcccaagtagggggctgcgtctgcccagtttaccagtgcgttcttgtcacccagcacgggctggccagcgagtatcgacacagggtttgctgagcggaggaatgagccctgctttgtggtggaggggagcaggtggcaggaaagccggaccccactgcccctccctgnccctctctgctcttttattgcaggcagagtgtctctggcacagtttgccttggccttcgtgacggacacgtgcgtggcgggtgcgctgctgtgcggggctgggctgctcttccatgggatgctgctgctgcggggccagaccacatgggagtgggctcggggccagcactcctatgacctgggtccctgccacaacctgcaggcagccctggggccccgctgggccctcgtctggctctggcccttcctggcctccccattgcctggggatgggatcaccttccagaccacagcagatgtgggacacacagcctcctgactccaggaagagccagagctgtgcagggaggaaggggtgagaggggggcccccacacctagactcagtaaggaagtcgggttggaccttaacatctgcattggacaactccaccccttccttggccttgcccctgcccgcctacactcctacgtgtccagggcttgggccgtgacttaggcagaggagtgcagaggagggtctggcaggggctgctcaggccgcctagctgcccctttgccaggttaataaagcactgacttgtttctcagcctccctccatctttgcatagtttctggcccctcactttgttgctggggctgtttctgggaccctctgtagggcctggaaactgcaggatgcctgagggtctcaggggctggggctctacctcccctggcctgggtgagttgggggtggggcaccagcacgccaaggcagtgtcctactgatccaggctatgagaatccaaacattctttcccaggtttggcattttatagttagaagcatttctgcaacagcagtttcatggaacctctcttagctaacctggtccatggggcagcagttacgctctaagaatccatgtggtaagatcatggtgcggcaaatggaggcagggtccaacccaggtctttgtgcttttgcctttacccttgcacagctggaggaaatgagtaggaaagaaatcaaggtaaagaaatgcgctggggctgtttgggcatctgtggagggtggtgctgacagggctaggcctgcacctctctggcctcctcaagagctgcttgttaaatgtttccgtgtaaatagaatgaatagagaccgccatttccacatggcaggcctaaacacatgtgttcgtctcagttttctcttaggatctctctaagatgatagtaaagaaaatcaaaaataatacaaagggaaagaaaacaggagggaagacagtagaacacagagcctgaccacattttcttttttctctctgttgccggggctggagtgcagtggcacgatctcggttcactgtaacctccacctcccgggttcaagtgattcggcctcccgagttgctgggattacagacacccgccactatgcccggctgattttttttttttcttttttgagacggagttttgctcttgttgctcaggcaggagtgcaatggcgtgatc

SEQ ID NO: 229450 - DNA, 738 bp, Homo sapiens
ggcagtaataccggcccttcctgtgcctgctgcttcatgccgccggcgtcctgctccacgtctctgtgctgctgggccctgcactgtcggcctgctgcgagcccacacgcccctccacatggctgccctcctcctgcttccctggctcatgttgctcacaggcagagtgtctctggcacagtttgccttggccttcgtgacggacacgtgcgtggcgggtgcgctgctgtgcggggctgggctgctcttccatgggatgctgctgctgcggggccagaccacatgggagtgggctcggggccagcactcctatgacctgggtccctgccacaacctgcaggcagccctggggccccgctgggccctcgtctggctctggcccttcctggcctccccattgcctggggatgggatcaccttccagaccacagcagatgtgggacacacagcctcctgactccaggaagagccagagctgtgcagggaggaaggggtgagaggggggcccccacacctagactcagtaaggaagtcgggttggaccttaacatctgcattggacaactccaccccttccttggccttgcccctgcccgcctacactcctacgtgtccagggcttgggccgtgacttaggcagaggagtgcagaggagggtctggcaggggctgctcaggccgcctagctgcccctttgccaggttaataaagcactgacttgtttctcagcctccctcca

SEQ ID NO: 229451 - DNA, 1333 bp, Homo sapiens
ggcagtaataccggcccttcctgtgcctgctgcttcatgccgccggcgtcctgctccacgtctctgtgctgctgggccctgcactgtcggcctgctgcgagcccacacgcccctccacatggctgccctcctcctgcttccctggctcatgttgctcacaggcagagtgtctctggcacagtttgccttggccttcgtgacggacacgtgcgtggcgggtgcgctgctgtgcggggctgggctgctcttccatgggatgctgctgctgcggggccagaccacatgggagtgggctcggggccagcactcctatgacctgggtccctgccacaacctgcaggcagccctggggccccgctgggccctcgtctggctctggcccttcctggcctccccattgcctggggatgggatcaccttccagaccacagcagatgtgggacacacagcctcctgactccaggaagagccagagctgtgcagggaggaaggggtgagaggggggcccccacacctagactcagtaaggaagtcgggttggaccttaacatctgcattggacaactccaccccttccttggccttgcccctgcccgcctacactcctacgtgtccagggcttgggccgtgacttaggcagaggagtgcagaggagggtctggcaggggctgctcaggccgcctagctgcccctttgccaggttaataaagcactgacttgtttctcagcctccctccaaaaaaaaaaaaaaaaaaaaaaaaaaaacgcgtttttttttatttttgttctgtttttctaaaaaccgaggagggcggcgctttttattgtgtgtgcccccccccagaagagagcgcgcccccccccaacatgttgtgggggaggcgcgtgtgagaatagtctgccacaaacgagagtgaatcgacctccccaaggagggactattaaaagacacgactgttcttgtctgcgacaagagcggctgtgcgagagaaccaaatgaagcccgcctataaaaagcatgaagggagaaagggtggggccccccgcaaaaaagagggggcacatccatgcgaggggctctccaagaaagaattgttcgcgcccttttgtgggggggggggaggcacacaaacgcccggggaggaggaggcctacccagcgaaataatttttttctctccaagaaagagaggaaagtttcgggcatgcgacccgaggtctctctacgaagcaccttttttccacacaaacggggggtggtggtgcacaacagaagggaatcataaacggatgctcgtggggaagtagagggagagaaagtttcgagaagcgcg

SEQ ID NO: 229452 - DNA, 418 bp, Homo sapiens
aatgactcaaggagagatctgctgctgtgtaacaagtcatcccaaaacttagtgacttaaaacaacagtttattatttcttaagaatttgtgagtttgttacataagccccaggcttatccaggactggaacgtacaagatggtcttatttatatgtctggggctttggtgctgccagttttctgggggaccttgcttctcatctctgtggcttctgtctccatcatttagtagcataattcaagcttttttacatggtagccagcttccatggaagtggaaataaggctgctaggcctagtaagacttagactctgaatacctttgagtgcttcggagtactgtgccatctaccagagtaaccaagccaaaacaaaacaaaaacccattgatgacttagtgtaagagttgtttatga

SEQ ID NO: 229453 - DNA, 645 bp, Homo sapiens
tcgtgtgaccacagctgtgactcagggaaactgcggggtagcattttggggttcaagagagcttctgactcaggccgaggggtcagggaagcttcctggaccagctgccttttgagcgagggctttgaggagacgttccagtggagaaggcaggggcagagtttcaggcagaggggactatgggaggaaaggctcgagggccagagatagcaggaggtgctggggagtgaggttctgggcatcccaggcagaagccacagtgtgggcacaggcccgaccccagtgaaagcgtgagaagcagctctagccgctgcagccctgggtccccattatggctctaagcacactggaaggagtgcattttctatgtgacaacgtcctttttcgtctcttccacttacagggcctgggtccgtgttattgtctcctaggtcccaggcctctgtcacaggctctggctcagcatagatgttcagtacctacctgcggctcaattaactggggccagttttcagttgataattattgagcacttctctgccattcagtgggtcaggggctggggaaatgtcagtgacctaaaaacacccctgccctcatgggctgacatgctacagtggagggagagacaactaaaacataaag

SEQ ID NO: 229454 - DNA, 215 bp, Homo sapiens
acctcctgctttctttgccaccagatgttccagtgcacaaaaataactaaaacccaattttaatcttgtgttggaaattaaaagaccaggaaaaaaaaaagatggtatgtacagtcatgtgggtgaagtttagacaagtaaatggctataacgatttgattagcaatttttttttgagtcagaatcttgctgtgttgcccaggctggagtgcagt

SEQ ID NO: 229455 - DNA, 507 bp, Homo sapiens
tctctgaccagctgccttttccacttccttgcagctggcaggaggtgcctccttctttgtccagaaagaagaaagagtggctgcttggcccgggggctgtcaaagggcaaaccaggtcaatggtcccacccggcccacagcgtcagaggtcccccacgaacgacttggctgaggcatccctccaggggtggggattggcccctccatcctcatggcaagcatgctaataggcctcctcctatcactgcctcctgtttcttggatgggataaactgtttggcctttggacaagattacttttgcaccaaacaggattgttatcacttaattgaaaataattatccaatgcaaattgagttcaacttatctagctggaaataaagaagtgagtattttgggtggtttcactgctgcaaaggcaggtattttaagcaaatgaaagtaacgagatgcaggctgtgttttctgcaggaggccctgggaaatctgggggcctttcttgagttg

SEQ ID NO: 229456 - DNA, 827 bp, Homo sapiens
catgcctttgttgcctcatctgttgttatgaaggttatggcaaggattggatgaaataatagacataaatggcttaatacaatgtcaagcatatactgagtgctcaataagtggtagctagtgctatcattatgttatgctttctggattttgtattttaagctccaggtccagagacatagatctagtaaggggaggatagacagttcaggtattaaactgcttgactcaagcatgtgcttactggcaaccatgttactaccctatgcattacacaagacaatctcagatctactccatctatcccaggtgatggtcttttccaaatagaggaagacttcctctatcagtaatgtaaagtactacacccctccctaacttgtatttccaaataagttattgtgtttttattgtagaatttaacatttagattaaaaatacttagtgcgatctcagcaaactaccatggaaaggtaaccacttgaatctgacaaagggtatgtgcaagccatgttgaatggtgaaatacttaatgctttcactctgatgtatggaataacacaagcgtgccctatcactcttattcactgtcaccttatagcatctatcactctgtcatctgtattcaacaatatactggtagtcttaccaggacactaaggcaagaaaaagaaagaaatgttattaaaattagaaaataagaattggccaggtgcattgcctcatgcctgtaatcccagcactttggggggctgaggcaggcagatcacttaaagtcaggagttcaagactagcctggccaacatggcgaaatcctgtctctgcca

SEQ ID NO: 229457 - DNA, 696 bp, Homo sapiens
cttggacccgtcatcttggctaatttcctagattagacgttggtagggaggccgataagtcaaagtggcaagtgtcagtgtcacaccaaagggagcgaccagaacagagtaaagcccataaaccgagtaaaaacaaacaacaccacagtccctcaaagctgtaggccacgtagtatgagggaaacagcaccaccgctggggcagtgtgtcatcagaagagcattaggaagaggtccgtatcttgcagtttatgttgaagtttctggtaaagatggtcagaagcgggaacctgacacttcaaagtggaagcttcagttacctgggcgcccaaggggaggtgttctccccagtgatgccgggcaaatgaaccaacagctggatcatacttctcatttgacatgctttttgggggacctacgtggggttcagcactgcgccgggccacagatttgcagggccaatgaggatgtggtccctgccccggagcctgatgctctaagtgctgagggtggagggcttcccggaggaggtgttctctgaggagagtgaagtacccggcagagtggtgctgaagagcctctgagcagagagactggggtgacatgtggcttggtgtgagctctgagcacagaagtcacttggggatcatagcagttttgtttgtgagggacagtgtgggggagagccccccctacg

SEQ ID NO: 229458 - DNA, 643 bp, Homo sapiens
cttggacccgtcatcttggctaatttcctagattagacgttggtagggaggccgataagtcaaagtggcaagtgtcagtgtcacaccaaagggagcgaccagaacagagtaaagcccataaaccgagtaaaaacaaacaacaccacagtccctcaaagctgtaggccacgtagtatgagggaaacagcaccaccgctggggcagtgtgtcatcagaagagcattaggaagaggtccgtatcttgcagtttatgttgaagtttctggtaaagatggtcagaagcgggaacctgacacttcaaagtggaagcttcagttacctgggcgcccaaggggaggtgttctccccagtgatgccgggcaaatgaaccaacagctggatcatacttctcatttgacatgctttttgggggacctacgtggggttcagcactgcgccgggccacagatttgcagggccaatgaggatgtggtccctgccccggagcctgatgctctaagtgctgagggtggagggcttcccggaggaggtgttctctgaggagagtgaatgtggcttggtgtgagctctgagcacagaagtcacttggggatcatagcagttttgtttgtgagggacagtgtgggggagagccccccctacg

SEQ ID NO: 229459 - DNA, 643 bp, Homo sapiens
cttggacccgtcatcttggctaatttcctagattagacgttggtagggaggccgataagtcaaagtggcaagtgtcagtgtcacaccaaagggagcgaccagaacagagtaaagcccataaaccgaggaaacagcaccaccgctggggcagtgtgtcatcagaagagcattaggaagaggtccgtatcttgcagtttatgttgaagtttctggtaaagatggtcagaagcgggaacctgacacttcaaagtggaagcttcagttacctgggcgcccaaggggaggtgttctccccagtgatgccgggcaaatgaaccaacagctggatcatacttctcatttgacatgctttttgggggacctacgtggggttcagcactgcgccgggccacagatttgcagggccaatgaggatgtggtccctgccccggagcctgatgctctaagtgctgagggtggagggcttcccggaggaggtgttctctgaggagagtgaagtacccggcagagtggtgctgaagagcctctgagcagagagactggggtgacatgtggcttggtgtgagctctgagcacagaagtcacttggggatcatagcagttttgtttgtgagggacagtgtgggggagagccccccctacg

SEQ ID NO: 229460 - DNA, 525 bp, Homo sapiens
aaagagccattaaccaaggggtggggggtgtgaatttctaggaaaaaaaaaagaacaacagaactaaaatctcagtgtcagccctgccttacctcacagggacaagtcaggggaaaggtgccaactgagaactctcagaagacctccaggctggacaagggattcaggatgagggcctggccagtggggaagagttccgttctactggagtttaaaaaaaggtcggggggaagaaaagcacaagtgctattaacttttaacctagtcttctcccaggtggacattcaagcatgtcaccaaatcgccagacaatttgatttctctaacgtcaaaaagcagaacccaattggatcagcatggtgatcccgatgcggagttttctttgtgtggtatggtaatttttcaattaggttggagacagattaaaagcaaaatttggagctcagaattcatgctcatctttcagaaagagacaagaatctttgcccagggagtctgaaagttactttagaagcaggtgggttg

SEQ ID NO: 229461 - DNA, 338 bp, Homo sapiens
ctggcttcttggtagttgtggaaaatagatatagagattgctttatatttagctggatgtgatgactcacacctgtaatcccagcactccgtaaaaccgaggcagctggatcacttgagcccaggagctcaagaccagactgggcaacacggcagaaccctgtctctacaaaaaatagaaaaatcagctgggcattggaagcacacaccagtagtcccagctactcgagaggctgaggtgggagaatcatctgagcctgggaaagtcgaggctgcagtgagccaagacgatgccactgcaacatgctttgggcaacagagtgagactgtctagaaagg

SEQ ID NO: 229462 - DNA, 606 bp, Homo sapiens
atttaataaatcctttattgttgaacatttagatttttcccagtttcttctatttcagtgacataatatatatcctgacacataataagcacttctaccaggaaatagaatcagtaggaatatatatttaataaaagccttattacagggacttggtcttatgcaattatgggaactggttatgcagtctgtatggcgtcatctttgcatcttatgctagagcttgaagtctgcagggcaaacaatcatgaaatgaagttgaatgtaaagtggaagagcaacaaggtgaaaaccatgaagatggactggaagccatgtcagttcttgctgcctctaaccttgataaagtgtaggtatcctacaggaaaaactggcacccttcatcaaggagctaaatagacatctggcccaggagatggaaaaggtgaaggaggattcaagggaaggtggagcagttgtaggcctggctgttgcgtcatgccaaggtgagcagcagatatctagcagtgtttataaactataaaaatgcctgctccaaccttccacctggaaaaaacaaaatgtttcaattctgttctctaaatcttacacaaatattatctcctg

SEQ ID NO: 229463 - DNA, 427 bp, Homo sapiens
atcgattcgtaaagcagggtttaatccataattattcaactgaagggacatttgggaatcatggatggggaaacagctcacgcaatcaaccctggagggtgatggtaaatactgtgtgttctaatatcagctcagttatgcgtgtcttctgtgcataaaatgttttttcacttgtatctgagatttcctgccccccaaatgggagtaaatctgttgactcatttatcaggagtcctgtgaagtgcagcattgtttgtaaagcgtctctttcctctgataaacagcaacatgaagagaccagtgtaactttcctcatgaagtatgtttaagtcacggatctaaaatttgagagaagcaaaagaaatccgataaattttgaacttgacaaaggtgaccttttgtccttgaaccaagtggtactaattta

SEQ ID NO: 229464 - DNA, 438 bp, Homo sapiens
ccagaaaaataaatcatttaaaaatcatgatttgcttctgaattgaatattgttttaagaactttttgatgattccagttgctactgctggtctccagcagtttcttagaatagtcaatggacacaagttatgttaaaatctctattaggccaggtgcagtggcacactcctgtaatcccagcactctggggcaccgaggtgggtggatcacttgagctcaggagtgttctagacaagcctgggcagaatggtgaaaccaccatctctacaaaaaaaaaaaaagaaaaaaaattatccaggcatggtagcgtgcacctgtcatcccagctacttgggaggcttaggtgggaggatcgcttgaacccaggaggttgaggctgcagtgatcttagatcgcaccactgcactacagcctgggtgacagaatgataacctat

SEQ ID NO: 229465 - DNA, 477 bp, Homo sapiens
ttaattgactttacttagagtctgctgatttaaattttaatctcatccaaaaaaaaagcaaaaaacaaaaaaccttcatgaaaacgtttagaacaatgtttgagaaaatagctgggcaccacagcccagccaaattgacacataaaactaaccatcacgctactgttacaggtgggaatgtcatgtccctcaggtgtttggggccagaaaaagagttcaaaaccaatgcagagttttgaagtgtggagaatcataaagacaggcagaggcatctcttcctttttatttgtcaaagaaaactactggttatattttctctgtgcagccatacgtatgtcagtgtttatggctttaatcctgcttaaatagaagaacataattttatgagaaaaaatactggttgatcaccttctgttattctgcgtgtttcaggtggaccctgggggtataatttggaaaggaatggaggtagaaaca

SEQ ID NO: 229466 - DNA, 450 bp, Homo sapiens
tgctgagttgagcagagtgacagactccacactggagccagccccgcagctggccataaggaggagccacgagcaggtgctgggaagacaggctcttgaacgcacactatgctgatgtctctttctgtgaagttttctacatgagtgacgttctcaaagtctgcaacacagtctgccatgagatgccttttttcctctgggaacacaatgctactttcgtgattggctgagtaatggcccccaaagatgtactcttcatcctaatccctggaacctgtaaacatgttaccttatatggcaaaagagacttcgggcaggcacctgtcatcccagatactcaggaggctgaggcaaaagaatcgctcaaacctgggaggcggaggttgcagggagccaagattgtgccaatgcactccagcctgagcaacaaagtgagactctgtctctaaa

SEQ ID NO: 229467 - DNA, 496 bp, Homo sapiens
aatagaggagaacttaaaaaatgctgaaggttaaagaggacaaggggttatttgagaagtattttctattttacagacaaaggaaaggagtgggaaaaatgcttgtctttagaataaactatgttcctaggttacatgtgagacgtgtctgggataatgaacaaaatcagagccagtaagtgtaattgggaaagtaagctattttagaagttattaccaagtctacacaacaaggagaaaagagcttaagtgtttgacattctttccaaggtatgaggaagaattccaagggacagaattaatatttccctctattgacatcctgaacagtgaacagtgatctatttatataatgaatgttaagttctagaatccctaactgtaatagtcacatacttatctgattttctttaatttgggaataagtctgctacatttaagaagacagaaaccaaaggacatttcaacataaagctcggtataagctaagaattta

SEQ ID NO: 229468 - DNA, 1052 bp, Homo sapiens
taaaattgccacccgaaatgtagaggaagaataagaggccaggattataggcctcatcttagagagtcctccccttgggtttacttgggtgatggtagccacagcagatcctagggcagccctgattttgccttggaagtccattaatggactttccaacacacaggtttggatgaagtcttcaagatgctctggaggcagcaggcatcaagtcacggatggacagctggaagggacctttgagatactcctatcctgagcctagaggaagtcaggaccccagacgaaaggcacttttcccagggccctagagttggtggtgaccctgagaccagaacccaggtctctcagctcccagtgagacatcagtgaatatcacgtcacgttctatgagagtccagatctctgccattcattagttatatggcacagggtacatttcttcatttgttaaactgtactgttagtctgagccacacacatgcattgaagtccaggcatctgaggttctcttcttattaaatagtttcctatataacacgttcctatattaacattccaattatatgcccgtaattttccacttcccttccaacatgttttccctctaagacgtttttaatagtttcctttagcaaaaaaaacgaggagcatttttatgggactatgtatgagtaattacaacattctctgagattcccaggtggaaatgataatgcatgtggaaagtagcattatgggctaatgtatattagaatttcatgtttaatatacatcaattatattaaacgtaggaatatcagcctaacttcagtgtttgtatcttcattgttcaaactcgtggtatattactttaatacctattgaagctgatttcagtgtaaaccataacaggaagtaagcaatttccttttattcactaaaaaataaaagggtgtattagtgtgctcatatacatgaaagagcattgtatcttgtagtagccctgaatcgacgtcagcttcctaaatttaaaatgctgactgaacctgtgtgaggtggtggaaagcaaa

SEQ ID NO: 229469 - DNA, 1136 bp, Homo sapiens
cccttatatattatgaagatacattttttgtgactatcctctttatatgtattgtgaagataaggttttttatagtgaatatcctcctaatgctactagtattgtttgcaatctgtcattattcttagtgtaaaattaaacttcaacagagtacctgtgtgaactcttaacaatttttgaattagtgaagccccaaattaatgatgctttactagatataagggaactggaaaggctgaaatctcaaggtagagtcaaggcagtaattcctagcagcctgtgtttctcggtgttcttcatgcttcacagaggttggaattcagcttctggtttaagttgtcttaatcttgaccacagtggtaattttactttcccactcttttttcctcaactagaatgactcggagagttgagctaacagaggtagaatattgattcgtgagataggttcttagagatataagtgtgcgcatggaagaaggaggaatggcgtggaagagcaggtggagacggccacagcagggcttagaaattccctctatccaaagcctggttgtgaggaatttgatagaaaggattgtgtgggctaagacatcagtttttatggtaatatttgagggagaaaattgagatcttggaatgcatttgaaaaaaagattagttttaatacaattatcactttacctgagaccacatctcaaaatcaaaatcagtgataatgtctttgcattaatgttggaaagacttatgctacttctgcataattttctggtaaattatgtaatgagtggtcagtataatagcatggttattgtgaagggtaagatagtatgtcatttttttccctcttaacatgtaaaggctattttccatattatacatacattaatatttatatgtgaatgaacaaatagaaatatcatcaagtaaaactgaaggagttgatttgggttatttcttgtgtgaaacggatgaaaagaaaaatattagaaaatttgattacgttatgaagtaaacaaaatacagcttaatgaatgtgaaaagataaactagaaatagacatttgtaatgcatataactgacaatggattactatctagaatagaaagaattctcacaaatacatgtaacccagt

SEQ ID NO: 229470 - DNA, 436 bp, Homo sapiens
ctttcaagaagctgcccccaagtacttagcagtatgggagataagtcacctgcactaagaccaccctcatgatttgggtgctgacagatgcatcaagtctcaaggcatctcagttttattatcagtttttgtttttttaaaagaattgggctgggcgcggtggttcacacctataatctcagcactttgggaggacgaggcgggcggatcacctgaggtcaggagttccagaccatcctggccaacatggtgaaatcccatctctactaaaattacaaaaattagctgggcgtgggggcacacgcctgtagtcctagctactcaggaggctgaggcaggagaattcttgaacccaggaggcggagggtgcagtgagccgagatcatgccactgcactccagcctggtgacagagcgagactccgtctctaaaaaaa

SEQ ID NO: 229471 - DNA, 509 bp, Homo sapiens
gtaatttggaccactgtgtggcattccttggcatggttttagcacgctcattttgacccagtcctctgcttgtgggcattacagttttcagcgttcagctcttctaaacagcacacctacaggaaagtccttccttagaatctgaaatgtttcctcaggatactttcctagaaatggccttgctaatgtaaaagtgtgcagatttttttttttaaataggatttcactctagtgcctagactggagtgcaatggcctagtcaaggctcactgcagcctcaacctcccgtgctcaagcagtccttctgcagtctcctgagtaggtgggactaaggtcatgagccaccactcctggctaatttttaaattctttgtcaaggcagcgtctcactatgttgcccaggctgagatgggaggatcacctgagcccagagggttacggcttcagtgagttaggatcacaacactgcagtccagcctgggtgacagagtgagaccctgtcgcaaaaa

SEQ ID NO: 229472 - DNA, 593 bp, Homo sapiens
aggggaaatgggctggtctattactgtgacattgggaagggaggggctaggttttttagaatatttgaaaatagaattgatagggtatgtttatagatgggtagaaggaggaacttggagacaaaaatgattttgagatttccagattgagagaaaggtaatgctgcttatccacgacagaagacttaggaaagaggaagaaagtttgaattgtttaaggactgggggaagatggagatttataaataattaataatatagagcttgagttgtctgctttatattgccctaaatattatcttatttataaataaaatcttgcttagtatcctgtaagtattagtaatggatgtttgcatttttctattagattcagaggcctcagtctggaaaaagtactgagatggattagtgatgtctgctatgatcagaggagtgtgagttggtagaatttaacttaacacttactgagtacttaatgaatgccaagtactgttctaggtgctgggatacaacagagaataaaacaattttaaaaaattccctgccttcatgaaactaatgtcctagtgtttgtttggagaccataaaca

SEQ ID NO: 229473 - DNA, 223 bp, Homo sapiens
taacctggaacagaattacactgccatatatctgtatgatgggctcctttaaataccttagggcattaagaattgcttgtgtttgcagaagaaaacaaggaataatctccctctaatggggagtgagggtcactgagggtggaggactccaccttaggacacggtcagtgttgccaagaggaaggggtacaagccagttacttctacattctccagggttctg

SEQ ID NO: 229474 - DNA, 588 bp, Homo sapiens
tacccaagtagagtggattcataagaaaattctaaattatagcatatgttgaactctgagaagcctctggaatgaagtcatttttccctaacccctgtttcctctttatattggcagtggataaatggaaagtaagttaactctactgtaccaaagctagttcaatatagaaaacaggttctacaaggattaaggaacatctcttggcccacagaagattcatgtggatcctgtgttaaacccgtttcatccatgtatgaaagtgattcaaccgttaagttagccatttattatataaattgaatacttcttccatattgtggcttttagatagattggcagacctgtccccaaccccttccctgttgaccatggacaatggagggtttgctgtataaacttgattgaagggtttgcctttagctggggtggattactcagggacctcaaaggtattggtgatgatttatttcttgagcttggtggtgagtatgcaggactgtgttttgttttgttttgttttttagcaagccttacacattttcttttgtatgcaatatttaataaaataattttggataatttggt

SEQ ID NO: 229475 - DNA, 457 bp, Homo sapiens
agaggcagagaatgggtttatgctgccgcaagccaaggttggagctgccggcagccggaaaaggcaggaaagaattcttcccaagagccttctgaggaagcacggccctgccaacaccttgatttcagacttctaacctccagaactgtaagaaaaagaaattctgtgttctaagccacccaggtttgtggtagtttgactctcttcactccaccctgtgaggggcatgatgacccctattttatggataaggaaattgaggggcaccagtatttttctgcttcactcctgtgggttatctcactacctttctgtggagaccactgttctagatgatgaattcctggaaagtaagacctcagcctttccatctttgctgtcgcccagccccagcacagtgtcccaacagtgcttgtggaataaaaattatgattgtataaattgaattcatgattcc

SEQ ID NO: 229476 - DNA, 414 bp, Homo sapiens
tttagtatagacagggtttcatcatgttggtcaggctggtctcaaactcctgacctcaagtgatccacctgcctcggcctcccaaagtgttgggattacaggcactagccaccatgcccagtctatcacacacattttaaagcctgcacaaaatgttgaagttttaaaaggaaattattaaatattaaattattaatctgatttaaattattccacaggggcaccagtatttttctgcttcactcctgtgggttatctcactacctttctgtggagaccactgttctagatgatgaattcctggaaagtaagacctcagcctttccatctttgctgtcgcccagccccagcacagtgtcccaacagtgcttgtggaataaaaattatgattgtataaattgaattcatgattcc

SEQ ID NO: 229477 - DNA, 401 bp, Homo sapiens
agtattacctccagttcactatttccaaaactgcttcatatcagctcctcgtgttctccctgccattcccaacctgaaactcagtgaatggtgccatggtttattcagttcacaagttaaggcctggtgcggtggctcacacctgtaatcccagcactttcggagccgagatgggtggatcacctgaggtcagaagtttgagaccaacctggccaacatggtgaaaccccatctctactaaaaatacaaaaattagctgggcgtggtggtgtgcgcctgtaatctcagctattgggaggctgagatgggagaatcgcttgaactggggaagtagaggttgcagagtactgggatcgtgctactgcattccagcctgggcgacagagagagactccgtctca

SEQ ID NO: 229478 - DNA, 477 bp, Homo sapiens
ctatgttggtctgcgagaaatcaaacttcgaacaggacaagcccgaagcccgcttctccgggagacggggtgccacaattgcaagatctcaggtccgggaggcccaatttgatgagctcttgaaccaaatgaggcatcgaagccatgaggaaatactaaagtttcatctaagaaaggccaaagattttctgaagaacatgaaatccaggtcggctgacgagatgccaaaagacagaaaaggctggcctgaaatttataattatggtcacaggcagcccactcaggtgcctagcagcttagtcagcaagctaaggactaaagttttgcctctaacttaagggagtcttgtggtcctttgtagctttgctctcagcccacatagaagctttaaaagagaatgttgaaacgtttgtagaggatggttttaaggcaatgtactttaaagtgtgacataaattgtgtgttgaaaaaagtaaa

SEQ ID NO: 229479 - DNA, 464 bp, Homo sapiens
gagaatcaaaaatatttgggggaaaaaaatggatggtagcatctgtactgaacatgcacagatttttttctcgtcatgattccctaagtaatataacaactatttatataacatttagattgtatttggtattataagtaatctagagatgatttaaagtatatgagaaggtatgcataggttatacgcaaatactacactgttttatgtcagagacttgggcatccgtgcattttggtatctgaggggaatcttggaaccaatcctccatggatactaagggacaattgtaatgactctcctcacctttaatctgctctatagagatcctcagggccactttttatggcagtcacaagcaaagctgtgctttcagaagagtgaagtcttgagttataatccaacatttagcttttgtgctcagcttaatacagattatttcccttagcaatctaagttttgtg

SEQ ID NO: 229480 - DNA, 101 bp, Homo sapiens
agttaatctgtatactagtggactcagacattagagccaagtttgccactaattaaatttggaaacttgagcaaaatacttagcccttctgtcgtcttctc

SEQ ID NO: 229481 - DNA, 328 bp, Homo sapiens
tatttgaaagatcctaaaagtggtgaagatggagtaagtgtttggtagggaatccctgccctggctgatcattatgtctgccttggctgtacatgtgatcttggtggcatttctggactatcacccagagaggtgggttaagactggttaagaccgcagagtcagaccgcttggagttgaatcctgacaccaccgcattctagctgtgtgactttagaaagtcccttagcctctatgaaatttagtttgctcaatcagaaaaagagaataatgacactgttcatcttacagaattgttgcaaggattaaataaactatcagatggaaa

SEQ ID NO: 229482 - DNA, 655 bp, Homo sapiens
ttattgaaaaaaatttataaatctagtgtagcctaagtacagtgtttaaaagtatagtaatgttctaggccttgacattcactcaccgacccacctcaagcaacttgcagttctgcaagctctgtacaggttaagtgccctttacaggtatctcatcttttatcttttatacggtattttcactgtagcttttctgtgtttagatatgcaaatacttaccattgtgctacactcacctacaatatttagtgcagcaacatgctgtacaggtttgtagcctagggctatatcatattgcctgggtgtgtagtgggcagtcatctaggtttgtgtaagtacactctgatgttcccacaagggtgaactcacctaacaaggcatttctcagaatgtatctgtgtcaagcgacacatgactgtaatttagttttgcctacttttgaactttaagtagaaccatacaatttgtattttttcttctttgaagggtaattttttctttgaaagctgaaaatgattttctcttagtcactaaacagaaataatgtgagattcacccatgtcgctgatgtcattgtaattttaatttgttcattttcattgctgctgttacatgccattgtacaaatatatcacagtttgtccattctaatgtc

SEQ ID NO: 229483 - DNA, 294 bp, Homo sapiens
ccccccacccctccccacttagtctctggtaattactgttccactacctgcttctacaatatcaacttttgtatttgtttttctgtgtttgacttatttcacataaaattatatcctccaggttcatccatgttgtccaaatgacagggtttcattttcttttatggctgaaaagtattttattgtgtatatttaccacattttctttatgtgtttatccattgttggacactaatttgattccatatatgagctattgtaaataatgctgcaataaacatgggagtgcagata

SEQ ID NO: 229484 - DNA, 426 bp, Homo sapiens
ttttaatgaaatccaaattatcaattctttctttcatggattgtgtctcttagtattgtattcatgatatcatttgtttatctattctgcttaggtcgttttgccttttttgcctttatttttaggttttctttatgtgaaatgtttattttaaattttgttcattttaataacttagaagactttcattttctgaaacttttatttattagtattattattccactttcttagtgtttttattgttttggaaatgatgggagtctgaagtttgctgtttttctctggatctcacccttggagatcatacacacacacagacacacacacacacacacacagacacacacacacacacagcaggctggttaaagaagacctgagaaatgaatgtagacattcatttctcactggaggaagtcctca

SEQ ID NO: 229485 - DNA, 565 bp, Homo sapiens
ttgctcatcttcgccacacggtggcggtcttatcacatgcttagtgcctgctcttttcctgcttgcgctcaaggcggtttcggaggggtagggtatgccgtttgtcccttgcaaatcccaggatgccctacatccagaaatctggccatgcaaggcaaagcccacattttgtcaccagccagcctgggttcaaatgccgtttaagagctgtgatcgtctctgggtctcttcagcagtaaaatgggactgcaaacccagatcaccatgcacgtggtaaaatttgtaggagataagttatgtgaagctcggggctgaggcccctgtgtagggcccagttcctagttcctaagacggcttcctcgagctgaaaggaacccagcccagtgtagtcttatggggaagagggtggggacccagtcttaagagcagaaccaagaatgagagcctgagctacgtgcagagtgcagagtccctgctgtgagctctgccccaccccaggctggaaaggttgcctgtctgcccctggggtgggagggtggcagttaggctagaaggcaggtattag

SEQ ID NO: 229486 - DNA, 80 bp, Homo sapiens
tggcacccttgtctgatgagtggcccctatgaagaggccatgaagttgaggccgaaaacattgtcacatatggaagaaca

SEQ ID NO: 229487 - DNA, 415 bp, Homo sapiens
catggagtactatgcagccataaaaaagaatgagttcatgtccttgcagggacatggatgaagctagaaaacgaaacaccacatgttttcactcataagtggtagtagaacaatgagaacacatggacacagggaggggaacatcacacactggggcctgtcggggggtgagggttaaggggagggagagcattagaacaaatacctaatgcatgtggggcttaaaacctagatgacgggtagataagtgcagcaaaccaccatggcacatgtataccagaaacttcacattctgttcatgtatcccagaatttaaagtaaaatttaaaaaaagaaacgtactggaaaatctgaatagaccctctgctggaagcattatgaaaagtaaataaatggatatactgcatcatcctca

SEQ ID NO: 229488 - DNA, 431 bp, Homo sapiens
cagtttggctgatttcaagctaccaatgtgaatttactgcaagtgaattaggaagagatacatgtagcactctattatgtagtgtttccactctacaaatacaataggtgcaaataagcttaaagagtatagataataaaagtataagggccgggtgcgctggcacaagcctgtaatcccagcactttgggaggctgaggtgggtggatcacctgaggtcaggagttcgagaccagcctggccaacatggcaaaaccctgtctctactaaaactacaaaaatttgccaggtatggtggcaggcgcctgtaatcccagctacttggaaggctgaggtaggagaatcacttgaacacaggaggcagaggttgccgtgagccaagattgcgccactgcactgtagcctgggcaacagagccagactccatctca

SEQ ID NO: 229489 - DNA, 463 bp, Homo sapiens
tgcacttctatatgaatgttagagtcagcctcccaatttctatttaaacatttctggaatttgatttggattgcactgaatcttccaaaaaccttgagggaaaatgacatcttaatattcagtcttttgactaatgaataaagtttatatctctatttacttagtttctcattaaatttatctctgtaatgttttatagttttcagtggacagatcttatacatcttctgtcatatttatccatttaatgtttattttaaattgcattgttttgtctcaattgccaattgctcattgctagtataaaaatacaggtataatgatctatatccagtgccattgctaaactcttattagttctagaagcatttttaagattgatagaattatctgcatatgctcttattttctgtaaataaagacagttctacttgtctttttccaatctgaaggccttttttga

SEQ ID NO: 229490 - DNA, 269 bp, Homo sapiens
agggccacaccatagttctagtattttttggaggtggggccaggaatgtacattttcaataagctgattcttaccagcttataagattctgacacacattgaagtttgggaatcactggttgaaaggacagtgctaatgagagcaaagtcacagatttgattccaaataggctaggtaggatccattgtctaacattggccatccaacttgtgtcataaggttctaaggcgctaaagaaaggataacagaagaccccgagaaaaaaaaa

SEQ ID NO: 229491 - DNA, 187 bp, Homo sapiens
ggtagaggttgcagtgaaccaagatggtgccagtgcactccagcctgggtgacaaagtgagactctgtctcaaaaaataaataaataaaataaaatttaaactgaaaaaaaggcggggtgtgatggcacatacccagaaatcccagccaccttggaagctgaggtgtgaaaaatttcttgagcccag

SEQ ID NO: 229492 - DNA, 536 bp, Homo sapiens
gtattgaaaaagaaaatgctgaaaaaatgatggaagtatcaaaagctgacctaattaaggataaaggaaactcacaggattatgtggcctggaagcttttgcaaacattttacattttaaattttgtttgttacctttgtaacctccttgtttttccttcttcctagagatgaatcattttctgaatataaacacgtttctggaggtactagttaaagactttaagcagtgaaatatgcgaatactgtgtctggtttgagtctttgagaaatgcaaggatttagctacattaacaattctctagccaccactgaaggagttattttttttagactagtttattgaagtgaggaggaaaagaataaagtttttttttttttcctttgagatggagtcttgccctgtcgcccaggctggagtgcagtggcacgatctcggctcactgcaagctccgcctcccaagttcacaccattctcctgcctcagcctctcgagtagctgggactacaggcacccgccaccacacttggctaatt

SEQ ID NO: 229493 - DNA, 365 bp, Homo sapiens
cagatacttgagttgtttctaccttttggttattgtgaaaaatgtagcaatgagccctggtgtaccagtatctgtttgagtccctgttatcaagtcgtttgggtatataactaggagtggaattgctgagtcatatggtaattctaagttctaagaattctaagagcattccaatttctccactttgtcattaatacttgttattctctctgtttttgattctagccattctagtgagtatgaggtagtatcttattgtggttttgatttgcattttcctaatgactaataacgtcaagcatcttttcatgtgcttattcagctgcctattttcataaataaatgtttattgaaacatgtccaca

SEQ ID NO: 229494 - DNA, 412 bp, Homo sapiens
ggagaatcgcttgaacctgggaggtggaggtttcagtgagcccagattgtgccactgcactccagcctggtgacagagtgagactccatttaaaaaaaaaaaaaaaaaagaaaaagaaaaaaagaaaaaaaaagaaaatacacagaggagacaaaagaaaaagaataaaaaaggttgaagcacacctacaggatctagaaaatagtctcaaagggcaagtcaaagagttgttggccttaaagaaaaatctcatgaagaaaagcccaggagcaaatggcttcacttgtgaattccacaaaatatttaaagaaggattaagactagttcttcacaaactcttccagaatgtagaagagaagctaatacttcccaactatattttgtgaggccagtattaccctaattgtggacc

SEQ ID NO: 229495 - DNA, 590 bp, Homo sapiens
tcaagcattctcacacttagaggtaaacaaacacacaaagccacaggcatgagactgcccacactgtctcatacgggctcttaatctctgacaagcaatgggctatgggcaagcattcctggcttcaggcctgggtcctcatgccattgattgggcaacttggctttctcccaaaaatgaatgcgggcaatcttttatcagaaaggccacagcagcagatgtgaaactggagcatcctgggtcaacccgcttaaaaacagactcccctttcagatagaggcagagagagtcctgttgggatccttagccctttgtgatgtcatgggaatctgtggcaacgtggtggcctttttgagtccccctaagccacatcctcccacccctgcctgtgtgaaagccaggacagcctgtgcagagtcagacttgcacgagttgctgagtgtgctttctaagggatacacctgcctcaggtcctgtggctccctgttgagcagtctgcccgttctggtgacctccatctgccagcccaaggcggtaaactacctagagcctttgggaggactcctagtcctgcagtaaaaccttgtgta

SEQ ID NO: 229496 - DNA, 548 bp, Homo sapiens
atatttttttaaaagtacaactacaagtctgcaccttcaactctcattctgaaaattcctgaatatttatttaatttcaagataaaaatcagcatggtgtttctaggttgactcctaggccttctcaaaccagttcaaaccagagtttaatgcgagaggctcagcagatttctgctttgttgtgagtcactaaaacgtgatgacctcagcagccataaaccaaaggtaatgagtatcccacagagagaaggcagatgaagggaatgtacaatatgatcctcataagactttctcattctaaaatgcagttctattctcattttctttctcctatgagattctaagaagcaatcccggaagaaggcaagaatcaagatactaagctctatcttccctactcatttagggtaaaataatttcctacacagttctacagtttatgtgtgtgtttctaactgacctatgcaaccatctgccagttgctgattttacacctttttcttcgcataaaatataataaactaactgaaatgcagccactttgaaaa

SEQ ID NO: 229497 - DNA, 319 bp, Homo sapiens
gtttattttaatgtttgtgcaataacgtccagttttaccaagcagaatgatgtgcataggagcttttatgcagaactcactgttcttcagttagagcttattactctaatagtgaaatcaaatccatcttcagttgctacatggctttgttaaacagttaaacttgagttggagatgctctgtcgtagggaggaattttcgctccacagatgtgttcatataatgtattttcccctttcccctatggaaactttgtggaaagattatttcagtgttaaccctgattgatattttagtaattaaacaagtgtctgttact

SEQ ID NO: 229498 - DNA, 377 bp, Homo sapiens
tctatgtgtccatatgtcctcatcatttagctcccacttataagtgagttataccattttatactttttgatgtatatcatataatagtacaactcatttttatatttaacatctttaaaagtactgtgactgatttttcccacttattcattcaagatattaatcatctgaaacccacctacactgtgtctctacgcttatgcaggctctaagatcagagacctaaggagaataggttatgctctcctgctgaggggatcaatgtctcagttatttcaggttgccataacctagaagctggcaagtccaatatcaaggcactagcagattcagtgtctgctttatgcacattctggttcatggagtgacactgtct

SEQ ID NO: 229499 - DNA, 387 bp, Homo sapiens
tctatgtgtccatatgtcctcatcatttagctcccacttataagtgagttataccattttatactttttgatgtatatcatataatagtacaactcatttttatatttaacatctttaaaagtactgtgactgatttttcccacttattcattcaagatattaatcatctgaaacccacctacactgtgtctctacgcttatgcaggctctaagatcagagacctaaggagaataggttatgctctcctgatgccataatttgggtagtatataaataccagaagtttattttttgtggttctagaagctggcaagtccaatatcaaggcactagcagattcagtgtctgctttatgcacattctggttcatggagtgacactgtct

SEQ ID NO: 229500 - DNA, 761 bp, Homo sapiens
aatcagatgcctagagggacctgaatgctacaacctcggagagagaataggggagtgttggtgtttgtggtgaatcggaaagcacgtgtttaaagaggacaatcacattaattcagttccagctatgagattacattgtcaaatcatctgatttttcaagagaaatcacaaatttgaatttcttaaaatgagaaatctactttttaaataatgacgggattttcaagtatgttaaaaatactgtaggctaataccgaataagctaagcaaaacttttgtggatcaaaccgaaaccatgggctattttcttctcctcctcttcctcctccttctcataggaataaaacaactaaatataatcctgtctttataatttccatataccaagctttaattatatttaatacccatcaaagttagttaaaatgaactctgagtaatttataccttatggaaaaattacggtgttctaagtctgaccaaatgtgtagaaagtaccatattatctttggatatgccatctatgtctgctttgccccactatactacatattgctttagatcagccactattttacatttatttcaaaagaaattttgcatacccttcaacacctagcactgttatatatgtggtcagtgcttaatgacttggagtaaattagtggtaaagtaagggaatttaaaagtagcattttcttctttccacctccacaaacaaaatcagaatctaacttcatggaacatttcatctaatttgt

SEQ ID NO: 229501 - DNA, 473 bp, Homo sapiens
ttcctctctctgccccttactaaaaaaaagatgtattcaggcaagttatttaaaatcatgtgccactgttttcttacctgtaaacttggacaaacaatgctttttctgttcacctcaagattatgagaatcaaagcagtctgtagaggttcttggaagatataaaaagtgttttatgacttttatatagaatcattcttatacaagttgttaatatttaacatataatggacaaataagtacttcattttatattggctgaatttgtgctcaagtagaccttgaatgttatttgaacatttttggaaggatgttgttagaggtattggtttgggaataaaagtcccagtgaaatatctattatttgcactttactatgtttcatttcaatgttattactgtactgaaacaatgcatcaaaatacacatttggacaatctaaacacttgaataaaatatataattaacagcatt

SEQ ID NO: 229502 - DNA, 552 bp, Homo sapiens
ccagccagtccacagaggaggcaccattcaacctcagctctgtctaacccacgtctcgctcctaactagtgtgccctgctgcctccccctctagcctgtggccttcttgtgggtggtaatatgtcttgtccccagctgtgtcccctgatcccagcccagaacctggtataggacaggcagtggggaaatgctgtggaagtcatggaggcctgcatggaggaggtggtgtcttagtgggccttgaaggatgaacaggatttggatgtgtttcagtgagatggtgatggagcagcagtcatgaagccatcaatcctgaggcagtgagtgctgccactcactcacggggatgaccaggctacgtggtcttttgtcccccagcaggcgagcctggactcatgcaggtggcatctcggtgggaagtgcagagggccgcatgaagtctgggtgaaactgccacggcattctcttgcccagtggaatcagaagggttattgctgttttgttccctgctatgtcctcagtgcttaaaaaggaacataataggtgctcaaa

SEQ ID NO: 229503 - DNA, 567 bp, Homo sapiens
gagtagctgggattacaggcgcatgtcgcaatgcccagctgagaatatttgtatttttagtagagacgaggttagagtcgtagaataattttttgtgtttttagtggagacggggtttcaccatgttggccaggttggtcctgaactcctgacctcaagtgccttgctcccaaagtgctgggattacaggcctgagccacggcaaccagctcagtgtcctgactttgatattgtactatagctatataaaatgtaaccattagggaaaactgggtaaaggatacaggggacctttctgtattatttctgcagcattctttgactccatacttattatattttttaagccaaaaaagcattccttcatgcctagcttgtagctgcacttttttaggtgcagtgatgaataccagagtgatcaaaagatgccctcaaggatgaaagtctcattagagagagcagttttaacagacagcaataacaatgccttagtgctataatgaatagttattctatgacatactttttagtattgtttgaaagtttctacagatgtgctttgcaatc

SEQ ID NO: 229504 - DNA, 448 bp, Homo sapiens
  misc_feature (18)..(18): n is a, c, g, or t
atgaccttggctcactgnaacctccccctcccaggctcaagcgattctcctgccctcggatcctaagtagctgggattacaggcatgcgccaacacgcccagccaatctttttttatttttagtagagatggggtttcatcatgttggccaggctgcaaagacatcgatctaaaggcagtttggtttcccacagcactgatgccagcaatgttctaccagctaccttgctctaaatttaaatatcaggcaccttaagaagacaagtaggcaagacccaacgctatcagtttattgaactgccaacttccaatactaaaaaaatactaaatactaaatacagaatacttacaccaactgataaccaagtttgaccttgaaaattatttatttcccaagtagcattctgacctaaaaaaggtcaatctgagccttgtctttttttcactc

SEQ ID NO: 229505 - DNA, 133 bp, Homo sapiens
actgcctaaagcaatctataaattaaatgctatttctaataactatcactgaaactcttcacagaactagataaaactattttgaaattcatatagaatcggaaaagagtccaaatagccaaagcaatcctaa

SEQ ID NO: 229506 - DNA, 1148 bp, Homo sapiens
ctcccagggacatgcacaccaggcttgccctttggagcctctcctgaccttggccagcgtgggagctgctgttcctgggaggatccgccacctgccccaggcgctcaccagcctggcttccacagctgctacccacaggggctgccggggcctgcatggcgtggcgagggtcagggatggtgagcgccccacccattccttcatccatcacctaataaatgtgctctgagggtcccagtccccactctttaggccacagactgtggggatgtgggaggtcagatttaagctattttagtgcaaccaaaggtgcaggttgggggatgtggctggggcgcctgggccctgggacccgcaccctgtgcagccgaggctgttgcccgcaggattcagtgcccggccatcctggctgccctggccaccctcctgggagctgtcctcagcttcacctgcatccccgccagcaccaaaggggccaaaactgacgcccaggctccactgccaggcggcccccgggccagtgtgttcgacctgaaggccatcgcctccctgctgcggctgccagacgtcccgaggatcttcctggtgaaggtggcctccaactgccccacagggctcttcatggtcatgttctccatcatctccatggacttcttccagctggaggccgcccaagctggctacctcatgtccttcttcgggctcctccagatggtgacccagggcctggtcatcgggcagctgagcagccacttctcggaggaggtgctgctccgggccagcgtgctggtcttcatcgtggtgggcctggccatggcctggatgtccagcgtcttccacttctgcctcctggtgcccggcctggtgttcagcctctgcaccctcaacgtggtcaccgacagcatgctgatcaaggctgtctccacctcggacacagggaccatgctgggcctctgcgcctctgtacaaccactgctccgaactctgggacccacggtcggcggcctcctgtaccgcagctttggcgtccccgtcttcggccacgtgcaggttgctatcaatacccttgtcctcctggtcctctggaggaaacctatgccccagaggaaggacaaagtccggtgaccgctgcccagacacagactggc

SEQ ID NO: 229507 - DNA, 1199 bp, Homo sapiens
  misc_feature (191)..(191): n is a, c, g, or t
taggtcaccctggagcgctcaccccaccggcacccgtgcccaagcccgcccctgcaaaggcaggcaaggccaggcgggtgctgcctgggacccagtgactcagcacccctgcccggatcaactggacttttgccccctgctccgccagcctcctgcttggatctctcctgggtctccctgctgcgcctgtncaggatgcagggagctcgggctcccagggaccagggccggtcccccggcaggatgagcgctctaggccggtcctcggtcatcttgcttacctacgtgctggccgccacagaacttacctgcctcttcatgcagttctccatcgtgccatacctgtctcggaaactgggcctggattccattgccttcggctacctgcaaaccaccttcggggtgctgcagctgctgggcgggccggtatttggcaggattcagtgcccggccatcctggctgccctggccaccctcctgggagctgtcctcagcttcacctgcatccccgccagcaccaaaggggccaaaactgacgcccaggctccactgccaggcggcccccgggccagtgtgttcgacctgaaggccatcgcctccctgctgcggctgccagacgtcccgaggatcttcctggtgaaggtggcctccaactgccccacagggctcttcatggtcatgttctccatcatctccatggacttcttccagctggaggccgcccaagctggctacctcatgtccttcttcgggctcctccagatggtgacccagggcctggtcatcgggcagctgagcagccacttctcggaggaggtgctgctccgggccagcgtgctggtcttcatcgtggtgggcctggccatggcctggatgtccagcgtcttccacttctgcctcctggtgcccggcctggtgttcagcctctgcaccctcaacgtggtcaccgacagcatgctgatcaaggctgtctccacctcggacacagggaccatgctgggcctctgcgcctctgtacaaccactgctccgaactctgggacccacggtcggcggcctcctgtaccgcagctttggcgtccccgtcttcggccacgtgcaggttgctatcaatacccttgtcctcctggtcctctggaggaaacctatgccccagaggaaggacaaagtccggtgaccgctgcccagacacagactggc

SEQ ID NO: 229508 - DNA, 492 bp, Homo sapiens
  misc_feature (191)..(191): n is a, c, g, or t
taggtcaccctggagcgctcaccccaccggcacccgtgcccaagcccgcccctgcaaaggcaggcaaggccaggcgggtgctgcctgggacccagtgactcagcacccctgcccggatcaactggacttttgccccctgctccgccagcctcctgcttggatctctcctgggtctccctgctgcgcctgtncaggatgcagggagctcgggctcccagggaccagggccggtcccccggcaggatgagcgctctaggccggtcctcggtcatcttgcttacctacgtgctggccgccacagaacttacctgcctcttcatgcagttctccatcgtgccatacctgtctcggaaactgggcctggattccattgccttcggctacctgcaaaccaccttcggggtgctgcagctgctgggcgggccggtatttggcaggttcgcagaccagcgcggggcgcgggcggcgctcacgctctccttcctggctgcc

SEQ ID NO: 229509 - DNA, 3047 bp, Homo sapiens
agcgggtcgagctcctggttgccttagtaacccctcggctttctgttcctggacggtggcggccgccggctctatgatggagcccccgaagcccgagcctgagctccagcggttttaccaccggctgctgcgtccgctgtcgctcttccccactaggacgacgtccccagagcctcagaagcgccccccgcaggagggccggattctgcagtccttccctctggcgaagctgacggtggcgtcgctgtgcagccaggtggccaagctgctggccggcagcgggatagcagcgggagtgcctcctgaggcccgactacgtctcatcaaggtcatcctggacgagctgaagtgcagctggcgggagccgcccgccgaacttagtctgagccacaaaaacaaccagaagctgcggaagcggctcgaggcctacgtgctgctgagcagcgagcagctcttcttgcgctacctgcacctgctggtgaccatgtcgactcccaggggggtcttcactgaatcagccaccctcacccggttggccgccagcctcgccagggactgcacactcttccttactagtcccaacgtctaccgtggcctgcttgccgacttccaggccctgctgagggcagagcaggcctctggggatgtggacaagctgcaccctgtctgccccgctgggacgttcaagctgtgccctatcccctggcctcacagcactggcttcgcccaagtgcagtgctctaacctcaacctgaactacctcatccaactcagccgtccaccagagtttctcaatgagccaggaaggatggatccagtgaaggaattgaagtccatccctcggttgaagaggaaaaagcctttccactggctgccctccataggaaagaagagagaaatcgacatcagttcctcacagatggtgtcgctgcccagctatcctgtggcccccaccagcagggcttccccctcgcctttctgccctgagctccggagaggccaatccatgccctccctgcgtgagggctggaggctggcagatgagttgggccttcctccactcccatctcgccccttaaccccgctggtcttggctacagagagcaaaccagagctgactgggctcatcgtggctgaggatctgaagcagttgataaagaagatgaagttggaggggactcgctacccaccactggactcaggcctgcctcctctcctgggggttgtgacccgtcacccagctgcagggcatcgcctggaggagctggagaagatgttgaggaacctccaggaggaagaagcctctgggcagtgggacccccagccccccaaatcctttccacttcacccacagccagtgaccattactttgaagcttagaaatgaggtcgtggtccaggcggctgccgtacgggtctctgatagaaacttcttagactctttccacattgagggggccggagccctgtataaccatctggctggtgaactggatcccaaagccattgaaaaaatggatattgataactttgttggcagtactaccagggaggtctacaaggagttgatgagccatgtctcttctgaccacttacattttgatcaagggcccctagttgagcctgcagcagataaagactggtcgaccttcctgtcctcagcctttctacgtcaagaaaaacagcctcaaatcatcaaccctgagctggttggactttactcccagagagcaaacactttacagtccaatactaagaagatgccctccctcccatcactccaagctaccaaaagctgggagaagtggtcaaacaaggcctccttgatgaactcatggaaaaccaccttgtctgtggatgactacttcaagtacctcaccaaccatgaaacagatttccttcatgtcatctttcaaatgcatgaagaagaggttcctgtggagattgtggcccctgccagagagtccctagagattcagcaccctcccccattgctagaagatgaagaaccagactttgtgccaggagagtgggattggaacactgtgctagagcacaggctaggagctgggaagacaccccacctgggagaaccccacaaaattctgagcctgcagaagcatctggaacaactgtggtctgtgcttgaggtccctgacaaggaccaggtggacatgaccattaaatatagctccaaagcccgcctgaggcagctgccttcattggtgaatgcctgggagcgggccctgaagcccattcagctgcgggaggcattgctggcgagacgagagtggtttgagggacaagcttccaatcccaaccgcttcttcaaaaagaccaacttgagctccagtcacttcctggaggagaatcaggtccgaagccatctccacaggaagctcaacttaatggagtcttctttggtttccctcctagaggagatagagttaatctttggcgagccagtgatcttcaaggggcggccctacctggacaagatgaagagtgacaaagtggagatgctctattggctgcaacagcagcggcgggttcgccacctggtctcggccctgaaggatccccaccagtcaaccctgttcaggagctcagcagccagcctttagtagctcctgggaatacccctattactccttgaccaggcccagtgccctcaaatgcctccctcacccctaaatggccagcagctcatctagacctctttactgctttggaagaagaaatatttgtctatatctgggagtggagggttcaggaacattatgcttccaactatgaagggattgagactaaaactattgttttcttagtgaaattctcatgaaagaatccccaagcctagtagtcccattatgtcaagccttgcacaatacaagccaaatctcctatatcaaaagaactgagaccttggagttaattgtagtgggaagggtcagaggcaaaggtgatctttggaacaactcactttagcattcctatcacactacattaaattgtcacctcttttagttctcaaacactattagaaga

SEQ ID NO: 229510 - DNA, 837 bp, Homo sapiens
  misc_feature (788)..(788): n is a, c, g, or t
  misc_feature (805)..(805): n is a, c, g, or t
agcgggtcgagctcctggttgccttagtaacccctcggctttctgttcctggacggtggcggccgccggctctatgatggagcccccgaagcccgagcctgagctccagcggttttaccaccggctgctgcgtccgctgtcgctcttccccactaggacgacgtccccagagcctcagaagcgccccccgcaggagggccggattctgcagtccttccctctggcgaagctgacggtggcgtcgctgtgcagccaggtggccaagctgctggccggcagcgggatagcagcgggagtgcctcctgaggcccgactacgtctcatcaaggtcatcctggacgagctgaagtgcagctggcgggagccgcccgccgaacttagtctgagccacaaaaacaaccagaagctgcggaagcggctcgaggcctacgtgctgctgagcagcgagcagctcttcttgcgctacctgcacctgctggtgaccatgtcgactcccaggggggtcttcactgaatcagccaccctcacccggttggccgccagcctcgccagggactgcacactcttccttactagtcccaacgtctaccgtggcctgcttgccgacttccaggccctgctgagggcagagcaggcctctggggatgtggacaagctgcaccctgtctgccccgctgggacgttcaagctgtgccctatcccctggcctcacagcactggcttcgcccaagtgcagtgctctaacctcaacctgaactactatcaactagcgtcacaagttctatgancagaagatgatcatgangatgatcatcctcgtgagagaaaagcttcatg

SEQ ID NO: 229511 - DNA, 744 bp, Homo sapiens
gcccgcagcagtcccctcacggaattcccccgactcgacacccctcccgcgaggataacgatgattcagactcttagcgttacagattcactctgcatctggcttctcctgcttagtattatgttgagttcattcttgctgcccagcattccatcatgcgcttataccacaatttgtttatttcttctacttttactctgtgcgcattaggtatttccagtttggggttattacaaatagcgctgctgagcactgtctagaacctagctcctggtgagcatagaggctcatttctgttatacccgttcctcacagcagcgttgctgagcacagggcgtgtgcatgttcggagtgagtgggtgctgcctgagcacctgcagcagtggttgatcctcagtcgtagttttttctgtttttaacataagatgaattgacatgaggtaacatgcacagatcttaagtggaccgctggatgaattttcacatacgtgtgcatctgtttcaccgcgcatctcttccacatatgcgtgcatccatttcaccgcggctccgatcaagacatagagcacttccagaagactccctgagacccctctccagtcatgaccccccaccctggggatgacgtctactctgacttctgacagcgtggattatttttgcctattctagaacttcacctaaatggaatcgtatagtctgttctcttctgcatctgccttttttcacccagcgcaatgtctg

SEQ ID NO: 229512 - DNA, 471 bp, Homo sapiens
  misc_feature (263)..(263): n is a, c, g, or t
  misc_feature (273)..(273): n is a, c, g, or t
  misc_feature (281)..(281): n is a, c, g, or t
  misc_feature (283)..(284): n is a, c, g, or t
  misc_feature (286)..(286): n is a, c, g, or t
  misc_feature (289)..(289): n is a, c, g, or t
  misc_feature (294)..(294): n is a, c, g, or t
  misc_feature (297)..(297): n is a, c, g, or t
  misc_feature (301)..(301): n is a, c, g, or t
  misc_feature (303)..(303): n is a, c, g, or t
  misc_feature (309)..(309): n is a, c, g, or t
catagagacagaagtaacaaaggcaatttgatgaaatttattgagacagaagactaaaaaatgaaaaaacatggtaaatataaaaatatgacggcagaagtaatccagatatatatgcatttgtaatgtccatttatatcattgcattaaatctaaatttttctgctcagtaaaaaaaaaaaaaaaaaaaaaaaaaaaaaaaaaaaaaaaaaaaaaaaaaaaaaaaaaaaaaaaaaaaaaaaaaaaaaaaaaaaaaaaaaaanaaaaaaaaanaaaaaaanannanaanaaaanaanaaananaaaaanaaatacattacactactatttctattaaaaaataactatagtggcgtctcattatctcatatcatatatatctttctctatattatactctgctctctacttcgactttggtgggatatgtccctaaagcggctctttataatttattccgtttaataaact

SEQ ID NO: 229513 - DNA, 377 bp, Homo sapiens
  misc_feature (263)..(263): n is a, c, g, or t
  misc_feature (273)..(273): n is a, c, g, or t
  misc_feature (281)..(281): n is a, c, g, or t
  misc_feature (283)..(284): n is a, c, g, or t
  misc_feature (286)..(286): n is a, c, g, or t
  misc_feature (289)..(289): n is a, c, g, or t
  misc_feature (294)..(294): n is a, c, g, or t
  misc_feature (297)..(297): n is a, c, g, or t
  misc_feature (301)..(301): n is a, c, g, or t
  misc_feature (303)..(303): n is a, c, g, or t
  misc_feature (309)..(309): n is a, c, g, or t
  misc_feature (351)..(351): n is a, c, g, or t
  misc_feature (355)..(355): n is a, c, g, or t
  misc_feature (357)..(357): n is a, c, g, or t
catagagacagaagtaacaaaggcaatttgatgaaatttattgagacagaagactaaaaaatgaaaaaacatggtaaatataaaaatatgacggcagaagtaatccagatatatatgcatttgtaatgtccatttatatcattgcattaaatctaaatttttctgctcagtaaaaaaaaaaaaaaaaaaaaaaaaaaaaaaaaaaaaaaaaaaaaaaaaaaaaaaaaaaaaaaaaaaaaaaaaaaaaaaaaaaaaaaaaaaanaaaaaaaaanaaaaaaanannanaanaaaanaanaaananaaaaanaaaaaaaaaaaaaaaaaaaaaaaaaaaaaaaaaaaaaaaaanaaananaaaaaaaaaaaaaaaattaa

SEQ ID NO: 229514 - DNA, 414 bp, Homo sapiens
ggcggagcttgcagtgagctgagatagtgccactgcagtccggcctgggtggaagagtgagactctgtctcaaaaaaaaaaaaataaaataaataataaaaaaagaaatgaggggatatgcttcttctaatttaatgggaaggaggagggcaagattgggcacagataaaatcaggttgtagttggctggtagaaggttgaggaaccagtcatctcatggtttttatcctcagagcagagaaggcagagtcatcatccattgagaataacagaagaaatgtggcagggcaggaggtgtgagggagaggagagatttgaaagacctattatggagaatgagacaacacagattagggacacaggaattatttcttagccttcagggtggttgagattgactatcatgaaattgaa

SEQ ID NO: 229515 - DNA, 784 bp, Homo sapiens
aaaaattacttcataaacaattttactaaaatttattcactctataaaaatgagaaactcctgtgattttaatggacacttaagcaaaatataagttaagagataagctaaataatggaatcatcatagcgtgcattttaaagccagtttaaaaattctcctttattgtgaccatcatgctgttcctcccctctgtcatcatggccaatgcagagatgattgtcaaagaaaagcaaatgggtttgtgaggaattctaatcttctagtctcctggggcccactgtggtggcttagatccaccccactgctgctgagatcagagtctattttggagctctaggcaggttctagagccttctctaattaccccaactggaattaaacaaactttacagcgttaatgaactgtgtgggccacatctgcctctgccagacacgttacagccctgctgcatgctgttaggctaccacacactaattatcctttgagttttctgcacattcttttccaaacaaggcagccctgccaacttgtcaacagggcatttactctaaaaatgaagttactttattttttgcctgagaatgcccacagtcactttctcacagacaggaatggaagcaggattgtatctttctttttttttctgcctctttaaattaaggaagagggggaaaaaaacctctgtaagctaatatataccttctctggtggttgtagtgctgcaagtttttctgatttagaccagagaagaagaaatgtcaccattctcagctggtaggg

SEQ ID NO: 229516 - DNA, 309 bp, Homo sapiens
gcattattcataataactcagatctggaagctatttaaatgtctagcaactagtgaattaataaacaaaatgtgttatacttttataatagaatattattacacaataagaaggaaaatgaaaaacatgaaaagaagtcagatgcaaaaaacaacatattgcatgattctatttatataagtgtccagaaaaggattatagatacagaaatcatatcagtggttgcctaaggctggggttagaaatggaggttaactgtgggtagccacaagggaactttccatcaccccagaaagttccctctagttc

SEQ ID NO: 229517 - DNA, 270 bp, Homo sapiens
tcggagggtccccagcagcatgaaggtccagattcccccaatagtaactccttagcacatgctcgttgggtttcttcctttccctgtctgattttccctacttcttcgcttgtacttactaggattgtctcccaagtaagctacctgcaccaaagtcctttcaccaggatctactttggagggagctctttatcagaaaaagcaacttgcttattggcatccaggttgaaaatgttttcttccagtaggcaggaatgttgataccatata

SEQ ID NO: 229518 - DNA, 408 bp, Homo sapiens
cattaatatttgcatgcacagggtgatgaattcatctttttcctttgtccagagtcacgatctctgtcctcatctcacagaaataatgtggagatgtcatggaagacaataaagaactgggatttattctccctagattcctattattgagaagatattgtatatgatcccaactctgagaagcctttttatttcagcagtaaaatggcaattgcgtttgtaaaagcagcaacttttcttaacatacaacatctttgatttatctcttatttcctggcagcttgcttttcgggtgaacttgtagcatatgctctgactggccattgaggaagtatccatagacatcctaaagtagcagacttcacacttccagttgtataggagttataaaattgactctcacaaaga

SEQ ID NO: 229519 - DNA, 231 bp, Homo sapiens
acttgcttcttgtcagagggatcttacaaagatgaccttagtgatgaagacattgtgaattaaaatcatttgttctgaaaggtgggaccaagatgtaagcttcaggaaacgttgcctcatctactttcaaggtggggctttctcattaaagtgcctatacgatgtttctccttcccagagatgaaggataaaaaaagaataaaaccatcaggcatttttgtttaactatgt

SEQ ID NO: 229520 - DNA, 487 bp, Homo sapiens
gagaaacagaagagtcagtcaaccacatttacccactttcccatttattttgtggagctaacaccagagacaaggtctgattgggcactgctttcattcaggatgatttatcattccccatatcattctccttcatcacgatggaggagaaaacttagtttctttccagctgtgcccagcttcagacatttggtatacagaacaccttcacctccattcctttcccccatgttttgggtggccttatgtcccatgttgcccaagctaatccttgtggccctggatgcacctctctttctctcaaacatgttctaaattatatggtcatcctacctgtggtgccataggcaggcatgcaaataaaacatcaacatcaactgaaaatgacattatttgttttgctaccatattatgttcacctttactctaagtatattcacattgtttgtgacccaattaataaaatatctgagactactttgtttgt

SEQ ID NO: 229521 - DNA, 547 bp, Homo sapiens
tccctagtagctgagactacaggcatgtgctaccatgcccagctaatttttaaatttttttttgtagagatggagttttactatgttgcccaggttgatcttgaactcctgggctcaagtgatcctcccatcttgacctcccaaagtgctggggttacaggtgtgagccactgcacttggttataagttgaattttaaagtagtaattttggggcatttgaaaatcctctgtggagtataagtactttttttcaggtgctctgagtactgctataatcaggggtgctaaatgtatttagtgctgacagaaatgctcatttattattgcagacttagaggtaaactctatttctataattattcatcttaaagtttaacaaaatcggaagtttttttgctgttttagaaaagtctataatgactatttgatttttatccacaaaaggctatcaagaaagagagaaaatatatttgtgtctttggctgaagagatttaaattaatttgcttacttttcagcccaaagttaaatcatggaaagggcatga

SEQ ID NO: 229522 - DNA, 643 bp, Homo sapiens
taaaggtacaaaaattagccgggcgtggtggcgggcacctgtaatcccagctactgaagagcctgaggcaggagaatttcttgaacccgggaggcagagcttgcggcggtgagccgagattgcacgccattgccctccagcctgggcaacaagagcgaaagccagtctcaaaaaacaaagaaagaaagaaaagcacctggggtgcgtctggagccgcgttctgggagccgcgcttcactcgctggtggtacagctccaaggctggagcttacttggcatttttgttgccacagaagcagatgggaaaattctaggtctgtaccttgtgtgaaaaaaggctaagtaaaattttgcatttacgtgacttctgtgtggagagcagcgtcggcttttgtttgtctttggttctgtttggagcacaactagggtagagaggggtttggaaggttaggacagcgccctcggacgccagtgagacccagaggcgccaccaggccctgaacctcatgaacctgcgcggccctaggcatgcggtgaaaacgggacgttgccctcgtcctagcaccagagcaggcaggggcaccgctgctggagagcgccaggtggctcctgcggaggacggtggcccagatcctaccctgac

SEQ ID NO: 229523 - DNA, 607 bp, Homo sapiens
acttacaggtatttttgaagttcattgattttcttccagtctcctagcgttgcagaacgtggatatttatttggtttttgtttttcaattctactcatttctctatatggtatccagaattaaaaggaagcaacttctgatggaggcagtggccctgtcagattttcacaaatgcttttaagtgcaccttgatttattttttctactcagtttaagtcagaaatgaactgagatatgaaatgatagaagcaatctttcatcacactttaatgtcatgaaaatcatctttaaatgttcttgtgtgattttctgctctgaaggtttatgtcataattttcttacaactattctgttaaatgctatctatgccacagattatattaatgcctagaaatacctagtccacatttccatggaattaaatggctttataattgaagcctaagtaaggatttaattttttagagctctcttgggccagacgttcagcttctagtgataccaactgtcatttgactctcacagttttctgtttcagtctccatttttgcaatagattgcaaaaagaccattttgtccttttcaactttgggagtgaagagacgga

SEQ ID NO: 229524 - DNA, 280 bp, Homo sapiens
aattcccagttcaccgacaccagcctggggatcacctccttgtcagaagttggaaagaggaaaaactcagccaacctgggaaggactttatcgggtgctcctgaccaccgagatgacggtcggaaagggccccatccctggagggatcttggaccttcactccaggatcaacgccttccaaattaacattcaaaaaggtttaatctgtctcttccttctccctgtagccgcccaaggacgtcttattatcaatataaggtgatcaccctttccccagcta

SEQ ID NO: 229525 - DNA, 607 bp, Homo sapiens
tgtacatggaactgcggcagactaactcctgtcaaggtgctcatctaaatcacctgtggggtttcaaaaatccatacctgcctgggtcctaccccagtgattcagattcagtatgtctggagtggagcccaggtacctgggtttctttaagttctctgaattgtcctgagcacatgaccaactgagaccactgttctcacaacagtcagacccccaagccgaccaaactggccaagcttctggcaaggatcagtgcacagttggaagtactcagccgggttctggagacactgtaagaagaccgctgcaggggtgcctcatgggaagagatggacctcctctggtggtcgcaacaggctttgtctgataatcacagcatccccctctcagggcatccggctgggtgcatggggcatgtgcaccgacaacttgaacaaccttccccagagggcagtgactgcagaaccaggacctgccctgagcattttagccaggctgtgagagggtgccctctcctggacatgctgctgctgctcacatagttccttcacttaaaaccaagtctctgaaatgataagaaaacttcaataattattctaaaaacata

SEQ ID NO: 229526 - DNA, 656 bp, Homo sapiens
atacctgattgtatttgtcttaaactgattacaaatgagaattctgaatttgaagagacttgcctggccaaggatataacaactgccaataagtggtatcacagacaaagcccaagcctctgactccagagcccgggcttttaaccagtagcctatagtcattacaaaaaatattaatagactttatttttcagaacagttttaggtttacaaaaaaactgaacatacagagagttgtcaattaccacttttcccctgcacacaggtttcctatatattttagtcactttaaaaatacctttctttgggttcttttagtattagcttttcatgcatagaaagagtgcctggaagtgaccagatggcatgcccagaagcttggtgtctgacactgctcttgatgcctcccaggcccagggcttggtagacaacctgtcctgtctcttcgagttccttgagaatcatacgttcctctggctctatctggagctgctggtccaacttccctgagtgaattggctaattcagcctaactcatgccacttgagatgaatcattcttgactatactttctaattgacttgggatgagactagtaaaggtaccgcccacatcgaaggttggaatttccttcagtggtctttctgtttgctttg

SEQ ID NO: 229527 - DNA, 400 bp, Homo sapiens
actacaggctgggtgtggtggctcatgcctgtaatcccagcactttgaaaggctgaggtgggaggattgcttgagaccaggagttcaagaccatggcaagaccttatctctactaaaaataagaaaaattagtaaggcatggtggcatatgcctgttgtcccagctacttgggaagctgagatggaaggatcacttgagctcagaaattcaagattgcagtgagctatgatcatgccactgtactccagcctaggcaatacagcaagatcctgtcccccaaaacaaaaaaggtacagaagtcttctattgtataattcgctacagccagcatgaagttactattggagaatagtctgaatgaacactatctatttataagaaatataaatatgatgccat

SEQ ID NO: 229528 - DNA, 528 bp, Homo sapiens
ctaaatatgaattcttactgatgtctccaagtctaattcattaacacaaagatcattgtagcctccttcccttgcttatctgtgacctcccacttcaacaaaatgtcatgtaattggaatcatacagtatgtagcctttcagactagctttttccaccattggccatccatttacttaatcctagtatacccctataggaaaaaactttattaactacagtacagtgcttttgtacagttcttttttactttattcttacattctccactcatttccaaagttacttaggtcagcaccttatttctccattcctttcagtgaggttcttttcatacatttgtaatatagttattttgttgtattctgtattccatcttgggcttcctgaacctcctaaataacttttttttcaatttgcataccttaagattccctcttttgtgttgtatagttttatagattttgacaaatgaaaatagtgtcgtgtgtccaccattacagtagtatacatagtagtttcactccct

SEQ ID NO: 229529 - DNA, 813 bp, Homo sapiens
ggtgctgactgccacaggagagcagaggcaaggcagccactgaatgttccagaatggagaggagggaaaacgttgtgtttaaaacttcttgtgggaaatggctacccggcacaggcacaacttcaaaagcaggatggtagaaatggaaacccgagggagagactccaaggttattgaggaaaagaatcacaagatgtttttctctgatcgtctctttattgtcctcgttcctggttgaattttgagctgaccagcagagcctgaagtctgccgattgtcgtctctacgaagcagatgactgaatacggagtttgataaatgcaagaagtcaaagccaacatctgaagaaatttcagctgggatgctgatgcagtctctcttagacgaaatgcttgctttgcttctatttcatgctcctaccaagcaggtgaaattctaaggatttagataccattaccctagagatcccagaataaaattcgagtatgaaattacagatgatcgccactgggaggccccagtgatctgcaaaatgaacttttccttctggataaataagtgaaaataaaagacatgatttaagcaagtgaattgaattataaaagatgatatgcaaatgcatcaaaagcggcaaagggtaaatacacaacaatgtaggaaaaaaaaaaaaaaaaaaaaatttttggggggggccgaaaaatttaacctttttggggggcgctgggtatgaatggtcaggtgccggagacacgggaaggggggttcccaaaaaagccgggccggggtgaacaccagggtggtctggtaggccgg

SEQ ID NO: 229530 - DNA, 425 bp, Homo sapiens
agttgctatcatgggggagtttttcaaaattaaaaagtaactcttcattctcccttgctcccagccctggcaccagcaaactacaacttcgtcactatagacttagctatctgaattcacttcacatacgtggaatcatacaatacgtgaccttttgtatcatttagtataatgttttcaagactcatctacgttttagcatggatcaatgtctcatttggtatggctgaataatattccactgtatggctgtatcacattttgtttattgattaattagttgatggaaatttgggttgatttcaccttttgtctattgtgaatagtgcttctatgtacatttacatgcaatgtttgtttgaatacctgttttcaattattttggatttatacctagaaataaaactgctccatcttctgacagg

SEQ ID NO: 229531 - DNA, 181 bp, Homo sapiens
actgagaaaatttagaaaattataattcagatgagagttgtatggccatttatatactagaagcacctgataacaaaattatttaaagtatattcctatcctaaacttctctttaaaaatcagcttctagaaactaacatttgaaaaatatttttgggcaggccaggtgcagtgactcacg

SEQ ID NO: 229532 - DNA, 930 bp, Homo sapiens
actacttggcttgggcaactgcaggggaagttgcccccaaagtgtctgtgaggatggaacatggtggaggacgtgggaagtggcgacagggaacgggaggctgattgtgaagtgcagagatttggaattgttctatcattccctaccaacaggttggaagagctatgagatgactcccgccagaggggttcccacaccttcttgtgatataggccacttctccagcaacacctccttacccactccactccctatctacaagctgaaggagggagggccctccaggggcagagagagggccacacacagctagaacagaatcctgccaatgcaggtgaagggcgctgggcactcaccagccctgagaaagaggggggcatcaggaactggcattggcaggccccaacgttgctgttgagaggctgtaactcctctgccctcctgactcttcctgagagaggggctgctttctttaaccagtcctgaatgtctctagtctgaacttgtagctgagtgactagagattttgaagttgcatagatgagtgttcaaaccttagttttttcagttgctacctgtttaacatgaggcaaattacttaacctctctgagcctcagtttttgtagctgtaaaataggggtgagtacagtaccgaccaacaaactgtttcaaggattaattgagatcgagcacataaagtatgtaagacacaatgctggcacataacaagctctcagtaagtcggtagtattatagttattattgctattgttatcatcaccgacgattatgtcactagaagacctagaggctgaacacataattgagagacttagaagaactgagaatgataaaagaaacctcagcatgtgatctacaatatggtattatttttgtttttaaaaaaatgttaactggatatctctaag

SEQ ID NO: 229533 - DNA, 152 bp, Homo sapiens
agtgtattttatttcaatttttgattccatggaaccttattattaatattgttttaactgatatttcttttgatttggtagcatatttaacattttttaaaatttctttttgcatcttaaacttcctaactgggctaacttggctcatgcct

SEQ ID NO: 229534 - DNA, 365 bp, Homo sapiens
tatgggcaagcatttaagttgagtttattaattctacagaggttatctccctaaaagggggctaggaatgacaggattagggtttgtgtttggtgatttcaaaagaaacaggaaattgttctggcttagatgctgtcagaaagatgactacttcttaatcttatctagaaggagggagaaatgaaatatggctaaagctgtaaggtaacaagattttgaagtttgtctaatttcatcacaaacacaggatgaccttgtttgacactgattttctgtgagatagtttatgttcaacaagagtaccatggcctaactatgggcaacaggccagctcccagcaacaccaaagcctgccagttattgtc

SEQ ID NO: 229535 - DNA, 385 bp, Homo sapiens
tttactaaaaatacagacattagctggtgtggtgacatgtgcctgtggtcccagctacttgggaggctgaggcgggagaattgcttgaatccaggaagcagagattgcagtgagccgagaccacgccattgcactccagcctgggtgacagagtgacactctgtcttaaaaaaacaaaaaaaaagaatccagtatactttgcaatgcagaatattgggttagatgagcctttagagactaatccagtttaacccctcctttttacaccttagtaaagtgagtcctagtgttttcaagacttgcatgtggcagagttattttttgagctcagatcttctaattcttaattgataataaactgctttggtgaattaacacccacaga

SEQ ID NO: 229536 - DNA, 2178 bp, Homo sapiens
  misc_feature (1)..(1): n is a, c, g, or t
  misc_feature (1513)..(1513): n is a, c, g, or t
ngaaaaacatgcagaacctcttcagccagtggctcccagggagtggcgggacagtaaagccccagaaacgggtgagcccaagactctccccacctaggacagttttctgactttggcatagggaggggaacttaaaaagaggcccatcatcctgcaggtcgagatggacaccagagtccagggaggctaaggtggctggaattcgcatcggaggatgaaggagaggaaggagctaaacagagagaagggccagaacctgcccaggggcgcctggagtctagccgtgttgcagtcggcccgtggaaacttactcctgaggctgggaggctctaaactgaacagctcccaaagatcaggtggggctggaaatcactgaagctgccaccagccaagtaacaggccccactgagtattcggggcgcccagggcattccccgaagggccatgccttaggagtggggctggactcggccaagggtaaagacgctgtcagactcgtcggaaaagtgcttcaagaacaagcttccaaaggtgggaaccagccgggcgcggtggctcacgcctggattcccagcactttgggaggccgaggcaggcagatcgcctccagagcagcctggccaacatggggaaaacccgtctctactaaaaatagaaaaacttagccgggcgcggtagcacacgcctgcggtcccagctgctcgggaggctgaggcgggagaatcgctcgaacccgggaggcggagcttgcagcgagccgagaccgcgccagtgcactccggcctgggcgacagagcgagactccgtctaaaaaatatatataaccgtcaccgggagaaaaaggtgatttaaacaggcctagagagttcgatcgggagcggggagcggggagcgggtcccagagagccctgggcagccccaccgccgctgtggcctagttgccaccacagcccgggaggagcccaggcaccgtcacccccgccgtttggggaacaaatggttcagggtaagcaacagatacggtttcatcaacaggaacgtcaccaaggaagatgtgtgttcatcagactgccgtgaaggagaaccccggggaggaccctggcggcgggggagctgcggaggccgcggagtccgatgttgagggagaaaagggcgaggcggcggcaagtgttccagggcctggtggggcccaggtcaaggcagtaaacctgcggccaccgtaaccactgcagacgcgggacctccccgccgtcaccggcagaatcaccagaatcctccgtggggaacggaaggagggatgagacagcgctgccgcgggccaggcccaccacgcgggccccaccgcagagtcccactttcctccatggaggccgcagttctccagcctccggggcggccgggagcagcgatgcgggggtgacagcgcggggagcggggacaccagcggggcagcgagtgtaccggggacgcagaccacgattccgcaggacccacctcacccaagacggcctgnagaggacagcgaggaagaggataaagacaatccgggagatgagacccaaggtcaccagccacctcagcaccggggccgccgcaacttcgattaccgacgcggtcgcacagaaaaccctaaaccacaagatggcaaagacacagaagcagctgatccaccagctgagaattcctcgctccaggctgggcaaatgcggctgctacctctaccatcaccccgtttagtcatcaaacaagaactaggaaattccagcgataagaaatgaacgaaaattggagctgaagaccctaagtgcttgcttttcgtccactgaccagataactagaactagctgcattatctgtggggcatggggtttccaattatttttacctaaagacgtctctttttggtaataacaaagtgtttttttaaaaagcctggtttttctcaatacgcctttaaaggttttaaaattatttcatatctgctcaagttgagatttttaagaacttcatttttaatttgtcataaaagtttacaacttgattttttcaaaaaagtaacaaactgcaagcacctgttaataaaagtcttaaataaaaacgaacaggcctagcaatgaaaggatggaatcagcacacgccggtgttgaaaacggctttgacacataggctcaatgtgct

SEQ ID NO: 229537 - DNA, 423 bp, Homo sapiens
attctttccctttccagtaacttagatttagaagttagaatagaaggtagatttaggaggtagaacagaaagttttgaactctgtggccacccttcaagtcaaaagaattaaatgcccaggaagacaacaagtcataatgcggccgggcatggtggctcacacctgtaatcccagcactttgggaggctgaggagggcagatcacgaggtcagcagtttaagaccagcctggccaatatggtgaaaccccgtctctactaaaaatataaaaattagctgggcatggtggcacgcacctgtagtcccagctactcgggagggtgaggcaggagaattgcttgaacccaggaggcagaggttgcagtgagccgagatctgcactccagcctgggcgacagagcaagactctgtctcaaaaaaaaa

SEQ ID NO: 229538 - DNA, 473 bp, Homo sapiens
ctcagcctcccaaagtgttgggattacaggcatgagccactgcacccggcccatgttgtggtttatatcagtagttcctttgtaaatagtgaacagtattccatggtatgaatagagcacagtttttttttttatccattcaccagttagaagacattgggctgtttccaagtttgggtgattacaaaaaacagctactgtaaacattctcatacaagattttatgagatcacatgttttcatttctcttgggtaaacagctaggattggaatggatgggttatatagtaagtgtatatttaatctaagaaactgccatggctgggcacagtggctcacgcctgtaatcccagtactttgggaagccaaggaaggaggatgactagagcctctgaggtgaagaccagcctgggcaaagtggttaagactcaaccgcaaaaaaagaaaaacagaaaacctgaaaacaaaccaaa

SEQ ID NO: 229539 - DNA, 442 bp, Homo sapiens
agtagagatggggtttcactgtgttagctggtctcaaactcctgacctcaagtgatctgcccacctcggcctcccaaagtgctgggattacaggggtgagccactgcacccggctactctctgctgtttttaagaatcatttccatcagttttaaaacataatgcatgttatcctatttcaaaacaagcaacaaacaaaaaacataccattcttggtaccaaatcccttcagttactgtaccatttctctgctttcttttatagaaaacctcttcaaaataaaataaataattcaacaattcaaaatgaataagaatgagtcggccattttcctgcctcagcctcctgagtagctgggtctacaggagccccctatcacgcctggctaattttttgtgcttttagtagagatggggtttcatcgagttagccaggagggtct

SEQ ID NO: 229540 - DNA, 513 bp, Homo sapiens
gagggtcattagaatatttttgtaaaacattttaaataatattatttaaaatatcaatttttaaaaatatatgtgatgtagttatacataggtactcctttgttaactgattatgtaagatctaataggtctacaatcataaggtggatgaacagaaatgcagtgttgaggtgtctgcaatgaatataatgtgattgaaagtatctggtatctatcagtggccaagtcacatgtactgctagggctactgcagtgtgttgtctatatttataatgagaggaaatgttaaatttccatttgaggttagtgaaaaataaagatgtaaattttttgtattatttgaagttcacataccaccccccgaattcgatctgtggaaccctggggtaatccaaattaattgcctttatttacaaagttattttagtaatcacaaagagagaagactgcagtatgaactggggtagctgcaatagatataacaggaagggagccaaatttgagatatctttg

SEQ ID NO: 229541 - DNA, 687 bp, Homo sapiens
cactggggaggataatctctaactaatagtggtagagcaattagattaccatattttaaacaaacgaacctcaaactttacctcatactatataaaaaaaaaacaaaaacacagtagccccccatctctgtcccttatctacagtttcactgcagtttgtaacctgtagccaacagggtcaaaagatattaaatggaaaattccagaaataaacaattcacaagttttaaattgtgtgccagtctgagtagtgtgatgaaatctcctgctgtctctttcagtcctgcttggacatgattcatccctttgtccagcatattcacactgtttagtatacctgcctattagtcaatcagtatctatctcagttatcagactgtcagtctcacagtgtgtttaagaaacccttattttacttaataatggccccaaagcacaagagtagtgatgctggaaattcaggtatgccaaaaagaaaccataaggggcttcctttttaagtgaaatggtgaaaattctcaatttaataagggaagaaaaaaatcgtatagtgaggttgccaaaatcaatggtaagaattaatcttccacctatgacattgtgaagaaggaaacagaaattcatgtggtaactgcagttttaggcatccactgagggtcttggcagaggggatcactctagactcga

SEQ ID NO: 229542 - DNA, 501 bp, Homo sapiens
ttacggaataaatctacttcagcaaataagttttggaagactcaaaagaagtaattgattttgagggttaccagggagtagaatgttgaatgaacttgaatttctattcaaaatgaataaagccccagaacaaagtctgacttagtccactgttatgtttgcttaagggtgagagatttgcccctaatagtgtggagagaccattgagagctaatgaaagagcccccagcagtgcctggtatattaccatgtgacagtaagtgccaccactggatccagaagatcttggactttcaccagaagctccacgagagaacttaaattaaagttgcagattgaacatgccaaatctgaaaatttaagatccgaaatgctctaaatctgaaactttttgaataccaacctgatgcttaaagaaatgctcactggagcatttcagattttgggtgttcggtttagggatgctcaaaccataattataatgcaaatattccaaaatcc

SEQ ID NO: 229543 - DNA, 393 bp, Homo sapiens
  misc_feature (30)..(30): n is a, c, g, or t
  misc_feature (80)..(80): n is a, c, g, or t
ctgcccggggccgggggaaggaagccagcngaggagacgcaacgtgcctgagtccgggagcggggagcctttttcatttntccatcctccctccgcgggcgccctcaaccgtcctggtccgctcaccatgcacctcccctccaagaaagggccacatgcgtgccagggacgcgagccccggccacagggacatagcagcctagaaggtataccaggaacacttaatcaacatcctgcatggttccagcaaagacattaagacagttgggactgttggtgaggacagatgatcttcacaaaccctctgactcttaagaacctgggagacctgctggagtttaccccacattcccttaattaaaaagccattaaaatagtcaactttgctgggca

SEQ ID NO: 229544 - DNA, 322 bp, Homo sapiens
tgggacaaaagagtctgaacaacagtcttcagccctagacctttcctctgacagagtctaccaaaatgagaaggaaccagaaaaccagccctggtaatctgacaaaacaagacttttcaacaccccccccaaaaatcacaccagttcatcaccaatggatccaaacaaagaagaaatcactgatttatctgaaaaagaattcaggttagttattaagctaatcagggaggggccagagaaaggtgaagtccaatgcaagaaaatccaaaaaatgatacagcaaatgaagggagaaacattcaaggaaatagcttaagttaaa

SEQ ID NO: 229545 - DNA, 302 bp, Homo sapiens
ggccggctttccaaaggcaaacaaagaacagtttgtcttttccctccccccaccaccacccgagcaggcggcgggaataggcctaggggtccggatggccccggcgcggcgcggcgccggggcactcccacggcgccccccaaggtcccgctgcgaatgcgcaggtcggggcgccggaggccgcggcagacagcgcggcgccactccggcccggtctccgtggcaacgggctggtgggaggggccgggcggtgcgggcgccttggccgctgttcctcgcgggcacgtcgctatggcaacgat

SEQ ID NO: 229546 - DNA, 506 bp, Homo sapiens
cgccttcagatcagctgtctacctgaagctcctttcctcctggctggtcactgacttctggccaccaccaagctcaccacgtggctctctttacaaacctgcttcacacacaggctgcttcacacgcatggtccattagagagcctgctcctgatggcacactttgggacacagacacaagctgtcatttgttcagacagtatgggagtgctcagatttagaaccactcaaaaatcatccacagttattgagcacctactctttgttggattctgggtcagtaaaacctgtataggacggaggtagacaggctgtgagagtagggtgactgatggaatcccgtagtcgctgtgtccagccatctaactgagctgtaggtagcgtggtaactcagtttgtattcaaaatattgcttctctggccaagtgcactctgaggtccaaacagtgagctgagatcgcgccattgcactccagactgggcaacaagagcgaaactctgtctca

SEQ ID NO: 229547 - DNA, 615 bp, Homo sapiens
atctgggggtggcagataacatcatctcaaattttcttatgttgcaactaaataagaaagttcctatttcaactatcttagaattgtgtaagaatgtatacaaatatttgatatttcccttcggtatataatgagatgagtaataataatttctatatttctcctaattacaaatttgtatattaaagttataatgcgcacttagaaatgaaccaatacaaaactgggaaattccacagtgtatcataaacactcaagtaactatgatgaagggcaagacaaggaacacctaaaacaggctagatccacctccattccactttccaagtccctaaacccttcttcgcatctcctgatataagcaatatccataatttataatggttatttcctcaattttcttcatactttaccaactaggtatgcaaccctaaactccatcgcttggtctagctactttgaacgctgtataggtgcaatcctacatgttcctcttgtttgtggcttcctgaactcaacattatgtttctgaaatttagtcacatagtgcaagcacatgtgattttttttcacttctctatactgtcccattgcatggaattactgtaatgattc

SEQ ID NO: 229548 - DNA, 836 bp, Homo sapiens
ctgttcagctaatcagggcacgaggcaaactccatcttcattcattaacaaactaatccgtggcccggcctggtgactcatgcttgtaatcccagcactttgggaggccgagggccctggagcaccaccgtccctcccctaggcccaggatgtgattctgaatctacagtcagactggaccacctctcccccatgcccccagaatgtccacaggggctccctcgcctacaatagatggattagattcctccctactcttcccacactgtcagagtctgactggtgtgaagttccggtgtttttgtgtgtattttactaccagggtcggctagataaggaggagctttcattacatcctggaagtctgtcccccgcacacacgcacagccgtcctcccttcccccaacatctgatctaattctctctctgctttgctgaggctggcctggcctaagaggattagagcatttgctaaacgggaccaggacaggcagggtcagagaacccgctgtggggagacccagggccaggatggccactagggggcggcagaggaagcgagacgcggagaggggtgtggagtgctgaggagaggcactcgtcggcttagcagcaatcaatgtccacaaagtaaccatgaagttttattcatttttaaatttacaatgtccagctaagttatgagaattcaaaagaattgaactaggttcctggaaacaaaataaacagatcaactgaattctatgtgcaagacaaacatttttttaaaataagaaatttaaaataccatgtaaaatatcagacaataataaaaatgaagtgcaagaaataaatct

SEQ ID NO: 229549 - DNA, 391 bp, Homo sapiens
aatgtggagagttatatgggctcaaccctgggttgagtaaccccattctctagcacaggaaaactttaaaaagacactctttaactgtcttccttagtttgcctcaacccacagcttctccccattcgttgaattcccagagcgaggactcaataggtcagagttttgcattttggttctttagtgtattgaattagcttcattgtgtttttaaatttctccctctttataaaattatgttattcaataaccagaagatgttctgtgacgttagatcagtttctgtcaaataatatggtttaattcacaaggtggataattaagagaaaaaatgtgatgagaaatccccaaacaaataatttttgaataacttttagcttttttattaaaa

SEQ ID NO: 229550 - DNA, 397 bp, Homo sapiens
ctattttttctattttttgtacagttggggttttgccatgttggacaggctagtcttgaactcctgacctcaagtgatccgcccaccttggtctcccaaagtgctggtgttacaggcatgagccactgcacctcgcctgttacgtgctttttaatgtctagattgaggatggtttgtcatagatgttgtatatatttacagagtccttaccacttgagaatttttaatatgcaaagatgacagtggtccttttaacttatcctctaaaaagcccaaataggattttttcttaaaagacacaagctaaatttgaagtaagtaactaaaaattaaatatacctctcattttgtttgatgttaaaatctacaaagatttaataaacattttttggttcat

SEQ ID NO: 229551 - DNA, 414 bp, Homo sapiens
ttcctatctcctcttgcccattctcttctccttgcctcacttcttttatctttttccattttactttcattttttgtttctctagatgttgttttgacatatgagttaatgtactggtacaattttgcatctgtaaattagagcttcagaatcaactgagtgtatttattctttatttttaggcctaaatttatcttaccttttattgattttataatatactatactctttcattttagtctgcatatgttagccaaagaagatatgcccctgttttaagaaatctctgtaaaaaatgtcaagtgtgacaagaattcttcaagaaacaagctcctctagtttgtcttctatatttagagcttcaacagttacctatattactggtaactcccaaatataccttcaaacttgtt

SEQ ID NO: 229552 - DNA, 363 bp, Homo sapiens
atgtgctagtttgatgataggtatttttcagaatgtctctcattgaattcttaaaataatcctaggaaatacgtactagtattcttcattttccaggtgaggagactaagacacagaaaaattaaataacttcaggtcaagtggtaaagccagttgttcaataatgtctatctgagatagaaatttttctccaaatttttaattattctccaacactatgattaattaaggtttaagaatgtaaggagggttaaaactagaaaagctattttggtaatccataacattaataagctaataagataaaaaacattatcttcagtgttgctgaaaagacattcaataaaacaacatttattatgg

SEQ ID NO: 229553 - DNA, 391 bp, Homo sapiens
agatattctgcttaccgtcttccactccccattccttttcctttgctcatgttgtacatctagaatggagcatttaggacagctggacctttgctaaccatccctcttctgtccttcagaagtgtgtcgcttaccagaatcctgaatatatctgtagacacagccctgggttctgtcctgttagccacgaatccgtgtggcccttcctattagtaatatatgtaccctccactaaatcccaagtttcagttacccctcacatatatttgatgatacagcaaagccctcatcataaagaatcatgctgtaatatagattccattatgctttgaatcagagcctgtcctggtatatgcagtggcgtataacatctctttttttctggaacaca

SEQ ID NO: 229554 - DNA, 388 bp, Homo sapiens
tttatgacttagccccagaaatcccactttgtaatttctgcagtgtcctggttatacaagtcagccatattcagtgtgggaaggccaaaggcatgaatgcaagagatgtgagcctcaaagaataagaacaaatagttattatttattaatacttatttgtaagacaatatattaaggtattttcatgctatatatattttactcctcagaattactgttttataaaagagaaatgaggatttttacgtaagtatcagagtaggatttgaattcaggcaatctgacttcagagccaagctcttaaacgttatgccattgtatctcaatctttagtattcttggaacacaaagaatatagaagcacaccactaatttttgtaagtttaaa

SEQ ID NO: 229555 - DNA, 342 bp, Homo sapiens
attaagaggacattggggttgtctctggctgggggagcagagaaaagggttcacaaaggaagtgacattagaacagggttcaaggtttcagctgcattgtgcaggtttcaagggattttagaggggggaagtaaaaaaaaaaaaaccctgctgttcttttttagaaagagatttggggaagaaactgctcatctaataatagtctagtgaacagatgaggacctagttggtgtaggagaaaccacatttggaagatatttgataggcagaaacattaggccttggttatagatttaatgagggagtgagaagaaggagtcaaaatgacatttaggcctttaa

SEQ ID NO: 229556 - DNA, 439 bp, Homo sapiens
ggcctcaaatgatctgcctgcctcagcctcccaaagtgctgggattacaggcgtgagccaccgtacctggtctcatgatgtattttaaaaatgtattttcttgttcctccactaaaaaggcttagaaataatgttcagtccagtggcagtgagcatccctagtgctcagattgtggtctctaaatattacttcccagcaagaggaactaggctttctgggagaaatggctgattccagctctggagtggaaaatataaatgatgaatcagaaacagcttgtcaaaccagaaaacaaggaagctgtcaaagactagtgaggttgtattcaaaaggattcaggagtctctcattagctataaatgtgacagtttggagatcaataaaaataacaactatagagggttgaaacacattcagtatattaaaatctataacttc

SEQ ID NO: 229557 - DNA, 615 bp, Homo sapiens
tatgcatttataatatggatatattataatggactatattataatatggagtattttaggaaaatttttgggcaaagatcagaggagatgccctttaccttgccaggcccctaagtaatacattatttttaagtcaatgaatgagaggattagaattctgaaaatcatttagaagtattgtttaataagtcctttttttctactcaacattaagtagtaatcaacttttacctccgccagtttttctgcttttttgctggtacgatctctctttctaaattgaatcaaagacctaggtggaactggaaacttaggagggaaagacaaaatgaggcttgttcatgatcaaattctgtgtactctagttgcttctttcccttggagtgacaggtacttttatatccaggatgattacagtgatgacatccattcttttttgggggcattgagaaggtgggcttcctaattattttacaaaggtattacaaagtgttaatatactgttttttcctctaatagttgtaacttaattacttcaggagactacgacagtgtagaatttgtggtaacatgatcttctagtgactatttatcaaatccacctgtttctagatg

SEQ ID NO: 229558 - DNA, 487 bp, Homo sapiens
tagaacctgacctcagggattttttttaaaagctatccaggtaattacgatggttgagtacattctagatgagtgtttttcaacttttgcttacaacacttggatagtttttgttttaaagagcaacatctaggctccaccaacggaaaacccaattttaattagtttagaatgggtactaggcaaaaatatttgtttaaatttctccaagtggttacaacatactagctgggtaaagaagcattggctgacacttttgaacttagtactctgttagctcctttctccacagtcttcctgatcagctggtaacaggcttctaccttgtttccaagacccacttcacaaactataccctcagccttttacctggttgcttgtttttgttcctctgcttgaccctacttcatgtctagctagtattccatgtccataggtctgcagtcctttgccttgctgggttttctctcgggcactagaattctcc

SEQ ID NO: 229559 - DNA, 519 bp, Homo sapiens
cagaccctcccacagctgctttccctgccgagcacaccttgctcatttctgtccgctcacataccacctcctccatgaagccctctgggctcacacagtcccctgggcctccctttcccagccctgatccctctgcctatgcctcctagggagagaagacggtcagtctgaaaaacaattaaataggtccaagaaagcgtcatgaatggtgaacacttctaaattggaactagagaaatctaagctgtcccactcctgctcaaaatcagtgctgtgattagctggcagtgcttgctgctggcagtgcctaatgatgggttcgtctctcctatttgactgggagacctatgacggcaggtccaggctatctaactcactgccatgtccccagtaccatggagcataggaaagtgcatagcaggtgctcagtggccagttaattaatctattaattcaactaatatttaatcaataatgacttgctgacaagccctgctccagaaactgagattgcaggaa

SEQ ID NO: 229560 - DNA, 128 bp, Homo sapiens
taaactggaaattaaatagaagtgtagtgattcttcaacatattgagaataaggacaggagatatcactgttatgggcccaaacctggcctaggaattgtttgctgtcaggaattggaactaagtagg

SEQ ID NO: 229561 - DNA, 379 bp, Homo sapiens
ggcttcattctagaaccaacttcaagatggctgcagcagtgccaggcattctgcccagatctgcactattcggaggcagaaaagggctgccagtttctagggcctaatgagtaaggaaatctttcctggaaactaccccctccctttacatgtcattggccagagaaggtcacatgcttagcctggcatacccagtccctggctaaagaactgagtatacaaaactagcctagaataatcaggacccacctgctggtgatgaaactgggagaagaatgaaaactggaacaaaaaggaggggaaatggagtgttgagtatgcagccaacagtgtctgctatgtcatcatttcaaaataaatggatattattttgcttaga

SEQ ID NO: 229562 - DNA, 567 bp, Homo sapiens
gaagaaagtaactctttcaagggaaatggcccgagctgtgggtcaggctcagacgtgggcgctgcggtcaagctgtggtgtttccatccatttgctgcaggcccaagcctgggtagggttcatcctccctggagacagaggtgggagatgtgctttgctgtcctctctggctgaagtcaccagggcagaactgcacttctgtggccggcgtaagtcacactgagagtcagtgtgacccccatgcctgcctctgttgcccgggtcctgtccctggcacctccggaggccccttcttcacctttgtgatgcaggctctccccagggtctctacagcccacaggccccaagcttcttccaccaatgagtgtgcagaatttggtggcaaaataatcattctccttatttttattatgtactcttcaagcaaatgtggtacattgaagaatgggaatgacagatcccttccatgcttctaaactctctctgatggtcagtttggagaacgttttacggtagatacagtttaagtagttttttcccatgcaattattaaagacaaggaataga

SEQ ID NO: 229563 - DNA, 162 bp, Homo sapiens
gggtttctttatgttccaatagaaatctttatagtgctattcctgtttgttaaaatttacctattgttcataaagcaaaggtcttatgtaaaaaaaaattaaaaaataaactacatagtttgaatttcagaggtttgctttcctccattatactcacttgga

SEQ ID NO: 229564 - DNA, 425 bp, Homo sapiens
agataactatagtagaaactatgaaaatatatgaaaactagttttataacctatgtcaggcctctgagcccaagctatgccatcatatcccctgtgacctgcacatacacatccagatggtcggttcctgccttaactgatgacattccaccacaaaagaagtgaaaatggccgttcctgccttaactgatgacattgtcttgtgaaattccttctcctggctcattctggctcaaaagctcccctactgagcaccttgtgacccccactctgcccgccagagaacaacccccctttaactgtaattttcctttacctacccaaatcctataaaatggccccacccctatgtcccttcgctgactctcttttcggactcagcccacctgcacccaggtgaaataaacagttttattgctgactca

SEQ ID NO: 229565 - DNA, 475 bp, Homo sapiens
cgcacattatcaggagcaactgtgggggtaagcgtcctttctctggcaattcgctctatgcccttgtacgctgttgtttgtatttctcactgtttgtaagtctgggcaacagatcgagaccctgtctcagaaagagaaaaagaaaaaaaaggaatgcaaagcacttagggcagtgcctagcactaaggatccactaaatactgttcttgcaaattgaagcatgctgcctctgacaaccttgttaatataaaagaggcccatttcccttctacctgtacctctttgccatttcttataaaggaagctgagctgttaatagtttaatgtgattggcctggcacggtggctcacacctgtaatcctagctactggggatgctgaggcaggagaatcgcttgaacctgagaggcggaggttgcagtgagccgagttcatgccactgcactccagcctgggcaacagagtgagactgtca

SEQ ID NO: 229566 - DNA, 553 bp, Homo sapiens
aagagcgaaactccgtctcaaaaaaaaaaaaaaaaaaaagaactatgaatgaatggtaaatcccccccccaaaccaaagtagataagagtaagaatcacactttttctttaatagtataattgtcctgttatagccctcaacacaagcattttactagacattttacttgaaaaatgtcttacctgtccatgccaagaaacagagaaagtatgtatgaaaatgaacaactggagaaaaaaaagtctagcccagaattgaggaagggatttataaaagtaaatatgaactgtttggtcaaatttacatatatacagaaaggaatcctagaaataaaaattgtaaatatatttttaatcataattcattatttagtaacctctaacaagtcagagattgccaccagaatataagcatccttagggaagagatgtttagggcagagacttgagccatctcattcactgctatatccctactgactaaaacagtctgtgaaatatagtaaaaatgaagaatgagacgagaaagaaaatgaattgtatttctagctca

SEQ ID NO: 229567 - DNA, 444 bp, Homo sapiens
caagtgataatgagcaatgtgaaacaaagagattggcattaaatgtaatgaaggactagaggagtgtacctaaacctgaaacaaattccaagaagtggccttgacctaaaatgtttgcatcctgccagagacccttacttataagtcaggagatacctgatgcccaggagaactggtttttgtactctgtcttacacagactaagaattaagaatgcaggtgagaagtttagaaaacttcctgatgatcatatgaaaagacattaaactttacctggtaaaactatgaaatgttgcctgtagatttctaagaaaaatgagtaggaagttggaaatatttcagaattaagaatgtttttatataattagaactctttaagctatgtaattctgaaatctgtgtgacagacttctgtgtaaacataaagaactagttatttttaca

SEQ ID NO: 229568 - DNA, 484 bp, Homo sapiens
caattgacactgaggcagctaagagtccatgaaaaattgaagagttaatgaatggaagagtcaggattcatatccaaggtcacctgatcaaggccaagcccttgctcctctgctgcctcagtagaacatcatttctttaattaagatgctagaagttgtaaccgaaatttatcacggccacacaatactacatacttcaggatttcagctacaagacatttcagaacaggcaacgctatagctttagagagcagacgggcggctgccagggactgggcttggaagtgcgttgagtgcaaagggcacaggagacttttcggcttgtggaaatggcctatgtcacgatttggtactggagttcaactgtacccatttgtcacaacaaaatgaactgtatgcttcaaaaacgtatgagtaatcatgtatgtaagttatatcttaataaggctgatttttaacaaatatattgtgaataagcttcaac

SEQ ID NO: 229569 - DNA, 430 bp, Homo sapiens
atagtagctaattgatgtaagaagtagctaagcttgagaaggtgtaagtagaatttctttatctgtgtccctcctccaccaagtaaaacgaagccatttcataatctaccatttataacttaactaattatgacacccaagtcagttctgggcaagcaagaagtatctctgggcaaagagtcctggcgtaaggttcctgggcacatctttgagtgcctgttaaagttaaacttcatatcatttccgggtaggattcagatgattataatacttagatgatatttataaaactaagtattttagctcttgaagatatctgctgtcattactgaaacaccactggggagtgtgtgtgtgtgtatacatgccagtgacacttccagtcccctttgtattccttaaataaactcaatgagctcttccaatccta

SEQ ID NO: 229570 - DNA, 507 bp, Homo sapiens
atttggttttatattttataatttctctttatatttgtgtggtttgtttctttattcttttttattctattttcaattttcaatgttttccttcttgccattaatgaaatgggattttatcaaaacattgacataaaggttcatattgctatttcctatatatttataattgtggtttttatttccttttgggtattaaagttatttaagacagttctttttaaactcccaggaggctgcttttccaattgtttgtacttgcactttgctagtcttattacattatagatattgagtgaagttttcataatttctactattggtaatttattgtttactttgttgccatacatatagccatgtttataaatgttccacatgatattcttcttttgtagttgagagaattggtagcatcgcttatccttatcctttctgttttaaattcaccataaaaatgtctctttccaaaaagtcgacgcggccgcgaatttagtagtagtaggc

SEQ ID NO: 229571 - DNA, 652 bp, Homo sapiens
ataaaaaattagccaggcgtggtggcaggtgcctgtagtcccagctactcgggaggctgaggcaggagagtcgctggaacctgagaggcggagcttgcagtgagccgagatcgcgccactgcactccagcctgggcaacacagcgagactccgtctcaaaaaaaaaaaaaaaaaaagtagcctcagtatctcattttaccttacactaaggcaatctggattcacagcagttgcatccaataactttaaaaaaaattagttttacaattgcaggatgccttttaatttatctaattaggagctggcaaaaggtaagatgattggctggattcagaatggaatctgttggcttctgggacctcctcatcctcctgcatagcaaggactcaaggagggactattgccggagtttatatcttcctcccagagtagaaaatactttaaaatgtatcacataaagcctgggcattgttaggttttcattccaaattttaaaacagttactttgaaattgttgacactggcccactttggtacaaatggtaacactgtaaacccgaattctccaaatgagcttttccacttagtaaaataagatagaagtagaaccaactgaagaacttgcaaaaaaattgagtgatcccatggccgg

SEQ ID NO: 229572 - DNA, 292 bp, Homo sapiens
gcagagagaccacacacacgcagagagaccacacacatgcagagaccacacacacccagagaccacacacccagacacacacacagacagagatactacagacacccatagacagagatatcacacacagaaacacacatgcagatacacccatagacacacagatgccacagaggcatacacagagaaacacccgtagacacaccaggatacacatacacacatagatacaccactcatagacacacaaacacacacccataggcacacacccataggcacacacacaaag

SEQ ID NO: 229573 - DNA, 1085 bp, Homo sapiens
ggaatgtgaagaaacatgagacagtagccagacacccaggaacaccttctgtcccatgctctgaaattcttttacggctctactttcccttcagtgatctttcttcaagatgacagtgacagccaaaggctttttcatagcttggaacagaccgtatgatctgattgttcttccattgctttggggacacaggaatatctgtgtatttttgagaaactgtttgttaagctattttttaagttccctttttgcattatgtctaaggcgtgtaagagcagtgggatttggctcagaatcccaggaacaccagaacagatgttacatgttttctgctttgtgatttcccattctatagaggttttaaatgtcattctatagaaatttatactcagtaattttataagaacactagacatctccctaaatgtaagaaactgttattttttattaaacatttattgttttagtataaacagagactggtaatttaaactctgccccaaattctcaactgtagtgtggtttagtgtatctgttcacttctgtattagtcagttttcacactgctaacaaagacgtacctgagactgggaagaaaaagaggtttaactggacttaactatttccacatggctggggaggcctcagcagcaagagaaaatgaggaagaagcaacagcagaaacccttgagaaagccatcagatcccatgagacttatttactatcatgagaatagcacgggaaagactggcccccatgattcaattacctccctctgggtccctcccacagcacgtgggaattctgggagatgcaatttaagttgagatttgggtgggggcacagccaaaccgtatcagcttcctagatttcttaaatatgctgtgtatttgggtagcttagagcagtgctcagcatatgtttaacttccacttgctaccttagtttataataactgtaattttataattttgtttggaatgaccggaactgttattcatatatatgttggtgtgtatacatttgtgtatatatgtacatgtgtgtaacatggattttttcacaaataaaaagtgtgtaagta

SEQ ID NO: 229574 - DNA, 199 bp, Homo sapiens
tgcagtcctagctcctggtggtgagatgccccaatctacctccttgtattctagaacacgctctcccactgcacaaggctcattattcaatggtacaaatgtacattcaagataatcacatcattattatttaattcaatagtactccagcacactcctccctccaacaaaaccagcttttctggatcctctaagaagc

SEQ ID NO: 229575 - DNA, 546 bp, Homo sapiens
cattgtagctattgtgagaaaatattttgattataattatttaaaagcaatacaggacaccctggatgatggtaatgactagggcaatggttgcattccagtacttaagtatgaaataaggaattattactttctgggtgaatataggctagaattgaagacaaaaaaatttgttgcttatcttcagtacttccagcttcatagataattactcttaaaaggaacaagaatgactgcctctggatggaggaattggatagcaatgggccgtgggataggagacctataaaccttcatgctatattattttgtgcctttttaaattttgaagaaaaaatattcatttattcaagatatatgtaaattcagtaaataaaaagatatgatagttatgaccaagtggaaatatatttcctgatgtaaaaggaatcactgaggaaaaagattaaaatattttggctgtcaactcgtagtttaaaaaaaattccttgaaagaggtagagaaaagtcaagttgcagtcccacacagagcctctgggcgccgcc

SEQ ID NO: 229576 - DNA, 349 bp, Homo sapiens
tgctttgtaggcctggtggtaacagccaggttctccaagctggtctccaagtcactggcttcagaaccggccctcccgtctcagctccttgaccctccaggagcccagcagactccaagcccgtcttcggatggggaaaggagacgtgcctggctgtctcaggcccctattaggtcacaaggcagccctgcctgtctgccgactaaccctgccctccctgggctgaaaaacacagagaaaggagctcggctccatctccatccctggcactcaggagccaggagccagggtgtcctgtggtgatttatgcctaatgcagcctgttttcccctctccctacggcatgaga

SEQ ID NO: 229577 - DNA, 520 bp, Homo sapiens
agtgaggtgtgtgaactgagactggtcctggggctgcagccttgtgtgccggaaccctggttagccagtcatctactctgtgaccccagtgaagtttgtatatgagtttggctaagttaataccaactgctgtatccaacaaactccaaaatttaaatgattcacacatgaaaactctttttcactcataccaaggtctgtgtgggtcagcagggaactctgtaccacacagttattcaggacctagagtccttctgtcatcaacctgttgctttaaggttgtcctgacatcttcttgctggtagagaattaagggaataaggaaagtcatacccacttccagacctcccctcacatctcacccatgggaactgggcatttggctgtacttgggtccatgagtctaggaattgtggctgagctgcctgtccaaggagaagagcagatggtctggtgagcacctactcagtccactacactcagtctgttcctgaaaaatgatattagaaattatttttat

SEQ ID NO: 229578 - DNA, 438 bp, Homo sapiens
ctgactcaagggtggtctattactcccttaccaaggtcctcctctgcagaactgtataagtggcactccaggatgttggcccttcttgctagccatggcctttgaggctccccagacacatgctaagcactttaaggaaaggggccatgtcttctctttgtatcttctcacagcaaccactgcatgaatcaactttctagcattctcctgtcactagctgtgtggcctgggacacattacttaacctctctgggctgcaggctatttgtctctaataagcagataatagaagtacctgcctcataggcttattatataaggaataattgagataatgaacgtgaaacatttagcacagtacctgacaacacacactaaataaatattacttttaatggtgatattattcaccacaataaatatattgaaaaggcatta

SEQ ID NO: 229579 - DNA, 469 bp, Homo sapiens
tattatagtagtcttggtagtgaaacatgtagatggttttgctcattttttcccaaccaatataagcttaaataaaatcctattaccaaaatttgagtcttatgtacttttagttgtctagtgtttcagatggttatctttacatcctatcttctcaaaggtatatcttgaaagcaaacatttcagccaggtggggtggttcacacctgtaattccagccctttgggaggctgaggtgagactgcttgagcctaggagttcgagactagcctggacaacattgtggtaccccacctctacagaaattttttaaaaattagctggccatggtagcgcatgcctatagtcatagtcccagctacttaggaatctgaggcagaggattacttgagcccaggaatttgaggttgcagtgagctatgatggcaccactacaccctagcttggacaacagagtgagaaccatttc

SEQ ID NO: 229580 - DNA, 312 bp, Homo sapiens
  misc_feature (24)..(24): n is a, c, g, or t
  misc_feature (27)..(27): n is a, c, g, or t
  misc_feature (118)..(118): n is a, c, g, or t
ctaaattcgcgccggcgtcggacnccnagtcagaaatggcaatcagaaaaataatggcactatttttaggagagagttggaggattcgtgggaagtaggagatggccagaacaattcnccatttttagctcccccacaaaccacagactccaacacccaatttcccttcctttttctccctcatgcccaggtacaaaatagaaatctctgtgtttattaatggatgggagggaaagagaaattgaagtctcactagcagcttctgggtcaacactttgcttgtcagggatattcaatattatctgtcgacgc

SEQ ID NO: 229581 - DNA, 530 bp, Homo sapiens
agcaagttacttaatctctgcctcagtttaaatgtcctaagtttaaactcttgttagccgtgtttgacagaggaggaaattgaggttcagagtggttaagtagcgtgcccaaagtcacctccctgcagggaggtatgaggcacgatgtaaacagatcatctccctgttcatctcctggaggactggctccccagagcgggatctccaaactcaggacaaagaataacatggagttatccaagtgaaggggaggaaggtggtggcatgaaggcagtgtttcaggcagaaaatatcgaaaatcacacgtgcaactaggcactgaagcggttccgagcgacctggagcactagatctgagctggggctggaaaattgggtgagtgggttgtgaccaggttacagaggccttataaacctgattaaggcattcagactcatgggtttttttgctgttttggggggttattttttttgaaacaaggtatcgctctgttgccctggctggagtgcagtggtgtggtcacagatcac

SEQ ID NO: 229582 - DNA, 424 bp, Homo sapiens
gtcgctttttgactatcagatgggtgaaaatgaaaatgtatgacaacgtatctggttcaagcaaggctatgaggaaacagacattctaatacattgctggtgggaatgcaaactgatacaacctttctgaggagcagtttggcaacatttaacaaaactattggtgcctcgacctgttcaccgaacactttaaggaaacctgccttaaaagatagacttctaggcctgtaatcctagcgcttcggggggccgaggcgggtggatcacctgagatcaggagttcgagaccagcctgggcaacatggtgaaagcctgtctctactaaaaatacagaaatcagctgggcgcagtgatgcatggccgtaatccaaactacttgggaggctgaggcgggagaatcgcttgaaccccaaaggcggaggtt

SEQ ID NO: 229583 - DNA, 357 bp, Homo sapiens
cggcacgaggataattcttgccacaattcagttttcttcctcgctttgaataataacctctttaaacctgtgacaactttttagtattctatagcagctgctttctgggagagactctagtgaaggaactccaagctggttattctgtgatattcatgagactttgctgggatagactttatgctgcatggggtgatactgtttgagaaactccaccgtagtgctccaacattagtgtgcttttctaagtgggtaagttactgttgcagtatgccaaggagacctggacacagtgggagaaaaatgtccagtgaagggtgttcatctgagttccactgaccgagacatttagcttaa

SEQ ID NO: 229584 - DNA, 456 bp, Homo sapiens
agctcttctttaattcccctttgcaatttttaaattttcaatgtacaggtcttgcacatctttcattagatgtatttctaagtaattctggtatgttgatgctattataagtggaattggttttataaatgttttcccaattgtttgtcactagtgtgtagaaatacagctgattggctgggtgtggtggctcacagctgtaatcccagcactttgggaggccaaggtgggctgatcatgaggtcaggagttcgagaccagcctgaccaacatggtgaaaccccatctctactaaaaatacaaaaattagccaggcttggtggcggatgcctgtaatcccagctattcaggaggctgaggcaggagaatcgcttgaacctgggacgccgaggttgtagtgagctgagatcatgccactgcactccagcctgggtgacagagtgagacgtcatctca

SEQ ID NO: 229585 - DNA, 552 bp, Homo sapiens
gatgctaggaaatgtcaccatgcaccactgtttttttatgctctgtataatcaagaaataatgtctgtgtcagtctccttacatttgactccatagtgatctcattttttctctaaaacatcgagaataaaattaggacactttggatttttttcctcctgttttcattttacccaatttcttcaactattgaaggtcagattataaaataatttatcattctgatgcagaactatcagttgagtgagttaaatgtattctttttaatgtgctttttttaaaatccatttccatcagaaactagagcttatttttttttaaatatatttctgtgctgagaaactactaatattttttatggcttatctacttagaaaaaccataggtttggccgggcgtggtggctcacgcctgtaatcctagcactttgggaggccaagacaggtcgatctcctgtcctcaaatgatccaccacctgggcttctcaaagtgctgggattacaggcatgagcaccacacccagtcctaaatgcagaattatttacagcacga

SEQ ID NO: 229586 - DNA, 198 bp, Homo sapiens
gtgggaatcataaccttgaattggttgattttccccttatgtaaaagacaaaagtcatcttgcattaatatgtcttttgactggatttatattgctcttggggatgataaaagctcagtgaactgagcatctaacaggcaatgaaagttctctgtgtatttaagactctgaattggctgtcattttactatccacacc

SEQ ID NO: 229587 - DNA, 602 bp, Homo sapiens
ggtgattcgcctgccttggcctcccaaagtgctgggattacagctgtgagccactgcacccagccattttttaaaagtctcacttttgagaaaagtaaggtgataaagcagcctgcctttttgaatcaaagaaaatctgttaattgaagtgattataacatagtttatgctattgcaataagttcttttcacaatttttttttttttttttgaggcggagtctctcatctctgtcacctgagctggagtgcagtggcgcgatctcggctcactgccacctctgcctcccaggttcaagcgattctcctgcctcagcctcccgagtagctgggattacaggcacgcatcaccacgtctgggtaatttttgtatttttagtagagacaggattttgccatgttggccaggctggtctcgaactcctgatctcaggtgatctgcccgccttggcctcccaaagtgctgggattacaggcatgagccacctgcccagcttacacttttttttttttatttttggaataatcttaaatttacagaaaagttacaagtagagtgcaactctgtactcataaactcctcatggtttcttttgttaaagt

SEQ ID NO: 229588 - DNA, 237 bp, Homo sapiens
ccttacttgctctctggattgggttttatttgatgtggggatgggaacaccacgtctggatgacctgggaccctaacctctcataaactctgagtcactgaggtagaggtgggaagagcagggcttcttcctgactgccctatttgggctttcttgctttgtttctttccttcctttctttctttctgatggagtttctctccagccttggtaataagagcgagactctgtctcaga

SEQ ID NO: 229589 - DNA, 664 bp, Homo sapiens
tttattttgtgtgtccccatgttattagttttactgcccattaatcattatatattaccaaatatagtaaagcgtgcttacgaggagatagcaaagggtccggccatgacagtcacaatgaagccatgccaggaggaagcctaggggtagcaggcagtgccccctgtcccgtccacccagacacataaccctgagcacctcctggctcccaagtgcattaagatatgttcctgcaccctatccctcctcgtcagagaaaaacctggggaaaatagttctgttcattttgaggacagatgactaaccatgctaaaaatgtatatgaagaaattagaagaaatttgaaattgtaaaaagaaaggaagagcaagagattttattagcaatgagttccattgctgcaaaatataccactctctttccctttaatttattctatgtgtgtcttccatattattttttctctgaataccaatatcatcaagcgtttactctggtaaaaaaacttcatggctttctattgtcccctaatttgggccttgccttcttagccagatttcaaagcccttcatgcctttactttatcctttctactcatgtttatttcccaccaatctctaccacattgttttttgttactagtcactccatcctcccggtgtcc

SEQ ID NO: 229590 - DNA, 429 bp, Homo sapiens
agtaaatctctgaatcaaagagattttttggagtcatcatttctccaatgagtgtcttttagatggtaagctcatcccagcctcatttttactcacatttccccccaccccgacatgcaaacagtaagtgatttcaaatacctagagaggtatttttcaaatcctttgctgttttcatagttagatagctgactgtagctacagaaagctctgctgaggtcaatattggttgttgatttcatgccggtgtctgctggactctcaggctaccttgcacaagggtttctcttcctgtgcaatggtttgtactgtgaacctcttatctgaaatgatcatcagtccttgtgtggtttgtaaagaaactagttcattttgaaatagctcaagagaaaagaagcactcattcttaggaacaagagtgctcgctaa

SEQ ID NO: 229591 - DNA, 407 bp, Homo sapiens
gaaaaaataagtagttgattctacaatcagctccaaaatcaaaccaagaggcataaacgttgattgagttgtttgatatcaggagaaattgcatatctaatcaaggcatattattagcctcaattaatctgtgaagaaaaaaataaaagtaatgggatcatctgacactgaatgatgagacaaaaaagagactgatgaagcaaaaagatttgggtgaaaggtcatgattagggtgaaaagtcatatccatacttattaaaaacctatattaattaaaattcagggagtggaggttgcagcgaggcgagatcgcgacattgcactccagcctgggtgacagagtgagattctatctcaaaataaaataaataaataaaattcaatagagggttactgcaatgctggtt

SEQ ID NO: 229592 - DNA, 400 bp, Homo sapiens
atccacacagcagaggtgacatgaaagcggtgttcctgacagaagcatatatctgaaaacagggctgcaaagttacaaatgaggcatgaccaaaaaggggacatctatgaagggtttgacttatcaggtgccttttcttgggatacaagaaaccccgtatttagcatggagctatacatttcctctttctatactagaattccaaaattttatagctttatgtgatggtttttggaagaataagagaaaaacgcagtaaaaagatgcatggcctgcctcaagtttaactgtttaagtttaattgcctctaaatggcaatatctaggagttcactcactagcagctgagttaatacaagaccaaagcagaatttgtatggttccaactcaaaatcttacca

SEQ ID NO: 229593 - DNA, 167 bp, Homo sapiens
aatatctgagaatcagctttcttatttaatctgagtaaatgaaaggtatgtgatacctggagtaatttgtttgatctcctttctgtaactgttggttttaacaattccaaagaccaatgtttttgtgaaacaatgtgaaggaattagaagacttaagacagtaagta

SEQ ID NO: 229594 - DNA, 426 bp, Homo sapiens
agaccactgctcttttataaaagttattttttctcagtgggtttttggggaaagatcaaaaacatgaaaactagccttcggtaatgatggaactgatagattagagaaaatccactttatttattgacttctcttttcttcctactccattacctccaggacaataagttctgcagtgaaattattatgtaaaaaattgcagacagacagagtaaagcttgactggaaggtggagcataaagatagcacttttaccttctccctcaaactcattgcttttctcattgtcattacatggataaggagttctaaaagtaaagcaagaggcaagatatttattcattaattttctgttcattaatcatcttctattgtgatgggggccctggaaatacagaatgaataaagcaaaattataacctagga

SEQ ID NO: 229595 - DNA, 617 bp, Homo sapiens
ccagtgcatgcagcccccagtcatgtaccccctgcttgctcaatcgatcacgaccctctcacgcagacccccttagagttataagtccttaaaagggacaagaattgctcacttgggaagctcggtttttggagtcctgagtcttgccgaagctcccggctaaataaagcccttccttctttaactccatgtctgaggggttttgtctgtggattgtcctgctatgctgtgggacaaaagaatctgaacaacatccttcagccctagaccttccctctgacagagcctacccaatgagagggaaccagaaaaccaaccctgacaatatgacaaaaccaggctcttcatcaccccccaaaaattacactagttcaccagcaatggatccaaaccaatatgaagtccctgatttacctgaaaaataattcaagtggttagttattaagctaatcagggagggaccagagaaaggtgaaatccaatgcaaggaaatccaaaaaatgatataagaaatgaagggagaaatagtcaaagaaatagatagcttaaagaaaaaaaattaaaaattcaggaaactttggatacacttttagaaatgcaaaatgctctggaaagtc

SEQ ID NO: 229596 - DNA, 283 bp, Homo sapiens
ctgtcccatcccccaggtatatctttcccaccagctatcttctatccgccagtggtcccccaggcctcagctgtcacccaccacagtggacatctgacagtgtgctgcggttttccgtctcctttttccactagtctgggagcccccgggggctgagctgtcaccccacccctagctttaatcttgccctgtcaaatatcctcagcatctccccttcctaacagccccatctcaatctttctccccagcttctgccctcaaactcccaagcctcagcggccgc

SEQ ID NO: 229597 - DNA, 193 bp, Homo sapiens
gtatcataccctgaaattaagcatgtctggtttatgcttgatatttgtaaccactgtgtaactattcttatttttctggttcttccattgtagactcccatagcagtaaatacgttacatacgttcatgctttatttttttccaattacaattataccactaaattcactgaggaaataaacattacattttt

SEQ ID NO: 229598 - DNA, 519 bp, Homo sapiens
cgatagagacagaaatgtttattttcaccgatgaccctcagtgtttgaatttttgctgttaagtctataattctataaattaaaatgttaataaataacagaacagttaatgatgtttctctcctatctttcacattttacaattttacattctgctaccaaagaaaatgttagtctgcctcttctggtgctggagggggtctcccatggggactgggtgggggggtcagccaattagccattccagcaaataacaggagggagaagtgaagggctggaaggggttatccagaggagggagagcaggactcaggggacaaggagaagcgaatagggaactctgggagccaaagcaaaaggagatcaggtccactcacagagaaaaacggcaggcctagaattagagaaaagaagccctcccacccaagaaacaactcttacacataggattacatataggatggtttgtaaagtaatctcaggggcataaaggcagaggatgagcagaaaaaaaaaaca

SEQ ID NO: 229599 - DNA, 883 bp, Homo sapiens
acatgctttgatcatctatgacgacttatccaaacaggctgttgcttaccgtcagatgtctctgttgctccgccgaccccctggtcgtgaggcctatcctggtgatgtgttctacctacactcccggttgctggagagagcagccaaaatgaacgatgcttttggtggtggctccttgactgctttgccagtcatagaaacacaggctggtgatgtgtctgcttacattccaacaaatgtcatttccatcactgacggacagatcttcttggaaacagaattgttctacaaaggtatccgccctgcaattaacgttggtctgtctgtatctcgtgtcggatccgctgcccaaaccagggctatgaagcaggtagcaggtaccatgaagctggaattggctcagtatcgtgaggttgctgcttttgcccagttcggttctgacctcgatgctgccactcaacaacttttgagtcgtggtgtgcgtctaactgagttgctgaagcaaggacagtattctcccatggctattgaagaacaagtggctgttatctatgtgggtgtaaggaggtatcttgataaattggagcccagcaaggttacaaagtttgagaatgctttcttgtctcgtgttgtcagccagcaccaggccctgttgggcactatcagggctgatggaaagatctcagaagaaccagatgcaaagctgaaagagattgttaacaaacttcttggctggatttgaagcttaaactcctgtggattcacatcaaataccagttcagttttgtcattgttctagcaaattagttccatttgtaaaagggttactctcatattcgttatgtacagaagtcacatgaaaagtaaaggttccataatggca

SEQ ID NO: 229600 - DNA, 742 bp, Homo sapiens
cctgaatggtattgcctaggttttcttcgagggtttttatggttttaggtctaacatttaagtctttaatccatcttgaattaatttttctgtaaggtgtaaggaagagatccagtttcagctttttacctatggctagccagttttcccagcaccatttattaaataaggaatccttttcccatttcttgtttttgtcaggtttgtcaaagatcagatggttgtagatgtgtggtattatttctgagggctctgttctgttccattggtctatatctctgttttggtaccagtaccatgctgttttggttactgtagccttgtagtatagtctgaagtcaggtagcgtgatgtggggcaagtttcttaaaggaggtagcgcgtttgaactgggcagtgaaagacaggtagaactctgacagctagtggtaagagaatcggggaatagtattcctgggggaaggcaggccagaatgacatgtttgtgcaaaggctgagaggtgacagtatggaggcatactcagtaaatggtgagtaaaataatgttaaagaaggaatcactaagggccacattgtggaggagtttgaatccagctgagtttgaactttatgttgacttaagtgggaagctatggacagtctttgagcaagaaattcaaatcaacagcaaatttttatcaagagactactatgtacctggcattgtgctaggttccaggaataaaaaaaaagaataaatatg

SEQ ID NO: 229601 - DNA, 613 bp, Homo sapiens
taagcaattcgatacttggttttctctggttttgtttttccagttgtgatatagtcttatcacattatgttgacctaataaacccaaattgagccaagtggctagttgggagactgagtcaagaggatctcttgtgaccagagttcaagatcagcctggacaatatagcaagacctcatctcaacaaaaatagttttaaaattagcttggtatggtttcacaaccctgtagtcccagctactcggaaggcggcaatgggaggattgcttgagcaatccatttgaggctgcagtgaactatgactgtgccactgcactccagcctgggcaacaaagcaagaccaagtctctagacaaataaacagaaacccaattagtccatgtgaacatcctctattaccagtttttttgtgtgatgtaaaattgctggtatctctaagaagcttcattttactggctatgtgttttggctatggattaaggagatttcccaaaatagttttctcttttagtacaaatcttttttaaaatacatagttaaaatgcatgtaagtaaatagcattatctttgcaaaatgaaagagctttttatttttattccagaatgtaatgcg

SEQ ID NO: 229602 - DNA, 511 bp, Homo sapiens
tgtttggtatttctgagctgacatgtgtgcacagagtagctttctttggtccagaaatgaaaaccccaggcacatagatgcaaatgatggcaggtggacaccagtcagatcacagaaccaactctgcagattaagggtagggcactttatggcatttgctgtgtttgagaaataagatattctaggatttagagtttctaaagattcaacgaaatgtgtgctttgattcatgttgctaaaattattcaaaatattatttttttaaatgttctcaagtgaattgtctggggaatataaaatatatccttctctgcaagttcaaggtcaaatgatcctttggtcctcattgtaaccataatttctcaaggaagaatatcacccatatagatggccaaagatgatgcactaacctcagagaaatattttagcactttgttcaatttcgacagaaaatgtaaagtcaaacttgtttcctgggatttgctgcattccattacaaataaattatagt

SEQ ID NO: 229603 - DNA, 348 bp, Homo sapiens
tggagacatatattattttgactgtgtgtcctctgtcattaaagatggactatactagctgggtgtggttgctgatgcctataatcccaccactttgggaggccaaggcaggtagacggcttgagctcaggagttcgagaccagcctggccaacatggtgaaaccccgtctctactaaaaatacaaaaaattatccggtcgtggttgcgggcacctgtaatcccagctcctcgggaggctgagggaggagaatcgcttgaacctgggaggaggaagttgcagtgagccgagattgtgccattgcactccatcctgggcaacaagaggaaaactgtatctcaaaaacga

SEQ ID NO: 229604 - DNA, 453 bp, Homo sapiens
agaataaacttgtctgtttctacaaaaagccatgttggtatttcgagaggaattgcaatcaacctatggatcaaattgagaattgtatccttattatgttgaatcttccaacccacgaacatggtatgtctgtctatttaaatagttttttttttcacttctttcatcagaattgtgtgattttttcaacatcagatcctatcacgttttgttaggtttatacttaaatatttcctttgctctcaagagatttaaactgttattatttttatttcagtttttacatgtttgttgttagcatacagaaatgtgattgtgtttctcatgttgatctcatatcctgtgaccttggcaaactcacctattaattttaagaggttatttgtgtattacttggcattttccatgtagataatcatgtcatctgcaaatatggagagttttatttctacc

SEQ ID NO: 229605 - DNA, 896 bp, Homo sapiens
attgaagagggtaggaagaactagttttactttatctgtattacccctccctcaaagcagcactgctcagagccaagagagactctctcacctgtaattccttctaagggggaaagcaagagcatagtaagtaagcacccagctcccccagccatccacaacactgcccaagagccccacttctttctcacctcacccagattgctgagataatcagcatggctgagagattgggagaggctgagagcaggaaagagaagctgctggccctctgaagtgttctacagactccatcaggaagcccatccacgagctgcttgagacacctcatctactgttcccaaactctacaccccccacccccagactgagtccctaaatgtgcccccatggacagtgaatgcaagcgtattatgtagacagccagctcaactctgtgggattgggagaaggtacacaaacttgagtatttcaggacaccatcctagggaaaacaaacaggaggctcttagcacctaacctagctttgcaggattgaaagaaggcatgcaaagtcaagaattagccctcaagagggaaaaagaaatgtagagcaggtgcatccatagaaaaggattaagaaagtctcattatccatagacaggctgactggtgaaggcatttctctcctgatgccagtcaataaggattggaggaggagatgactgcctccttcttcaaatgtgaagacagcatttgaagcaacaagacttcaaaggacagcacttcaaggaacatgaaaagttaaggagccatgacatcacaaaggaacacaatattccagaaagcaactactaaaaaatggagatctaaaaatgacctgacaatttaattgttttaaggaagctcagagagct

SEQ ID NO: 229606 - DNA, 501 bp, Homo sapiens
taagttgctctctacaatgaggttctagttgatactccactgtccacttaagtataagagagttttccttattctacatcctcaccaaaatggtgagtgtaaaatattattccattgaagttttaatttgcatttccatggctactaaagaagttgaacaccttttcatgtctgcaggacatttgtatttcatcttctatgaatttccaatctactgtcttattattattactggttggtaaaatattcttcatatatcctgattattaatcctttttagttatttttcctgcaaatattttctcccagatgggttatctatctcatgctgaatttcaataactgtacattttttattttaatctagacatatttatcaatctttttcttttacagttcaaatttcaagtcttgttgaagaaatcctttctaccttccctgccctagtatcataaaaacattctccgtcgacgcggccgcgaatttagtagtagtaggcgg

SEQ ID NO: 229607 - DNA, 383 bp, Homo sapiens
aaatttacttattatgaggagtcggctcatgtaattatggaggctgagaatcccatgatctgctttctgcaaaccggaaacccacagaagccagtggtgtagtttgaaggcctgagcgatggtttccagtctgaatctggaagcttgaaaaccaggtgcttcaaggatgggagaagattcatgtcccagctcatgcagtcagtcagaggaagcccaaatccagccttcctctgtctttttcttctgttcaggctttcaacagattggaagatgcctgcccatattggggagggctgccttactgtccaccaattcaaatgctaccctcttctggaaacaccctcacagacacacccagaaataatgtttaaccagacattggg

SEQ ID NO: 229608 - DNA, 318 bp, Homo sapiens
ggaggtttgcctggttttagatgaaacatacgcctttgaagcaaagagccaccgtagctaaaaataccttttcctggctgttgatcctctcatttgtaaaatgcatgtttccattgttaaacctgcagcagcccctctagagaggaaagctccactatcgtggccaggctggagcacccatgccctggggaggtagcaccttccccagccctgcccgtgggctccgtcgccaagcctctccaagaaggagtccaagagaagcacacagaggattctcaatactttattttctgtttagaaatattaaaccacatacaa

SEQ ID NO: 229609 - DNA, 552 bp, Homo sapiens
ccaggaacaagacaagaatacctactattgctactttaattaacactgtactgcaaatcttagctagcagagaagacaaaaagaaataaagtacagatagctcttgacttacgatggtgcaactttaggatgatgcaaagaaactgtactttgagtacccatacaaccatgccgtttgtcagtttcagtacagtattcaataaattacatgagctggtgaatacctgatgataaaataggctttgtcttggataattttccccaactataagctaatgtaagtcttctgaatatatttaaagtaggctaagctaagctatgatgtttgccaggttagtttattaaatacatttttgactataatattttcagcctacagtataagtattgcaacagaagaaatcaaactgtcatttttcaagtgagcctcaattatttaaccaggttactagatacaaaatcaatatacaaaagtaattatatacccctgtatcagcagcaaacttaaaaagtcatttttaaaaaggatactactggagatagccagccaaa

SEQ ID NO: 229610 - DNA, 802 bp, Homo sapiens
ggctgggctttaactcctgggctcaagtagtctgcccaccacggcctcccaaagtgttgggattacaggagtgagccaccttgcctgtcccagagcctgcctctcttaactgctgcactagactaccttcttattttaaaagttagcctgcatttctcttacctgcattttaaattttattgagtagttattttatgagcagtctttgaaaaattttcataaagcgggctccccctgaaattttataacccacattccagatttaccagctgtgaatgtcttgccacacctacttgatctctcgctatgcgcgtacacagtttccttcttcgaaacaatccagaagtaggctagcaatggtcacccctacatacttccgcacacatctttcaagaacaggacaccattaccacacccaagaaaaccagcatttaatgaatttattcaggagtatcatccaacatactcaaatttccacagctgttccgaaagtatccttcaattctggatccattgatggttcacaggttgtatttggctgttacatctttttagttgttatccttcagagtaaaactggcctgcccctctttctttctttacaatattgactcctttgaggaaccggggctggatgtggagcattctccattcatctgattgtttccatgtgaccagattcgggtcacaaatttctggcaagaacccttcacagatgaccatgtattggttattaggtaacaatagattactcaagtagagaactgggaaattgtcctttgtccatcacaatagatttttt

SEQ ID NO: 229611 - DNA, 926 bp, Homo sapiens
ctgaagtctgggattacaggtgtgagacaccatgcctggtcctgtctcagttctgactagccacatgtggcttggtggtagctatagtatcggatattgcagaagaagaagttggttagattcagatttaattattgggggagggggacaggaatacttaataggtggtgctgtttactcctgttgcatcacgtcaggaggtgtgtagtgtctggttgtcccactcacagtgatgttgggatgtttgtctgtatctgtgttaaaagttagcctgcatttctcttacctgcattttaaattttattgagtagttattttatgagcagtctttgaaaaattttcataaagcgggctccccctgaaattttataacccacattccagatttaccagctgtgaatgtcttgccacacctacttgatctctcgctatgcgcgtacacagtttccttcttcgaaacaatccagaagtaggctagcaatggtcacccctacatacttccgcacacatctttcaagaacaggacaccattaccacacccaagaaaaccagcatttaatgaatttattcaggagtatcatccaacatactcaaatttccacagctgttccgaaagtatccttcaattctggatccattgatggttcacaggttgtatttggctgttacatctttttagttgttatccttcagagtaaaactggcctgcccctctttctttctttacaatattgactcctttgaggaaccggggctggatgtggagcattctccattcatctgattgtttccatgtgaccagattcgggtcacaaatttctggcaagaacccttcacagatgaccatgtattggttattaggtaacaatagattactcaagtagagaactgggaaattgtcctttgtccatcacaatagatttttt

SEQ ID NO: 229612 - DNA, 518 bp, Homo sapiens
gaggtgaatggttcgtgtttatatccccccattgccttttgtttgtagggacatcttgctggccatgttgatttgaacgaaattctcccctcatgctactccaacccccgataaatagaacgttcctcttaacagtaccaattactcacgcctcacgaaattagatgaaagggtgcccccttttccccgcttttctcccaccccaatctttacctgatgatggcttctttaccgtagcagatataccactacacaagcagttgggggagggggtggtggaacccttatgactggattgtgacaaatggggctccgcttgaataattttggtttagtagcaggcagttcttaactaacgcgtattatttcgaggctctgaacgcgatcttctctgtggcttcctgtgtgtgtgaacccagcagctggttatgtctcgacccagagaactgacatctctgtcagagaggagatggggatatacaattgtaaatctttggggagagtcttctttttataat

SEQ ID NO: 229613 - DNA, 521 bp, Homo sapiens
aaaatacatttttatataataaaataatatttgagtcaggtatgatagctcacttctgtaatcctgatgcttttggaggccaaggcaggaagattgcttgaggcaggaattcaagaccagcctggggaatatagcaagactcctgtctctacaaaaatttttaaaaccaccaagaggattgcttgagccccagagttcaaggccacagtgagctatgatcatgccactgtactccagtctgagtgacagaataagaccctgtctcttaaaaaaatatataaaaaaagagtatttgaaatcaaaagcaaatatacttaatagtaaaactggaatgatttccattaagttcaaaaacagtataaagatggtcactattgacagattattcagcatcattctattattctatctaatggagtaaggctaggagaagaccaattttgagattcaattaaggaaagctgttgatttttttctatacttatatcttgaaaataggtaacttttactgttggatagcg

SEQ ID NO: 229614 - DNA, 319 bp, Homo sapiens
tgggctgaaggccatgcaggtggggcctcggcttcacatcttttgttaaatggattttgtggctgttaggacactcttgagacccacatgtgaaaactgtcagtctgttatcacttaaggcagaagaaaattgcccttgactctgggctggcagcaggtggagacaaggcctgacagctttcctgccatgtggcacacactttgggagcagagccatagcccaaagtggaccgcccttgagctagaagtgttgactcaggcgtgggaaggtgtagagcaggcgggtcacggtgaggaaggagtggggggctcagttgtc

SEQ ID NO: 229615 - DNA, 415 bp, Homo sapiens
actaggaagatgatgaaaaatcagagggcagggacccttatgcaatagtcaggaacaaggatgaattagaatctatctgcatggcataccctcatttatgtgccaagccttcgttaactgccaccacttcttggaagcctgtcctgactccttcagatagtatggaagagcattctgcaatgctcctgtagctccatcatagcaattcttttattttaaatgtttatttctactgttttcctactggactccatactccttgaaatcagggatgaggttttattaactttgtgtccctagtgcctagaacatttcaaccatactcaaaccttcatcaactcagttcacagtcaacagatacttactgagcatttagtatatgccaggcactctgccaaggcactgggacagcatg

SEQ ID NO: 229616 - DNA, 470 bp, Homo sapiens
tgagatggagcttcactcttattgcccacgctggagtgcaatggcgcgatcttggctcactgcaacctccggctcccgggttcaactggtcctcctgctctcatcctaacccacttttagtttttcaaatggcagctgctggtccttttgaaaatataaatcattgtcactccttgtcttacaaatcctgtttgaggccaggtgcggcagctcacgcctgtaatcccagcactttgggaggccgaggcgggtggatcacctgaggtcgggagttcgagaccagcctgaccaacatggagaaaccccgtctctactaaaaatacaaaattagcgggcatggtgatgcatgcctgtaatctcagctactggggaggctgaggcaggagaatcacttgaacccgggagccggaggttgcagtgagccaagatcgcgccattgcactccagcgtgggcaataagagtgaagctc

SEQ ID NO: 229617 - DNA, 473 bp, Homo sapiens
ctgaggtctgtgaggtctagcaaattaattgaacccaatgagggagttacaggaaccctgattaatagtcagtctgtcaaaagcacaggaaaaacaacctggggcttgctgttggcgcccgaagtgggactgaaccctcaacctgtgggatttgccactatctccaggtagatggtattgaaactgaactggggttggaggatacccaggcggtgtctgctgcacaattgattgcttgctggcataggggaaaactatacatctgtttatttattatttgtttgtttgtttattgttttgagaggctcttactctgttgtccaggctggagtccagtcgtgtgatcacagctgactgcagccttgatctctgggagaatcacttgaacccgggagggagaggttgcactgagccgagatcgtgccattgcactcctgcctgggcaacaagagcaaaactcggtctcaaaaaaa

SEQ ID NO: 229618 - DNA, 411 bp, Homo sapiens
ttttaactcacactatgatttatttgacccatgggttatttagaagtgtattttaaaatttttaaatctttgggggcttttaaagatatattattgttattaattttttgttttttgagaccctgtatcaaatatatgtatatttggatgggataaatgatcaggtgtgtagtttagaaggctattataagggtgtcaataaggctgaattatataacatatattctttccatagaaaattaaaaggaaaaatgaaaaattctgcaaagaacagggtttgtatatgctcagtctgggctggggcatagatgggaatgagtaactcatgcacatcatcactgatcatcccagggtcccagtttacgttcctgtgtcctgtgctgctcactggccgctgcatgttcccagaag

SEQ ID NO: 229619 - DNA, 178 bp, Homo sapiens
cattcacccccggggcagctacattgtggttgatgttggatcccagactgacgtgcctatcacacagcacacatctgggaagtctcccttcaccaggcagtgggcgaagtgagaatgcaaactcattttaatgtcagtttgagccaaatataattagaaaggaaaatctctgactttg

SEQ ID NO: 229620 - DNA, 409 bp, Homo sapiens
tcctcctgcttcctggccagaatagactgtctggggggtatgtgggggagaccagagaggcaatgaggtgtgacaggagaagaaaggagctgggcagcaggagcctggattgagttctagttctgctgtacaatcttggaaatgtcctgtgcctcagtttcctcacctgtaaagggaaggtcctaggcaagataatctctaagttcccttctggttctgacaacctgtatatttccttgccctgtcgatgatgtctggtgcagggcctggcacagagtagatgctccgtataagcctgttgaaggaaggcaggacagactgtgcctgtgtgtgtgtcagggggacactgcccatcacagcagagaccatttgctcgacaactatttcttgccaagaattgggctaaacc

SEQ ID NO: 229621 - DNA, 527 bp, Homo sapiens
cagtaaaaggtgtttgaagctgtgggttttgatgagaaaatgcagtgctcagagagtatgtggctgaggacagaggactaggggacactaaccaagtaagggacagttgaagatagagaatgagaaaacaataggaaggactgagtcacaaaggccagagtggtgggtttcccaagtggcagctgtactacagaatggcccagggctcagcttcttactaaccttgtgaccttgaggaactggcacttctctctgcttccctttccttgtctatgaaataggataataacaccatcatcagagggtggttcagaggtttgagcactgtggcaaatgtaaagtagtgtgtccttgtaatcatcagggaccaggtaggaagcgcttgatcagggtggattcccctcagagggaacactcaagaaaggtttgccgaaactgttataatcagaatgcagctacagcctagatatagagatcgcctgaacctgtgtcctcacgtcattaaaagtctgctcttatttggagta

SEQ ID NO: 229622 - DNA, 323 bp, Homo sapiens
gatcccagttgagggcccaccccaccccaggacccagctggtgcagttgacaaggatgcgctgcgcccaaggctatttaaacccgccctgttggggggcctcgagctcagatcttcgcagagcagagcagcggctggagcgttctgccggctcagcgtggacctggagcttacagcgtcttacgacttggaagtagattcagaggataggacagtacacttggatatttactcacctttttctcattcactatgtctgccgtggtctcgatgagagtgtgccacgtaagtttcccccattaaaagtcatgaattcagtggaaa

SEQ ID NO: 229623 - DNA, 451 bp, Homo sapiens
atttgggcaggtaaataagcttttgtttcttttttttttttcctcataaatggactaggaatattactcctacctacctggcatggccgatgtgcgagaaaatgagataatctcgtggacaggctctgaaaactgcacttttactgagtaaaaaaccctttgcctctccgggcccccgtttccccatctgtaaaatgagtctgtaaagtgagaatgatactccctacgccgcaaggctcttgcgggttaaactggaatattataaatgcaccatttatttgcagattgaaattctgtgcgtccggaggtggcgggtgggagagggaatgagcagggatgcagggtaggccctgagttgctgggggctcagcatggccgctgcgcacattgcatcattttgtcgacactggtgtgggtgaaatcttccaaaagaaattaaaacagaaaaaaa

SEQ ID NO: 229624 - DNA, 567 bp, Homo sapiens
ccattctaaaaactagaactgtttactcatcagtattagtaatctactcatcagtaaagaataaattattaactacttagtaatttactaactaatctcagtagattataaatcaatagctattattaagttattgataataattgaagccaataaaaacaaagcccaactatgggtcaagcacttactacatgccaggcattgttctaggccttggcagtgagcaaaacagacaaaaattcctgcctttgtggacctgacattctggtggttattattaccaccgtggtctaatgacaagatacacagcacatcagtccagcgcactctcacatgacgctgagaactgcagatggtatctacctgaattcaacagtgaccataaaagcacttggcaggccgggcctggtggctcacacctgtaatcccagcatacttgggaggctgaggcaggagaattgcttgaacccaggaggcggaggttgcagtgagacgagattgtgtcactgcactccagcctggggaacagagtgagactccatctcaaaaaaaaaaaaaagcacttgg

SEQ ID NO: 229625 - DNA, 389 bp, Homo sapiens
atgaagaaactcgggtagattgtcgcagaagttattcttacagcttcttactctataatgaagatttatggtatacgcaagggcagtctggtgcgctctgttcctcacttgatttcagtgatctctgaaatgtcacccaagatggcggtggctggttcgtgagtgttttttttctttttgtgcgtgagtgaagttttgttagaggtattttaagcattaattgaaaagctgcatttctgaactgagttttcgaattttcctacgtgttgacgcaaacagatccccatttctttgtcttgtgttttattgtgtgatgcgcccgtgaaggtagaggttgacttctctctttccacacacagcactctcctctgtggttattaaggggatta

SEQ ID NO: 229626 - DNA, 528 bp, Homo sapiens
tataaaggattttacagaagtagcataattaaggtttatgaaagaatgtggggttaatttgtaaaaataagatagaatgaacagaaatcaaatatgaaagtgtaacagaatttgctttttcaaaaggaaaatacagaattattgaagcaagaatgctgtgtacaatgaagaaataaaattcttttaaacattaaaataaaatggagtgtactttgaaaactattcattaaaatttatgacagttgtaaaaatgacttaattgcatattttcctttgtatttcacattagtgaagcaatttgatagaattgcattttaaagtacaaatgttcagtttctatttatgtgcagaatatggctatttgtttattgacttattaatcaccggatatttgtttcagtatggtttaaggtgaaataaattcttccaattcaataaagtgtgaaacttccaatagcagaacaaaatttacaaatatatgtatttaacctaagtaatttgtattaaaatttgtgtttacctgctctt

SEQ ID NO: 229627 - DNA, 475 bp, Homo sapiens
aaattaggccaggtttaaagaagtcaagctgtacatatgtaagaattttaataagcttggaaaatgctacctagagcttatgcacaggcttactgtaccaatgggattccctgccaccagccacagcgtgctaagcccctaacaagagctgttgagcacgtggggcagcggggacagggagtctgcttggtccaggtttccttaggagttggagactcacagcagaggctggcagccagatggatagagaacagaatcgggcatgcagctcagtggagccaatgacatttactaggaaaacatgccgaaggtttctttggtgcaaatctggtcctcacacacccttctagaaactagcaaacactgtaatcaatgtctgcatttatcaaatgcctgtttgtacccagaactgtgttgggtacaatagagagttatttaagcaaacatggtctctgacttctagatgccgacaccc

SEQ ID NO: 229628 - DNA, 434 bp, Homo sapiens
gtatcaactccctacttcatctgttatttttatgaatgaaaatcgtaattgagggggcactaaacatatttttggagaaatgaaatggggtggtgtgctgccttaattagtttctctaaggagatttgatttcatatcagctcttatatttgaaatttgtacttttaattagaagtgaggacttacacataacatttcatctttttagtgttaaattcatcttttctgatatgtagcatggaacatccttatgtacacaggagtataatatcacaataatttcttattctggggagttatcacattttttcttatttgatcaaacacttggaaaaccaggaattaacataaaataaatccctgtacaaactaatcaccattattttcttgcattcttaatctgagatggtagaaaagaaacaactccccccctc

SEQ ID NO: 229629 - DNA, 227 bp, Homo sapiens
gcaaatgattggctcctttgattcaggattaagtgttgcattccttggcttctgaggctatgtatccctgactgagcccccaaagatggcttgttttcttaggggttattcccatgtgggccaacaggcaacattaatatttattatgacaaagcactttccaaagtctgcctcaatgtctgtgtttagcatgtgcaaccttggccttcccttcagtttgtataatt

SEQ ID NO: 229630 - DNA, 260 bp, Homo sapiens
aatttggacaactgagacacagagaacagctagaaggatttaaagtcagaggatcgtgtagcattgttgcatctcctatgccatgtgtatgcacacctatgccatgtaaatgggtaactcaatagagagccatcctttaagaaatgtaagcaaccgcttatatccagtaagcctagtgggtcatacttgaaggaaaaaaaaacaaacccaaagccaaaacccacgtatttggaaacactattttacaaacacacacatac

SEQ ID NO: 229631 - DNA, 760 bp, Homo sapiens
ccagtgttactaactgtaattctatcctgttcttcactggggaaaagcttttccagtgtgctgagacagttttggttatgtaactgttaaaatgatgacagtcgtgtggcctgcggatagcactatgattttctcacagtgagttgaacctggcaggtgttgccactcacatctgaccacatttataacactttctgtactcgtatcttgtgccagtagtctgctagtccagattcatgttcctttttctcttttgaaattaaactcatagcctccaaaaatttgcatttgccctgttttgaggggggagaagtggagactattcatgatgctcaatatatcatagtattaaaatatacattgcaaattcctttgtatttatgcccttttgaaataaaaatgaatgttcttagcaaactcaaagttcttgaactctgtagtttacacatccttagaacagcactaccttgtatgtgatattcaagagactgactttctaaagagtcttagagccaagctttaaattctgatctgttaatatatatttcagtagttgctaataatgccatacctcttcttcactatgctgatcccacacacagctttctttaggagaaggaatacctgtacatatgaatgagaaaactgtagaaataatagttcggacccttttcaaaattgtattcggaattgctagtttagcctctactaaaccatacttggttcctgggcctagtgaagatttgatcatttaatttcg

SEQ ID NO: 229632 - DNA, 405 bp, Homo sapiens
aaggttaggagcatcaggtctatagtataatatatgcaaactatcaatcaaggagaacagttggctaaattaaatatgtgtatatattttcacacaggtggtttggcatagatttgttgagtcatgtaccatgtctattttcattcttttcagcaaactcttttaagaacttttattacttgtggggccatatgaactcaacaaactgagaattgaagtaattgctatcatcggagtgttccctctgccagattaggttgaggcattgaggctactcagaactggagaattggctcagcaaaccctgcactgaattgctgccaaatgcattggcatttgaaccccttggatgtgatcattaagctttagagtggtaatccttttttatgtgccactgtagaaatg

SEQ ID NO: 229633 - DNA, 449 bp, Homo sapiens
agaaacaaaacacatctgtcacacagccacatggcctcctcttacttggacagacaagcgtccccagcaaagcttcccgtcctctcgataggtgactcgtcctaaatcagctctgaattcccgcaaagacttctggaagctgtgctggggttgaaactggtagaccaaaaccagaatcaagtctgttgggaggggcctttcccctgggacgggaattccagtggtaatgtcttcctggggcttctccggaaggtccaatttccactccaccctgctcattctttcaccatgtatttctcacaaacactttgagctggattgaaggggaaacatttgataatgcaatcattaatggagtatctgggtattcggcaggaagtcagtatatctttcacactactgtttagacttattcaaaagaaatttaaaagaaacatgaaaaagcctca

SEQ ID NO: 229634 - DNA, 433 bp, Homo sapiens
ccatctttgtgtttcaatactccagaatgaagtgaaggtctttggctccaaaataattgaaagctactccactgtttggcatgaacttgttcattacaggtacattcacttaacaggctctctttccacccttgtagaaatacaaaaataagacttaatacagacgatggcatgggcttagtaactacccctttacccttaaacagctcattgcccctttacagggaagggctaagtacagtgtacggttttatcacattccagtgtaagaaatgcatcgtgaaaagcagatggagaggtaatgctggagagagagtgcatagctctcatggaaaaagtcttgtaggatttcttaaactggtgatctctagctattctgtaagaataaaaagaaatttacgatgcagatatgagggaaacatttagcaagtgg

SEQ ID NO: 229635 - DNA, 468 bp, Homo sapiens
caaggtgtgagttttttcctctcctaagtttggtaattctgaatgtcacaaaggtcctttgtttaagaatcctgcatgttccaagcaattcctggaatttcttaaatggcttccattttcctggaggagaagctcgtaatggtctgcttggctctctgcctttatagcctctactggagccacttaacccgcaatttgtaggttcagctgtacccccaggcctaaggccacccctgtccctaggtgagggaagataagttcaacccagcctaccctgcctctgtcctccctggtcacctggctcatctacaaaaagcgaagattcccccttagtgtctggcagagatgcacatttactcctgggtagaagttaaaaaaacaaaagatgtatttgctttttttaaatctgcttggaaatataaacaaaggtgaaatcttataaaataaagtgttccaaaaacacttgcc

SEQ ID NO: 229636 - DNA, 315 bp, Homo sapiens
tgaattctctatgggtaggatttaagaattatctcccgtcctcctcatgcagctgccctgtgattattaaactctttctctgctacaactcctactgtctcagggtactggctttttctgggtggcaggcaagaagaacccaactgctgtgaaacaataattgttttatcagtgtaattatttaccgtaaatggatggtattaactctcctgcgcaggtgagaaaactgagtaaaacagataaaatattttccttaaaattactgcctgaaacaaaattaaacaataacaataaaacttactgtgttcacgaggt

SEQ ID NO: 229637 - DNA, 478 bp, Homo sapiens
catgatacttaggtaggacaaatgtcttcagacagagaaattaaggtttactatcacatatgtgaaccctgaaagagccagtctgtaaagttggatcctgagtggctaactgggcctaaattcaaaatagagtgaaatgaccgtttgctgactagaggtcacacacatagtctgtgttcctggagaacccccatgctcacttaactttgggatttgtatagctgtctgttcctatttatgccacctgaatcaaccaatggacaatgacctgcattggccaatcagaactcaagaagcatcaaccaattagaactaagcaagtttgcattctttatccgcataagcaaaccaaagtgggaaaccgggcaggcactttccctataaaagacaggccctctctttgttctcttgaaacatggctgcatctcccaggtttccaaactgttagctgtaataaagtactctatccccttttaaa

SEQ ID NO: 229638 - DNA, 443 bp, Homo sapiens
tttcacccagtttattcagagctcaactagtacttttaggacttctttttttatatacatgagactcactttgacatacttaaaaaaaaaacagtttatggaaagtacagtttaagaggagaatttgattagactaagtggatatctttatagaaatattaatgatttcagaattttcagttacaagtgtatataccgtggctattgtttatggattcatatgtaaggtagggtcttttttgcatatagactccagtattagttactttcattctaaaattatatttatgcttctatggggaagaaaatttttaattcacttggttgtattaaaattatacttacggtttgagaaaacatgctatgaaaatcatgattatagcaaattaaatatgctcaaaatttaaatctaaaataaaagcccagaaactgaaaatattgga

SEQ ID NO: 229639 - DNA, 423 bp, Homo sapiens
aacttacataaccaactttgaaattaaaaatgtatgtgtaaatctgatttgtccaactataggcaaatttcagtcatttaggaactgcctagctttattttgtgattatgccttccccccccccccatttgcatttagacggttaagagcttatattaaacacccataccaccaaagaaggaaaagggtagcatgatataaatgactaattttataaccagacccaatgaaagattgaaatagaaaataggtgaaatccttttactccatgaaaatggccttgctgtcatttcaaactatgcactttatatgtgtttatcaaaaaaagtcagaatagagaaaagtaatgaaagaaaataaaggagatctgaaatcacactattgagaaagaacttttacattctggagacccttcttttatat

SEQ ID NO: 229640 - DNA, 456 bp, Homo sapiens
ttctataagcacttgttgcattaacgatatgatttctatactgtccctctttgcgtgatgaattatattgttttccttgtgtctagttatgcagtacaagaacaaaactctgcttgttcataggaaaattattttaatgtgatctttttttctatttactagagtttttatttagttattatagccatactcataaaaaatcattgtgcatatcttgtctgtttttggaaaataagactatatttgccttatgaggtagattgaaaagcataacattcttacctatttttggaaagttccaaaacattctccaacaaactcattggctataggcatctttgaaaacagtaatcctaataacatttcactctgttgttgtaagttgtccattcaggtttgctatttcccgatacctctcttttatcctcttgtggtcttgaatttttatgtgggaag

SEQ ID NO: 229641 - DNA, 854 bp, Homo sapiens
ctaaatcagtagtgatatagtgggtggcaaatagaattgcaggaagaaagtgaagatctggttgcctggagcttgtaagattcaaccctagttcaacacagctctgtacttggaccacaaagacagaaagaaaaagggtgtctgaagctgagaagcccaagaagaataaaatactgaaaatagtaataacagtaagcaacacttatacagtgtttattaaatgccagccaccttgatagacattttacatgcattatgccatttaatcctcacaaccaccttgtgaacttggtgctgtcattgcccttgttttaaaactagattactaagacttagttaagtaatttcctcaaggtcatgtagctggaaagttgtggagcaagttttcaaacttgggtttgtctatcacgcaagttattttttactttaaaagatctgatcttctctactgttttgtcattttgcatggatgttggtcatccttatgttcacaatcactcttctccttctgaattaacagacctagctggcaaggcagcatagataatggttaaggaatgtggccattgcattcgattacctggattcaaattacgatacctacactaaaaagctgtgagactgtgaatcatggatttgacctctatctgcctcattttttacatctgtaaataaggataataccagtgccaacccacaggtttttataagacttaaatgagatggtgtgtgtaaaagcagttgttatatatctgagcataaaataagtgctcactatatattcgtttttattaggaaccagtagtgcatatgatacattctttgacaaaagcctgtgaagaagcagaagccca

SEQ ID NO: 229642 - DNA, 420 bp, Homo sapiens
ttttttgagacggagtttcgctcttgttgcccaggctggagtgcaatggcgtgatctcggctcacagcaacctccgcctcccatgttcaagccattctcctgcctcagcctcctgagtagctgggattacaggcatgcgccaccatgcctggctaattttgtatttttagtagagacggggtttctccatgttggtcaggctggtcttgaactccggacctcaggtgatctgcccgcctcagcctcccacagtgctgggattacaggcgtgagccactgcgcccagccattcagtgaacatctttaagcatattgcctttggttttactggagtgttggagttacttcattgggctacattaccaaatgtggaaatttgtgggcaaatggtataattaactatattgctcttgccgtgta

SEQ ID NO: 229643 - DNA, 330 bp, Homo sapiens
taatatattaacctaatctattaatgaacatttaggttatttccaatttttcactagtacacctattcctttaataattcctcttgtacatatgtttatacacatataagaattttgtgtgttaggttgtcagggacagatacctaaatgtggaattgctgggccaagagacagaaaggaagataaaatcatttacattttgcagccaggtgtggtggtgtgctcctgtgatcccagctacttgggaagctgaagtaggaggactgcttgagcccaggagtccaacaccagcttcacaacataccaagaccctgtctcaaaaaaaaaaaa

SEQ ID NO: 229644 - DNA, 568 bp, Homo sapiens
ggatgctgctgaagagaaatgcagataacagctgtgctggcagcctggagacacccgcctagattgaggccacacagaaggcactgagagaaatttccaaaagagatgaaacaaagaatacctctttgtttgaaattactgagagtagaattagtcaactggggaagagtttcatgatacattgatcgattcataaaaaactacacaaacaagataattattacttctggaaaaacaaattatacagggaaggaacaacaaccataataaagactaagatgacaataaaagttatgtatcaatgataatgtaaacaatctcaagaaaactatataggtacagtaaataaaaggtaaaacagataatgcctaaagctaaggaagtaagtagtagcaatatacgcacactacttacaaacacagagttaaagaacagtagaaacacaggcttgggattgataggagggagcagggaacatgacgacaatttgttcttctaccaggtggaacaatttctttccttatgtgctcatcaaatttcgattaaagtaaaaactaagttaaaaagt

SEQ ID NO: 229645 - DNA, 445 bp, Homo sapiens
taagttcattttaatggactgctttaagtttgtcagcagtattttctgagacacagtggctgaaaagttgtaattttatgatttatcagaggctatgtttcatattgatgctaacaccagaaatgtgaaccatttttctttatggtttcatgaaatacgtggactccaaatttttgagtttttctatgaggttagtttgtaatggattatgataagtatcagtgaaactaatagtaacattttgttcctgaatgctgctttttggcattttagcagcttgttttgtgtctatataatatatttatatctatataatgtactttgtaaagaaaatccagtttctctatgtatttttacctaacattgtactttgttctcactttttaaacattgtactttaattttattctctctgtttagtaaagctgaggaaggaatttcagct

SEQ ID NO: 229646 - DNA, 414 bp, Homo sapiens
agccagccccacctggactctttaaattcaacacgttccaaattcacttgtcatcattcaacatgttcaaaattgactcgtcttctcatctgcacatcggctctgcctcctgttcttttctacgttggtgagaaaagaactgttgctcaaagcagaagtgggagctgtctgaatggcctcagtgctctgcacacgctggggaagtcattgcagcaccttcggaatctcgcttgtctccaccatctgccttcctgttaatctggttgctccctctcactgacccagttactgtgtttcttgtcatttctgatgaacactacgctgggttcctagtccctgggtaacacaaattcaagtgttcaggaaatgtgatttttccctgccctctataactaaagttaaattcaatctatg

SEQ ID NO: 229647 - DNA, 391 bp, Homo sapiens
ctggaccgcctcgtaagcaggaggagcatagaaggaggcgggctccacaagcttgatcttctgaatccccttgtctctgtaaacttcccctggaagaagcgatgcactggcgaagccatgtgaggggggcttttggttccagagagacagcccgagagccccagtgggaaccatccggagacccagaagatcgaattcgcgggacggcgcgttaccttccaacaccgctgggccaccactctgagaaccagaatcagcggtactggggcttccccacgggacaggagcgcgttctttggattcccctggtgcggcgtgcacaaccttcggacgaagagtccacgcctgccacccaggaggaggcccaggcgcaggcaggagtggcggccgc

SEQ ID NO: 229648 - DNA, 526 bp, Homo sapiens
ggaatgggttgagcacctgtaggtactgtagggtaactctaataatttattgcatattttcaattagcttgaagagcatattttgaatgttcccaaggcaaagtaatgataactttgtctgtggtgacagatatgctaattaccctgatttgatcatcacacagtatattcatacatggaaatatcacaatgtcccccataaatatttgcaagtattatgtatcaactaaaaataataaaagcaaaaaacacatcatgttgtacaccataaatttatatgttttcttaccatcagttaaaatacaaataaaaatcttaaaaagaaagaaaaacgctgggcatagtggctcatgcctataatcccagcactttggaaggctaaggcaggaggatcgcttgagcccaggagttcaaaaccagcctgggcaacatggcaagacctcgtctctacaaaaagtaaataaaaagttagctgggcgtggtatgctgtcgacgcggccgcgaatttagtagtagtagtaggcgg

SEQ ID NO: 229649 - DNA, 431 bp, Homo sapiens
agtctttaggtatggcatttactaatctgtaaccctgggaacttataattactacaagaaataggatgaatccctatctgagtgggaaggtatttgattgtcttagaagcagaggtggaaatgaaggtgatgtattcagactcagtcaaggcaaggacctgatctatcttgtcatagctttatgtcccactcctggaacacagcccactacatagcaggcacccaacaaatacattacagggttataataacattgagtcaactagttaactagatgtaaaatcacttttactgggttattgttgtggccaaatgggttaataaaaagtgtacagataaccctcaagatcctcatttttattgttttgtgtttaaacatctgagtgctccccccacttttttttaaaataaactagattagattcttgatt

SEQ ID NO: 229650 - DNA, 643 bp, Homo sapiens
tgagaaataagataaattaccaaaattgtgaacaaaagagattatcactaatgacccttaggaagttaaaaaacattataagtgaatactctgaaaaacctgaagccaataagttagaccacttagataaaaaggaccaattcgtgcagagatagaaattgccaaaactgacccaaattaactggaaaacctgaagagaactgtgaactaagtcagaaattgaaaaaccttctcaaaaagaaatgccaaagcccagatatcttcactggtgaattctatcaaatattttgaaagctctttcagacaagaagagaggagggaagactttccagcccatttacagaactggcattaccctcatatcaaagtcacagcaagactcacaggaaaagagtgccatacaccagtgtcaccaataaacataaatgaaaacatccttaacaaacattggcagataatacaaagccacataaaaacggattacactccatgaccaatgggattcatcccaggaacatatggttggattaacatttgaaaatcaattcatggaatgcactgtattaatggaaaaaaagacataattatctcaaaagatgcagaagaaacagttgacaaaaatgttaacatcactcatgttcat

SEQ ID NO: 229651 - DNA, 262 bp, Homo sapiens
ccttcagcgctgaactggaagttctcagggtatctttctggtccagctgtggggatgtgggcaatgtgtgtaagggcccagcgtggtggctgccctgcccttagcccgacaagtgtttgctgtggctggtggcagtctcttctttcagtccccagtgcttttctgggcctccaccttcctaagagtgggctgactctacattccagtttacccagaagagttgtttcattcttgataatcaacagcatccctttcgttcttt

SEQ ID NO: 229652 - DNA, 345 bp, Homo sapiens
ttctactttgttctgattaattcatagatctgtgcaacgaaagaatttgcaattggcaagcaaaattctaaattaggcagtttaattgtcaagtaaattttaaaacttgcatgaaggatggaaaaaatatagaaatgtcgacatgttggcatttggaaaccataaatgggtattttcttgtaggtcatgccaatctaagagaaggaaaaaaaaagaaagactttggttctgtcagatagaataacagtttctttaggaaactttaaaaatctatttcatcatatattcttccaatgaaggtaaatttaatgaaattttatactttatttccttgaactcctctta

SEQ ID NO: 229653 - DNA, 582 bp, Homo sapiens
aatatctggtacaaaagggtggctggtgcccttcaccaggtctgtgcataggacaggctccatgccccctgtagtgcaggaagaccagagcatcaccagtcaagaactttgggagaagattcttatgctgatgggaagttgaatgaaggccccctcccattctgaattctgtaattctagggcccaaactgtatcccttagaaataaatagaacagcaactcaccatttagataattggcccatttggtgaagtctttccagtccagccatccaagaaacagtctgccaacaggctgtagtaggattctagcaggtcccggtgatctacaatggccatgagggccaaacacatggctttctataggattggcaagaacagcctagtgcatgtcaccatccactggagttaagtgggttttagactcaggctgatggacctaccttgacagagaagaagaaagaaggttttattaaaaaaaaaaaatagggcactggattttaggtcagaagacctgtaccatggctttggccaactaggaggatctctccaagttgctgttctttcatctgaaaaaaaaaaa

SEQ ID NO: 229654 - DNA, 452 bp, Homo sapiens
agagacctatagccagtgaatgagacatggggtttattgaggacaattacacgcagtccagtggtggcaggctggacaggagaagtgctaccatttgtagaaagcatgcagtttatatagtattttcacttagcaccttccccctagaaacttacacctgacaacctttgtttaacccagaacaaagggcctcaatcctctgtacagtctgcattccatgagatgggctggggggttcagatgctcctcatagataaggaatgaatctccaggttggtcactcccagactcttcagcacagaactccaaacacacattcttcttagaccacagggtcattctcaggctttgcttaagttagctattgctgtcagatgcatctgccattcacagaggcacttcttcctctgccgtccactgctcaaccccaagttcagctcttccttccagct

SEQ ID NO: 229655 - DNA, 297 bp, Homo sapiens
caacccagcaactaagcagtatattactgacaatgcttctgaatgtttggtcacttgttattcatgatatgactcacatccaactgttctgaactgattcattcttcaagaaaatttttaaacaatatgttgggttatgccgttttactaatttaaaagaatgattcgtactcaggacattttggtttatgatttgtatagatcactaattataggcaatactgtaagaaaaccagtgaaacaaacccttaatagataaccagaaaaatctctttgaaactccaaggtgggctatat

SEQ ID NO: 229656 - DNA, 231 bp, Homo sapiens
caagaagaaaggtttttatacaaagttgtgcaattacagtttgatagtcaaatttgaggacagtcaggtataaagctctcaattcaaatgcagatcaagagaaatgaacacttggttttattagtcatggcatagttgagacttgttatttgaaatttgtaatttctcacaataattttttattcttcactgtaatatttttaggtaccataagtttctatggccagttcc

SEQ ID NO: 229657 - DNA, 359 bp, Homo sapiens
gaattaggaaatggcgctcacacagacctgccccttcttgtctggtagttgttactctggtgtccctcaatgagacatgtcttccatcaatgtagccttttatggtccttgaccctggaatctgggctgggtcatgattgagaccatgagaaaccatgactcaatttcaccaatagaagaagttggtaggagtagcaatgtcttgtttctagctctgagcttaaaaaagacctggcagccttggccgggcacggtggctcacgtctgtaatcccagcaccttgggaggccgaggcgggcagatcacgaggtcagaagttcgagaccaccctgatcgacgtggtgaaaccctgtctctac

SEQ ID NO: 229658 - DNA, 397 bp, Homo sapiens
tgcataaagcgcgaggtatttctaccagtggggtttgaacccctcagaataagggaaagatttacatcctcagaccagggtccattggcatgcgtaggaagccctcttcgtcttcaagggtttagacaaatatattttattggacattagcccgccaaggggataatattaaacagagaacaaataagccaacctcatttattgagtcttccataggccgaatcctaggtttgagctttagaatacactagcacagctgtaggactattttcacttgattttgtcatgttgctagcgtgctttttaactgctttgtgcctgccaactcagcagaacatatgatggtccttctggtggtgctaatttgaaatttaaaactgctacgttagatgcttat

SEQ ID NO: 229659 - DNA, 397 bp, Homo sapiens
agtatgtactagagtttgtttaaatgttgaacaagatgctgaacattcttaatatcatatattttatttaggtgagatttaacataaatttgaaaaaaaattggccaggcatggtggctcacacctgtaatccctgcactttgggaggctgaggcaggtggatcacctgaggtcagaagtttgagaccagcctggccaacgtgttgaaaccctgtctctactacattaaaaaaaaaaaaaaaaaaaaaaacagatttggtggcaggtgcctgtaattccagctactagggaggccgaggcaggagaatcacttgaacccaggaggcggaggttgtagtgagcagagatcatgccactgcactccagcctgggtgacagagtgagagaccctgtctca

SEQ ID NO: 229660 - DNA, 345 bp, Homo sapiens
atttctgtgcctttgtcaatgcttactaaagtgacttcattttgactgtgttgtttcctgaggttgaatcctattcaaagattagaaaaagtgatagaaatgaaatgcagctaattttatcctggtatttattgggtagattttaataatcgaataccgtaaatactgtaagttttagaacttgtgtcaaaatgttcccttatgtggtggcatgcgcctgtagtcccagctgctccgggggctgaggcaggagaaatggcgtgaacccgggaggcggagcttgcagtgagcagagagcgagtcactgcactccagcctgggcgacacagcgagactccatctcca

SEQ ID NO: 229661 - DNA, 116 bp, Homo sapiens
cataaggcttacttcccacccaccccctccccggaaacagggtcttgctatgttgctcagactggtctcaaactcctgggctcaagtgatcatcccactttaccctcctgaatggc

SEQ ID NO: 229662 - DNA, 389 bp, Homo sapiens
gccctgcacccccacagccccagagaaagttcttcaaggggaagcagggtgggacttggacagccgctggagatgacgctgacggcccccactggtgctgagcatcgtgaaggatatttattctgttaaagaggaaggacccacctgcctaacgacgggagtgttattcccggaaaagcaattccagccctgccaaacacccctcgtttcctgtgaatagccgggaaatgaggattgcgaagcagcaggctggacacacacccgacaagctgctgccccaagccaggtggcaggagcttcaagggagtctagggttgccatttgtagtggaggaggccaaagctcagagaggtcaagtgactcgccccagatcacacagctgctccaag

SEQ ID NO: 229663 - DNA, 782 bp, Homo sapiens
aataaaaacagaaggtccccaaatggagtggatacattagattcttaagtagagcatttaattttcctcataagacacaataaagcatagagtggaggttcatcatgctatcatttaactttctagaattcaactctatactaaaaaaatgaataatgaaaaagacaatctaaataaggcagcttgtcaatggaatgactgtcccaggcaatcaaccttgaaatcataaatacatgttggctgaagtaatggaaagaacaggtaaatgataataggtttccccaacataagaagtgaaataaatgcattattcagatggccaggcaaatagatggtgatggcttccttaacatacttaatatccaaaatatacaaaataaaaccaatgggtttataatgatattccaccaaaacaaaaaaatcattggtcgactttggaccactgatctggatcattagacaaccagctcactattttgaaaaactggtaaataaaaaaagagaatcaagcatttattcctgcccttactataagaactacatcactaggtaaccaaacagttgaggaaacaaagttttagaagtagtctggctaaaaactgaagaaggactgagaaaaaatagaatggtatcagttggaaatcgccatttaattaaggtctttagtaatagctgctaaaatcataaaaagaaaggcaaccagatactggaagtatagaataccacctataaagtattactgccaaaaaactcaaacgctaaatctcaagcctcaagatcta

SEQ ID NO: 229664 - DNA, 431 bp, Homo sapiens
ccaggccacacctgccctggtggctccgtccagcatccctgctgggtcacttggaatggacgctggggcatcaaagctgccctacagctctgaagaacccctgcgtctctccctaatgacaagggtgctgggaaaaatgctcattccatgtttttatctggacttcaccagcagtcactgaagtcttaggtcacagttctgtggagttttccaacgggtccctcagacaccaccgctgccccacaggggctagaatggaatgagcttgggagtcaagagatgtatctgccttgagcttgagcaggtcattttacctctccccgttgcagtttctttctctggaaaaggagacacccggactggacagtctctgaggtccatccagctctacctttctgtctctactggctgtttgaagaattgcaatgctc

SEQ ID NO: 229665 - DNA, 614 bp, Homo sapiens
tcactttacgccctgaagcatgaagacttcacagccactgtaattttacccaatccaggcagtatacctatagttattcttattcatagattcccagatcatttctaaatataaagatattgtcttcaaaactctgtcatataagtgactaccatggatgaaataggtgtttcataaaatacagtttactttttccccccattttaagcacagctttaccatctctgcaggtatttgtttcagaaaaacaggaaatgctctctctctctatatatatatataggaatttataatgtttcatagataaaagggctggtttgtcaaaatagccatttttagaatatttattaaaaacaatgaatgaagttagagtaccaaggaagaacacaaaggaaaccacatatattatagttggaggaattatatcatgccatatttatatcatccaactttacaacgattaaagttcacaggataaatctaatactaaataaatggtaatagtagtagatggagacaagatatcattgtataacatagaatctgtcataaagtgttttttccctgcacattttcataatggctgttagaataatgattacaacatccctcat

SEQ ID NO: 229666 - DNA, 192 bp, Homo sapiens
aaggatgaataggaaacacccacaagaccaatgggaaagtatatcctgggctgttgatcattttctgtattaccagaaaatgacagataagcacatgcctgtgagtccactgcctatctctcccagtatttgtggagataaatacaaagtgctgagggaaagtctaagaaatataagaggtggaacctgccc

SEQ ID NO: 229667 - DNA, 380 bp, Homo sapiens
gcaggctgagctcaggagttccaggcggcagtgagccgtgattgtgccactgcactccagcctgggtgacagagcaagaccccgtctcaaaaacaaaacaaaaaaccacttccttgcttttctttctaattctacaacccccacatacatccctaaataatatagggtttcatttgcctgcttcagaacctcgtataaatccaaataactatgcatttgtttgtgacctctgctcgacattgtgtttttgagattcatccctgttgctgcatggagttgtagttcatttttattgctgtatagtattctattacaggattgcaccagggttcattaatccagtctactgtttataaacatttgtgttgtatccagttttg

SEQ ID NO: 229668 - DNA, 566 bp, Homo sapiens
agggaagctatctgagcaagaggtaaatacttagtcattcggaatagtccataaatgacgactgcttcatcttcaacaaggggaggtctgattggaaagtgctcacagaatgattggattgcatttctgtcttcaatccacctttgattcacaatatacattcctttgttaaaaaattgaagaatgtctgtaatcaaacccttgttaacagatgtaaagagctacaatttgcttgctggacattatttcaacaaaagttttttcattcaaaataatttgtcaaaaaaggacccatgcccttacgtggtttcagatagtgtgctgtccaatttgtatgcttttccacctactcccccagggccatcagggggtacgtgagtttaatgattctacttcttaaccatttcttaaatctgcctccttggtcgggcgcagtggctcacacctgtaatcctaacactttgggaggcgggaggattgctttgaggtgggaggattgaggtgggaggattgcttgagcccaggagttcaagaccaccctgggcaacatagtgccctgactctac

SEQ ID NO: 229669 - DNA, 229 bp, Homo sapiens
cggccctctaaaattgcattcttatgcatcttatagagagtgagatttcagtttaaggagaagaaaaaatattttctacaggaccatccaaacatgtaagtggcttctcatgggacagtttcccatcacgggaaagatataagtcgattcttagtcatccagagtgttgaagacagtgtatcagttagagactgagtttcagtccctgtccaacagcaactcaactata

SEQ ID NO: 229670 - DNA, 705 bp, Homo sapiens
ttttttggcgtatcttttctgactatacaatggtgcaacatcctttggctttgaaatttacatgatcataaaatgggtcattttttgttttaaaggcttattgaaataattttctcaagggcctctcttaatactttgttctcaaattattcttttgtgaagtgcttgcctgtgagtgatcacttttttctttaatggttaattctgctggatactcatctgtcaattctgtaggtgactaatgtcattctcttgcagtttaacagacttcatgaagtttctcatcttttgcaaagtacgcaatttcattttggtttgtgttgtatttgcattgtattagcaagagagtgacagagaaggataatgatgtagtgaatgggacagataacagctacagctaattaggaagagttggtgagtagagcctaattttataaatgattggtttattagtcagtgttcttgtttggcaatttttgcttctccatgcattacatggattaatgaccagttggatatcgaggatcttctgtacacacaacttgcagtaactatgttgtaggttgctctaaggattaaatataactaaatatgaggatatatttagactatatctaaaaaggcatctggcacactgcctaagcaaataaaagttgatcaattcatgtttattaaatctgaaagaaactggagggaaaggtatca

SEQ ID NO: 229671 - DNA, 308 bp, Homo sapiens
ccaggcaaccagtgagcaaggctgagaacttgtcccaggttacgagactcccaggtgagaaagaaagtggactcacagttccttggctgtctcacagagctgcagtggcattccacctctttcacaggctttgtagattctctcggctttccctgtatgttcctgtaggagttcttggagcaaaagttcacaatgtgactctccacacactgctgtgtctgtccaggtgggatctgcaagttagtcctgcctcctatctgccactttttctgtatcacgtgtctttgcaatttactccttcctccaaa

SEQ ID NO: 229672 - DNA, 359 bp, Homo sapiens
tttttttttgagaaaacacattttaacattagaaaaaaggtagaaaggacataatcccagaaaacccagtttttttcctttactatgaattaattaaaaaaaaactttaccattgactagcacttggaaactagtgatttagttatattatttcagatcatgtataaatcagaatttttaaaaaataacttttggaacaaaatcaccactgagggtggcaaacccatgggagactccagtttgagacagcggactgcacacgggcacctgccggctctctttactcccagagtttcccaccaccaggaagaaataatataatttttaagagactggaattctcacagtgcaagaaaaca

SEQ ID NO: 229673 - DNA, 487 bp, Homo sapiens
tatgcttgctttgatgaaggaaatatgacaaaatgtatgttgcatgagttccagaacttaggcataagttgctttgtagcttctctctttgcccacccactcatagcatcctccaccaccatgtaaggaagcttgggcaagactaatgaatgataaaagaccctgtgagagagaggcccagtctatagcccgcattaggcttcagacaggtgagtaaggccatcatagaccctccaaccccagtcaagctgccagataactaacgtctcatgagaaagcccaggcgagaccagcagaagaactgcccagctgagcttagcctgaattgcagacacatgagcaagtaaaatgttattgatttaagctactttgttgtgcagcaatagataagtgatatagtatactctgtataattagaatttatcagtggccctttcactgactctctgcatatttttgatgtaaagaaataaaacataaccagaga

SEQ ID NO: 229674 - DNA, 459 bp, Homo sapiens
gatgggatttcaccacgttggtcaggctggtctcgaactcctggcctcaggtgatctccctacctcggcctcccgaagtgctgggattacaggcgtgagccatggcacctggcccatgataacttcttcagaggaaataaaataaaataaaatcatgcgctgaactatgttagaaagtttgggttgtaaaatccaagtttgtttggtaattgtgtatgttaatggagtctgaaaaaaggactgaagatattacctctagtgtggcaggacattgacaaaacaacttaaccatgagaaacaggaatggaaacatttctttcttcagcttccaaatctcatgtattctgtgattttttttctatggtaatcctagcacccaagttacaagcttgtcaaatgggatatttaaaatgtaaatagaaaatgtttaattgtgtagataacccctactaggctttg

SEQ ID NO: 229675 - DNA, 458 bp, Homo sapiens
gaggttcttcctccttggtatcagactaagtggggggtctccagccgagacaacagaccaggcctggattcacagcagccttgaattacttttccaagctctgtagccagccttcaaatgccccgcctgcacctagaagtccccattcacggcagcttctaactctttttctgagctgtgtagccgggtgttaggtgacccacctgtgcctggagtgccctgacctgtgctgcatccctcagggactgggtgtgtacttcttgtagcacagtcaaaaatgcccatccaactctgcgggcaaaagcttgctccttcttggtgttctgtgcttccactgcttcagcaccttctccatgctcgtggcagacccatctactgccacccaggtttccttccactggagcctgtctgagcagcacagctgccaccgggtaccacaacccatgttgcggccacat

SEQ ID NO: 229676 - DNA, 207 bp, Homo sapiens
tcactgaagcagggagagagaggggactaaataccccacccccctcctcctgccctctggtctcctgccagtgacccctcttggccaagtgcaactggaagccctggatcttgaatgctgcgttctacggcagtcagcctcccaggctcagagccaggcagtgtggatgggggtgagcagggagtgaccagcaccccccacccctgc

SEQ ID NO: 229677 - DNA, 427 bp, Homo sapiens
ttctacttggatgactcaaaggtgacataaggtcagtgtttaaagtgaatttatctgtgccccaaacctgcttcttctcagtcagccacactaccacacacgaggtgcccaagacactaacttggcagccatcctgggcttctccctaccccagagctgaagaggaaatgaggcctgtcaattctgctaccttttttggactatgttttcttctctccattccgtcaccataggccaggccactaccatctgtctcatggattgttgtaataatctcactgggattttgcttccagtcttgcatcctttcaagcccttctccatgctgagtcatcctttaagtacgcctgaacccattatgggcatcccattctcttttatttatttatttatttttgagagtcttgctctgtcacccaggctggag

SEQ ID NO: 229678 - DNA, 613 bp, Homo sapiens
tagggacgataggcacccaaggcgtgtagtgagttcgccttgtagagaagatgtgagcccgccccaagactggcaattggaaaggcttgcatgcagagctgggttgtctgaaccctgacataataggtccctcgccggctcccgtaatcccagctagaggactttggtcccgtttccggcaaggccaccacctgacttctcttcgcaggattccctctcttagggttcctccacggtgttctccatgcccggtcgagggctccaggactttgggcggtaatgagtcggctacagtgggtctgagccggcgccgcggacgagtcccttcgtttcagccagtttggctcgtttattgagaaaagtggggggcgaggggttagtatgtaagaaagtcttaaagtttccacatggttaaggtaattttatcaactctttcttgcacccctccccctagtacaggtttcagacctaaataacctagagttcaggatccagacttcaaaatattcactgctttttctgttgtttgtgaaaaataagtgttttctttgagcccagatcgtgctattgcactccagcctgggcaacagccaaaccctatccgaaaaaaaaa

SEQ ID NO: 229679 - DNA, 462 bp, Homo sapiens
gagccaagatcacaccactacaatccagcctgggtgacagagtgagactttgtctcaaaaaaaagaaaaaaaaaaaatcacaagtggaagaggaagacagaagaatgggtcagggagatgcaaggatggaagaagaggcaggagaaatgaggcctgagaagaactggactcgccactgctggctttgaagacaaaggtttccaggtgccaagaaatgggtatggcctctagaagctgagcatgaccctcagctgacagccagcaaggaaacaaaggacttcagccctacagtcacaatgaactgaactcagccaagaacctgaataagcaagctaaccaattcacctctggagcctccagagaggcatgcaggcctgccgacacttcgattttggcccagtgagacccacgtcagacttgtgactacagaactacaagctaataaatttgtgttgtttaagc

SEQ ID NO: 229680 - DNA, 644 bp, Homo sapiens
tgaagtgtcttttccaaggccaagctcctgagggcaggggctcaagcttaggccttcagactccaaagtccagaccgtccctgggaacaagcaccctaggttttcacatggagcctccgaaacgcctctggcatctcctgctgtggggttggatatgagctgtcttatatagaccctacctaaattaaattaaaatcgactaattaaatgtggcctctttgaatacactgccgtatttctaattacagctttccttctctcctgagaaggcagcccaacattgtttctgaaaaggtcctcaattactaatggttggataacattttgaaaatgtaagtgtcattaaattgttagttagaaggccctgagtggggatgagaggatggaagtcagttgtcaaccgtctcctctctctctctgtttctgtctctgtctctcacactttctctctctcactgtttctctctctgtaatacacatatgcacatccttatctcacaattgacccaaagcatcagaaataaaaagtcagactgagtgaccttagctgctaggaagcatcttattgtgccttccctccctctctgactttggccttgacactgatctgagcctgcagataacagaaaggaggagcttatcta

SEQ ID NO: 229681 - DNA, 581 bp, Homo sapiens
tgttctgcatccagcattttctgggcagaaatatgcattccacttcaaaagttttcttagttttattgcaatatttggtgacagctttcactgagggaccacaatatattcatagataacgtgatgttttgtatcccagcccaaagacctggcaaaagaagtattcgttgtcaattctcttctaagcttccaagggtcatcttttttcagttaaggggctgattggtacaatgcatgagaaaaaaagtagtttgtttaattgtataatgtaataggtagaattctaaggtgaagatttctaagataacagagtctctaagcccctaagtggcttagacaaggtgaattcactctactcagatcaccaatttttgaaaacttggaaagtaatgaaatatactaatgcaaagtctagaaaacataatttaattttccttattaattcagaagacagttaaggagcttacagcgactctaagaaattactactactactgttgtttaggaaaatttggtgattgcatggaattagtgctaagatatatcttatgtgctgctttttgaataaagtttaaaatgtg

SEQ ID NO: 229682 - DNA, 422 bp, Homo sapiens
aaaatttttttttaaattgacaacagatttttgagatttttggtttacaaagctgtcatagaactcaaatacaaatatctatatagaaatgatttaatgatttagtgatgtctttgttagtatgtcattttacacgccagttcactatctccaccaaaaatgtacttataaaaggtagaaacactattatagaatctagatctccaggtttccaggtttttgaaattagctaaataaaatgttaagttcctgatcactcatttgccttacattttaaggataatattttaaagataaaatgtgttgttataaaagtaaataacaacattacaaaaagttatattttttaatagaaatggggtcttgctgtcacccaggctggaatgcagtgtcactatctgtacccctctaactcctgagtt

SEQ ID NO: 229683 - DNA, 524 bp, Homo sapiens
actgaatttggatgttttgtatttctaatttctgcacttagccttattattttttccttctatttattggggtttagtgtgtttttgtcctaactccttaagttgaatgcttacttcaaattggtagcttttcctttctaatataagcatttatgactataaagttagtacatgggttttgctatggagcatttttatgatgggtcagtttttagagtatttaaaaattaccattatgggccgggcatggtggctaacacctgtaatcccagcactttgggaggcccaggcaggtggatcacttgaggtcaggagttcgagatcagcctggtcaacatggtgaaaccccgtctctactaaaaatacaaaaaaaagtagccaggcatggtggcgcatgcctgtagtcccagttactcaggagactagggcaggagaattgcttgaacctgggaggcagaggttgcagtgagctgagatcgtgcccctgcactccagcctgggtgacagagggagactctgtctca

SEQ ID NO: 229684 - DNA, 610 bp, Homo sapiens
aatttgacttgtcattctcataaagttgacattaatctggtaatcttacgatctttatttcaagttgtggaaaagtaatgtataaggcaagggaaatagttcaacagaggccttttaaagaattctacataatatttttattttctaagtttattcaacagaagtctgcaatatcagtgaatggggctcttttcaaaaaagactacagatcagtggatgagttagctattttcaccatctagggattttcttctcaatccctgaagaattcagaagttgaaactaagttccatatttgaaatatgttggccaggcacaatggctcacgcccataatcccagcactttgggaggctgaggaaggaggatcgcttgagcccaaaaatttgaaaccagcctgtacaacaaagtgagaccctgtctctacaaaaataaaaataaaattaaaaaagaaaataaatatatcttacccttcaactaatatgtttctgaatcttagaaaattactatgatattagtattcaatttcttatattctctgtctccctcttctctcatttcctttccccttttcttcccctctgttccttcccccaatcattctcttctct

SEQ ID NO: 229685 - DNA, 474 bp, Homo sapiens
cctttgtaccacgtttttggatgtgagcatggctagtttggggttttaacttttttagaaacaggaacagaagcacattgtaaaaaaatttaaaattccctgggtattttttcaccccgagactctcacagcattactttaaaaattttttattttgaaatatacatacagaaaattatttttctaaacagcttattgaggtacaaatgacatcaccattacttttttaacattatgcagaaagacaaccaaagactacctactcccacagtatgtgtacaaaaaaacggtttctatggatatttttgtatatgaaaatatcatggacttatataaatattgtttctagcacaactctatatttgtaaattaatttataatgtaaactggggcagcaaagaaaagtttttcccaagaaagttcactgcatgctgagaagaagaatcacatgaaataaacttaaagtgggatcac

SEQ ID NO: 229686 - DNA, 83 bp, Homo sapiens
ttacttaacaaaatttgtaagatgcagttcagacagagctcagtgggaaatatataacattgaatgcatatgatagaaaagaa

SEQ ID NO: 229687 - DNA, 1411 bp, Homo sapiens
taatttgtaacaggacacgattggagaaattggttgttttactaagactttgactggaatggtgtgcttttctttaaggaatcaaacttgacttatggaaccaataaagtccttggaaaaactggccccatattttgtgtacacagtctccgtacaagatttctgacctgtagtaagtaaagaatgtcactttctgacaggcacataagccccaggtttacctcagaacctcaagaggagaggaaattcacccaatttataagtatttgatggcacaaatccatggctgggcatggctttaagaaagtcttatctgagattcctcctgtggaacaaagttaattggttccagagattcaaagccagagttgctgtcagttcattggtagagatgccatcactgggcaagtgttctgaaaacatcttatctgaataacagcagtcctggagaacatctagggatctagcaaagcgagagatacatgaaggacataaaaacgtttttagaaagtccttggaaacagttctcatttcagacatgtaagcatgagctaggatgaaaagtgatttcatcctggtatctgcaattttcacattcattaggtttcaacatataaactttcaggggacacagacattcagactatagcaccaagctgtagaagctacatagttgtagaccagggtcagcaacccaagaagcctgacttccaagctgtgcttttaacttccccaccatgttgcacctaaagctttggagttttcctgtgattagtgtttttggtgttgttttattttttttcttacaggaactcttgcaagaagaaaggactatgagttcaactttagagggagccatggggactaaacaaaattctgaggccccctcaaccatctaaatggacttccttctgggccaggacactcgaaaattaaacctgaaagactggttcaggccatgatgggaagtgggagtcgaacatgcctcatcataccctccagcattaacatcaacacagaccttaaggctgataagaagcatttacaatctattctctctgaagtcttctacctggaggcttcatctgcatgataaaactttggtctccacaacctcttacaacccaggcattcctttctatcgataattactctttcaaccaattgccaatcagaaaattgttatatctacctataatctagaagcccccacatcaagttgttttgcctttctggacaggaccaatgtatatcttaaatgtatttgattgatctctcatgtctccctaaaatgtataaaaccacgctgttccccgaccacctggagcacatgttctcagggtctcctgagggctgtgtcacaggccatgttcacttacatttggctcagaataaatctcttcaaatattt

SEQ ID NO: 229688 - DNA, 580 bp, Homo sapiens
agaggcagcagattaataattggcatagataaaaaagttaccatgcaaatactaaaaagaagccagtgtagctatattaatgccagacaaagtagactttatgacccaaaggttgaggtaaaagcactactagggacaaagagtaatgcctcttagtgatgaaaggtaaatttaccaagatgataaaacatttctaaatctgtatgcacttcatgacataagctcacaatatacaaaacaaaaatagtaagaaagatttagagtgaaaactcattgacataaatttaaaactcacacacaacaccacacatctgttgagtacctctctctccaaggacacatgctgaatgcatcacactgggtggctgtgatgagggaggtgggattggggcatggaaaaaccgtgaaatcaagtgagagatacctccccacaaccaggtgccgcagcccaataggaagagacgtgcttggtcaacttagtttctgccctcaagcaccagagagaaaaggcagagaaaccaggtaagggcacattgtctattcattagacccatggagttttcaataaaaggacacaaaa

SEQ ID NO: 229689 - DNA, 540 bp, Homo sapiens
gactgctgaggcatattagaattgaggagtggtagtggttaagtgacgtctgtcagaacttgggcttttttgaattgaggtttataaccctcataaatcattaaatgccttgagtttatatgggaaagggagaataagtatgatttttaagtctgatattgcaatagcgtgtgccccagataattaaagctgtagaaagttctaacgtaataatcacctaatgcaaagtgaaactggttccatttaaaaattcaggaaacagggttaggtgcagcggctcacgcctgtaatcccagcactttgggaggccaaggcaggaggattgcttgagcccaggagttcaagaacagcctgggcaacatagtgagacctcatctctgtgaaatactaaaaaattagcttcaggcacatgcttgtagtccgatctactcgaaaggctaaggctggaggatgccatgatcctagcagtttgaggctacagtgagctgtgatcacgccatcgcactccatcccgggtggcagagtgagacctgtcttcgt

SEQ ID NO: 229690 - DNA, 370 bp, Homo sapiens
catatacctcgtgacctgggcatgatctttaacttttttcccccacctctctctgagtgtggctaactactgaccacgttttgtcagttccacttcctcactatctctggaagctgtgtactattctacactctcactgccctactctggttcatgccatcactgcttgcctgtaatccttcagtagcatcctaagtggcctcttttctttccttctggtgtcccccttcctctcaatctatcctccatccagattgagctttctgcaatacaaatgagttattttctctcccctgatttcagcctctcgttatcctttggataaggtccaaaacctgtaacacatgaccctcagagccctttgtggtgt

SEQ ID NO: 229691 - DNA, 369 bp, Homo sapiens
agcaggcaaagagtttgtgcagggaaactcttatttttaaaaccatcagatctctggagactcattcactatcagaagaacagcgcaggaaagacccgctcccctaattcagtcaccttccactgggtccctcccacaacatgggggaattcaagattatatttggctggggacacagccagaccatatcaagtggctaatcatcatatgctgttcagagagaaggagactcaggccaaggtcagatatactcgaggcggctgaatgctattgcagggagagctcatcctggaatcggatcagacagaattttggctccgccattattaagtcactgagccactctgacttccagtctcatctattaaa

SEQ ID NO: 229692 - DNA, 453 bp, Homo sapiens
agagattctggtttacctgatgtagggggaatgtgggtattgtcatttttaaaagcttctcagatgtttctagaagctgtgtttgagaatcattgttctagacactctgaccaaatgataagtagtactagtgatagcagacatccttttctggcttctgatcataagcttctagtattgcaccattaatggtgatatgagctgatcatttgagattgactcagtggtgtgttggaggcagctggtacctgctcaaaaggtgtaactgtacacatattttcccaacttcacattcattgacattatgttgatcacttcaaatcagccatggttgattcacatggaaattgacaaatgctaaaatcagcgctccccaccttctctgtcaacctgttcattatttgccagcacatcacagtagatctttattagcttaaagaagtattctttttt

SEQ ID NO: 229693 - DNA, 558 bp, Homo sapiens
atattatagaccatatatatatatatatatatgtttatttttttgagatggagtctcgctctgttgcccaggctggagtgcagtggcacagtcttggctcactgcaacgtctgcctcccaggctcaagtgatcctcccacctcagcctttcaagtagctgggactacaggtgtgcacaaccacacctagctaatttttgtatttttgtagagacggggtttcgccatgttgcccaggctggtctcgaactcctcacctcaggttatctgcccgcctatggtctcccaaagtgctgggattacaggcgtgagccaccgcacccagcctatccctgtctttatagaaacattgtgaaaaggagagagttctgaatgttgatgtccctgaggtagagcaattgcatgtacccaaaatctgtgtgttttcatttgtgagcatctagtccagtgccctcccttcacttgctctgagggtgtaggatgttgtgatacccattagctaattacctttggaaatgatttcagaggattagaatgccacttcagccacccatttttt

SEQ ID NO: 229694 - DNA, 356 bp, Homo sapiens
gtacaagtgtaattttgttacatgcatagattgcatagtggtgaagttaaggcttttaggatatccatcatccaaataatgtacatcgtacctatcaagtattctcttattgtccaccagagtttgatttctttagattccacatattaactgagatcatgcagtatttgtccttctgtgtttggcttatttcacttagcataatgactcttaggttcacctgtattgtcacaaatggtaggatttctttttttttttttttttttgaggctgaataatactccatcgtatgtatataccatttttaatccattcatctatagatggtcacctaggtttccatagcttagctattg

SEQ ID NO: 229695 - DNA, 444 bp, Homo sapiens
atgtctctctttcttcatttgtagattgtatataaatttcaagtagacagttatcttttctcctttgaaaatttcattgtttagtgttgctgatacagttagcataattatttttcttttgttagatcatttgtctcttttctggtagctcttaagattttctctttgtctttcgcatgctgcatttttgcataattggtagaaaggacttattttgctcagaactcttttttttttttttaaacagcatctctctgtcacccaggcctgagtgcagtggcacgatcatagctcgctttaccattttcctccctgggctccagctactcgggaggctgaggcaggagaagtgcttaaacccgggaggcggaggctgcagtgagccgagatcacgccattgcactccagcttgggcaacaagagtgaatctccatctcaaaagaa

SEQ ID NO: 229696 - DNA, 501 bp, Homo sapiens
ctggcagcctcgggtgttccctaagagggatttctttcttagatgtattactactttttctagggattagccaagcctagcctctcagatcatattgctccaggttccctcaaatgactaataagaatgtgatgtgtttgtttttgtttgtttgtttttgagacggagtctcactctgttgtccaggctggggtgcaatggtgcgatctcgctcactgcaacctccacctcgattcttgtgcctcaggctcccgagcagctgggactacaggtgtgtaacactacacccggataatttttgtatttttagttggagacggagtttcaccatattggccaggctggtctcaaactcctgacctcaagtgatccgcccgcctcggcctcccaaagtgctgagattacaggcatgagccaccgcgcccaaccgaatgtgatatttttatgaccatgagaaaagaagggctgcattctttggtgggtccgcaaaattaaaaaaaa

SEQ ID NO: 229697 - DNA, 326 bp, Homo sapiens
attccatatttttagtggggtattggttatacaggtagatatatttgtcagaattcattgaactgagaacttaaaatctgtgcattttccgaacacttcaacagaaataataaaataagaaaaatgtttaaatggaaaaaattactaagcatgaaagcaataatcgagtggatatagattgttatataacaagtagaatatctaattgtgagagaaagcagagtaaaagaatcatcaacataggctggagtggagtcaatccaggaatgctccctatttgtgtgtatgagctgggttttggggaaaggatgagctgtagatggcca

SEQ ID NO: 229698 - DNA, 2053 bp, Homo sapiens
cacgggagtgcagcccgcccatgtggctactggaggtcacgttccctaactgatcccttggttctctcgggtggagccttcagcgtgcacggcggggtttgactttgccaccgtctctcttctgggttccaataaagttttcctcttcctctcctcgtacggagttcaagatggcggcctcctggtcgctcttggttaccctgcgccccttagcacagagcccgctgagagggagatgtgttgggtgcggggcctgggccgccgctctcgctcctctggccaccgcccctgggaagcccttttggaaagcctatacggttcagacatccgagagcatgaccccaactgccacttcagagacttatttgaaagctttggccgtttgccatggacctctggaccactatgattttctgatcaaagctcatgagctaaaggatgatgaacatcaaagaagagtcatacagtgtttgcagaaattacacgaggaccttaaaggatacaatatagaggcagaaggccttttttcaaagcttttttcaaggagcaaacctccaaggggcctgtatgtttatggagatgttggtacaggaaaaacaatggtgatggacatgttttatgcttatgtggaaatgaagaggaaaaaacgggttcattttcatggtttcatgctagatgtgcacaaaagaatacatcgccttaaacagagtttgccaaaaaggaaaccaggattcatggctaaatcatatgacccaatagctcccatagccgaagaaatcagcgaagaagcatgtctcctatgttttgatgaatttcaggtcactgacattgctgatgccatgattctgaaacagctttttgaaaatctgttcaaaaacggggtcgtcgttgtggcaacatccaacaggccaccggaagatctctataaaaatggactccaaagagctaactttgtaccattcatagcagtcttgaaggaatattgtaatacagtccagctagattctgggatagattaccggaaaagggaacttcctgctgcaggaaaactctactacctcacaagtgaagctgatgtggaggctgtcatggataagttgtttgatgagctggctcagaaacaaaatgatttaactagaccaaggattctaaaagtgcaaggcagagagctgcgcctgaataaagcctgtggaaccgttgccgactgcacatttgaagagctgtgtgagagaccacttggagccagtgactatttggaactatcaaagaattttgatacaatatttttacgaaacattccgcaatttactctggcaaacaggactcaaggtcgaagattcataactctcatcgataacttttatgatctcaaggtgcgtataatttgctctgcgtcgactcctatatcaagcttatttttgcatcaacatcatgacagtgagttggagcaaagcagaatactgatggatgatttggggctgagccaggattcagcagaaggactctccatgtttaccggagaagaggaaatctttgcatttcagcgcacaatttcccgactcacggaaatgcagactgaacagtactggaatgaaggagacagaaccaagaagtaactgccacttttgcataaataaaactctagacaaatggttaacgcaggcagaactccttattgtgggacttgaaggaatcattttctcatcattaattatgcactttgtcctctggaccattttaatctaaaattgctctcaaggatctagtggattagtaagttaaacacttaacattttttaggtctgctttttcttatttggccttatttctgcaccatgaaattaaaatcatctcattcctgaagatgaatgtaggaccagacattttagcttcacattaaaccacctgaatgaaccttgaatgcacaagtaaatgcaagacgtctggataccttcaagctttggctgcatggtggtggcatgttagaaatacatcttttataatgggggaagaatgccctatgtttcaattcaaaacaaagacagttttccaa

SEQ ID NO: 229699 - DNA, 2889 bp, Homo sapiens
cacgggagtgcagcccgcccatgtggctactggaggtcacgttccctaactgatcccttggttctctcgggtggagccttcagcgtgcacggcggggtttgactttgccaccgtctctcttctgggttccaataaagttttcctcttcctctcctcgtacggagttcaagatggcggcctcctggtcgctcttggttaccctgcgccccttagcacagagcccgctgagagggagatgtgttgggtgcggggcctgggccgccgctctcgctcctctggccaccgcccctgggaagcccttttggaaaggtcagtgactgtgccatgagtagtccgagccgactgcatatgactggagaagcctctgggattaccctccctgtccgatctaccccaggtgtctcctgctttcacgaagctgagggctcctcgagaggagtttccatttctcttgaccttttatactgtctgtgaatgagccctgagcactgagggaaatgaccctgagtgactttcattttgagggtcagaggttgactcagagtttgttccttccgggacgtttagagagctgaacctagtgggagtgcctggcttgaagagatgcaggtgtggggttggggcctggggacccctaccctctgcgttttccaagctctcggggctggtgactgacgggcactggaggaagagccgcgcctgggacctctgcaggccctgatgtctctcgtgattctaggaaggaaggtccacacacattctcagattgagggatcgattcttggtgttcttttcaagtcactaggggcttcagtggaattattttgtcaccgggctttctttctccctggcttccttcattcagttatatgttcatgaatgaatgaatgaatgtatattctgagtaaccaagagtgccagttttactgctctattcatgtattcgcactaaactgcacgattttcaaagagatgaggtcttgctatgttgccaaggctggagtgcagtggccattcacaggtatgatcatggtgctctgcagcctccaacttttggtttcaagggatcctcctgcctcagcctcccaagtagctgggactacagatgtgtgccactccacccagcctcaactttaaaaaattagcctatacggttcagacatccgagagcatgaccccaactgccacttcagagacttatttgaaagctttggccgtttgccatggacctctggaccactatgattttctgatcaaagctcatgagctaaaggatgatgaacatcaaagaagagtcatacagtgtttgcagaaattacacgaggaccttaaaggatacaatatagaggcagaaggccttttttcaaagcttttttcaaggagcaaacctccaaggggcctgtatgtttatggagatgttggtacaggaaaaacaatggtgatggacatgttttatgcttatgtggaaatgaagaggaaaaaacgggttcattttcatggtttcatgctagatgtgcacaaaagaatacatcgccttaaacagagtttgccaaaaaggaaaccaggattcatggctaaatcatatgacccaatagctcccatagccgaagaaatcagcgaagaagcatgtctcctatgttttgatgaatttcaggtcactgacattgctgatgccatgattctgaaacagctttttgaaaatctgttcaaaaacggggtcgtcgttgtggcaacatccaacaggccaccggaagatctctataaaaatggactccaaagagctaactttgtaccattcatagcagtcttgaaggaatattgtaatacagtccagctagattctgggatagattaccggaaaagggaacttcctgctgcaggaaaactctactacctcacaagtgaagctgatgtggaggctgtcatggataagttgtttgatgagctggctcagaaacaaaatgatttaactagaccaaggattctaaaagtgcaaggcagagagctgcgcctgaataaagcctgtggaaccgttgccgactgcacatttgaagagctgtgtgagagaccacttggagccagtgactatttggaactatcaaagaattttgatacaatatttttacgaaacattccgcaatttactctggcaaacaggactcaaggtcgaagattcataactctcatcgataacttttatgatctcaaggtgcgtataatttgctctgcgtcgactcctatatcaagcttatttttgcatcaacatcatgacagtgagttggagcaaagcagaatactgatggatgatttggggctgagccaggattcagcagaaggactctccatgtttaccggagaagaggaaatctttgcatttcagcgcacaatttcccgactcacggaaatgcagactgaacagtactggaatgaaggagacagaaccaagaagtaactgccacttttgcataaataaaactctagacaaatggttaacgcaggcagaactccttattgtgggacttgaaggaatcattttctcatcattaattatgcactttgtcctctggaccattttaatctaaaattgctctcaaggatctagtggattagtaagttaaacacttaacattttttaggtctgctttttcttatttggccttatttctgcaccatgaaattaaaatcatctcattcctgaagatgaatgtaggaccagacattttagcttcacattaaaccacctgaatgaaccttgaatgcacaagtaaatgcaagacgtctggataccttcaagctttggctgcatggtggtggcatgttagaaatacatcttttataatgggggaagaatgccctatgtttcaattcaaaacaaagacagttttccaa

SEQ ID NO: 229700 - DNA, 1616 bp, Homo sapiens
cacgggagtgcagcccgcccatgtggctactggaggtcacgttccctaactgatcccttggttctctcgggtggagccttcagcgtgcacggcggggtttgactttgccaccgtctctcttctgggttccaataaagttttcctcttcctctcctcgtacggagttcaagatggcggcctcctggtcgctcttggttaccctgcgccccttagcacagagcccgctgagagggagatgtgttgggtgcggggcctgggccgccgctctcgctcctctggccaccgcccctgggaagcccttttggaaaggaatacatcgccttaaacagagtttgccaaaaaggaaaccaggattcatggctaaatcatatgacccaatagctcccatagccgaagaaatcagcgaagaagcatgtctcctatgttttgatgaatttcaggtcactgacattgctgatgccatgattctgaaacagctttttgaaaatctgttcaaaaacggggtcgtcgttgtggcaacatccaacaggccaccggaaggaatattgtaatacagtccagctagattctgggatagattaccggaaaagggaacttcctgctgcaggaaaactctactacctcacaagtgaagctgatgtggaggctgtcatggataagttgtttgatgagctggctcagaaacaaaatgatttaactagaccaaggattctaaaagtgcaaggcagagagctgcgcctgaataaagcctgtggaaccgttgccgactgcacatttgaagagctgtgtgagagaccacttggagccagtgactatttggaactatcaaagaattttgatacaatatttttacgaaacattccgcaatttactctggcaaacaggactcaaggtcgaagattcataactctcatcgataacttttatgatctcaaggtgcgtataatttgctctgcgtcgactcctatatcaagcttatttttgcatcaacatcatgacagtgagttggagcaaagcagaatactgatggatgatttggggctgagccaggattcagcagaaggactctccatgtttaccggagaagaggaaatctttgcatttcagcgcacaatttcccgactcacggaaatgcagactgaacagtactggaatgaaggagacagaaccaagaagtaactgccacttttgcataaataaaactctagacaaatggttaacgcaggcagaactccttattgtgggacttgaaggaatcattttctcatcattaattatgcactttgtcctctggaccattttaatctaaaattgctctcaaggatctagtggattagtaagttaaacacttaacattttttaggtctgctttttcttatttggccttatttctgcaccatgaaattaaaatcatctcattcctgaagatgaatgtaggaccagacattttagcttcacattaaaccacctgaatgaaccttgaatgcacaagtaaatgcaagacgtctggataccttcaagctttggctgcatggtggtggcatgttagaaatacatcttttataatgggggaagaatgccctatgtttcaattcaaaacaaagacagttttccaa

SEQ ID NO: 229701 - DNA, 1733 bp, Homo sapiens
cacgggagtgcagcccgcccatgtggctactggaggtcacgttccctaactgatcccttggttctctcgggtggagccttcagcgtgcacggcggggtttgactttgccaccgtctctcttctgggttccaataaagttttcctcttcctctcctcgtacggagttcaagatggcggcctcctggtcgctcttggttaccctgcgccccttagcacagagcccgctgagagggagatgtgttgggtgcggggcctgggccgccgctctcgctcctctggccaccgcccctgggaagcccttttggaaaggtcagtgactgtgccatgagtagtccgagccgactgcatatgactggagaagcctctgggattaccctccctgtccgatctaccccaggtgtctcctgctttcacgaagctgagggctcctcgagaggagtttccatttctcttgaccttttatactgtctgtgaatgagccctgagcactgagggaaatgaccctgagtgactttcattttgagggtcagaggttgactcagagtttgttccttccgggacgtttagagagctgaacctagtgggagtgcctggcttgaagagatgcaggtgtggggttggggcctggggacccctaccctctgcgttttccaagctctcggggctggtgactgacgggcactggaggaagagccgcgcctgggacctctgcaggccctgatgtctctcgtgattctaggaaggaaggtccacacacattctcagattgagggatcgattcttggtgttcttttcaagtcactaggggcttcagtggaattattttgtcaccgggctttctttctccctggcttccttcattcagttatatgttcatgaatgaatgaatgaatgtatattctgagtaaccaagagtgccagttttactgctctattcatgtattcgcactaaactgcacgattttcaaagagatgaggtcttgctatgttgccaaggctggagtgcagtggccattcacaggtatgatcatggtgctctgcagcctccaacttttggtttcaagggatcctcctgcctcagcctcccaagtagctgggactacagatgtgtgccactccacccagcctcaactttaaaaaattagcctatacggttcagacatccgagagcatgaccccaactgccacttcagagacttatttgaaagctttggccgtttgccatggacctctggaccactatgattttctgatcaaagctcatgagctaaaggatgatgaacatcaaagaagagtcatacagtgtttgcagaaattacacgaggaccttaaaggatacaatatagaggcagaaggccttttttcaaagcttttttcaaggagcaaacctccaaggggcctgtatgtttatggagatgttggtacaggaaaaacaatggtgatggacatgttttatgcttatgtggaaatgaagaggaaaaaacgggttcattttcatggtttcatgctagatgtgcacaaaagaatacatcgccttaaacagagtttgccaaaaaggaaaccaggattcatggctaaatcatatgacccaatagctcccatagccgaagaaatcagcgaagaagcatgtctcctatgttttgatgaatttcagggctcctggaacattggctggatggccatggattccggaaaccggctttttggaaaatccgggtccaaaacgggggtct

SEQ ID NO: 229702 - DNA, 456 bp, Homo sapiens
cacagagacactgacgttagtgtttttggtatttagtgacttgtgaaatcacaggtgacttctgatagtgcagacttagggcactattggggtgggggaaaagaaggcagaagccagactgcagtggggtgagcaaatgtgagttcaggaagtggagatagtggaggctgatttggagaagtctggatgaggaggaacaaggagatgccttttttttttttttttaaggataaactatacttgaacattttttcccattaaacatacatgtattggggtacctgcccacagcctttttaatctgctgtggcacattgcctctactgagttgcatgatcttgtcttccctctgatcctacctcacagagaagagtagcccgttcacaatgacctatgtattgtgtgacctgtttgtattttcttgtaggaatttgaattaaaagacacagacaagtt

SEQ ID NO: 229703 - DNA, 511 bp, Homo sapiens
atagtagtctttaatactttaaaggattaaaacagtaatgcaacactgtctacgtgctaggacctgaactaaatacttggaaatattttattttatcaacccaatgaggatgatacaattattatgcctctttaacagatgaagaaattgtagtttagaaaagaaagtagctgttcaaatacacactacactacaggtggcaaaatagggctttcacctgggtaggatgattctagaatgccactttacagccactgaaatatattgcctcccaaatgattctttctgctcaaagagttttttttaagttatctacttatttatattctgcttttttcaaaaagaatgtgagaacagtacaaaatgtgttcagtatagcaaattaaaattaattaaaaagtaagaaaaagaagccaatttgggcaacccactcgggtccccttccacgctgtggaagctttgttgtttcgctcttcgcaataataaatgagcttgatgttttattgagtac

SEQ ID NO: 229704 - DNA, 461 bp, Homo sapiens
acaataaaataaaaaaatttgtagaatgggaaaaaatatttgcaaaccatacatctgataaaagattgatatacaaaatatataagaaatgcaagcagattaaaagcaaaaacaacagtaacccagttcaaaataggcaaaaactaaactgatatttgtccaatgaagacatacaaatggccaagagataagccataaagtactcaatatcaccaaatatctggcaattgcaaatcaaaaccatgatgagtatcatttcaaacatgttagaatggataatgtaaaaagaagaaacataacaagtgttgacaacactttgaagaaaaaaattctgtacattcttggagagttataaattgatggagtcattacaaaaaccaatagaggttatttgaaatacagaactactgcgcaatctagcaatagtagtattgtgtatataatactgtttatataacaaa

SEQ ID NO: 229705 - DNA, 435 bp, Homo sapiens
ctcaaaatcatttactaaacagtctgtcctttctgaattgattcctcttgctaactttatcacgtattgtttctgtctgcacatgggtttgtctctgcattctctgtccattggtctgattgtctgctcttgtgtaaacactacaatgtttttattactatagtgatatctgtactatatctcaacacccaataagacaaattctctttttttttcaaaggttgactttaactatttatgggcctttaaaatttttaagtttttgagttactaaaaaattcaacttgaatttttattgggattgcattaaatgtataggctaattgggaaaaattgtccattttataatattaattattccttctaacaatgtaaatatattccatttattcagattattttctgtgtgttttattaaaattttacatttttctc

SEQ ID NO: 229706 - DNA, 620 bp, Homo sapiens
gaaaactataccatctgggtcattttatgtttgcatttgcttattgttttttcctttgaaagttggtcacatttttctagttctttgtgtgtcaagtaattcttgtaccctggacatttatcctgaccatatgttataagactctgatcctgttggccaatattccctggagaatatctatgtttttgtcttagtagacaaccacacttcagatattacaagttctttgtcatcttgtgtggctgttggttccactgtcagttcagttttcaagacctttgctgtgttgctttgggtctgtcccatgcatgtcctgcttaagggttaatctggggcttgggcagtggtttatatcattgttcagttctcaaagccttttctgtgctgctttgaatctaccctgtgcatgcatagctcaagagggaacctaagatgtatgccaattcacatacagaattaggagatcctcttgttcagctcattcctttgcagttctcctcccatattctttggccttcagagtcctcttttcccagtcctcaggccagaaagatggggtttctctgagttttacattcacataccaccactgcaacagttcaaaaccacaagagaaaata

SEQ ID NO: 229707 - DNA, 431 bp, Homo sapiens
ttgccaagtttttcaggaagtgctagtggccattttgatgatgtgaactagattttaaaacagaaagaggaaaaatgaatgtggtggacaagggctgctgacaatattagatagaatcagagatggagtctcactatgttgcccagtctggacttgaagtcttggcctcaagcaaacccccttgcgtcagcctctgaaagtgctgggattacaggcatgagctaccgtgcttgccttctcctccttctccttctccttcttctcctcctcctcctccttctccttcttcttcattgttaattttaggtgcagcaattccatccaggggataaaagatttatttattttattttatcattttttaaaatttattttttcgagatcgcgacagtgcgctacagcctgggcgacagagggagactcgtctcaaa

SEQ ID NO: 229708 - DNA, 1021 bp, Homo sapiens
gacttcccaagatacttccttagaaacaggacaaggatatgaagatgaacaagatggctggaacagttcttcgaaaactactcgagtaaatgaaaatattactaatcaaggcaatcaaatagtttccctaatcatcatccaggaagagaacggtcctaggcctgaagagggaggtgtttcttctgacaacccatacaactcaaaaagagcagagctagtcactgctagatctcaggaagggtccataaatggaatcactttccaaggtgtccctatggtgatgggagcagggtgtatctctcaaccagagcagtcctcccctgagtctgcccttacccaccagagcaatgagggaaattccacatgtgaggtacatcagaaaggatcccatggagtccaaaaatcatacaaatgtgaagaatgccccaaggtctttaagtatctctgtcacttattagctcaccagagaagacacaggaatgagaggccatttgtttgtcccgagtgtcaaaaaggcttcttccagatatcagacctacgggtgcatcagataattcacacaggaaagaagcctttcacatgcagcatgtgtaaaaagtccttcagccacaaaaccaacctgcggtctcatgagagaatccacacaggagaaaagccttatacatgtcccttttgtaagacaagctaccgccagtcatccacataccaccgccatatgaggactcatgagaaaattaccctgccaagtgttccctccacaccagaagcttcctaagctgctggtctgataatgtgtataaatatgtatgcaagtatgtatattcctatagtatttatctacttaggatataagatataatctcctgattatgctttcaatttattgtcttgcttcattaaaatgtaaggctaaggagagcatggaatttgtcagttttgttcactaaagtattccaagtggttgggaaagtggaacatttccaagaaccaataaatttctgttgaataaatgaatgaatcc

SEQ ID NO: 229709 - DNA, 261 bp, Homo sapiens
gcattagcagttgatacttgatcagcttgttagatgtagaaggtctcactgaagtttgagaatcacactaactttttaaagtagatttttgtttgtttgtttttgagacggaattttgctcttgtcacccaggctggagtgcaatggcgtgatctcggctcactgcaacatccacctgctgggttcaagcaattctcctgcctcagcctcccgagtagctgggattacaggtgcctgccaccatgcccagctaatttttgt

SEQ ID NO: 229710 - DNA, 831 bp, Homo sapiens
gggagggagggaaggagggaggacttgtatgtgagaagtgacttctaccttactgctttaaaaaatgtatctgtcttttgacaacataaaatgtcttgtgtctaaacatggatcccttgtaattcacgcaacttcttacaagtgaagattacagtttttcatcaaatttgtgaagttttcagctattattaaactattctttaagccaatttctttcttccctctcactcctggtacagtatatcttggtatgcttacttcatggcgttccatagattatataagactatattaatttgtcttatttttctttctcttcagacgagataatcttaattgaagttcctacaagtttgctgattctttcttctgcctgtttaaatctacttttgagttcatctggtgaaatcttcatttcagttgtcataattttccaccccagattctatttagttctttttaatttctgattattgatattctccacttaatgagacatcattctcctactttcctttatttcttcacacatgacttcctaattaggcctttgaacaatgtaatataactgatttataagctactctagttactgtgtctggacttccttagaatgaatttctgttggctgtgctttttcttgcgtataggctgtactttttttttggttttgtgcctgtctcattttttgttgttgttgaaaactgaacatttaaaataatataatttggcaactgtgaaaatcagattcttcattttcctaatgtgtgttatgattggttactgttgcttagtaaacaacagtactgtgactttcctaaactaatccta

SEQ ID NO: 229711 - DNA, 588 bp, Homo sapiens
acacggcctctataaaaaataataataataatgaatgggctgggggcagtagctcacacctgtaatcccaacacttcaggaagccgaggtgggtagatggcttgagtccaggagtttgagactagcctgggtgacatggccaaacccagtctctacaaaaaaatacaaaaattagctgggccctgtagtcccagcacttgggaggctgaggcgggaggatccacttgagcatgggaggtggaagttgcagtgagctgagatcatgccactgcactccagcctagctgacaaaatgagactcaaaaaacaacaaaaaataagtcttggtgtggtggctcacgcctgtaatcccagcactttgggaggccgaggtgggcggatcacctgaggtcaggagtttgagaccagcctggccaacatggtgaaaccccatctctagtaaaaatacaaaaattagccaggcatggtggtgcatgcctgtagtcccacctactcgggaggctgaggcaggagaatcacttgaacccgggaggcggaggttgcagtgagctgagatcgtgccactgcactccagcctgggcaacaaga

SEQ ID NO: 229712 - DNA, 510 bp, Homo sapiens
agtgccaaagttttgaagaatctgatacaaatattgttttttccactccctcatctgaacttctctctcttaaacctaggttcctccataggcttcccctggggaatggtctgtgaggtagcggtcatgggcctcgaagtgttttctggattgatcacggttactgtgtctactctctgctgctagcacactggcatgttagtaattttagctgatatccctgtcccaggttcccttaaaccaagaagctcagatgaggcagctgcgttcatttttttatttttaatttctagatttatttaaatcacagaagtaatatttatttattttgacaatgtaaaatatacagacctgtagaaagagaaatagtctccttcacttgtctcccatcaaattctactcccctagaaatagtttgtgtctttgtatattctttcctttgtacacattagcagatatgatatggatgggttggtttgctgtataaaagtgaccttaaactgtacctat

SEQ ID NO: 229713 - DNA, 1741 bp, Homo sapiens
gaattatgccaagcatttgtataaggctaatgtttagcaggaagcattcatgatcaacgatttatcttgaaaataagattccttcgtctgagggattgatctgtatgtgtgtgtatatttagtttctcatgacaagaaaaatggtattcagtcagctataatatcagtatctataatctatttctcggtaaacatatttgtacatatacacgtttatttttctaatttaacagatgtccttggtatttatttgcattttgtcatagcattcttgctcatatgacctgcactccagcctgggtgacagagccagacttatcccaaaaaaataaatgtacagtttacagagaaatactagacacaggtaagttgaaaataaatagattgaaaagcatattttaagaaaacagtaaaagattgaagtgactatattaatatcaggtaaaatagattgcaacagaaaaattttgtatcaggtaatgtggattcttcatagtaacaaaagttcatcaggaggacatatcaatcataagtgtatatttatttaatgcagaatgacttaatacatgaaaactgactaaaggcagaaatagttccacaatcagattgagattttaatgtaactctttcagcaactaataaaaaaaaattactcagaagatttggaatttattattagccattcttgatcatattgatgtttattaaacgttatatcttacagctagagaattctcattcttttcacatgcatatggtacattcaccaaaacagagcatgctgggctttgtacatgctgggccataaggtacaaaggattaagattatatagagtatgaattttgaccgcagtggaattaaatttcaagtatttggaaagtgacacacttttttgtaatcagttggtcaagaaatgtcaaagggaaatcagaaaatattttggaccgagtgattgtggaaatgcaagataacaatttatgagatgaagctaaagcagtgtttggaggaaatttatatatttaattatgttggaataaaactacaattatctaatttcctacctaattaaacatttaaagaaaacagcaaggtaaacccaaggtaatgtaaaaaaaggaaataataataaattcttgaaatagaatacggacaagtagagaaaaataatgaaactaaaaagagttcttggaaaagttagttaagataaagctctaattagactaatccagaataagagagaagacactaattaccagtatatttaataaaataggagacatcactgtcgatcatatggacattaaaaggccttataagagaatatcataaacagctctaagccagtaaattagacaacttagttgaaaaaaataaattctttggaaaacacaaattattacccaggagcaatagaaaattttagtatccctatattgattagagaagctgaatttgcaattaaaaattattccaccaagacaatgtgaagcctaaatggccacactaataaattttatcaaacttcaagaaagaaatattgtgaatcttatgtaaagtcttccattaagaaaaaaaaatgagaatacttcttaactcattttattataacaaattggtaactatcattgttactgtgatactaaaattcaacaaagataacagcaaaacaaagaatcagtattcttcatggatatagatgtaaacattttaaacaaaatttgagcaaattaaattaacgat

SEQ ID NO: 229714 - DNA, 524 bp, Homo sapiens
atgcaaaggttataagtccacctgtgctatttagtaactgtgtaacttctctctgcctcaatttctttgtgcagtggggatagtaatatggttctgagtctacctgtgctatttagtaactgtgtaacctctctctgcctcagtttctttatctgtgcaaccccttcctcatggggttgttgtaaggattaagtgagctaatagatgtaaaacacttggaattgtgcctggcatatagagctcagtaagtataagctatgattaatgacaccatcatgctctccccatacatcacccatgacagtccacctgttgaggaaagtaggggttgtgtttacagttttatgaggtagattgagttatagttggatatctttaaacttggaaaaaaaggtgtgtgtgccggataggtaaggggcctgatgtgatgagcaaacacctttgtctatgatagtatatatatttttaaattcagctatgaaacagaagatttgacagaaataaagagctaataatttctcctt

SEQ ID NO: 229715 - DNA, 758 bp, Homo sapiens
gggaggctgaggcgggtaaatcacctgaggtcaggagtttgagagcagcctggccaacatagtgaaaccccgtctctacgaaaaatacaaaaaattagctgggcatcgtggcaggcacctgtaatcccagcttctagggaggctgaggcaggagaatcacttgaacctgggaggcggaggttgcagtgagccaagatcacaccattgcactccagcctgggcaacaagagcaaaagtccatctcaaaaaataaaaattaaaaaaagcaataaattgatttacagtcaacagaacacagacattagaaagtagttgaggcaccagagtctatggagaatgaaattaagatgggatgaaaggcagcatttgaatccattgctgtttaaatgctgtatttctgttttcctcatgatcgcacttaatgttaaaaacaagtatgcaaattcaaccttggcacattagtgagttatcaggccatttggatactttgagattcttattttaaccagtactgttgattgtgaggctatgtctgtgtatgtgagtgtgtgtgtgcttgtgtgtgttgtaaacgtaaatatttaaattggttcattataatctgtgaaaattaacctaactttatctgaaaaaaaattgcaagtggcaacggtagacattcttgtgtcctgcctatgggtagatagaagcttttttcattttatttgtttgatagttttctagcaaatttatttaattagtaaaagaatcgagagaga

SEQ ID NO: 229716 - DNA, 646 bp, Homo sapiens
gccacattttcttaatgcagtctatcattgttggacatttgggttggttcagtatattgaaatttgatcctcaatgtggcagtgttgggaggtgtagcctagtgggaagtgtttgtgttatgggggcagatccctcatgaatgtcttgctgctgttctcacagtagtaagttcttgctctcttgaggctagattagttcttgaaggaattgattatttcccgaatgagtgggttgttataaagccaggacacccctcaggttttcccctctttgcacctgtctgcttcccctttgattttctccaccatgttatgcagcacaaaagccctcaccagaagccaaggctatgcccacaaacttttcagcctatagaaccataagctagtctcaggtatttttctatagcaacacaaaatggactaagacagaactgttcagtgaattaaagttgtaattatgaaattcccaaaaaagaaatatccaggctcagatgctcttattgaagaagtctaccaaactttttaaggaagaattaaaactaattctacataatctcttccagaaaatagaagaggaagagacattttccagttaatgttaagaaatgttttaccttgcttatatcaaaaccaaagacattacaga

SEQ ID NO: 229717 - DNA, 547 bp, Homo sapiens
tgagcgcctgggtctgcacgttggcagttttattatttagcatttttccaaggagatgagatttacatatacttgcaagtaacttagtcagtccgaggtgggagtcctgcagtgtgggtttctgctgctatgggtctgagaagaggctgtaaggactcctcaggaggttgttaactgtcttccctccccccatcaccagcctgtgttcctgggtattgacgtgtagctacccgcagctctccccttgcctctgcttttcacatagttcccaggaggcataatttctgctgtaaatcaattaaaacttctagagcgctctacacggtgctaacatgcttttactgcctaatcctcacactgtctttgtgatgcaggtgtcatcgttcccactttgagatgatggaatgataattataataaagtagtctggtttggcaaagtggagtacgccatttgaagactctcaggagtttaatagtttaagttctggagggagtcagttttgaacccaatatcagtattgaaaatgtttgaaatttacaagtgg

SEQ ID NO: 229718 - DNA, 226 bp, Homo sapiens
ttatatataaatatttatataattatataataaatataaaaatttagtttctttttttaaccctcttataccagggagaatggctattttaaaaaaaaattttttattatactttaagttctagggtacatgtgcacaacgaataatttagtttctaattaaacatttaaatgcatatttaaccattggctttttttgcttaataaaggtaatgtttgataatatg

SEQ ID NO: 229719 - DNA, 891 bp, Homo sapiens
tggacacataacaaacaattactgagcaactactttgtgtaaaacattacactagggactagaaataaaaaatttcttaagaccttgttcttaacctgtggagtttctgttacagagcatgtcattctgacatggggcgagttgtgccctcccccaattttttcttctctaccaggatttcctgaccatctttcaagatctttcttgatgaaactacccaacaatgccatgataaactttattgctgtttctgtactcgtcttccttggtagacagtgtagaagagaaacattttgtgttgtttagatttgaatctgttagattcatgatgtttattaacatgtgtgcattgacccataagtggggtgtgaaattggtagatttttgactggtactttaaaaaactggagtagaagagaacggaaactgtcaaagtgattcacacattaagaatgagtaatgcttcatgaaatttgtttctattatttatgtgagtgtcttgagtcacaatgtaaaatatttttactaaggatcatttaaaaaatcaataaaacactggaggctcagtaatttgggatagactataggaagaaacctagacctagagattctgaagttttcagattataaacagatctatactatacatagaaagcaatgggttacacaagtttatagcttaagtaaaccaataaaatagcaaacatgtctatacattaaggcaggagtcagcaaactatttctgtaaagatagtaaatattttaggttttatagactataagtttcctgtcacgactctgcaactctaccatcatagcacaaacgcagccacagatgatgtgtaatggaatgacaatggctgggttccaataaaatttgaattttacata

SEQ ID NO: 229720 - DNA, 509 bp, Homo sapiens
taaaaataaataaataaataaataatggaattataattcatgtgttttatatgtttgatataaggaataaaaataaatacacatcctctctaatgtctaattcttttgcatcatacctggtatgctactgtaatttacctttcttatttttggttatcgtggtggtttccacttttgcctattgtaaataatgttgcagcagacatcattttatataagtcttttggtacagattttggattttcttttaaggataaattgttagatgcacaatgataaagaattttcttatttcttatattgcttacttatcttagaagattataccaatttatactaaactgagaatattttcaaaatatatgcagagtctgaatacttctcactaactttacttataccacttggtcaaagccactatcatctctcacttaaactttggcagtagcttcctaactggaagtatagactgccccctacagtctgtactccacataacagaagtttta

SEQ ID NO: 229721 - DNA, 486 bp, Homo sapiens
gaaggtgaggctgtatcacagagggctgtgtaatttaaagagctgcaagttcattaactttctagagttatatcctagtttgtaggataaatagaatgggtgtgagaaagaaaatcatgaaaaaaattccttttagatggatcacagattaggaaaaattcagtgaaaaaactggaagaggcctgctttggaaataaggtgtacactgtttagaccttagctttgtcgtacagacctagggaatagaagcccatgaaagtttgcaggattttgacagtttctctccaatctttctgctgaaagtatagaataaggagtgatccagattgcacaggggtgaattttccataatccaggactaaatgtggcagatgccaaatttatgagtgttagtaatcttcaccctgttgttcttgggatttttccatgaggagagaaaagaaagaattatctggattctagttccagccttgccactacctaaaa

SEQ ID NO: 229722 - DNA, 136 bp, Homo sapiens
gctcagcctcatcagcttggaaaaggctgccacaggcactcgtgctgctcatgtgcactttgtgtctaattattttcttggcaaccagtggataaatggcagcttcttccttttctgggagacagagagtgggagg

SEQ ID NO: 229723 - DNA, 981 bp, Homo sapiens
ttaaattctatattgacccttcaatgcctaagcaattaagtcccaatttcttaacctcacactcaaagcctttacaatttagttttcaactgccttcctaaacttccccatcttccaccctttaagtcctgatctactcacagttttccacacctaccctgaatttccccactttagtttcattaatagttttgtcactgcaatgacagaactgttaaagcccagcttaaatttatttaaaagtttacaagttgttctgggaatcatatagtttgatcctcagtagtgataaaacaacataaaattatgaaaaatgttattataacataatggaatttcctctactttaaatatttattttgcaccatccctgacctcactaccaaaaaaaaaaaattcaaagtgcctgaggtttccaggcattcttagctctatttacttacttcccacctcaaatggccttagaattcaaattctgtagaaaatggattgccataaataatccaatgaaaatgggtcatattttgccattaatagaatcacagtcaacaaggactaatagaattagtcacttaagtatctttagatatgggagacaacagaaacagtaagaatctcttctctttgttcccagccttgaatataactaggaagccttcccagaagaaagcagctgtgaagggtacccatcaggaatatccggctcagaagccagggcctcagagactgttctctcactgagacctagagagggaactccctgtgttattctcactgatggcccaggaaccacccttgcaagtcatgaccaccagcatcatgtagcactggaactgatctgggcaatgacctctgtctaaacttctgaatcccctccgacaaagacccaagacagcagcatggccatgcagctgtgctcacatctcacccctgcactggccaggaacacatctatctttcctttgggtagggtcacccaac

SEQ ID NO: 229724 - DNA, 124 bp, Homo sapiens
actatacttcttgttataatgcaaatggcatattgttcttcttccggcattaacattaatttgtactttctatgacattagctgtataacaatgtgttctgaatctgttaaggagaagtcctcc

SEQ ID NO: 229725 - DNA, 412 bp, Homo sapiens
ccataactatgagctaccaaccgcagagactgagagcttggcctgagttgtgccttcagaagggactctcttggcccctggggtacctaggggctcacaaaactgaggagtaggccaggcgcggtggctcacacctgtaatcccagcactttggaaggccgaggtgggcagatcatgaggtcaggagatcgagaccatcctggctaacacagtgaaaccccatctctactaaaaatacaaaaaattagccgggcgtagtggcgggcgcctgtagtcccagctacatgggaggctgaggcaggagaatggcatgaacccgggaggcggagcttgcagtaagccaagatcgagtcactgcactccagcctgggtgacagagcaagactccatctcaaaaaaaacaaaaaacaaa

SEQ ID NO: 229726 - DNA, 439 bp, Homo sapiens
tgtgaaatgcagggacaggttcagggacttgcccaaggacatgtggtgagtaagtggcaaggttaagattcaaacccagttctcctacctcccactgtacagtcttcagaactttttaaaggataagaaccaaatgagaggatgcacttctatagtgcgcactatgtgctgggcaccattgcagtttacaaattttaacttatttaatccttctgataatgctatgtggtaggtacaacctttcacccacattttataggtgaggaaactgaagtacagagatgttgagtaacttgtccaaggtcacagataagaaatagcaactgggcatggtggcttatgcctgtaatcccagcattttgggaggctgaggcgggaggatcacttgagaccaggaattcaagaccagcctgggctacacagtgagactctgtgtata

SEQ ID NO: 229727 - DNA, 612 bp, Homo sapiens
gattatgatgggaatacctcacagggcactgcacaggctactgaactgcgtcccaaacctccaccttcctgcgtgaaggttcccaaagaaaaacctgtccttggcactgacttctacatagacttgctatataaatagggaaagccaggcacctctcagtttctgcatccagaaaatatattaacatttattataaagatcaattgaaacagagaatgtggcgttcttgtagcagtgtgtaatgaggaataaaactggaagtaataataataacaacatcaaataaattactggaacactgatttatgcatgtgatgctactaagtaatttcatactttatttcatgtttattttccccattttacctacggggaaaatgaggctcagagagattagcaactcctcaaagatcatgccttaagaagtggtcaagctgagatggaaactttggctgtccaatagcagaggccgagcttcagcccttcttctatattgtctttttactgttacatctgctgtgattgttatttatttggggtgttttagcaaaagttgtatttgaaatgggaaattgtagaattataattaaatgcagagttgtacaatttgca

SEQ ID NO: 229728 - DNA, 349 bp, Homo sapiens
agcagaggactggagtgtagggtagccatagtaatccaggtaagaggccatatgggtctgggcagggatggttgcagtgcaggcagtgagaagctgcagacactgaatttgttgttgttgtttttatttttgagacagagtctggctatgtctttctggctggagtacagtgccacgattttggctcactgctacctctgcctcccaggtgccagtgattctcgtgacccagctactcaggaggctgaggcaagagaatcacttgaacctgggaggcagaggttgtggtgagctgagactgcaccactacactccagcctgggtaaccgagtgagactccatctcgaag

SEQ ID NO: 229729 - DNA, 380 bp, Homo sapiens
acccctgaggattatcaaggtcccttggggaataaggacctcagtgtggaacaggagccctgccaggtgtgggggtacccctggaggactgggggattggctgacctaactcaagttatatctcacttgagatctaactcaagtgactcttcccatgtgaagatccctcccagactgccaaagcaaagactattactctaactttttgtttttgttttttctttttttgcgggggatggagtctctctctgccaccctaaattcatgctaaagatttctagtgtcttaccatatgctaggaaatgtggatagagtagtaaacaagagcaagtcctgcccttggggagtttatattctagagagttagaaagattacaaaa

SEQ ID NO: 229730 - DNA, 548 bp, Homo sapiens
agatttactatctggccctttacagaaaaagtttgctgacttgtgctctacccagtgactcatgaatcatgcatgaggttttacagtctagctgttgagagtaggtactattcctggccctatgtgtgggcactgggtactattatctctaatattttccagagactgaaaatctctggaattctctttctgtgcaggcttgtcttcagtactcagtcctgggaattccagtaatgttgatttgcttggactcttgacttcatttccatcacaactcagggagtctgccaggctctgtctggattattcttcctcacagtgtgacctagaaactttcacagggcagtgagttggggcagtgattggactcttgctttgttgcccttctctgggagatcattgtcttttgttgcctgatgccaattgtcttaataaatccaattctttttactccatcttatccagaagattgagaagttgatttggggcatgttgaatgtaaagttgaatccaggggtgaagtagaagctaaagatatgaatgtgggg

SEQ ID NO: 229731 - DNA, 450 bp, Homo sapiens
gtgaggatctcctttagaagaggagaagccttgcatcaacctcttgggcctcagccaagatgtctgagataccgtccactatagtctccaagaacatgaccaatgacaagaacagcctggaatccatgaacatcagctcttcttcaagcactgaagagaacccaaagaaacaggcaagaaaaaacgaagaacatggtcctgacccttcagcgaaccctttccacttatctggggatgtggatttcttcttgctcagagatcaggagcggaataaggctctctccgtgagtatccaggacagacgccagcacctccgggagcttccctgctcccactgcttcctggagtggccacattgcccttctcagaggagcactttcctcaggtccttctcattccagaatagtcaatagctcaccacttactataaaatcagctggaaaccttaaa

SEQ ID NO: 229732 - DNA, 213 bp, Homo sapiens
ccgcctcaaagagccggcccgatcatcgcctcctagaatacccagctcaacgtctacctggagtcggctctacaggacgcgctcatctcaaacccagagctcaggcttttagggcagagagcgagagaaaggcttgctttacagaaagggaaactgaggtccaaggaataggattgcctgccgctcgaagaaacgtaatcccattcactcgtt

SEQ ID NO: 229733 - DNA, 490 bp, Homo sapiens
tacgtcatgcatttcagagtgcgtattaggaatcagaggacaaatggcttgagaatgtcacacagaaagtgcatagcataactgcagcagcacatgactgaatttcctgggcgcaaaagctgttgaggactgaaagtcactcagtagcccatctcgtgttttggatgcaattctttgaacttttagagtagcagattccatcagggaggccacatgtggatttaagcagataatttgtataggcacaaatcatatcattttgactaagttttttggaatgaaattgatatctgctttatcaccacttgtacttattggactattttggctttttagaaccttacttgttagaaaaaaaggctttctgttattaaggttgtttgaataggctgaagcaggagaatcgcttgaacccgagaggcggaggttgcagtgagccgagatcatgccactgcactccagcctgggtgacagagtgagactccatctc

SEQ ID NO: 229734 - DNA, 459 bp, Homo sapiens
taaagaatagctaatataattttaacattttgaaataagtaaaagataaggcaaaattgctatgaagaaaaataaaggcaattagaaactcttggaaaaacaaaatgctgtacaaaacaggaaactaatcaatgtattccacttgattctacagtaaaccacatttacttagctaaacactgttaattgattttaagcttttatacacaacctataaacaaggcatgagacacaattgtgctcataaataaaatgtaaatgtcatcaacttttaacaacagagagataaaaattcaaatgataaagactgggaagtgagaagtaatgcacaggggtgaaggaaaagttggatggactcatctttcaaagttgtgaaaatcaaggattcatcaaaatgtggaatcaaggattacagcccaatgacaaatgtagaaataaaattgtatacgttttacagtt

SEQ ID NO: 229735 - DNA, 387 bp, Homo sapiens
ttaaaactttcttggcctttacttttgcttcaggatattgcctccatgaaattagacatataaggattaaatgtccctacaaatgcaaaaaatttataatttaaggggaagtctatagaggggccatttggatcaattgaattctaataatttttaaaaggcaccaaaattccaaagtgctagccagattaaagtactcttatgctaagaaaccaacaaactgtattgaacatttctttgcctatttataaatcatgaccacaattatcagtagatatcaaatgccagttagagttgtttagccccaagaagacttattcttcttgtggctaactaatatgtcagagataaatcacacattctcagacctcaatatgattttctaaa

SEQ ID NO: 229736 - DNA, 495 bp, Homo sapiens
agaaaagttctccaagtccccactcgacccaggaagtccagctggcttcaagtctcataagtatattcagtcaagcagccagtgccactgctctgcctatggagtagccattcttttattccctttcttaataagtttgctttcaatttatggactcgcccagaattctttcttgcacaaggtccaagaaccctcttgaggtctggattggaacccctttctgataacagagtgaaaccctgaactacacctaccagaccaaaccagtaaggagtttaactacagtaactgagctttacttcatggcaggaaactctgtaaccagttaagcaatgaagttataatcaaattagctgtctccatcacacacttctgtttcctataggtgctgtcagatcaggttcctgattggagttctcttatctgctctggtttggagggctgccccattcgggaatctgttttgttttgctcaaatacactcagtaaaaacat

SEQ ID NO: 229737 - DNA, 410 bp, Homo sapiens
tacccactctctgatgtctgcatatctcattcctctcagttgtgggacaagaactcggaactcactgaactacaaaagaacttaacattcctactcgccaaactacaagagtaaaagagctataacagtagctggtcatgtccaaatggtttgtcaatctatgagaggagatactgtagttaataaaccagcagaaagataatgcatattggtccagaattttcaagaacagattgggtctctttaggttggaactgttcattcatggatccactagaaacaaagaaattgtactttccctgcagggtagatcatggaagggtattatttttattcatgtattgatatattggttcatttaatatgtagtgaggattatctaaatacctaacactggaccagcaactaca

SEQ ID NO: 229738 - DNA, 386 bp, Homo sapiens
aatgcatgtaagcctttagcacagtgtctgcctaagttagcatccagtaaatgttagctgctgcaataataagaaatattatagtattaagttattgttatttctgtgagggtgctggttttctgaatgctgagacattggtgatctttgctcctgaacgtgttactatttggaatactgcctttattcagcagcagattcagttcagatttactgaacacctactatgccaggaattgatctaaataagcaaaacaaaaatcctgctctcttgaaacttactttctggttaggagagacaaaactttcattaaccaaccctagcagtcttaacctttacatactttttgattgttcctgttgctgtgcttgagagtgtttggagg

SEQ ID NO: 229739 - DNA, 505 bp, Homo sapiens
gaaaacatatcaatagttttattaaatgtaaacacctaaacatactaattaaaggacagattttcacattgaaattttataaaattacttaaatataggctatatataagaaattaacctgatgagcaaaatggctgaacagaatcctctagcgatcatccccccacaggaacaccaaactgaacaactattcacacaaaacaagcaccttcataagaagcaaaaaacaggtgaaccggtacctggctttaacatcgtattaaggaaagaggcactgaagaggatttgaaagacaatcttgagtcacctataccacccctttcccgtacttcacctttggccatgtggtgttaagagacaatctgtgcacttgcatgagggagagtgcagtgattgtgggaatttgccttggaactcagtgctgccctgtcacagtggaaagccacacagggaagaacttagctggtgcccacagagggagcatttagactaatcctagccagag

SEQ ID NO: 229740 - DNA, 390 bp, Homo sapiens
tgcaacattcactctgagaaccgatgtggaactaatagcagcctttttatttccaatctttgaggtcacaagcagttgccctagcctgaaccctgtaagatttttctataggaagctctctttcaatgggtcatctccttaatgtatctcaacaggtctgcctggatgtttgaaatgagatgtgattcctgctaactactgtcaccaccaacatacacctctgaataggaggaataagttttacctttggaaaaaagccctgggcaattcaagtgaagcaacaacttggtgattttcttcttgggcattttatcacctttcaagttacatccaaggagcatctatttggggtcgacgcggccgcgaatttagtaatagtagtagtaggcg

SEQ ID NO: 229741 - DNA, 518 bp, Homo sapiens
tgcaacattcactctgagaaccgatgtggaactaatagcagcctttttatttccaatctttgaggtcacaagcagttgccctagcctgaaccctgtaagatttttctataggaagctctctttcaatgggtcatctccttaatgtatctcaacaggtctgcctggatgtttgaaatgagatgtgattcctgctaactactgtcaccaccaacatacacctctgaataggaggaataagttttacctttggaaaaaagccctgggcaattcaagtgaagcaacaacttggtgattttcttcttgggcattttatcacctttcaagttacatccaaggagcatctatttggggatatgtttgattgtctcaaaaaaatacaacagcgaaacaaaactcacaaatgtctgttacgtgaaggaagtgtgaatgaaatagagcatggtgggagagatttcctagctccgtttttcagcctggattgattaactctaataaattcaggaaggtgatttcagatg

SEQ ID NO: 229742 - DNA, 532 bp, Homo sapiens
tgccaggtcagccaacttttcaagaaatggcaaaaatctgaagtttgaagtgagtatctctaattttaaatgttggttcaacatttttacaaacacaatgcaggcctcacacatagaagtttaaagaactgaaacatctcaatgatcaacatgagaaaatatatagctggaaattgggaaaaaactttattttctgctgtttattctacattactactgatattatcatgactaatactgtaagatttaggctttaaaatatgaaatgcctatatttagtacttatatctgatttaaagtaggaattactcagaatttaaatagaaagtttatataaaataataggaaatggtaatgagtatcaatatgccaatatatagttgagaaagaaatgtattttttaagaaataagcataaaaatgtgttttagtgagagcattacatgtagttagtaattttagtttacaacaatttcacaaaaaaacatttaaatgatatgatctacacagtaggcaagaaatagcttaaagca

SEQ ID NO: 229743 - DNA, 1149 bp, Homo sapiens
aagttttggagtgactcttgatgctaccgcaacgcacttctcagcagataccagtgatgccatacaattggagaggatgctttcataaagcgtgaggtttcctggtcacattcttggctcacagctgaattccacatgagtattatccctctcttggctattagtgctcacgtgactttgtgtaaagcacagataattggaaggcaatcattggacctctttttcatcattatcctccccatccagtttgtgtttctaagccagagttgctaaccactagtagttagcactactagtgatttgtggtttcccatctgtcctggctcatggacatgactcagataggctggaggacatgaggtgcgtggataacacacagattatctgagcattctgggatcactgagatgccctgtggttactgtggaatcgcatcccagaagctccgaccacatccatccatgcagataaacccattttccaggcactcacagcaccattgttaattttccacaaccatctgggaaaagtggtatcttcctgctccacaaaacatatggcagagccgggcgccatggctcacacctgtaaattgtagcattttgggagggcaaggtgggcagatcacttgaggtcaggagtttgaaaccagcctggccaacatggtgaaacctgtctccactgaaaatacaaaaattagccaggtgtgatgatgggcgcctgtattcccagctactcaggaggctgaggcaggagaatggcttgaacccaggagatggaggttgcactgagccaagatggtgccaccacactccagcctgggcaacagagcaagactgtgtctcaaaaaacaacaaaaacaacaacaaaacacgtggtggggagaaggggtaacaccctacacatggtagccaaagttacctgcttttaagtaataaatgtgaacacctactgctatcacatttcaaaggtacattgaacgaaagagtttgtataagaaagatgtcatctaggctgggaaagctattggtagtcttgaattaggggcagagatgctcaaagttatctttgatccccgctttccctgaatcccatagttacccccaagccacccccactctccctaccatccaggctcccaatgctggc

SEQ ID NO: 229744 - DNA, 452 bp, Homo sapiens
gtccccttcatccagcccggggctcttcagtgcagaaaacccacagcagggcggtggaaggaatatgcaccagaaccctgggctgagagccacagccagagacggctggccagaggcctcgctccaggagggctgtaatgggggcccgcggcgatgagctcagaacgcccctcccacaggacagcctcctggaacacacctcagggacaacctccaaggcaccattttggagcaccttctcctgaatccccctggggcaccaaggcagaaatcacagccatgggcagtgcacaaagccaccggctcctggccagaagcactaagtgcctccccaggccaaggctcctccccaacacccaaaaccctgaccctgccgcacggctcaaataattcccatcctcgtgcccctcaaggcgggctatgggaaacacctgcacacaagcaggaagcgc

SEQ ID NO: 229745 - DNA, 310 bp, Homo sapiens
caagccttttgaagagtccgattcagaaataatgttttggagatggccaggtgccctaaccacttcctgaaatctggcctgatttttaatagcttttacctaagttcctcagattctctgattcatagttttcaaaatatcttgtctcctatttttgtatattgttctcggcttcttctgcattttaactcaagtataggcaattctcactatatttactggaattactccaatacgttttagaatattcatggtgctgtgcagccatcactagtatctaattccaaaacacttccattaaccccaactc

SEQ ID NO: 229746 - DNA, 599 bp, Homo sapiens
agcattatcctcagtgtggtcctctgtatgttgcctgtgattgggcaccaatttcttaaaccactattctggcctatcagcatggacaaagtaagtgcaacagaaaatctacgcagatataattcatgaccttcttttgcttttgcctctgtggatgaaaaccctatcccccatgctctggctataggtttttgacagaattcaagagtgcaggagacttccacagcagtccccagtctggaccaaactgaaacactcaagcactcgacgttctgcctatgcattctcccataaacaaggctttggggccctcatcacttctggcaagatagtgaagcccaggatgtccaagagaaacaccctttttttgaaaaagatagaggccctagggaaattccaaaggaggcagtcagtgctcttcctccctcgtactcatgcaacttaggaagaattagagtccctgggaaaccagcataaacctgctccttcattctcactagggactaagcctcttaattgtccagaaggctattcccagaaaggcaaggaggggtaaggaaagagcccccagatatctgccagagttgcagcatttcaag

SEQ ID NO: 229747 - DNA, 358 bp, Homo sapiens
gtcaagctgtgcacgggaaggaccctaaccaaccacccgcactatgaagacagcagcctgagagagcggaccagagcggtttatcagatatatgccaagagggcaccagaggaagtgcatgccctcctaaggtccttcggcactgactacgtaatcctggaagacagcatctgctacgagcggaggcaccgccggggctgccgactccgggacctgctggacattgccaacggccacatgatggatggcccaggagagaatgatcctgatttgaaacctgcagaccaccctcgcttctgtgaagagatcaaaagaaacctgcctccctacgtggcctacttcaccagagtgttccaga

SEQ ID NO: 229748 - DNA, 435 bp, Homo sapiens
aaggaatctgagatgtaaaatatcatgtctgagaacacacagctagtaattggtagagctaagatttgaacctaggcagttcaactccaaagcccgcacttaaagcactatgttcaggataaattattaagaatcatagaaactatatgctatcataaagattgagatgtatgtctgaggtatttttctttatgtagacatcaacagataatctcaatatttggtgtatgttatggcttgttgttgttgttgttgtgggggtagagacagggtctgtttatgttgcctgggacgactggtcttgaactcctgggctcaaagcagtcctcccaccttggcctcccaaattgctaggattacaggcgtgatactatggcttttaacacagtatgagtaaccaaagaataaaggactgacatatagtcatttcgattt

SEQ ID NO: 229749 - DNA, 983 bp, Homo sapiens
  misc_feature (18)..(18): n is a, c, g, or t
  misc_feature (265)..(265): n is a, c, g, or t
aaaaatgaaaatggggcnccagaagatgaagagaattttgaagaagctattaaaaatgtgaacacagcactaaatacaactcagatcccaagcagtattgaagatatatttaatgatgatcgctgcattaaatatcaccaaacagactccatcattttggattttagctcgtgccttaaaggaatttgtggccaaagagggtcaaggaaatttacctgttcgaggcacaattcctgatatgattgcagattcaggcaaatatatnaaactgcaaaacgttaccgtgaaaaagcaaagaaagatgctgccgctgtgggtaatcatgttgccaaattgctgcagtccattggccaggcaccagagtccatttcagagaaagaattaaaattactctgcagcaattctgcatttcttcgagtggtaagatgtcgatccttagctgaagaatatggtttggatacaattaacaaggatgaaattatttctagcatggacaatccagataatgaaatagtgttgtacttaatgttacgggctgttgatagatttcataaacaacagggtagatatccaggagtatctaactatcaagttgaagaagatataggaaagttgaagtcttgtctcactggcttccttcaggaatatggtttatctgtaatggtgaaagatgattatgtccacgaattttgccgatatggagctgctgagccacataccattgctgcattcttggggggagctgctgctcaagaggtcatcaaaataatcaccaaacaatttgtaatttttaataatacttacatttacagtggcatgtcacaaacttcagcaactttccagttgtagagtaagcaagcaccttaagtagtgtgttaatgattgaaactgtaattgccttcgggttgtgctttagtctgtaaaattctaaaggagagctgctaaattgttttcttaataaacatttttctcatttgtaataa

SEQ ID NO: 229750 - DNA, 838 bp, Homo sapiens
gggcagcctgagctccacacctagacatcttttcccaaataagtgtggtcagaagaaatcctaggaagtactttctctcaaacctgaattttgggtcagtttaccagctagccatgatagcatgcgcctgtagtcctagcaacttgggagactgaggcagaggatggcttgagaccaggagtttgaggctgcagtgagccatgatagcaccactgctatcatgctaaaggaatctagcaggacaggacactaacgggtttgtggaggtcagttgagtcctggctttatcactagctcttcacacatccctggagaattacctaggcttctatgtttccaacatcacatctctaatatcagtggttccaggcattgtgtgtgtattatctataataattgaaacctcacaatagcccagcagggagtaggttatcctcactttataaattacaaaaccgaggcccaggaagggcgaatactctactgtaaggtcacactgctgtgcaaattgcagccagaggccgggcatggtggctcacacctgtaatcccagcactttgggaggacaaggcaggtggatcacctgaggtcaagagttcaagaccagcctggccgacatggtgaaaccccatctctactaaaaatacaaaaattagctgggcgtggtagtggatagaaaccccgtctttactaaaaatacaaaaattagctgtaattccatctacttgggaggctgaggcaggagaatcacttgaatctgggaggcggaggttgtggtgagccgagatcacaccactgtactccggcctgggtgacagagcaaaactccatctcaaaa

SEQ ID NO: 229751 - DNA, 365 bp, Homo sapiens
tggctcacggtactgcaggttgtacaggaagcatggcagcatctgcttctggagaggcctcagggagtttccaatcctggtggaagactaagcaggagcaggcgcatcacatggctggagcaggaggaagagagaagccggtagtggctcagttctagtccaaaaggctcagaagtagggaagttgacagtgcagccttcagcctgtggccagaggcctaggagcccaaggcaggccaccagtgcaagtcactgagtccaaaggctgaagaacctggaatctgacgtccaaaggcaggaggaaccacaggagaaagacggaaaccagaagactcagcaggccagcacatccctccttcttctgcc

SEQ ID NO: 229752 - DNA, 376 bp, Homo sapiens
ttctaatcctggtttactattaactctgcaggacacagtgttcaagttatcttccattccatttcctatggaaagaaagaatatttctggccaggcgcggtggttcacacctgtaatcccagcactttgggaggccgaggcaggcggatcacttaggtcaggagttcgagaccagcctggccaacatggtgaaaccccatctctactaaaaatacaaaaattagccgggcatggtggcgcgcacttgtaatcacagctactcgggagtctgagggaggagaatcacttgaacctgggaggtagaggttgcagtgagccgagatcgcaccactgcatccacctgggtgacagagcaagactctgtctcaaaaaaaaa

SEQ ID NO: 229753 - DNA, 887 bp, Homo sapiens
aaaatgttgagattataggtgtgagccaccatgcctggctgataatgtgatttctaacaaatgttgaataattatagtttgggaaaggaaaacagtatcatttagtgaactataatttttttcttaatttttttaacttaaacttttatatctctttgacaatttggagattcttagggtggtttgatatacctgctttctaatggtagttagatgtttcagctctattctgaagcagtgaaattcagtctgctttctaatggtagttagatgtttcagctctattctgaagcagtgaaattcagtctgctttcaaagtcagtgaatgcattttgaattatcccttatttcatttcagtagtaactaccttgagactccccaagtactccaattagtttttaatttcagcagtaaatgtgtgttgaaaagaccaaagtttgcattattttccttctgatgtatttaccatccatgcctgttgacataaaaagatttttccagacttgggtagttttcagaaccaaacaaaacccttgtgctataatgtgacttagacacttttgactgaaatgcttgatatagttaatacacataatttttttcaaaatgaaaccacaaagagctataaagagaatttcatagctaatttactgcttacctgtatttggggaagccatttagcatctgtgaacctaaatttcatcagccgtaaaatgggagttagtttttaagtggaaagaatgttacataagataaacggagacaaagtttttatcagtgaaatccaaacaactcatcttaagatgctgtaagctttatgtgtttcttttgtgtttccctaccccgcgtcgacgcggccgcgaatttagtagtagtaggcggccgc

SEQ ID NO: 229754 - DNA, 263 bp, Homo sapiens
gagacaaagtttttatcagtgaaatccaaacaactcatcttaagatgctgtaagctttatgtgtttcttttgtgtttccctaccccgcaaatgtttttcaaacttaaccctgttaggtaaaaactctgggttcctataaacgggtaaagtttgtccattggtcttctcaaggaaaaagcaatatgaacagtttgggttatcttagtaaaagggaggactctgattttgtctcatgtccatcctctctctgtgtgttctagtcg

SEQ ID NO: 229755 - DNA, 206 bp, Homo sapiens
ttataattattagcaaatagaacccagaagtataaataatacatcatcagcaaatggggattatcccaagaatgcaaggtgagcttaacattagctgcttgattagtggaagtagccacatttagatattaatgagaaaaaatcatacagtcatctcaataaaggtagattaagtatttgacaacattcactgtccattcataatt

SEQ ID NO: 229756 - DNA, 364 bp, Homo sapiens
aaaaatcaaaaaagagagctaagatatatagtatatagtgtacatagtatgtagtacgtactgatggaaagtttcccgtgatatgatattaaggaaatattttaaagtcatggtacagaacaagatattcagtatgacacagatttggtgggaaagctaaatataatgcctgcacacacacacacacatccttacatgtgcatcgtagaagatctggaaagatacacaccatgctgtaatattctggaaacggagaaggagacagaaggcagggttgctgttgaagtagactgtgttcaacatttacattgtgagtttctgtgatgctaaaattttccacaatgtgtgtattattctggaatta

SEQ ID NO: 229757 - DNA, 398 bp, Homo sapiens
tgtgtattgttggcatgcatttagtaattagcccgagtggatcagatggccttttatttccaaagattttttccctccagtcttacagcagcgaaatgtttgtagcacttgatgaaacagaacatatcctgtttctgtttttaaagtaatgagaactgttagctaataaaattggataatcccagccagatatgataattcagagaataccaccgagaggtgttgaattgtgggatggtttaaaaagaaaagccgactttgtgtgtgtgtgtgtatgtgtgtgtgtgcgcgcgcgagcgcgctgaaattttctttaggcttagaactcatgtatgtcactacactgcatcgtagtactgattagtcacaactggtaaaatgaaatattgattctctta

SEQ ID NO: 229758 - DNA, 489 bp, Homo sapiens
aggtgcttgcccaccgagtacacggccatgagcagccccgagcccgacagtgtggtggccgcgccgccaaacaccttgagcaggctgccgctcgggctgccgtggcccagcgcgtggccgcccagtgacaagtagagcagccccacacccaggcccagcgccgccagcagcgccagcagccccaggcacacgcggcgccgacaatgccactcgctctggcagcagtcctgcctggtggccggcttgttgcccagcaccgagtacacgctgaagggcagtgcgccatagtggcggcggatgccctcgcacaacgtggtcaccaggccggcccacagcttgtcggtgcccgcgtactgccaggcgctaaagcggatgaaaaggaactgcacgttcctgcgccgcaggtgcacctcggtgatgatgggctgcaggaacaccaggtaccacagtagctgcgggacgccccagccgctcacggcacgcggccgc

SEQ ID NO: 229759 - DNA, 511 bp, Homo sapiens
gcacgtgtcatttttatgttaatttcattttatgcgaaatgctccagcgcagtacaggctagtgggttcagggtggctgtgactaagtaatgtagatggggtaccttagacaaagtttccagactagaggctggaagtaagaggtccgggtgcccttttccacactgcagaccacggacttttccggtttctgaacaagtgagacaggccggctaaggacatttataatctccatgggtgagggccccaccctcatgaccatctaatcttgattacctcccgaaggccccacctcctaacttcctaatacaatcacttcttgggggaagagggtgtttggaattccaccccccgcccttttttttttttggagacagtctcactctgctgctcaggctggagtgcagtggtgtgatcttggctcactgcgacctccccctcccaggttctgcggtgtgagggggagggcggcttcgtggtcggctgggtcgggggagcgccgggcggccgc

SEQ ID NO: 229760 - DNA, 643 bp, Homo sapiens
aatgttaaaataatgaatgtcagcatgatttctagagatcgtactgagcaggatttagaggggcaggggggtttccccacttgtattcctgtccttcatagctgtctcttctggatttttttagtttattactcctcagggacaagcttttcgtttttcccctctatatcagcataatctgaaaaatattaaaattaaaataactaataatagactgcattaatagattagttccttttatagctttcatcattttaagtgaaaactttctataagttatttagggttttgaatttataatactgtaattaaaataagggtttttttcctcccattgacagtaaagctgtcactgccacaagatttgagctaaaaaaaaaattgtagattttgtacttctttgtcagtgctgccaaatcgagctttcttctggagcaccattcatcgagcaagacccctgacggtgccaggtggaaacttaatggatcctttccacctggtttgttttcagtgtttaatcctattagtatcagcaggatataggtcaggatatcaggtgcagaacctgtggaatcagccaatttggcttgctcatttactttaataaggtcccataatgagtgagagtacaaagttcaagccc

SEQ ID NO: 229761 - DNA, 356 bp, Homo sapiens
ttgttttgtttgagatggagtctcattctgtcacccaagctggagtgcagtggtacaatctcagctcactgcaaactctgcctaccaggttcaagtgattctcatgcctaagcctcctgagtagctgagattacaagtgtatgccaccacaccaggctaatttttgtatttttagtagaggcaggctttcaccatgttgaccaggctgcttttcatttgtttgtatatttctttcttcctttccttctttatttctagaagtattttaattttaatatataaattatgactggtaaaaaccttcatttctctgtctttgcttactgttatggctgattaaaaaataagttttcaaa

SEQ ID NO: 229762 - DNA, 432 bp, Homo sapiens
tgctccaagggcctcctgggcttccaggacgcatctcccctggtgttcctctcacccctctggccacctgtcatgcatcctctgcacctggcatttggaacctggagcttcaaaggctggagggtcccaggacgcttgctctcctcaggccagcttgttcatgccacaccagctcaaaggtcccttcctccaggaagtcctccctaactaccgccaatgcacacacatatgcacatatacacgcatgcacatgggacaaatatgttttctttcttgcatggtctctttgtactctgagcttcccagcacttagcacaaataattaactctgtacttagtgccatgagtctgagccagacactgtctcattctgcctcctgcccccatgcctgccctaagcagtcattcaataaatgtccgtgaatgaatgaa

SEQ ID NO: 229763 - DNA, 419 bp, Homo sapiens
ccagggtgatacttggagaaaactattatgttcctccttaggctttttttgctggggttatcttccctaagtcattcaaacttttgttgtataatgtgatttcttgacctccttattgccttaatttcaagtcctctgaagctgatctgactggaagagagtacattggaatcatgacctaccatgacaccaactctgtatctctgagtagattctaagtgcattgactcgtatgggtcatgtggtaaaatatcaggtcttttacttttatttgaaatgctataaaacctttctgttctctcctttctttatactgttgattcatagttgagaataaactctaccatatttttaagaaattcttgtaaatttcattccatgaactaataaaaatgtattgtttgtgtgctacctagcta

SEQ ID NO: 229764 - DNA, 651 bp, Homo sapiens
tgtgtacaggagcctagatagcaaactcctttagacacagtgttagaaagttggaattaataaaatatttaatgtgctccttgaagcatttgtttttgaaaggaaacttgacgtaaactaaacttccacagacgtgttttagaagtgactgtttccagtagattttcaatgatgtctgtatacactcagctgtggctgtaaaatacaacacacatactttgtaaacctgttagtgtgacgttttcaccctgacctgaaatgtttagtatcactcagaatacgagagtcatgaagctaacaggctgcaatgtgttcggcgctgtcgcccttcccgtgcaggaggccactgtctgcggggtccggtgctttcccgtcctgggctaaggtgggtgggcagagcagcctggaccgtctgcagccaccatgtcctctggacccctctctgcaccatgcccacctcctccaggcccccacaccatgccatgcagtggccgtgacagtgtttagaatcctttcttgtcttccatttcttcatcattttagggaggaagtgctgtgctttatgtcaagatgaaacacaacatctgattccttacctggctctgctagggcttaggaaagggggcttggttaaggtggactctgctgcct

SEQ ID NO: 229765 - DNA, 482 bp, Homo sapiens
aattatattgcttcttacatagttttttttttcctcataggttcgtatcctacaagtactttaaatttaatgtgttaattaaaaatttctggcaatctttttggtttttgttaaaattatctttatattgtttgtgtaatatattatcattttacaaatgggggacaaaagagatataaagtgacaagtaaatctgtctcctcagcttcacttcttcattctctagttcagtagttctcaactgggagtgagttgtcccccagggaacatttggatgcctggagacatttttggttgtcacaactagggggacagcactggtgaggtcagaaatgctgctaaacactctacagtgctcaagacaactcctacaacaaagaattatgtcgcccatcttcagcagtgctaaggttgagatacattgctctagttctaatccatagaaataaaattgtttctatagaaccttccagatatctcct

SEQ ID NO: 229766 - DNA, 422 bp, Homo sapiens
tagtgctcattacatcatctggattttccagagccaggctcttctgaggacatgggatagcaaaggctgcagatctcaacacaactttagagaatgccttggagttatggagacagaagtcagaatacagcaggttgagaagtaactcgtcaagagcaagaaaagttgcaagcatacacacaacggaaaaacagcactgaaaggaagatgtgaagaaatatactcagagcatttttcatattccatttaattcataaaagagctttggaggctgaaagttcaagaccaaggtatcatcaggcttttcctgccagaagacaaaggattccgatcaattaccttttctaattctacgaatgttctgtaaaattgtcccttgcctttcaaattacattaaaaataaaaagtgcacgtgactttca

SEQ ID NO: 229767 - DNA, 384 bp, Homo sapiens
tgtttctccggccatgcgggggagagtagagctcagtgtacaagagatgggagggtgtcagtacccagcaaggatggaatgacaatagctaccacatgggagtgctcactactgggcagatgctgttgtgatgccaccacagtccacctttgtcaaaacttgccccattttgcagatgaggccactgaggctgagagcaaaggtggccccagggcaagcggtgaggccagagctacaggtgtatgttccacacctggccacctgcaccgacgcacagggtaagtgttggcaagtcgtgtctgtccttccggcctcagtcttcccctctataaaatagaggtaactgttcccagctgcttcctagaaactctgagatcctgaact

SEQ ID NO: 229768 - DNA, 425 bp, Homo sapiens
tctttttcatcctttaaggtatggcattcctgaccattctatctaagttcatacccctctttattattctctgtcattgtatcctgtttgtttcctctataaaacttatcctggtcttggtgcagtggctcatgcctgtaatcccagcactttgggaggccaaggtgggcggatcacctgaggttgggagttcaagaccagcctgaccaacatggagaaaccccatctctactaaaaagaatacaaaaattagccggtgtagtggtgcacacctgtggtcctagctattcgggaggctgaggcaagtgaattggttgaacccaggaggtggaggttacagtgagccgagatcacgccactgcactccagcctgggagaaagagtgaaactctgtctcaaaaaaaaacaaaaaacaaacaaacaaa

SEQ ID NO: 229769 - DNA, 463 bp, Homo sapiens
attatggagtacagaatctacattcatttctagtatgaaatctgagatttcagagcaatttcctacttgtgtctgtagactgccacgtgaaccttagggcatgtatttatagtcttattccatttttaggagcactgcaagttgataagctttacagtggtgttccatgttaacactttaggatttgtggctgacatccctgacctgccatggtaatcactatcattgcttttcagaatgagatcttctctgtgcctccctgaaatgaactctgccttttcccctaacttttagggccaagccccatttgggctatcaacatccaaacaggcttcttgctagctagtggaaaaagacttctgaaactcactgaagtcccacaaatgctgacccagccacattaacttcagcatagccatgtggcctccacatccagaggcctgcctacaaaatgcagatgcag

SEQ ID NO: 229770 - DNA, 482 bp, Homo sapiens
ccacttgccacttggttgtgtaattacctatgacctgaattactgtacttgttccttgagggctaaatttatgtttgagtcttcctggtgttctaaccatgactcaaatcagtgcctcacacaaaagtaagggtgtttcagaactatctggtgaacaactgaaaatttagaacctttcatatattcttttatagctctgatatggaagatttcttgagaggaaagtactatgtttaactgtcatccaaataaaatggaaaatatagctttgaccaaaagaaatgatgtgttctaagagaataaaattaaaagaggattttaaaatctgttatccagtagatctgaaaataaataagaactgtcctcttgctgaaggagtaaatgcctttaaactttcacagtcatcgtatattgcacataaatgtggaaactggaaatctgtttcccactgaaagtaaagaaattgtgtttgaataaaagaa

SEQ ID NO: 229771 - DNA, 399 bp, Homo sapiens
aaaggagagggaacaacagcatgtggattatattttgcctaaaatacatgtgcaaagaaatgagaaaagaaagcacgtttggggttttattacactccaagcatttcaagatgtttagcatgtccagaatgcagctgtcttcatacacccccaattagaaatagttgatggttttctactgaacccagcagccctccacactatgtttgctgctgtctatttgccttgggatagacagaacaaaactcgccttgtagtgactacttgccttgggaaacaaagtggtgttcttcaggcaaacgctatgcagtaaaaaccagtggtaagaaaaaaaacaaaaaactgaattcatttgagaaaaaattgaagaatttagtccagaagttttacaataaacaa

SEQ ID NO: 229772 - DNA, 289 bp, Homo sapiens
aaaggtgctaaaacttaacagaacagggagatgactttagttagacgaataacaacattttaaatatctataaataacaagtaggagaaatgtctactatttgcaaacttaaaacttctctcctgctaagcatcatatggttgaaaataagcaaaagaggaaaggaggaggacaggaaaagagaggaagggaggaaggaaagaaaagaagtggaagaaacccttacatgcttttcgtttaagtgacttttccagccacaattaattctcatgtcagtactttttttctt

SEQ ID NO: 229773 - DNA, 367 bp, Homo sapiens
actaagtgaaaaatcttgtctatttgtagacagctcttagggctgtttaaagtgctctgggaatgttttgagatcattgtaaacatattttcaatatgccttttcatagcagagtttaaaatagatgtctccccaatttttcaactttggacttgtattctcagcaagaataatttatatagaagtgttaatatcaaatatctgctgttagttttataaatgtgtttatcttcttaggtgtactgtagttgtattaaatagaattattgacttaaattattcgaagaaagaaagaagtagcttttagaaaagaaacataacctacttatctgtattagtgttgcttctttgactaatcacttgagtt

SEQ ID NO: 229774 - DNA, 227 bp, Homo sapiens
ccagaagagaacatggaacgtgaacgcagaggatgtgtaagtgaagttagattgtcaatggatttttgtttttgggaaattatatgctttgcaaatatatttaattggagcttattttggagaactgtcaccattttatcccagttggcaatttttaaagaaaattactgaagtgaacataaaaaatggaaacatttcagaagtgtttgaataaacatcccctctcc

SEQ ID NO: 229775 - DNA, 272 bp, Homo sapiens
aaaattttatctttcttttaacatcttaaaaaaattgacttttagcatcaatcatgactagtattcaagtctgtaattgttgaaggactctgtctttacagttgagactattctagacacataaagataattccaataagcatttctgtaatcaactcttggctgtaccgagttattcctgcgatgaagtagaatgactgtcttaactcctactctgctctattgacagtaaattattcttggttctaaccataagcctttaacccaatgtc

SEQ ID NO: 229776 - DNA, 333 bp, Homo sapiens
accttcacaacaaccctgtgaggtagatgcaagtatccccatttgtggcttagagaagataaaagaaacttgtgtaatatcacatagcaagtggtgggagtcaggattcgaacctatatcaggctctctggctcccttcttagccaatgtgttacagaactcatactaagtgtacaacctgtgtttgtagctccttattgtaacacaaggatcaggagaaagaactatgctttaagtcctttgagaatttccagatagtttcttcctccatcccctcccctagtcccatctcctaaataatgtaaattacttctgcttacagttgcaggaaac

SEQ ID NO: 229777 - DNA, 564 bp, Homo sapiens
cacagagttggctggagttagtcctgattgccaagggtaaatggggctgttaccatgcaatggatagaaactaggatgctcctgtgtgtctccttatatcctaccaggtgtagcatgaaggttaaggacaattccgtcctcttatttggagaggagaccaaggccctgtaggactaaaggtttgggtgagctgaaagccaagggcaattggcccagcttggggaggagagttacaaatacatttgtgactatcagaccagaaacagactgcggtgttcacctgcggtttgggtacctgctgcttgttctttgctggggtatctgaagactgaaaacacagctcacacttagcctttttcctattctgtgtgaaagaactgtagtagttttctcttgcttaacaaggttctagtggtgaagtttattgcttagtctgtgagttgtagggaaataaccacaggatgggatggtagcagaacgagaaaagaaaagaaggttgtagatgccaggctggtgtcggcttgaaatttttaaagtatacagttcttctttatggattattaa

SEQ ID NO: 229778 - DNA, 367 bp, Homo sapiens
caaatattgcatttatgtaaatttatagagtttgaggaataattaaaactagtatttctgtagttctctacactattattttatgctttcaaaaatgattgtacacattttcaggggccaaaaccaggctatagttcatgacataagctgtgcttgagacttgtagctggtggtgtgctggagatggctcatcccggctcctgtgtgcatctctttccaactccacattcatctcttcccaataccatgttggtatcttgacatgggcataaaactggccatggtggaggtatttacacaatgtaaatgggcaaatgccacacattagagacatttcttttcttctgggcgagtctgttcttaaata

SEQ ID NO: 229779 - DNA, 644 bp, Homo sapiens
aggagctgtcgttttgatcatatcagcgtcaataggagctatgttgcagttttatttaatttcttctctctggttttaaatgatttgaggctgaagtcaattcacactatcggtgcattgggagtcaagcactgcagtaccacagagtcattttctgcttttcagccctgcccccagctggctcttacacagcaaaattccctgtgtgggctaattagtatatgaagaaaattgcttttgtgtttggagggcttccagattcactctctcataccagcccacacaatcaataaagatttggctgatctttccttatctcaggtggattagctcttctccaagtccatacccagactaggcaacatggtcctcaagcatgaaggggctgacaatctctgctcactttagaagggattgtccttctttagagcttggtttcattgagattcgttaatccatagctttttagaacaagagtcttctctaaccatttacatcttagaacactttgcattggtttgaagtggctttttccatttttgtttgtttgtgttttgggaaaggtggatatgggttgtacttaaatattcttcttactcatgttgctctgtgcttttttttgttgttgttcttttgtttttttt

SEQ ID NO: 229780 - DNA, 483 bp, Homo sapiens
cagtatgggcatcaagtttgaaaacatgactttcagtccaagctgctgtgcaaatctttggacaatttaataagcctcagttttctaatctgtaaaatggagatgaaaatactcaccctacccacatacactggcacaaatgatataatgtattaatcaagatagaaaactgaacctagccatggcatacaaaatcatgtcatataattttgaaaagtgcaaagttgtgaaatcatctttattttgccatgtatctcagattctcaactgtaacattatttgggtgatcagtgtgtagtattgattatattttagtgtcagccatgtagttactctctcctctaaggagttttttattaccattcactggaaaatacacagctttttctttgcaattatttctttacctcttttcttctgccttccaatttaaaattcatgagtaatacagcacctcacgaatagatgaaagggatgacaatc

SEQ ID NO: 229781 - DNA, 328 bp, Homo sapiens
gcagcctcagtgagatccaggaggatggcattgctgggctggcccagcccttattgattatggtgtaaagaattaatatggtggttatatactctttgttagacaccttggcttacaagacgtaagcgtaaagtgtagtgcgctttagtcagtatggccacatggtcctttggtggtaaattgtttgagatgcctccagtttttaaaaggagtagcatatcgggccaggagcagtggctcatgcctataatcccagcactttggaaggccgaggcaagaggattgcttgagcccaggagttcaagaccagcctgggcaacatagtgag

SEQ ID NO: 229782 - DNA, 1161 bp, Homo sapiens
gcgtgcatggcagctgtccatgtgtgggttggaatggcacaggctgccagcttgatgttttcaaattcagctttgtaggaggccataaattattcaacacccagctgatttttatttataattgaaaaaaaattagcatgcagtgccttttgttcacatgagagtttcaaagcatagtccattggtactggcctaatggtttctgtgagatgttaactggaacctggatttttaacttttcatgtttaaacaggatcagccctgctctaactcattctggatttgacaaataaaactatgtttctcatgaggtggtccctggacctccttgcctcagaatcacctaggatgcgtaagaaaaatttagaccctgaatcctatcaaagaacaactgaatcagcatttctgagtatgatgcctagaaatttgcagtttatcatgcccctatccatttcaaaacacacaggaatgtctgcctgaacttatattttaaggacagtgaattgtaacccagacaacatggaaatataaaagggaaaagagcctctttggtgggaatacaattgtgttcatgtgtgaaatgtgagttgcagcatgctttatttattccatgacttgtctttgttattcttagatttgaaatgatatcatggtcatttgtaggcatcaagagtgtcagtgtcccagtcagaatttgacttaagatattgcatttctgaaacttactcagtttttctacgaaataaatccttaaaatacccaagtgcatgtacttggcaaatatcctcatactttccaaagtggtcaaatggtagtgctcaagagaaaaatgcttctctagtatctgtttagggaaatttccttcctgtgaatgtcactgacgtgaataacatgagtcatagaaacatacagcacaactgcaaattaataaaggaacatgtatttcctttctaaaataatttaatgttatttccctactctaattacaaaaacttttaaaaaataaaatgcaaaacagaaaaactcatatttaggtaagctgtttctaaaaggctttttcttaattctctttcaccatttactgtaatgcagtgtaatatctaactttaatcgatgctgtttcattcctttgggtaagccagaggaaaacctatcctcagg

SEQ ID NO: 229783 - DNA, 262 bp, Homo sapiens
taattactgaattgaattgaaagtactccaacaaatttccttgtagtttgtttgaacttctaaaatgatgacatcattgctgtgtgattaataaagacatttaaagaaggaattacaaaacttcctagggaaatcatttctcctcttagttcccgctctcttctggtttcttacccactctaatagactaattagacttgcatagagatgggacagcaggctgtggaagggaaagctgtataatgcagtagaagtaccatag

SEQ ID NO: 229784 - DNA, 550 bp, Homo sapiens
tctctgacaaacatgttgttaagctttcaagttcacaattctgcagctggaagaagggggcagagaatcctatcagaaactcagtatttagttctactttacagctataaggaaatggcttctctagctctcaaaatgctcagtgaatttcctgcaaagttactaagaaagttaccctctttgaattgaaatacatatggaacaaattttatatttatgagagagtatcaattgttggaactacagaggatgctgcatgtgaagtaacttcaaatgtaattacggggccgggcgcagtggctcatgcctgtaatcccagcactaaggccggtggatcacttgaggtcgggagctcaaaaccagcctggcgaacatagtgaaacccctaaaaatacaaaaaattagtggggcatggtggtgcatgcctgtaatcccatctatttgggaggctgaggcaggagaatcgcttgaacccgggaggcgaaggctgcagggggccgagatcgtgacactgcactccagcctgggtgacagagcaaaactctgtctt

SEQ ID NO: 229785 - DNA, 591 bp, Homo sapiens
gcagtgtgcctaacatattacctgatattttaccattagcgggtttctctcttggctaaaggactgtagagaaaggaacagctacatctgcctagagaaatccatacagaagagggaaatgcttgtgctgaggcttgaaagaggaggaaacactggctccatgaagccttcatcgaccctcaaggattgctccttcctgtcctttatttccattgataagaaaaagctgtctgtaactgatttccaggccgaagtacaagaacagcttcccactgtcgctagtctctgggtgcctcaacatcccttgtttgtttctttaacctgcttgtaacctgtaggcgcggagtttattacctgttttcttgtgagaagacaaactcagagtggaagagaacttgtcccaggtcacccttggtggaggtgagctcagatcagcctgacctcacaacccaacaagaagcagtgcaagcaggaaatgtgtacattctatagtccattcatccaagttgacaagaagaaacctcaggcatgaagacagaacaagcatttctcaacaatacaaagtgataaagcgtcaaaatgagcttcata

SEQ ID NO: 229786 - DNA, 394 bp, Homo sapiens
ccggtgcgcacactactcccaccgcccccgagtgcctctgtccggctggccgcggccctggaacgaatattgctcagtcccccgcgagtcaggtctgccgcgttgcccggtgaggggaaggtgtgaagccccgggcctccgtctgcccggtgagtccggggacgcgcgcccccggggatgccatctggctcctgggctgtgaccagtcacagctcacatagctctgggcactggtaccgactgcctttccttgttagctgcgatacacaaatacacgagccagatcctttcctgaggccaggaagcctggaatctaataacaccgggcggtggataaagtcccccgagccagtgcttagcttccgttaatggagccatggatggaagcggatgt

SEQ ID NO: 229787 - DNA, 476 bp, Homo sapiens
agattttagactctcggtcaatatttttcacattttaagcttcaatagagatggcaattccagttccctgttcaagtacttttgttgttactattctaaatcttgatccttgaaattaaaactaaaggcatccagattagagcagataaaatacatttgttcctggctataaaaagtggttatatgggccaggtgtagtggctcacacctgtaatcccagcacattgggaggccaaggtgggcagattgcctgaggtcaggagttcgaggccagcctggccaacatgataaaaacccgtctttattaaaaatacaaaaattagccaggcgtggtggcaggcgcctgtagtcccagctacttgggaggctgaggcaggagaattgcttgaacccgggaggtggaggttacagtgagtcaagattgcaccactgcactccagcctgagctacagagcagactctgtctaaaaaaaaaa

SEQ ID NO: 229788 - DNA, 644 bp, Homo sapiens
agcgggtgacttgcaagatccaagtgccctgttcaacccttgacttggggttttgtacattgttatggttctggggtttgctgaagttgtgcacgtgttcacttgaggagttttttccttaacctgtcgagcgttcccagtgggaggtcgtataagaggccattttgcctcttagtgtgcctgtttgaggtctttgagaagaggataacaccagttccgagtgttttctgtctgttaggagactgtcttttcctggtgctggctgtgaccacttatcattttagagagacagtttaacaaccacctgaccatcactttattgtcgcctgacagtcctgggggcaacgggttgggggtatgtgtgtgggggtgctctcctgccctgtccatatctgcctaactacctactctaacatacctatgagctgaaagcctccacttagagtgtttgagttgttctgccttttttgactgagccattgtacatcttacatgtgttgattgatgtcttatgtcttcctaaaatgtataaaattgaactgtagcctgaccaccttggacacatgtcgtcaggacctcctgaggctgtgtcacaggcacgtccttaaccttggcaaaataaacttctaaattgaatgagaaaa

SEQ ID NO: 229789 - DNA, 2144 bp, Homo sapiens
  misc_feature (651)..(651): n is a, c, g, or t
  misc_feature (720)..(721): n is a, c, g, or t
  misc_feature (723)..(723): n is a, c, g, or t
  misc_feature (787)..(787): n is a, c, g, or t
  misc_feature (908)..(908): n is a, c, g, or t
  misc_feature (946)..(946): n is a, c, g, or t
  misc_feature (1495)..(1495): n is a, c, g, or t
  misc_feature (1947)..(1947): n is a, c, g, or t
  misc_feature (2134)..(2134): n is a, c, g, or t
tgagacagagtctcgctctgtcgcccaggctggagtgcaatggtgcgatctccgctcaccacagcctccctagtagctgggactacaggcgcatgccccaacacccagctaagttttgtaattttagtagagacgggtttcactatgttggccaggatggtcatggtctgctgacctcgtgatccacccgcctcgacctcccaaagttcaattttcttaaaagtgaccaccaacaccatcaacatatgtttatagactagatgtatcacttgtttacccaaattgtagcataaatatctgtttttagaaagcttttccataagtctttctatatgattggattattaagcaaggctatgattaggaaataaaccactttcccctttagctagttctaatgaaagctttccaaattaaacactgtgtttgaacacttcttccattcatagcatgtgctcatcaaaaagtgctttccgtttctggtatgtcaactgtactatttataacctagttaacaaagccaacatggtgaaaccttatctctactaaaagtgcaaaaattagccaggcatcatggcacatgcctgtaatcccagctacccaggaggctgaggcaagagaattgcttgaacctgggaggtggaggttgcngtgagccgagattgtgccactgcatccagcctgggtgtcagagtgaggctgtctcagaaaaaaaaaagnngnggggggggtggttccaagatggccgaataagaacagctccagtctacagctcccagcgtgagcnatgcagaagacgggtgatttctgcatttccaactgaggtaccgggttcatctcactggggcttgtcagacagtgggtgcagtgcaccgagcgtgagctgaagcagggtgcggcattgcctnacccaggaagtgcaaggggtcagggaattccctttccnagccaagcgaagctgtgacagatggcaactggaaaatcaggtcactcccaccctaatcctgcacttttccagtggtcttagcaaacggcacactaggagattatatcccgtgcctggctcagaggatcccacgcccttggaacctcgctcattgctagcacagcagtctgagattgaactgcaaggcagcaacaaggctggtggaggggcgcccaccattgctgaggcttgagtaggtaaacaaagcagcgggaagctccaactgggtgaagcccaccgctgctcaaggagacctgcctgcctctgtagactccacctctggcggcagggcatagccaaacaaaaggcagcagaaacctctggagacttaaatgtccctgtctgacagctttgaagagagtagtggttctcccagcacagagttggagatctgagaatggacagactgcctcctcaagtgggtccctgacccccaagtagcctaactgggaggcatcccccagtaggggcagactgacacctcacacggccgggtacccctctgagacnaggcttccagaggaacaaccaggcagcaacatttgctgttcaccaatattcgctgttctgcaacctctgctgctgatacccaggcaaacagggtctggagtggacctccagcaaactccaacagacctgcagctgagggtcctgactgttagaaggaaaactaacaaacagaaaggacatccacaccaaaaccccacctgtacatcaccatcatcaaagaccaaatgtagataaaaccacaaagatggggaaaaaacagagcagaaaagctgaaaattctaaaaatcagagcgcctctccccctccaaaggaatgcatctcctcgtcagcaatggaacaacgctggatggagaatgactttgacgagttgagagaagaaggcttcagatgatcagacttctccgagctaaaggaggaagcttgaacgcatcacaaagaagctaaaaaccttnaaaaaagattagacgaatggctaactagaataaccagtgtagagaagtccttaaatgacctgatggagctgaaaaccatggcacaagaactacgtgacgaatgcacaagcttcagtagccgactcgatcaagtggaagaaagggtatcaagtgattgaagatcaaatgaatgaaatgaagcgagaanagaagtttag

SEQ ID NO: 229790 - DNA, 104 bp, Homo sapiens
tcttaaaaggctccactgggggcaacaacgaaaaaaagctgaaaaatgctactctaaatgaatttactggccaggcatagtggctcacacctgaaatcccaata

SEQ ID NO: 229791 - DNA, 375 bp, Homo sapiens
cttttgagttaacactgaaatgaattaatactgaaatgaattaagactttgggagacggttgggaagccatgactcattttaaaatgtaagacatgactttcaccttccgccatgattgtgaggcctctccagccatgtggaactatggattttctctgttatcgcccaggctggaatgcaatggcatgatcttggctcactgcaacctccatctcctaggtgaacacacagtgttcatcccctcaggaggacacagcttttgaggtaccatcttggaagcagagaccagacctcactagacacaaacttcctggcaccttgattttggacttcatagcctctagaactgtgagaaataaatttttattatttat

SEQ ID NO: 229792 - DNA, 1600 bp, Homo sapiens
  misc_feature (1324)..(1324): n is a, c, g, or t
  misc_feature (1595)..(1595): n is a, c, g, or t
atgtatcctcaaagttgacaaccatgacatttggggattatgattggttttaaaaaacaaaatccttaatatagtaatttaaacaaataggtatttttttccacacaggaaaaaaagaagcctggaaatggatcatccaggactgacttccaatgatgtcaaaatccttagcggttgatttatcaccttatgggcacaagatggttgctgctcctttgaggcatgaagaaggaataagcaacaaaggatcatgcctaaaacatcactgcccaacagcgccacagccccccaacaataaaccttcccttaaatgctgtagtaagctgtattttctaaagatgaccacctcaatatatttattctgtttaatactttctttctacaacatgatacatgctcctccaactgacagaaggggacatattctctccctgtaagtctaggaggagatttttaacagtcttgtctaatagagtacagcagaagtgatgctaaataactccggaggcagggtcataaaaaaacccagtgataatattaaaaccacatgtgaatgttccagctggacccccagcaggtacaagcattaactaaaaaatggcatgaacaagctttcatatgactccagcctcagtctttgagtcttctagctgaggcctcagacatcatggagcagaaacaagtccttatctgaattactcacccacacaaaccatgagatataataaattataattgttgttttaaggtactatattttataacaaaatattaagcagcagtagagaactaaagcatagaaaaatctcaaattaacaacctaacatcacacctagagaaaccaaaaaaacaagagcataccaactccgaagctagcagaagacaagaaataactgaaatcagagctgaattgaatgaaattgagtcacgaaaaaccatacaaaagatcaacaaaaccaaaagctggccctttgaaaaaaatgaataagattgatagaccactaggtagactaataagtaaaagagagaagatccagggccaggcacagtggctcacacctgtaatcccagaactttgggaggccaagatgggcagatcacctcaggtcgggacttcaagaccagcctgaccaacatggagaaaccctgtctttactaaaaatacaaaattagccgggtatggtagcacatgcctgtaatcccagctactcaggaggctgaggcaggagaatcgcttgaacccaggaggcagaggttgtggtgagctgagatggtgccattgcactccagcctgggcaacaagactgaaatttcgtcaaaaaanaaaaaaagaaagaaagaaggaaggaaggaagggaaagaagagagaatattcaaataaacacaatcacaacacacaaaggggacattaccagcaaccccacagaaatacacaaaaccctcagagattattacaaatatcactatgtgcacaaactaaaaaacctagaagaaatggataatttcctgaaaatataaaacaacccaagattgaaccaggaagaaattgaaaccctaaacagacaactaacaaattgtgaaattgaatcagtaanaaaaa

SEQ ID NO: 229793 - DNA, 557 bp, Homo sapiens
aaaaacacataaatttatttgcctctcagttctacttgtcttcacattatagcaaacaaatacttctctgtaggtggcagtgcacttacataagacatttttctgaaagaaaagggtgggggtggaattatcttgaacattcgaaagcatttatgtaacttgaatctcatagttttaaaaacacactcttatttcctataatgtggatatatacttaatttatacttgcccttagtctctttccctcagaggtattagtaagtgttaaagagttatcagttttcattttatgacattatgattgaaattgacatgccagtcaagaattcaaaaacagatgttgtgaataaaacagtggctagcatttttgtttttaacaacaacaatagcatttgtattataaaataattgaaactggctaatataggtaaaactgttggtcaaatgatatatctcaactagttttggggctggagacttttaagtgggaaaggtttttttttcctaagtacattaaaaagaatgaccagttgaccatcctgctcatgaattttatg

SEQ ID NO: 229794 - DNA, 372 bp, Homo sapiens
cagatgtatgtggagagggagaaggatttgtattgaatagaaataacgagagctgcagtctaagattttttctagaaaaaaaaaaaaactttccaaatcccatttagaaaaactgcgacatggtaccgccttgagcgggaaaaataggttttacagattaggacaaggtcaggcaaacaaacagcccaaagccatgccatcagctcgaagcagctctgccccagcccactgctcttcctgggcctggctcacccctgcacgtgggacaaatccttaccctgctacaaagaaaccagcatgggaatccaaagtccactatgtctcagaaaaaggaagagaaatgtgagaatacatttccatttggttcacact

SEQ ID NO: 229795 - DNA, 494 bp, Homo sapiens
attctaaattgggttctaactggggaagtttctgattgcattgagtgggttgaaaagaaatgcatgcagtaggggagattttgtaaatctttgtgtgcctcctttgtgccagccccatgctcaaccctgcgtttacagtactgtggccacagacatgatccctactcccaaggacgtcatagatcagtcttggaggggaaccactgggaaggcaggcccaacctgccagtttcatgccctctctgcttttcatgttctctcttccacttctgaagcaattccagaggtattgacagaaaattactgagaacccatttattcaaagaggccatttgtaatcaagggtcccatgtctctcatcatataaatgatccattaaagtcatttagcaagtcacttagaacctttcaaagattgtctcctttggaggaaaaagcctattttgttctttttttaaaatcaagtacatgtaccctagaacttaaagtataata

SEQ ID NO: 229796 - DNA, 519 bp, Homo sapiens
atttcaggctttctctatcagttgcatttgattgtcctggacgtgctgaggcccatgcaaggtctgttgtattactttggccattatgcttcagtgtcacagcttctacagaaaggacgtacaggttgagcatcctaaatccttaaacccaaagtactctcaaatcgagaactttttgagtgctgacatggcactcaaaaggaaatgtttattgagcatttcagatttggatttttggatttgggatgctcagccagtaggtataatgcaaacattgcaaaatctgaaaaaaattccaaacccaggatgcttctggtcccaagcatttcagataagggatactcaacctatactaccattgggagggagatattatattaccattcgtcagtagagagaatgtgcagagtggggccaggggtagtaggaagtaggtcattctggggcagcaacttttatttatttatttagtttctcagcttttaatttatgaaggactcagccacattaatgttttgc

SEQ ID NO: 229797 - DNA, 760 bp, Homo sapiens
acaatgtatacatataacaaaatatcatgttgtgtgccataaatatatacaatttgtttgtcaactaaaaagtatgtcccttggaatacactggacatatttatgcttttttgaaaagtaccagtagagatacagtggttccccagtggtccctctgcactggagaccctctcacaggatgcccaggcctttccccatgactgggcaattaaaggctaatgcacagcacaaaaggcagcttccaggatcctgacacagcactgtggcttgcttctattctaactggcctatcttctgccttacttgtcattggatattttgaatatcactcctgggtggatctatataataaataaaggtccaagtgtgttctataacatgagaaactgcaactatgtgtcaataaaaattatcagtacaagaaaatattatttctcaaggtttgatgtcagatcaaacatcattttctcagggacccctcttatttaaggctcccagctatatgtccccacaatgtcctctattcttcctaacagtgtctgtactttctctgcttgtataatgtctggttttcccagcagactgtatgctccatgaggataagggccatgtctacagccccagtggctaagtaaaaagggctcaataaatttttgttgaatataaatttaaaaagctatttccatataatttttctaaaaaattatttcatcatttgttactgaagttttttctggcattaaaaatacctttggaattt

SEQ ID NO: 229798 - DNA, 334 bp, Homo sapiens
tgttctttcaaggtttagtagagttttaaaaataaatgtatgcatgtagaacaattcccagatggttgtttggttaaagagtatctccacagagctcctcacactgctattgcagagcagaagtcactgggttacttgattattagtattgtctactggaaattcggtaagagagtagattttatgtggtcttcccaaaacaagaaaactatgtgggatgatgaatatgttaattggcttgactatagtaattaactatgtatatgtatatcaaaacatcatgttgtataccttaaatgtgtacaataaaaataaaatcttaaaaaatttttta

SEQ ID NO: 229799 - DNA, 408 bp, Homo sapiens
gattgggggtggttctttttcagtaggcaagagtttttaaatgtgtttattgttgatctttaaatttattatattgtacttatagaatgtgttgtcttaatttccatgtgtttaaaatttcttaacattttctttgtttttggtatataattatttttaaatgttattgttttaatatgtctctagattaaataggtctcatactttctctaaatttctctctcatatatactgttcatggtctttgtatataaaatataccttatcaatttggcttttgaagtcatatcattactattaacttacttccaaagtatgtttaattctgaagtgtgggtaatattgaagtcttggcaaactcatgtgattagaaacccccctggtgcaacagagtgtgtttttggattc

SEQ ID NO: 229800 - DNA, 438 bp, Homo sapiens
ggttccaggcagaaaagtcagcttgcagaaagacaggaggtggagacacctggccatgtttaaaacatggagttgaccagcttgatgagcacgtagcctgtccatagattgagctgcctcttgagtgctgggttctggaagatgcggggtggggctttagggcaaagatgaattaggaaactacattagttctggtcagaggcatgagactgtgtgaggctggcacaggaggcatggatagagtgggaatgaagaatctactgaccttgacaatggattatatagggggtggatggaatcaaagaagaacattacagttagagtctatgaaaagctatggcacctttaacagaaataggaacacttagaggcgtgctagaagagggacactggggctgggtgcagtggcatgcacttgtagttctagctactcaggag

SEQ ID NO: 229801 - DNA, 532 bp, Homo sapiens
atcacagtattccatcaagtagatatgcaatttacacagccatttgatcatagtttgacctatagttgttcctaatattttataatataaataatatgaatattaatagcactataatattcctttctcttattttttgattattttgctatgactaagtagtggggaggaacaaaaacttttccttgtaaatagagtaatgtattgttcattagaagaacaatttagaaaatacagttcattgaaaagatttttaaaaattacccacgacggcatcattactcagagataatcctattagcaatttattattgaatttcttgcctttttctatctatatatctatatttcctttggaagtaacatgtactatttgtattattttgaagcttttaaaaaattttaacaatatcaccttcacctttctatggcattaaataattaaatattttctagatgttgacaaactatggctgatgggtcaaatctggcccacccccttcttttgtaaataaagttttattggaacaca

SEQ ID NO: 229802 - DNA, 409 bp, Homo sapiens
aaggttgcccaaatctacccacctccccatgaaacatcatggattgcacatccaatagcattgttctggtttgcatcttaacctctgaggctcgtaaactgtggcaaacctttgttcagggacagctacatcactcctattagcatcttggaccttggctcctggatgctgtccagatctcatattgctgaagtgttacttattcaaatctctctgacttggcattccacacccataaagtagctcaatctcatcttgactcccagccaaacgatgctcccagtagtatcttttttgacagagattaaggttcattttacgttatacatccaaacatttgatataaataatgactcatgtttaaactggttaataaatatctaccactgaagccagagaaagaagacaa

SEQ ID NO: 229803 - DNA, 406 bp, Homo sapiens
tactgaaatcctgattcactccatcccatttggtacttcctacgccccacccacctgccatcttgccttttccttagagcagccaacctgaagcctttggtgaaaatagtctctccccccgaacttttttttttttttttgagacagtgtctccctctgtcacccaggctggagtgcagtgatgcgatctcctgtctcagcctcccgagtagctgggattccaggcgtccgccactatgcccagctaatttttgtatttttagcagagacggggttttgccatgttggccaggctggtcttgaactcctggcctcaagtgatctgcctgcctcagcctcccaaagtgttgggattacaggagtgagccactgtgcctggctgaaaatagtctttacaggaaaatta

SEQ ID NO: 229804 - DNA, 491 bp, Homo sapiens
tggctctgtgtcagtgttgacaagtcgtacgtgttcgacgctccgtgaggcaactggttccagcagtatgcagaaggaaaccagtaaatcctcaatgtcacgccactcattgagacttggttgctctttttactctaaatatcaccatggatacaaacactttgaaaccagggtcctgtccatcacctcacagcccagtattgcacaattgtgtaagcacttgaaaaggtagaccttgtacctcaatcggctcacgaatactgttgggacacctgtgaaaacttagttgttttaggtatttcagttttgttttttatcattctttgtattggaaagttattctgatgcgtcattacagattttaaagtaaaaacagaatatctgtagtatgatagttttctcttctataggtacataatcttttataagtgtttttaatttaaaatgagactgtaatgccattgcctttaaggaggatagtttcagtacca

SEQ ID NO: 229805 - DNA, 466 bp, Homo sapiens
aggtgacgagagagagaatgagtgtgaaagaggaacacttagataaccatcagatcttgtgaaaagtcactattacgagaacagcatgggggaaactgcccctatgatccaatcacctcccaccaggtccctccctggacatgtggggattatggggattaccattcaagatgagatttgggtggggacacagagccaaaccatatcagtactcaaaactaaaatgccaccaaaggaagtttgaataaataggaaggcatattctatttttgggtagaaagactcactattataaagatgtcagctctccataaattaatctataaatttaacacagatctaataaaaataccaacagagtacgcaacctgaatataaattcatatggaaatttttgcatcagggataaccatgttgcttcagtagcatcctcagaatgaaaaacaaccaaccaaaacaaaaagaa

SEQ ID NO: 229806 - DNA, 652 bp, Homo sapiens
cgccctcccagagtgctgggattacaggcgtgagtcaccgcacccagcctaccttcaatatcgatgtttctgacagtctacaactgccattcttttcccaccttatatacctgtagctcttaaattttaatataaataagaattgcctgggaaactaaatggagattcctaggaataaccccagagaatctaagtcattaggtctagtgtaaggcccaaaaatatgtgttgtgaacaagtctaccaagtggaccattctctgagaaacattgctgtgcatatttatctcataaaatcagtagcttcaaaaaccacctaaacaataaagattatgtctacattctgactttaatcaagtattctactgtatttctaaaagcctattatttctcacaatctatggatgatcacagctggactcatcatttctcccattgtattgattagtgggcagcaatattcacctaattttcctagccagaaacttgaaagtcatattttagtcctctgtctctcttatatttgaccacagtcccattatttctctttctaattatctttcagcctcccttcactctccctagctctttcaattccactgccactgacttaaggctgtcattacttttcatctaaattgaagtacccagag

SEQ ID NO: 229807 - DNA, 543 bp, Homo sapiens
cagtagtttattatataactgaaatttgctaaaggagatcttaagtgttctcaccacggtggggggtggggagataagctatgtgaggtgttgaatatgttaattaacttgattgtaataagtttttcacagtatatacataaatcatcaagttgtacagcttataatttttaactgtcagctatacatccataaagttgtgggggaaacaaaacaaagacagcaaaacaagttttcattcacacaaattctggaagtcagcaaacacgtggtgaatcaggtcagcactcatagtgttacatcatcctcactagtatgctgcaataaatactccagacttacaatttgttccccatatgtttgtattttcaaatgtcttcagagataaaaattatttgtgttacttcttccttcataagaaacattaaggtttgtaggactaggaaagtatgaattatggataggaaaatgtacatttttcctgtgaagctgaacaggacaccctaaaaaaatgtatggttactgtcattgagaaattcagtg

SEQ ID NO: 229808 - DNA, 333 bp, Homo sapiens
gcagcattatttttaacagcgtaagactggaaacaacgcaaatgcccatcaatgggagagtcgtttaaatgttatcatacatccatacaacaaactagattgccgtcatgaaaaaataagcatgctctttaaggacagggaacaatctccaaagtaaattaagtgaaaaataacagtggctgtaatatgtgttaccacttctgttaaaatttaaaaggaagggaagaagcagttacatatttccttgtataagcataaaataactctgaaatgatacaggagaaactgttaatagtggttgcttccagagagggaaccaaggaagctgggtac

SEQ ID NO: 229809 - DNA, 460 bp, Homo sapiens
atttttacctgatcaactagagttgttgactcttgtcttcaaggaaatagggagaaaaatatttttttcatttaaaataccttttttttttagttagtaggatggtgaaaccattttgcagttattttattccctcaatcatatctgatttgcatttcaaagttatgagttctgtccctttgtgacaaaacccaacatgttaaggtgtggtaagtgaacttatatattaaaagccatagaatatttagatagattttctatggctataccaccctggaatgtgcctgatcttgtttgatgttggaaactaagtaggcttggacctggttagtaatttggtgggagagtatttagatagattacttttgggtcacaaggatagtcttaatctggtactctcacagtgaaacataaaggggttccagggacaaactgaacctaaacagaactcctgaacttt

SEQ ID NO: 229810 - DNA, 299 bp, Homo sapiens
gggacctgctgcttcactgatgagtccaactttcggtagcattttgcagacgcagcgtgaaaggaagctgtgtgctcgtctctccctgggctatggctcgctaataaacacaatattaaagaagcagtgggttgatgctgtttagcctaaaaaagagagtcgtcgtgtccctagcctggccttacctctcttttaagacagaaggcctcagctgagagggctttcctggacagtgctggacgatgtagtatgttttctgagagagctgtccatgacatctccttctacttcaattattt

SEQ ID NO: 229811 - DNA, 604 bp, Homo sapiens
gattctcctgcttcagcctcctgagtagctgggcgagcgccactacacccagctaatttttatattttttgtagagacggggttttgccatgttggccaggctggtctcgaactcctgacctcaggtgatccgcctgcctcagcctcccaaaatgctaggattacaggtgtgagccactttttcataagagatattttgtgtgggggtctgttgtttttcagtgcaggattctgacaggtgagaatggtttgttttcttgctaaatgaacagtctcactttgtggtacagtaagtactcacgtcatccataggttcttagaaactgcaactttaagcaagacaacatacaacaacaggtccttgaataaggtagttttgttcacttaaagtcacagtttctaaaagcctatccatgaagttgagtgaggacttactgtgtgtgtgtatatatatgtgtgttttttttgtctttttggtttttttttttgtcgggatggggtttcaccatgtttccaggctggtctcaaacttctagtctcaagcgatttacctgccttggcatcccaaattgtcacgccaccatacccggcctcttactgtatg

SEQ ID NO: 229812 - DNA, 527 bp, Homo sapiens
taggcttttcttttagatgctgccttccatctagttatgctattctgtttaccctggggagtggtagaacaggtgaacctcataagtctctggaaaggggccagggatgaatgtcttatacatgttagtattgatctgaaggagaattggtttggggtttgggtacatcaaatggaaaaggtcagcagaagatgtgtgtggcactagtaaggaggataattgacatcaaatgctttccatggaatgtcatggtttggactgttctccttactggcatcattggggtctggatcagaattctttatacaggtctagataacattatatgtaacaaaaattccccaagttactcatcagaaatcttagaaagcatgaagcacagtattgagcagagttgaagacaggtattggctgtgagagagagtgagacaggttttaaaatgggctgaggacttttatcactataaagagtagtttatttcctttttaatatataattatgtaaattagagccactggaatttttg

SEQ ID NO: 229813 - DNA, 284 bp, Homo sapiens
ttgtagttttctccatatgacacccacacattttcatgatgtttacacctaagtatttatttttcttttttggtattattgtaaaagttatttaaaaggcttacttttttatttcaaattctgaatgttccttactggtatacaggaaagcatttgactttcgtgtatttactttgtgccctgtaaccttgttaaatttgatcattacttctgagtatttctgttgattctttgagaattttctcataatatcattttaaataaaaagacaatattatttcttc

SEQ ID NO: 229814 - DNA, 334 bp, Homo sapiens
attgaaaagatttgggggaaaaactataaaaaataataacaaaaaaacccaatgtagtatgacaactattgcataacatttacattgtattaggtactgtaagaacacctagagatgatttaaagtatatgagaggatgtgcataggttacatgcaaatactatgccattttatataagggacttgagcatagaggattttggtatttgtaggaggttctgaaaccaatcccccacagatacagggggatgactctaatttctcactgaactttttgaaaaaggagcaggatcctcttaaaaacccacgtgctctcttggctttttatggctca

SEQ ID NO: 229815 - DNA, 552 bp, Homo sapiens
gccctcccttctgccaagatggatagtaccatccaaggacatgatgagatcagctccctcagccctccagaatctgttataaagagaaagcagcttccttgggatagttgccacccaagaactcagaagccaagctttccagcggtgagataagtgtcagggcatgtgctcggctcagcctgcccagagctgaggtcagacccttgtgacccccaggtgtcatctgcggatgggggcagtgctgtgggcacaactagcaggcagaggagatggaagaggagggggcagcggtaacttggaagtacttaggagttgtttttaaaagcaatgtcaaagtagagagctagaaattgaaggaagaacagaacacactttttacaaagcaaagtccagggatccctggtctttcacaatatgaccccaccaatgtaataactgctaagatgtactgagcacctactatgtgccccaggcactatgcatcatatgcattttcttaaattaattctcaccacataatcctattagggtaagagctattattatcatctt

SEQ ID NO: 229816 - DNA, 373 bp, Homo sapiens
ttttcacatataataccttactccccaacattaggtaaatgaggcattgctatgtatataaagcagaaagttaacatttgagagcatggaatgatagacttcactgcctccctctgtacttggttctgtcctctttacacattcataatttcatattccttgacctgcctttataacgtgcccaagttagcaccctcttctctaaaggggttatcttgccagaaagtacagaccttaaacacacaccaaagctcaaggtctcttctgcatcagcttacatttttctcttatctcacactgggatgacagacgcacccatctgtcatgtagattctttacatcccaagctaggcatttcttcttttgtttttgg

SEQ ID NO: 229817 - DNA, 461 bp, Homo sapiens
tatgctttgatgttagaagacatggttagcacctctgaaatagtttttctaacagcctgaaaaatagttggaaagagttgatgggaaggttgtataaatgaattttggtgaattctcaacatgatttatttatttttattttatttttcgagacagagttccactgtcacccatgctggagtgcagtgtcatgatcttgactcatcgcaacctccgcctctggggctcaagcgattctcctgcttcagcctccagtgtagctgggattacagtcacgcaccaccattcccgtctctactggaattacaaagattagccaggcatggtgatatgcgcctacagtcccagctacttgggaggctgaggcaggagaatcgcttgacctgggaggtgcaggttgtggtgagccgaggttgcgccactgcactccagcctgaggaacagagagagactccgtctca

SEQ ID NO: 229818 - DNA, 332 bp, Homo sapiens
ccagtgtttttggaacaaatttactaaagtagaatttaaaaagaataccaggccaggtgcagtggctcaggcctgtagtcccagcactttggggaggctgagggcaggtgcatcacaaggtcaggagttcgagaccagcctggcccacatagtgaaaccccgtctctactggaattacaaagattagccaggcatggtgatatgcgcctacagtcccagctacttgggaggctgaggcaggagaatcgcttgacctgggaggtgcaggttgtggtgagccgaggttgcgccactgcactccagcctgaggaacagagagagactccgtctca

SEQ ID NO: 229819 - DNA, 780 bp, Homo sapiens
atgtgaaggggccatggagtgaatggatggagggatggatgaatgtgtgagtaggtaggtaggtgaatgggtagatgtgtggatggataagtaggtgggtgggtgaatggataaatggatggatgggtagatggatggatgaagggataaacagatgggtggatggattgataagtgagcggatgaatggatgaatagctaggaaagtgggtgggtggatgagggtgggttgatgaggtaggtacacctacagataggtaagtgagcagtttcttgggagtccacaggtcacattttatctttgctttggaaaacctagcagatctgccatgatcaggatggcttcccgaccttgcaacccttctgcttctgacctccttggcacctgggaatgggggagattctgaccagcctccccagatgagtgttcaatgatagttacataaacacagtctcagaagagtcatccctgtgtcctccctcactgtgggttcccagctctggggcctgccctctctcgggtgccctgttcagctgtgctctgagccccagtttctccacctgtgaaatcagaataacacctacctcacagggctgttgtgaggatcctcccagtaatgactgtatggcactttgagttgcaaagcaatggatgaatgctaaatattattattaattattattatcactattctctccacaactatgggattcttcaaacatggcttatggtaataaatatttggttctgcattgggcagaggtatccaccagcccctt

SEQ ID NO: 229820 - DNA, 474 bp, Homo sapiens
ctttagtcagggtcatgcatgacagagggcttactggattgagaaatgagaggacagagttcagggtgaacatggcagatggaaagtgagaaaggaaaccaagatgtgtagaagaaagtcacagtagaggggaaccaaatcatgtggataaactctgcctacatctctggctgacctttgaactatccacaggcccaccattcaaaggtcctgacttcacaccctcatcagtcaatatattatgttttatcattagagtggaggacaaggagaacctaggtgtcaagaattgtcctgcaggatggaggcacattagtgaacatgacagacaaggttcttgtcctcaattcacacatctcatgctatcttggaagctgtatgttgcctgacttggagttctaatcaactgatatatacaacttattataattttcacttccaataaagaaattccatttgttgattttcctaaca

SEQ ID NO: 229821 - DNA, 395 bp, Homo sapiens
gttttatttagtcctccaaatactatgtgaggtggtaaattgtgattcagttgcctagcctataaaatgtggacaataaaagtatctacaacagaaggtttgctgtgaggattgaataaattaatatgtatgaagcacttagaaaagtggcaccaaagttctcataaaagttagttactattataaaaaaatcaatcttatcttagatgataagatatctttatcttatcaatcttatcttagatggcttaatgactttgtgacttgttcaagctcacataactgtaagattcaaacaaagctcagacttaaaccaagtttgtttgactttaaatccaatgctcttaataactaatacatagtccttggtaaagttgtcataaaatcatatgtgt

SEQ ID NO: 229822 - DNA, 1070 bp, Homo sapiens
gagccacaactttgcgcgagtgtcttggttgagcgcagcgcccattcattgcccgcgagcgtccatccatctgtccggccgactgtccagcgaaaggggctccaggccgggcgcagccgccacccgggggaccgaggccaggagaggggccaagagcgcggctgacccttgcgggccggggcaggggacggtggccgcggccatgcagtcctgtgccagggcgtgggggctgcgcctgggccgcggggtcgggggcggccgccgcctggctgggggatcggggccgtgctgggcgccgcggagccgggacagcagcagtggcggcggggacagcgccgcggctggggcctcgcgcctcctggagcgccttctgcccagacacgacgacttcgctcggaggcacatcggccctggggacaaagaccagagagagatgctgcagaccttggggctggcgagcattgatgaattgatcgagaagacggtccctgccaacatccgtttgaaaagacccttgaaaatggaagaccctgtttgtgaaaatgaaatccttgcaactctgcatgccatttcaagcaaaaaccagatctggagatcgtatattggcatgggctattataactgctcagtgccacagacgattttgcggaacttactggagaactcaggatggatcacccagtatactccataccagcctgaggtgtctcaggggaggctggagagtttactcaactaccagaccatggtgtgtgacatcacaggcctggacatggccaatgcatccctgctggatgaggggactgcagccgcagaggcactgcagctgtgctacagacacaacaagaggaggaaatttctcgttgatccccgttgccacccacagacaatagctgttgtccagactcgagccaaatatactggagtcctcactgagctgaagttaccctgtgaaatggacttcagtggaaaagatgtcagtggagtgttgttccagtacccagacacggaggggaaggtggaagactttacggaactcgtggagagagctcatcagagtggggtaggta

SEQ ID NO: 229823 - DNA, 1191 bp, Homo sapiens
agatgggtggaggcactgggccacctcagagggccagtgtcttgctgaggggccggagcagtcctgtgcctgcagcctccggagccatgggaacagggctgcgaagtcagtccttgcgagagccccgaccctcctatggaaagctgcaggagccctgggggaggccccaggagggccaactccgcagggcgctaagcctcagacaggggcaagagaagtccaggtcccagggcctcgagagaggcacagaagggccagatgccactgcccaggagcgggtgccggggagcctgggggacacagagcagctgatccaagcccagcgaagaggcagccggtggtggctgaggcggtaccaacaggtaagaagaaggtgggagagctttgtcgccatcttccccagcgtgactctgagtcagccggcctccccgtagcccacactgggcaccatcagctaaagatgctggaagccatcgtggcccccttgctgtgcctggaccagcccaccgtgtctgctgacctacctcttcacagctctctggactttggctgggtggccctaggaggcttctgccaccagctcactggagtcgccacgtggctgccactcttagctctggcccttccactccagcactagctctctttgaagatcccagcagggtcaaaaagaagggggctcagctgtctgccctctgggcttgggtaggggccttggactatgattctatgaaggtttagaagaagcctgcccggaatgggggctgtggacgctcctgccccacacgaccagctgtcaacttccaggacggagcttgatgaagccagacccatggccgagaggctcacggacgttgcctggtcactgggccatgacccaactgcccttcttgtcagttgctgatggtgggccagggcgcaggtctccctcccagatggtgagccctctggggcaaggaccacagctgggtggccctcctggctgagcactctgtgctgaaaacctttgaacctcacggtgtcctgatgaaggaagcagaggaagtcttcctccctgtgtgacagagggggaaactgaggcccagagtggggaagggatttcttggttttgacatctccgaccccaccccaccccatccagtgtccagcactggagtcgaacacagtaataaagatgctgagaaaaagtca

SEQ ID NO: 229824 - DNA, 921 bp, Homo sapiens
ggtggccactccacccgcagccagactccccgctccccacttttcatgcaggctggcatacccctggctcagggtcaaatgctgttccacacccacctcagaggcaccccctctcccctgccccgtgcatccccacccttcttgccaaaggacctcttttcccctatccagagaccaccccaggtggcattctctcccaccttctcctttgtcccccatcccctgtctctgtcttccagctgtgaatatgaagggtatcctgtatgatacaaaaacaaaacctgatatatgcaatatctgtctgtctgtctgtacccatgggcctggctcagccattggaggcccagccgagggtccggcagggcacagggacagccaggtggcaccgagtcacaggctgtggtccggtggctgagcatgctgttgtcttgtccttgattttattttcttttgttcttttttttcttttctttttgtttttaactccagcttcctttgctttttacttgaccaaagctaagacaatagccagatggttagtggggcagccaggcagggaggacccagggctgggattctccaaccttaggccattcctgcagccctcaccacctccagcccctccaagcatctcgtgtagggacccacgcagatggtcccattcattcactattgcccccaaccccgggattttgggtggtctccacagccaccatcatacactcatcccgtgttttcttccaaaaagtcacctcagcagcctccccaggcgatacagagggagagcccagaccaccacagctggccacgacattgcccttaagtaatatgcattggccagagagcccgggctggctgtgcacagcattcatgtagctgatttctagctttttttttttttctgccccactcctgagcaaa

SEQ ID NO: 229825 - DNA, 736 bp, Homo sapiens
cgaattacagcctcaaggcctctgcagttaagttgagaaaaagggccatgtctcaggacagaaccatggatgtggcttttagcacgtggagaggattcaaacagagaagaaggtaactaggtttttgagaaaggtctactgaccaaaaaagtataagcccatatttaaacagtttgcaaccgttcaaatcttctaatggtcattgagtctcagctacctagatgcaggactgagagcattctttccttttcttttcactgtcttccttggtcacacatgaggggacattgagaataggctttctgtgggggctgagtcagttcctttgcagcttcctgcttttgctttgcctccttcaagtaccagaagagtagcactgcagaaaacagttgaaaatccctgatttcatcccagtctcattctatacatgggactctaaggtccagacaaaccacttactggccctggctgtgagattgggactcagagcacctgactcacaacctggtccactgtagccctcatcaaggctctggtcaagtcttcccccttcttgggcctcactgctcaccctctgagtctctctaccgtctcacactgcctccttcccactctccctgcctctaaccaactgtggggtctcattggatttggtcagtgttgatcttggaatgagtatcttttggaagttgataatgtacctgcagttttccatgttttgagatgtgttaaaata

SEQ ID NO: 229826 - DNA, 200 bp, Homo sapiens
aggatgaagaagatgaagaggaagaagaagggactgagagaccatctgtaaaagggaggagtaaggagatcctcaaattcttgcattcattgttttcgtgaaagaactgtacgtcatggaactccttgtaatgccgacgctgggcttttctcccacctgtatgcagttgctgctgaatttcaggggatgtgatttgaact

SEQ ID NO: 229827 - DNA, 265 bp, Homo sapiens
aattatttctcaaaatgattgtaccagttcacattcccaacagcagtaaatgagagttcccactgctctgcatccttgtcaacacttagtattgactgactttttgatttttgccagactcagttggtatgagatagtacctcaaatatgttaccttgttatatgttttgagccatttttgtttcttttctctagtgcttgttcatgtatttttcaatttttttactgtagtaaaatatatataataaaatttatcattttattc

SEQ ID NO: 229828 - DNA, 541 bp, Homo sapiens
cgattggggttaatcgaggactgtcactggggcttctcccccaaagttgggcgcgctgcgtcctccgtccccagacatcgaaagtccgggctcacctgggagtgcagcctgagtgtggaacgcgcttccccaccgctggcggggtaaccgtaccctattgtcttcctcccagtccgctgcgctcccgagccttcctcaattctttgatgggggaggggcgcggctgcgagaaaccggccccctccactccccgccccatcttctctccgaccagatttttttcctccaacattgtaagtgagaagttttaataatgcgaataaatctagcttgggagagaaaattttgtttagtgtcagtttaataaacataatttttttgttggtgtagaggatctttagatcctcagattgatacaccaggttttaaaaagaaaacatcacctgcactccaacctgggtgacagactctgtctccaaaacaaaacaaacaaacaaaaagattttattaaagatattttgttaactcagtaaaaaaaaaa

SEQ ID NO: 229829 - DNA, 443 bp, Homo sapiens
cgattggggttaatcgaggactgtcactggggcttctcccccaaagttgggcgcgctgcgtcctccgtccccagacatcgaaagtccgggctcacctgggagtgcagcctgagtgtggaacgcgcttccccaccgctggcggggtaaccgtaccctattgtcttcctcccagtccgctgcgctcccgagccttcctcaattctttgatgggggaggggcgcggctgcgagaaaccggccccctccactccccgccccatcttctctccgaccagatttttttcctccaacattgtaagtgagaagttttaataatgcgaataaatctagcttgggagagaaacacaatagaatcaaaaaaaaatggcaaccatgaatatagagtactaactgaagacatacagggctatgcaaaaagaagcccccaagataattccttgggcc

SEQ ID NO: 229830 - DNA, 1012 bp, Homo sapiens
cgattggggttaatcgaggactgtcactggggcttctcccccaaagttgggcgcgctgcgtcctccgtccccagacatcgaaagtccgggctcacctgggagtgcagcctgagtgtggaacgcgcttccccaccgctggcggggtaaccgtaccctattgtcttcctcccagtccgctgcgctcccgagccttcctcaattctttgatgggggaggggcgcggctgcgagaaaccggccccctccactccccgccccatcttctctccgaccagatttttttcctccaacattgtaagtgagaagttttaataatgcgaataaatctagcttgggagagaaaattttgtttagtgtcagtttaataaacataatttttttgttggtgtagaggatctttagatcctcagattgatacaccaggttttaaaaagaaaacatcacctgctgcagtaaaactcattgcatgaataaagaacaggttactttgcgggatcccaaacaaggtgtccaaaacaggcaccctgttttaagtaaattaccatattaatgcttttctttattgggagtgccgtttcctgatgggacacactaaatcttgcacacagtaggtgcccgataaataaatttgacttgatcaagatttttttgttgttgtcactaatctattttggataggatttgtacatttctgtagtcaatatttgtttaatgaccttatggattttacaacaaaaggagctggtgctgatgtaggagggctttatctttggattaataggcagccaaatgtacacggggcccagactcttgcctggtgccacgtcctccctccagcctgtaatcagaagctcttgtaaaccctcccttgcagtgagggctgaaaactccgatctgcctttgttccatgacaaaggagagattatcacgtgccctactggactgtgcatttcgtggcttgaaaaatcagtggtgaatgatgccactcagacgctgggacactgggagaacct

SEQ ID NO: 229831 - DNA, 538 bp, Homo sapiens
cagggacagaataagattctgctgtgtgtccctatggaaactcatgtggaattttaatgagaagtgttaaaattggggccaggtggaaggtgatttaatcatggagggcactgggtgttggaaggtggagattggggaggatgggtggattacgctggtggtgaggggcgaaaagtgggggtgggggggatccctcacaaatagttaaacaccatctccttaatcctttcctcatgatggtgattctcgtgatagttttggagctgtgagatttaatggatactggcctcctgggttttggacttgcattggccctgcgatcccatttgtgttattttcctggcaaacctctaccctttggattgagaaaacttacccaatgcctgtaccatcattgtaccttgaaagaaaagaactcccttttaaattccgggacttataggcaaaagggactgcagccttttctcaggtgagacgtggaactttttacattcgagttaatgctgaaatgactaaagacttttggcaaccttaaaaa

SEQ ID NO: 229832 - DNA, 728 bp, Homo sapiens
agacatgggcaaagattttatgatgaaaatttcaaaagcaatagcaacaaaagcagaagttgacagatggtatctaataaactaaagcacttctgcacagcaaaagaagctgtcatcagagtgaacagacagcctacagaatgggagaaaatttttgcgatctatccatctgaccaaggtctaatatccagaatctacaaggaacttaaacaaatttacaagaaaaagaaaaccccattaaaaggtgggcaaagtacatgaacagatgcttctcaaagcagaaacaaatcttaaatgaagttaaacacacatataaaaacagtagcaggagaggttacctgtttgagcacctatattttcttagagggaatcatgtcttaccagccagattgcccataaacctcaaaaaaagtcacctgggagaaaaatataacacaagacttgattttgcaatgtctgtaagccccctcaaaccccaaacttggggctcactgaatgaagataatttgtttttccattttcttcttgagaaaaagatgatttttaaaaatcagtgcctttgatatattttcaaagtccgacaatgtgattgattaaatcaagtctcttgttgaatttttctaatgctccagggtagttttctgattgacagcatatacagaagtatttcagcattcattgtagaaaagctagcagaaatgaccagtcaattataggcacccaaaaaa

SEQ ID NO: 229833 - DNA, 332 bp, Homo sapiens
gaagaaatgctctaagaagagtcaggggccttaagtcaggaagaagcctgcctaaaatttagtcaagttgaggggaacattaaggctgtatcttgatcagttcttactctttttataacttcagactcagaaacagtagtttccttcctgttcctcaaagacaccaagtatatttctgttctataatctttgcatttgttggactctctggaacaatattctgccagcttactacatggcttgttctcttattttcttctgatgtatactcaaatgtcaacttaccaccagagtgatatttcatgaccaccctatttaaaacagcaatcctc

SEQ ID NO: 229834 - DNA, 449 bp, Homo sapiens
ttgccttctcttctccccgttatctaagactttcaaaattaagacattcataaaatatttagaggagagaatgcagaaataagggtataatagaaggatcaaacactattggatttatttggatttatttgtgattacaagtaatataatggaaattgtattggctgggctccgtggctcacgcctgtaatcccatcacttagggaggccgaggcaggcgggatcacgaggtcaggagatccagaccatttgtgctaacacggtgaaacccgtctctactaaaaatacaaaaaattagccgggcgtggtggcaggcacctgtagtcccagctactcaggaggctgaggcaggagaatggcgtgaacctgggaggcggagcttgcagtgagccgagattgcgccactgcactccagcctgggcgacagagcaagactctgtttcaaaaac

SEQ ID NO: 229835 - DNA, 265 bp, Homo sapiens
cttttacttgaattccctgcctctatgcttgctcttcccaagcctagactttaaagctgtttttgcaaagtacgcactcatttcactctcatgcttcggtcttttcagttgccttccttaggataaggtccagaaaaacaaacaaacaaacacagcttgggtactacatacatcacctgggtgatgggaccatccatattcccaaacctcagcatcatgcatgtaacaacccccaacatgtaccttctgaatccaaaatataaat

SEQ ID NO: 229836 - DNA, 583 bp, Homo sapiens
gattcatccaaaatatttaaagatgaaatggtacgatgcttggaatttacttcaaaatattcatgagggagtagatatggatgaaataaaacatatttggttacatatttataattgttaaagcttaatgatggatgatttgagtttttaaaaatgttctatcagggccgggcatggtggctcatgcctgtaatcccagcactttgggaggccgaagcaggcagatcacctgaggtcaggagttcgagaccagcctgaccaacatggcaaaaccccgtctcttagagttttcaaaaagacttcagttaaaaatatttcaactggacctttctgaatagatggaaattgtatttcagaaagttgtttctttcgagacctataatatttttaaaattttaattcattgtaacatttttatgccatatgttttccctcacttcttgagagacttaagtacctccaacttttaaattagacctgtgtctctaattataatgtagttttttatttatttatttacttattttttgagacagagtctcactgtactccagcctgggcgacagaactagacatctcaaaa

SEQ ID NO: 229837 - DNA, 417 bp, Homo sapiens
aaatgctgcacataggcaatttttgcctgaacttgtagattgcattattaattccacatagattctttattctaaaatcaacctaccaatgttttctcatctctaaccaagtattcaaaattaatcaactctctaaagcagcatgttttgtgacatgacagtaatgtgtatgccataaccaatcaggtgaaacatcattgtacggcagacatttcaaagatgagactttaaaaattaatgagcaaagagtaaaacatgtatactttcaacctttcttttttctttgaaagatctaaagaagacagacatgaagctcagttttcttcaaagatacttatttaaatttcaaattgactattttacattgctaaattttatataaaattaagtattgtatagtaatgtaataatgtcttt

SEQ ID NO: 229838 - DNA, 556 bp, Homo sapiens
tgttaatattggaaaaagccacacaccaagacaaaccaatcacaacacctttcggtttgcagcaaagtactctggatcgaaaacagtcacaaggcccaatggtgtggagtttgcccatgcatcttcccagtggctcttaataagaaatccatttccagaatcagcagcatgacccagcctacattactctggtcaggccagttatggtccagccctccttgggacaccctacaatgaagggacaagactgccttgtgggtcagtcactgcatggcacaggaatacagtagggagtctctggaagtttaatgaggacaaacattgcaagttttctctcttctttctttctttgtaaactgaaaggactttcactaatgctccataaaaactggtttaatatacagttattacaaaacttcagatttttgacagattaagtgctattaaatcaccctagtgtgaaggcactaaaaggtcacaagatgaattagttcaggccatcttctctcagtcttcagcaagtagcttctttcagaactgcctcctcccgccaaga

SEQ ID NO: 229839 - DNA, 397 bp, Homo sapiens
gtgtttcatccccctcgctgctcagcctttggaactgtttctctactctctgtttctatgggatccgcttttgtagattccacataaaattgagattgtatagtatttgtcattttgtgttggcaggaaagtaaattagtgcagctattttggaaaacagaatgaaagttctacaaaaaactaaaaatagaattaacatatgatccagcaatcccacttgtgggtatatattcaaagtaattgaaatcagtatgttgaaggcatctctgcactgccatgtttattgcagcattattcacaacagtcaagatgtggaagcaacccaagtgttcatgagtggatgaatggataaagaaaatgtgatgtatacatacaatggaatactattcagtcttta

SEQ ID NO: 229840 - DNA, 390 bp, Homo sapiens
cattggcataatgtttttatatattgttcttctctttaaacaaattatctatgaacactcataatgcccaactaatgtattggtattataaaacaaaatattatattagaacattattgaacacttttctaaaagtattaaaactctaaagaaaaacatttcacatactgtagattatttgcttatgttcttattaacactctaaaataaagctagtaaattattcaccatgattgtaacaatttcagaaaatatggtctctccacactggtgtgtaaatgctctatgactctagacatttaggtgtgttcaaataaattactctgtattttagagtttttgtatttctgcagttcacagcgtatttcaatataaatttctccactaaca

SEQ ID NO: 229841 - DNA, 440 bp, Homo sapiens
  misc_feature (298)..(298): n is a, c, g, or t
ccacttatgtgaaatgtccacagcaggcaaatccataaagaaaaaagtaggttaataattgccatgggtagtatgctgaaattcttttcattttgcaaaggaagctggatgagagataaaaactgtgagatcatatagttagtaagtggattgaatgggatttaaacttggatattgtgttccagcacccccaccaggccatggggtaccatgtgcaaattagaaaagatgtaggagggccaggcgcggtggctcatgccttggcctcccaaagtgctggggtcataggcgtgagccnacgccccctggcctggtatttctatttttatatgccctaatatttcttatttagaaacatttgaagcctattaaaacattacaagagtctcgggctgggattacaggcgtaagccaccgcgccaggcctttttttttttaag

SEQ ID NO: 229842 - DNA, 412 bp, Homo sapiens
caacctgggggcccgggttccaggttcaggtggcacagccccagagagctcccctttatccacagccccaggccctcccaccttctgcagggggttccacagccttcttcatactctgaacgcaggctgtcttagtatgtcatgctggttatagtagtgacagtataattatgtattatatctcttatgtaatagtaatggtagtgatttgcatgtgtggagcacctgtagggtgcaggcccgctgaggacctcatgcacgctgttgtatctcattatgtcaatgagaaaactgcctttgggaatggtagtgaactttgccagtgcagaacagtaatcctagttttgaatccagatttttctaacattttatttctagtataaagagtatttattttgttttacagtcatta

SEQ ID NO: 229843 - DNA, 560 bp, Homo sapiens
catgagtaaagaaattctgagagaggccgggcgcagtggctcatgcctgtaatcccagcactttgggaggccgaggcgggcagatcacgaggtcgggagatcgagaccatcctggctaacacgttgaaaccctgtctttactaaaaatacaaaaaattagtgggcgtggtggcatgtgcctgcagtcccagctactcgggtggctgaggcaggagaattgcttgaatctgggaggtggaggttgcagtaagccaagattgcgccactgcactccagtctgggcgacagagagagactccatctcaaaaaaaaaagaaaaggaaactctgagaggttaaatggcttattcagattactcaagttgtagatggaggaacagtcatttacattttggtctgtcagatcccaaaaagctggtgtttggtcccatccacaatgcagcttccaaagcctgtaccaaacgtaagatgctttgtccaaaggactcatttttgcctccctattagtaaaacgggagtagggggaaactacaaatagaaaaggcctgcaagtttgagtca

SEQ ID NO: 229844 - DNA, 383 bp, Homo sapiens
gaggagttggatggaggctgaggggtttgtagcagtcagccctgaccagtcctacctgggttgtcactttattgatggctcagggaatgtctcctttttgtttgcatttgatagcaagatgcctttagatttcttcccttgcccattaagtcaaggtgcagtttttgctttagaaatttcagaatcgagtttttccagcacttctttttctgatgcattgggttaaatatggatgataaaattaaaaaaaaacactcattcaagtgacctcatgttttgtgtttgtcacctgttttcttgttgtgctgagtgttaccctcagattgacctagctgtttgtgtacacccagtcactgccagatacatagctgaaatgaatttta

SEQ ID NO: 229845 - DNA, 186 bp, Homo sapiens
agatggcccaaggcacagagccaggagtggcctggggttcacagtggctggtgcacatatctcctgcacactcacagccatgttaatgtgtcctgaagggagaagtctacccttgcaatttccagatattgggacatgctgtccctacgtctggccattgatgcacctgctcctcctggagctcat

SEQ ID NO: 229846 - DNA, 1583 bp, Homo sapiens
  misc_feature (939)..(939): n is a, c, g, or t
cagaaggggctagctgacctttctcttcccacatgcagtaagccatcaagattcctctgggaggggtacccttccagtactggggtgagaaaacagcccttaccaccagacattgagaactggggctgcaacagacctgaataaatatacttaatgaagtaacccttatcttccactagttttatacacccctctatatatctcagtaactcccctagaaaatttattgcccctcaccaaagtttacttgtcctgtcatttcttctcaaattcattgttctttgtcaaaaaagtatacaagcatcttgctgtggttacttcctcggattcactcttttatgaagatccccatgaacacgtcgatgatgtatatgcttttcacttgttaatatgcctggtgtcaatttagtttgcagatccagccaaagagcccatttacacaagagcaaaaaggggagtcagagatgatctctcactcccctatactacccagctatccataataagaggaaattaaagagtcattaaaatgctttttccatcccagggtaagtaagccataaaacaagccattcagtcgcagtcgaagagcccttttattatttctaaaatgagggccatgaattagatcacctcgagtgtccctgctggtaaatgtatttctgaaactgtggttctctgcccatggcatcacagcagagcagctaagaaggtcgcctgtagaatcagaatgcctcgatctaaaaccctgccatgccatgtgtttatgtatattgttggccaagtttattagcttccccgtaactcagtttccttgcttgtatagtgggaattatacaagtatccaggtaataagattgttgtgagaattatatcaccttctgataaataccattacctcattagattacattttagttcccataaacctactttacncaaatccctatataaataacactcaaatttcaaataacaaggaatttatagattgcacatcaatgactaaattacctttcctactctagtaattcttcaaggctccatccagtcatctacttcctgtttaatgataatctaacaatcatagtacctacatactaataattcactcactctcaaccacctttctggcaagctaacctttaatgaaaaaatgtctcagctatcccaatgtttgctgaaaacctaagtgaagcgatgctcttgatttatttttccatcctttcttcccatgtaccattctgcataatagcagcaagggtccagtacaaatcttcctaaatcttcctttttcacaggttttcttttattcaaaattcactaagcagaatgaaatgaaaggactgattgagtcataacttcattattcccccatctccatctactccagtcatatacgcaaaacttgaatgtgatttagaacaccctgtcctggctgtccccatctaagaacccactttcactattctatgttctgctgctaaactctgggaatttctaagacccaaagcaaacaactgctctaattcaatactgcctttgatacgctaatagtcctatgaggacttcgactatcagct

SEQ ID NO: 229847 - DNA, 635 bp, Homo sapiens
aacaacttccttctttcctactttaaattttatatttattatcatgatcttatggattcttctttctttcttattcttaagtggactgtgaattattatcactattctttttgatttcccaattgatttgaccagtgggaattccttcaaaccaattcctatgttcttttgatatttcgccatcaatctttgagtacctctttgttttctgacaacaagagattctcgacttaccttatattttctttgccccagagccagaatcagctgtttctctaagaggcagtggttctttttagtggagaatggtatttagaaatcaagatgtagacataatatgtgctctctgctactggggtatcattgcttctgggccctttcattacagagctaaaataaataaatgtatgtatatgtatttctgtctctatcttcatctattggagtctctgatggttagttttatatgtcagcttgggtggatcacagtgcccaaatatttggttaaacgttattctggaggtttctttgaggatgtttttggatgagattaacatttaaatctgtagactttacatgaagcagattaccctccttaatgtgaatgggcctcatccaatcagtcgaaggcctga

SEQ ID NO: 229848 - DNA, 545 bp, Homo sapiens
ttactagggagtgtgaggggcaggggacacatgccttccccagataacctgagggactacatccctcctccacactccaagtcaaatatttattgaggcaagagaagagactggagtgctccaagttgggaagacctaaccccaacttggagatgtgatggaaggctctcccaagatgtcagtatctaaacttacacttgaaagataagcaaaagccgggtgcagtggctcacgcctgtaatcccagcactttgggaggccgaggcaggaggatcacctgaggtcaggagtttgagaccaacctggccaacatggtgaaaccccgtctccactaaaaatataaaaattagctgggcgtggtggcgcatgcctgttatcccagctactggggaggctgaggcaggagaatcgcttgaacccaggaagcagaggttgcggtgagctgagatcgcgccattgcactccagcctgggcaacagagtgagactccatctaaaaataaaataaaataaaataaagataagtaagaagtggccaggtaaagc

SEQ ID NO: 229849 - DNA, 511 bp, Homo sapiens
gtcactacacaggtgttgtaaacctctctaaatggtttcttcagcattcaagtttgacatgacaaaatgtgcatgcatgcagtattcaattactgtttagcactgtaccctctgagaggaggagatcctggggtatggtgtcaccccttccaacttcccctcctttgcttatccatttcctttcacactttatttttagagtccatccaagtaagaaatttatccatatatatttttattattgtgaaaaatttggaagttcatacctaaccattataatgcacattcttattcataaagaaattaaaataatgtttgatgaatgcacattcttattcctaaacaaagtaaaatagtgtttgatgtggtttatattatgtattttgttctttgtaaaggaactaaagtgaaattctttcttacctgaagttaaggaaatgttttgagaaggactatttgccagactcaccatgtttgaaagttatgtaaataaatgttttattcaatgtca

SEQ ID NO: 229850 - DNA, 430 bp, Homo sapiens
agaatgctgactcttctgcccggcctactttgacttttactctgttaggttttccagaatgctgactcttctgccccttgaaccagggactccaaagaataagattcatgggggcgggggcaaggagttaatgtattctgtctgtggccagccatcttccctggtacatcttcttttctcagttcaaactgaggaacgggttagttggaactggagtctttctcttcccctattttcctctgaaagagttcattgtaaaagtttttttacccattagctgggtgagaatgccagataaatggcagaacaagttaaaaatgagattgttccctcaacttcatgtgaaaggtggagtacttggctagatactctgtttattgtgtaatggattgaaccttgaaaaataaaaccccataagaatagcaaaaat

SEQ ID NO: 229851 - DNA, 316 bp, Homo sapiens
aacctgaggcctaagttgaagagcccagtgtagttcccaagaaggaatgattgtgcatcagagcccttgggaatggttttaacccaggaatgctgaacttgcatggctgctgttggggggcagtaaggcggtgaccggtgactgcggagagaggacatgccctgttcacaagcctgtgaaggcagacatgcccgtggttatgggaggtggtagttcctatacctgacacatcctaaagcatctgatatcacatgcaaactatatgaagaatgactaagaaaataaaaaataaattattatcattgttctgacaaga

SEQ ID NO: 229852 - DNA, 523 bp, Homo sapiens
tctttgtctgttggttcctgcgtgataatcaaagggacactgatcgactcttctatcaacgaaccacagctgcaggtggatttctacactgagatgaatgaggactcagaaattgccttccatttgcgagtgcacttaggccgtcgtgtggtcatgaacagtcgtgagtttgggatatggatgttggaggagaatttacactatgtgccctttgaggatggcaaaccatttgacttgcgcatctacgtgtgtcacaatgagtatgaggtaaaggtaaatggtgaatacatttatgcctttgtccatcgaatcccgccatcatatgtgaagatgattcaagtgtggagagatgtctccctggactcagtgcttgtcaacaatggacggagatgatcacactcctcattgttgaggaaaccctctttctacctgaccatgggattcctagagcctgctaacagaataatccctcctcaaccccttcccctacacttggtcattaaaacagcaccaaaccgtacat

SEQ ID NO: 229853 - DNA, 298 bp, Homo sapiens
tcttcaggctctggagtctgactgcttaggttccaatgctggctcctccactttctggctgggtgctctcaccttgaacttgcactgtctctaggacctgcttcagattcactttgtgtctgaaggggagtcaaacatccccttccatattttatgctgaatctctaaggttattaaccttacacaaacagaaaagaagttctctagcttcttgaatgtctctgtctttctggccaagactgttttaatcataaagacttggctttgatcattaagttttatagagtaagtggaagtt

SEQ ID NO: 229854 - DNA, 489 bp, Homo sapiens
ctttctatttcttaaatattgtttgtttactcgtgtgtgaaggtaaattgtatttaatacagaacttcctgtggtgtgatattaaagatgacagtgaaaacccgcaagtcaagaaatgcaaactggtgagccttagagctgtacttactttcccgtgatgtggatgttgcctaataatacacggacatatttcacagcctaactagttacccatcatttatttgatgtgtgaagacaaggccaacttctcaaatttagcgtgttgacataggaattttaatctcttcctttcttgaaagaggaaaaaaatgtaacgaacagtattaaattcagcgaggtgctgtggctcacacctgtagtcccagctactcgggaggctgaggcaggaggattgcttgagcccaggagttcaaggttacagtgagctgtgattgtgccactgtgctccagcctgggtggtgacaaagtgagaccctgtctctaaaacga

SEQ ID NO: 229855 - DNA, 602 bp, Homo sapiens
gcgtggtgtctcatgcctgtaatcccagcactttgggaggccgaggcaggcggatcatgaggtgaggagatcgagaccatcctggctaacagggcgaaaccctgtctctactaaaaatacaaaaaaattagccgggcatggtggtggacgcctgtagtcccagctacttgggaggctgaggcaggagaatggcgtgaacccgggaggtggagcttgcagagagctgagatagcactactgcactccagcctgggtgacagagcgagactccgtctcaaaaaaaaaaagaaaaagggcagaggccttgaatagacatttctccaaaaaaatgacatatacgtggccaataagatactcaacatccttagtcactgggggaatataaactaaaaccacaataaggctgggtgcggtggctcatgcctgtaatccaagcactttgggaggctgaggtgggtggatcacctgaggtcgagagtttgagaccagctggaccaacacggagaaaccctgtctctactaaaaatacaaaattagccaggcgtgatcatgtgtgcttgtaatcccagctacttgggaggctgaggcaggagaatcgcttg

SEQ ID NO: 229856 - DNA, 366 bp, Homo sapiens
attgttagtattttttgttttctgagcctttatagaattttaggtacaatatatataaactgtaaactggcccacattcctgagctgtgtctgcaagaagtgtgtcacctggctatttcctttttcttgatagtctgttaaaatttggcaatagaatagtacccagctttccatacctctgagactcttccagaatacagagttggcagttgttggttcttccttccaatggaatgttcccaagagtgtgagaaaattaccgttgaggccagaattttgtcccttttccaaaacaggtgggctctagcatcaatcatgaggtgaattaatgaaggccctttttatagccccaggctagtgatagtc

SEQ ID NO: 229857 - DNA, 450 bp, Homo sapiens
aatcgactttggggactcaaggggaaggttgggagcgggtgagggataaaagactatatattgggtacagtgtacactgctcagatgatgggtgcactaaaatctcagaaattaccactgaggaacttaaccatgtgaccaaaaaccacttgtacccccaaagctattgaaatgatagatagatagatagatctttcataaagtatttaaaagtttaaatgagaattatctgatttagacaatcaaatgtctaattttttacacactgttgtggaataattcacaaactgctctacatgtattatctgatttggttcttaaaacaatgtgaggaaatttaaattattattaattctatgatgctgatgatgctgatgatgtggtgatgatgctcctctttccagatcaggaatctgaagcccacagagccactaaagatattagatcgga

SEQ ID NO: 229858 - DNA, 441 bp, Homo sapiens
agtcctccaatcattggatatgacaacttatgctttaactttcatttagtcactttttaaaagaacaaatgacctgaattctgacaccattaaaggatgcactctcgagacattatttattatttctgtgattgtttttaaacaatttgagtcgtttctttgtcaaggtgtaacaaagtaaagctgtgtaatatattacaaattaatagacagtttcacctggagatttgctatattttttgatgtgtgactatacatacacagatgtgtacacacacatatatatatacaaacatacagacagtatgtattttcataaacagaacaatgttcattcagagcatcagctagactatttcattcctgtacttataaatatatcctacagtgtagttttatttaaaattattattataataaacatttgtgaaagttccatat

SEQ ID NO: 229859 - DNA, 637 bp, Homo sapiens
aagacatgtcaaaccccacctgtatatctgttttcaaccatttggagtcgaggcgagcctgggcagccaaacagaaagattcagagggcatcttttctccagcttcctcccaggtctcaggcctgcaagtaaacacatacgctgaagacctaacgctttttaatagtttacaaagacactcccgaaaggttcaatgcagaaaagaaaaaagagagagagaacagaaaggggggagagaagagctggtggaggggagagaaggggagagagggaaagagggaagagatggagggagagggaggtggggaagggaaagcctccttccaaggtaggcagggtgtgccgagtttctgcaccacgctgacgagaccttgagaatggacggtcacaggaagccaagtcacaatgtcatccccctgccctcaaatccaagaagtacacacacataacacacatcgttttaacgacaaatgacagcagcatgaatctgccgctttaccccacagcagggcgcgtgcgtgaaacaaattactcaaaaggatcgcctgcagaaaaacccacagccaccaccacttaagagatggagagaggcccgaggctgccccgcgggtggtccgcgcaggccccggtgcggccg

SEQ ID NO: 229860 - DNA, 492 bp, Homo sapiens
atatatggagattgacaatccattgttggtatggtaggcttactgccatcagggacccattcttcttctatatttccatcctactatgtcggtgtgtagcttgcatcctcatggttaccccccatcatgttccaagatggctgctgaagctccagtcatcacacctgcattccaggcaagaggtaagggagctagaaaaaagggcaaaaaagatctagccagctgtttccctcctcaccctcttcttggagagcttttttcaatgtcccaccaaaaaaactccctcttccatcttagtagccaccaatagctgtgggaaaggtgggaaatgtagtcttttagctggatgtagtcctgataccaaagaaaaaggggtgaatggacattgattgggccacattcacctcatttagcatctccatacaacagcaagagcaatattttaaaaattaaaaatagatgaccgatttgtttcctgttgggactcataaa

SEQ ID NO: 229861 - DNA, 319 bp, Homo sapiens
gaggctgtcttactttctggatttaataccgtttatctcatttctttatcctttaaaattgctttatattggaagtaaaatccaaaagctcagttggactcagttaaacatttttgatgagaattcttagtgattctgggagcatagtagacacctaataatctgtaggggtgatattttggcaacctttgaatttctgatttctcatcaacttttcttgtaaggtttcctgaattaatattttattacttttggcaatatgatagttttctaattctgttctacattcttcatttttttagctgtaattatttataag

SEQ ID NO: 229862 - DNA, 477 bp, Homo sapiens
aaagaaagaaaaaaaaagaaatggtagttggttgttctcttcatttagactttcatagttatatttccgccttaaaagtatgtattatttatggtcttttagatagtaagaaacagatacccactcagtttatcatagataacggcattttattttaaggataaagggaggtgaggaaaaagatgatggggacgcctcttccgtcaacacctccctgaggaccgcgatgcctctctggatgtctgcattcctgggattccactttcctcttgcccacctctgccgcagacctccctttcttggcagcttctgtggttccttgggcgcatcctgccattcaccctgccccctgcctcaaggcttctcactattcctggcttctctgcctcctcctgtgtttcactttttgctctttctggatgtaggggagggaaaaatgtcttccctccacccgtctacttatttggttgggctaca

SEQ ID NO: 229863 - DNA, 1863 bp, Homo sapiens
ctgagcagagtggacgaggccttctacctcctgtagcccccagctggcttgatttggctggtcttggggtgatgcctgacaccttcaactcaaggtctccctctgtggagggttctctgtgggcagtgggcacagagagtcagggtcgagattggaggcacctgccgaccatcacaagtgagctctctggggctccccgctgccacactgtaccctgtgctgggagcacagctctccaagagcctggggagccccaggggccaccagccagcccttcgtgcccagaggaggccttggctgccacatgggagcagccatgggcttcggaggtattcgggcctgagagaatgcccccctctggagctgctcgaagcttccaagaagtaacagagccagctgtagtggcagtggaccggcaggccatcttcccagatacctgggactctcacggaggaacatggcctacagcaggagaggccaaggccagagccagggaggctgggaagcagctcccctgcctcagttaccacggagcagctaggtgcaaagatgaccgagaggggaagtgtggccaggccaacccagggacctgaaaccccaaggagcccagagggcaccacggaagctgccacccaggacgggaaggaacagccagagcttccatgtgccatggccatgggcacacccagcaccacggagaggatttccacctctggccaggcaggcaccagctcgcatggctgctgggcatggccattggcgggtctgagtgtgggccgctcctcgctaactgcatgcagcctcccactctgcgcatgtctgcttgggcagaaaatgctgagacactgtggccggacctgacagtcagcacttggcagtgggctctgtggacccagcatttctcatagcgtcaacccacctcttgccttgttgaggctttttcctttcagatgagctgtccttgacattctgatgtggtgaaatggttagcagcatggactttggaaccagatagacctagatacaaaccacatgtctaacacttgctacctctgtgaccttgggcaaccccctccctcagcctcagttttctcatctgtaaagtggggagaatttccatcaagattgtccggagacctaaatgagataattcctggaaagtgtttagaacacagcatgtggtccctcaataggccgtggctgacagtacttttattacttgctttttgcttaaattaaaactttatgccgggccaggtgtggtggctcacgcctgtaatcccagcactttgggaggccgaggcgggcggatcacctgaggttgggagttcgaggccagcctgaccaacatggagaaaccccatctctactaaagatacaaaaagattagctgggcatggtggcgcatgcctgtaatcccagctactcaggaggctgaggcaggagaatcacttgaacccaggacgcagaggttgcggtgagccaagatcataccattgcactccagcctgggcaacaagagtgaaacttggtctcaaaaaacaaaaacaaaacaacaacaacaacaaaaaactttatgcctcaccctggcacagtagcttatacctgtaatcctagcactttgggaggctgaggcaagaggatcgcttgagcccaggagtttgagaccagcctaggcaacacagtgaaaccctgtctctacaaaaaattaaagattagctgggcgtggttgcacatgcctatagtcccagctgctggggaggctaaagcaggaggatggctttagcccaggagtttgaggctgcggtgagttgtgatcgcaccactgcattcagcctgagcaacagatcaagacactgtctc

SEQ ID NO: 229864 - DNA, 490 bp, Homo sapiens
agaaattagcatctatgctcaatttctaataatggaatggtgcctaggtactcatgtttgtctaggtgaaaacagcttctaaatccaggtgcttacatcagaattgctctcctggaaatttaggactgagacattgagtcacttacctgtagggtaacctgtagaatcagagatttctcaaatttgacctgtcttattttgataccatgtttcccagcaatgtaacctccccttaagtatcagtttttgtaaaatctcctaatcaatttcttatcagattatattatataaatacctatcatctagagtactccagaagccaaatgaacattaaaaaaaaaatactgagatagggccaggcatagtggctgagtgtaatcccagcattttgggaggctgagttggaaggataacttgaggccaggagttcatgaccagcctgggctatatagcaagacgctgtctctctaccaattctataaatattaaa

SEQ ID NO: 229865 - DNA, 399 bp, Homo sapiens
cattattagctttacagggatgttgaagtgatcaggatatcaatgacataattaagtggtattatatttttaaaatttgagaaataaggaaaccattgctttaggatatgtctcttatgtactcagaaaagcttgcttttgtaagttaagcctcaatgatgaataaatagtgcatttgtggctgggcgtggtagctcatgcctgcaatcccagcactttgggaggttgaggcagacagatcacctgaggtcaggagtttgagacaaggctggccaacatggtgaaaccctgtttctactagaaatacaaaaaataagccagacatggtggtgcacacctgtagtcccagctactcgggaagctgaggcaggagaatcacttgaacccaggaggcagagg

SEQ ID NO: 229866 - DNA, 675 bp, Homo sapiens
tgtaaagaacaaaaatttattttctcttagttcttgactgggaaggccatcgtctaggtgccggcatctggtgcgcttttttgctgcatcctcacagggtagaaggtggaagcgaaagaggacagactcgtcctgtcgagccctaaacggcacctaatcctgttcacccgggaggggagccctcatggccttatcacctctttaaaggccccatctcttaatcctgtcacattggcaacacctgaattttggaatatttgacgtgaatctggtggtaacctatgaataagtaagcattttggtgtagggctacagtatgtgaataatttcatgttgacatcaagaacccattttacctttcaaaccatagtacttaccactcagctccagaaaagtcaaattaggaaaggggaaaatatctttatccttaggaataatgaaggctgggcatggtggctcacactggtaatcctagcactttgggaggctgacgtgggcagatcacttggggcccaggagtttgagaccagtctgggcaacaaggcaaaactccgtctctacaaaaattagctaggtgtggtgatacatgcctatagtccctgctacttgggattataggcatgagccaccgtgcccggccttaaaaaatcacttaaaatctttaaaaaaaaaaaa

SEQ ID NO: 229867 - DNA, 492 bp, Homo sapiens
  misc_feature (405)..(405): n is a, c, g, or t
  misc_feature (479)..(479): n is a, c, g, or t
  misc_feature (487)..(487): n is a, c, g, or t
  misc_feature (492)..(492): n is a, c, g, or t
tatagtgttataatattctgttttgttttgtatcctattagcagtgaggatttttttttacctttaggtgatcatttattactcattaatgtccttttcttcctgattgaagtactccctttagcattcctttaggacaggatttgtccccagtgccttatttagttcacttggtgaggtcatgttttcctggatggtgttgatgctagtagatgttcttcagtgtctggacattaaaatcttgggcatgcagcaccatatgagaagtttaaaaaataaaatttaaagagagaaaaggctttggtatcaggatgattattgcggcactattcacaatagcaaagactgggaaccaacacaaatgtccgcaatgatagactggattaagaaaatgtggcacatatncaccatggaatactatgcagccataatgatgagttcatgtcctttgcagggacatgcaggaagctggaccatcnttctcagncttcn

SEQ ID NO: 229868 - DNA, 571 bp, Homo sapiens
taaatacagctattttgaattctctgtctgaaacatcacatatctctttttctccaggatttgtccccagtgccttatttagttcacttggtgaggtcatgttttcctggatggtgttgatgctagtagatgttcttcagtgtctggacattaaaatcttgggcatgcagcaccatatgagaagtttaaaaaataaaatttaaagagagaaaaggtgagtatttattgtagtcttcactgtctgggattatttgtagctgtctttcttgggaaggcttttcacatatttgaaaagagttgggtgttgtgatctaagccatatctgctttatggagcaccttatacccaataatgctgtaattcttccagactcagagaagtaccaccttgacagccttcaacaagacccaggagaattttctggattactagctacagactctttccctacccttattttctctcaaagatacagtctttctctctgttctaagccacctaaagctgggagaagaaagacacaagcacctcaggccaccaccactatgactgccctggatcagacctgaag

SEQ ID NO: 229869 - DNA, 484 bp, Homo sapiens
tcagctgcagggactccctccaccacgggacctaactagtgatgggcaccctagcagcagccaggaggcacaagccaaagagagaagcagctgacatgtggttgaggatcagacaggacaggaaaagtacttagaatagtcagcacaatctcatacctgaaatgtgacaagttttaagtgggcatatgaccacccactacagaccccatcctcccacctgtctggtttatgattatggccaataagaatcgagtcaaaggaatgtgtgtcacttagatgaagccatgacaaaaatataatcccttgcccttttcctttctctgctgagaggtgtccatgggatcagccaacctgaattcagaaatggaagtattgtgaagatgccagagttccccccctcccagctctggaaaactgagctctgcaaaatgagaaaaataaaaacatgtcttgttaaaaaaaaatataaaaaaatataaaaaaa

SEQ ID NO: 229870 - DNA, 1061 bp, Homo sapiens
agcggaaccgctcccgcatccctcgcctgcacagtgggcagtctggcgcctgtggcgtcgtgtttgctgagggcccggctgccgttgactgaggctgcgatggcggcggcaggccggggtcgggagcaggactcggcgcgcttcgtctatgtgacgcgcttcggctcgcatcagtgcagtggcgtcctgcaactgggcggccgtggagctcaaggcctttggggtcaggggcctggggcaggctgtcgccaggagaagccgagggaagcaatggcggtggcgggcgttcagggtggcagcgagctgcccctcggttcccagctcagggtccccacgacccctggtgtggaggctgcggcctctgcctcctcccagctgcgggcatcgagagttcagagcggcaccagacagtcggcgcgtgcaggtttaatccagaaggatgcagctaaaaagtatgattttcccataccattgaatgaagcttccaaaataatgaagaaaaagaaaaaggttttagtatggaatagagtatacaaagtcatttcaagaatgcttgaagaaaatgaaaaatatagacacaggctgaaatgccaaaggttatctagtgaaagctcaaattacacaagatgaatcttcttatcttctggaataacctatctttggatgtttcccaaagaagagtatgaagaatctaaagatgaaacattaaatgaatcataattatttgttacttttgatgtgttttattagaattgggactttagtagtcgaacagaaaaattaccttctttataaattaataatatttctttgctacttaataatacctttagttaaatattgttaaccatatgcatgcaagtgttattttcagaattaatgcttattctacatacttttaaattaacctcatacataaaattaaattagcatatcaatgcaattgcatgaattttataattaccagcttttccattttattaatgagtctacaactgctgctttgttcatctcttcttttagatgtaactcttaaattaaacttggattcatttaaatta

SEQ ID NO: 229871 - DNA, 406 bp, Homo sapiens
cggtgccgcgagcggaaccccggatgggtccggacgtgggcggcggcggcggcggcggggccggggcgcagcgctccgcagagggagccgcgggctgcttggtcggcctgccccgccggcccctcatgttggaaccgaggcggagggagaagggaaagcggccgggaaggggcgggcgcaatgggcgcagtgggggcggccggggccgggtggggaggccagaggggcagggcaggaggggcccggcctgcggaagcggttggagggagaaggctcaatccgaatggctggggcctcactgcggatcgccttcagccgccatcttgtttcttccgttaccggagcgcggtcacgtgagctgagcagcctacgagcctgggacggggcgaggtggcgcggcggccgc

SEQ ID NO: 229872 - DNA, 345 bp, Homo sapiens
tactgttcctagatacaagatactttgaaaataaatttattattaaaataaaatatgcagccaggcaaagtggctcatgcctgtaatcccaacactttggaaggctgagacaggaggatagcttgaggccaggagttcaagaccagcctgggcaaagtagtgagaccctgtctctacaaaaaatatttacaaaattagccaagcatgtggcacaaacctgtaatcacagctacacacgaggctgaagcaggagattcacttgagcccggcagattgaggctgtactgagctatgatggcaccactgtactccagcctgggctaaagaggcaagaccttgtataaa

SEQ ID NO: 229873 - DNA, 829 bp, Homo sapiens
agctgaagggaggccagggacctcactgggctgggcaggtgcaggccaccgccgtcccagtgccctcagaggcacctagactcatgtggacccggccgcagaccgttctgggcagctctgtccaggccggccctgccctctgacctggggccgcaggggctggccactgtgggctcggttccctgccaccccaattcatctgcaccccaaggaaagaaaatgaggggttgcagcgccccaggacccaagagcccccgaacaccagggcagcacatacttccagtgccagggccacagcagagaggggcgcaggagctgccgcggccaggacaaaccaacctcaggctgacctaggccggtaatgggtttagctgcatcaggtgcaaaagagaaacaccccacaaatcagggagaggagggaagccgcccaccccatgggaggaagctgaggagtgaacgccagggatgggcagggccggtcctcggagcactgcagacaccagaccaagggcgactgtcatcaccacgagaaggccccgtccatggcagaagccaacctcaccgcgccgactgcaccggagacgcccacgaggacagccggcctctgagaacgcagctgagccgtcacaggtcgccatcagcaaaggcaagagtccagattatgcaaacggaggcaaggctgccatggactccagagcctcagacgccatcaacaaaagcaaagtggacacatctgcatcaaatccatcacaaagacggccttcgagactccgtctcataaataaatatataaataaatatataaataaataaaataaataaaaataaa

SEQ ID NO: 229874 - DNA, 489 bp, Homo sapiens
aataaaaaatggttagaaaagaaatgatgaggaaatagaaagaggtggacagaatcaagatatatttaggagctggaactgacaagtgactaattgcatgggagaacgaggaataaagagacatcatattctggctgcgtgggcagtggcgctattcactgagaaggaacacaagagaccctgtgtggatgtataatatgtttggtgagaggtgatgccttagacctcttccatttgaagtgttcctgggtagggtggagaggtgcaatttgctgtatggagttaagagagacagctaaacagaagttatcagtttggaagttgtatccatttgaaattgtgtttagcttttctaacaataacccaaggccaggtgcagtggctcacatctgtaatcccaacactttgggaggctgaggcgggaggatcgctcgagcccaggagtttgagactaatctgtgcaacatagtaagaccccatctctttagg

SEQ ID NO: 229875 - DNA, 1901 bp, Homo sapiens
atataccccccttcccccatgttcctttatctcaatgaatggcctcagtaatcctgaaaccaaggtcggctgcatcttcttcctccctgcaccctccaggagcaatccatcagtaagtcctatcagcgtgacaccgtgaatgcctctcctcctcgcttccttccagttgcccctgcctggtcacaggcctcatcctccctctctggcccaattggatgccctctgcttgcttgcctcgtctctgactgtatcctgtgggtgacatgcatgcatacccggtaccacttaaaccccccatgggctccaggggccccacttgtggtgtaccaagccactctatccccttggccctgtgtcccttccttttcctctcttgctccagccttacttgtaattcctcagttcacacctccatcatgtctgtgagtctcaagatctcctagcccttctccagacctgttcaagacacccctagcccttctccagacctgttcaagacacccctagcccttctccagacctgttcaagtgcccctttcatcactccccatgtgcagttccatagttgtccatttcacattgacttccatgtatctggagggcaggagccagctctgacccaccttgccattcccagagtaccctctcagtgaatgtggatgggtccccctgccttgttaataagtcatgtgattgagcagattgtgtgacttgcccctcttgtcttggaaggtcatcctgcccagagcttgtgaaggtgcagtggcctgagccaggcttccaagaggacaaccgtgatgggctctgtgtgcgttgctgggaggacttttcaatgtgatggcagcctgggggaagacagtgtcaccacgacagtgtcacggaacatgcaggaaagatactgatctctgttcttggttaagttccaagaaccatctaagtttcgtgcccctcagctgtaaaagggaagtacatttcatttgtttattctgtaaaactctcggtgtgtgccatggccatgcactgatgatgagcacatgtgtgcggcccctgcccccgtggagcgcatgcatggtcctccagccagagaccgcgctgggagaaatcaggggttcactcctggtcggaggtgagcatctgcctctgcatgtaggaaggcatctcatgaaaccccaaaggcctggcagcccctgcacatggaaggagtcactctcctccatgtggggtgagccacgctggccttgtggcattcacatgttccctccacctgcttctccagcgtgaaggggacctcaatgtcctctgatgaccttcttgaagagagacatttccttccttcattggaggctttagacggagccagtgacagctcagctctggctgtttcccatctgtgaaatgggaagagggaggatggcacgagtcccttgccctcaccaaactggccgctagagagaggaaagatgtttccattctgatccccactcacctccaccccatccttccaggcttctgatcctcattgtaattttggagctatttggtgatattgtctttgtccttggatccgaggcttctcctaccaactcattgttttttcaacgtgacaaaataaaagccctgagctgggcgcggtggctcacgcctgtaatcccagcactttgggaggccgaggcaggtggatgacgaggtcaggagttcaagaccagcctgaccaacatggtgaaaccccgtctctactaaaaatacaaaaaattagctgggcatggtggcatgcacctgtaatcccagctactcaggaggctgaggcaggagaatcgcttgaacccgggagccggaggttgcagtgagtcgagatcatgccactgcactccagcctgggcaacaagagtgagactccatct

SEQ ID NO: 229876 - DNA, 321 bp, Homo sapiens
accaaatacagaactggccctttggtgactgtaattaaaatgtgggtccctggctgggcacagtggctcacgcctgtaatccccagcactttgggaggctgaggcgcacagatcacctgagatcaggagttcaagaccagcctggccaacatggcaaaaccctgtctctactaaaaacacaaaaaaattagctgggtgtggcaggatgcgcctgtagtcccagctactcaggaggctgagataggagaattgcttgaagccgggaggcagatcgcgccactgcactccagactgggagacagaacgagactccatctcaaa

SEQ ID NO: 229877 - DNA, 331 bp, Homo sapiens
tgtgtggtttgcaatttattttttaaattaccagataaaaatcttttactggctgggcacggtggctgacgcctgtaatcccagcactttgggaggctgaggtgggtggatcacctgaggtcaggagttcaagaccagcctggccaacatggtaaaaccctgtgtctactaaaaatacaaaaattagccgggtgtggtggcacatgcctgtaaccccagctacttgggaggctgaggcaggaaaattgcttgaatctgggagatggaggtagaagtgagccgagatcgtgtcactgcatttcagcctgggagacagagtgagactccgttt

SEQ ID NO: 229878 - DNA, 422 bp, Homo sapiens
gagttcagaatggagagactgggagctgggctgtcaggctctccattgcctttgccttcaaaggtggcatagtggaaaatgaaccacagtcccaggaagtgtgtccctgcagaaacaatagccagccctgccgggcgcactcagcttccactacccagctcagagcacaggctttataaatacttaggactgttagtgaaatacgccatagatgctgtattttttaaaagtcttaaagtttctttcatgagcactctccttaaactgatttctggtgttttcagagacttcctgtgcttagctacatgtgctgctcttctaaatgcacactacagctcagtttgtttggggagctatgttactctagtacatttccttcctcttctctctgggtttacagggctttttcctttccaaaaaac

SEQ ID NO: 229879 - DNA, 367 bp, Homo sapiens
cagctgttaagtggcagagttggggttcagatcctggctggcctgaccctagagccaggcctttatccctaaaaatgactgcctggctgggcatggtggctcatgcctgtaatcccagcgctttgggaggccgaggtgagcggatcacctgaggtcagttcgagaccagcctggctaacatggtgaaaccccgtctctactaacaatacaaaaaattagccgggtgtggtagcaggcgcctgtaatcccagctactcgggaggctgaggcaggagaattgcttgaacctgggaggcggagcttgcagtgtgcagcgatcccgccacagcactccagcctgggcaacagagcgagactccatctaaaa

SEQ ID NO: 229880 - DNA, 502 bp, Homo sapiens
agatagtgatgaagctggatagttaaaacagaaacttgaaaagcaagatgtggaactgggatataggatttcagagtttaaaagaaatgtgacatttcttagtggattgtccttcagttgtgtttactaagcaactgtcagctagtgagattactgtgtatggccaatccagataaataagaccgatcaagtcttaatgaaaaggaaagaaaaatttggaatggccatctctgtccagctcaattcctcactccttttttaagatggagagctgttaggtttgtctacacagtaggaaacacctgattaaataacagcatggagccaatcttgacaaagaaattggctgcatccaatagaatcccagggccggtcgtggtggctcatgcctgtaatcccaacactttgggcggccgaggtgggaggatcacttgagctttggtctcagggctttgagaccagcctggacagcatagtgagacctcgtctctaaaaaattaaa

SEQ ID NO: 229881 - DNA, 550 bp, Homo sapiens
tagttggagatttatttgaaaatggtaccacattaaatcccaggtacgaatccaagttttgagttctagaaggatcatggcatgcttatcctttttgttttcaccaaccctgagaggtagtctacattccaagattagaacataatgaagttagaagggctgcattctatgaggcagggagaattagacatggaattacagagcttttcattgcaatttccatgactgttatttatgtgaacttacacaaatctaaggatcactctgagccacagtttctttatcctattctgaaatctctttaaaggacttgagtccaagctctctcccacactgcaagaccccactgcaatggctcctatagctgctgccatggcctcctccaatcaagtcagccttactatcttaaaaaaagtaaataagggcagctaaacgccatggcaaatgtatacctatgtaacaaacctgcacgttctgcacatgtatcccagaacttaaagtaaaatttaaaaaaaagaaaaaataaataaataataacatctctttaaaa

SEQ ID NO: 229882 - DNA, 496 bp, Homo sapiens
gttcaccaatcctatagatgctttcatctggaatttatgttataggaattatgtattttttattaagatttttaatttcaggtaaaagtattccacctcatacatgtgattcagacatgcaagttaataacaataatactttagagaagaatatttaaaatagatctttcctggtccttttttaaagtataagaattacataattacagttggagatggctggtgataaagcttagaaattaagatggaagattctgaaatatgatatatctgtcctcagttaccaattttctgctctgaagcttgggaaattgcttaacttctttatcgggttttttattttttattttaattctgtaaatagacaattggcacagagtttgtgtcagacttaaactacataatgtatgtaaagcatgtagaataatcttatatagtttagttgcttttactattttctgtaatcccactgattaaaataattatattgtaatga

SEQ ID NO: 229883 - DNA, 544 bp, Homo sapiens
aatgaatggagggcggcggcgactgctgcagctgggccagctgcgcgggctgcaccccctcccagcctgcgagaggaggaagctagtagaagatttgtaccaacaaaaccaaggagtaaacaacttgagaataactgcatgagctcagggcttggactgtcagattccatttctaagcttccagaagagcgacacatagacactggggaagtcagagcctttgaactccaatgccatccccgtcacccacctccaccaccagcaccaccaccgaatggcactttggacaatttttccctctcatgtgacttttgtcatttcttacgtcagttggagccagcacctctcaaatccatcttctaaaacccagaaaattgtgtgtaacacatgatgactgaaagggagtaggctgaccagttaagagcctgccactggaatggaaggctgtgggaaggtgaggggacggtggacatcaaccgggaagagctgaaagatggcgttaccaggtatctaccctgctaccctgcatagaattcccaagacc

SEQ ID NO: 229884 - DNA, 618 bp, Homo sapiens
agaccacattctgggccacaaaacactttaacatacttgaagaatagaaaacatagaatgtctattctcagaccacaatgacatgaaactagaaatgaaaccagaaagatagctagaaaatcctaaagtacttggaagtgtgttacttgccaataacacgagtcaaagaagatatctcaagataaattttagaatattttgaattaagtgaaaatgaaaataaaacttaccaaaatttgtggaatgctgtgaatgcagtgcttagagggaaatttatagcattgactgcatgtattagaaaatgggaaagatctaaaatcataatgtaagctttcactctaggaaactagaaaaagaagagcaaattaaatacaaagtaagcagaagaaaagaaataaaaattcaagcagaaatcaatgaaatggaaaacaggaaatcaatagagaaaatcaacgaaaccagaagatggtttgaaaaaacaataaaatcagtaaacctttagccagactaagacaaagaagagagaggacacaaaatactaatatcaaatgaaagagggaacatcactacagagatgtcccacagacttttaaagggtaataaaaaaaaaaagatgaa

SEQ ID NO: 229885 - DNA, 466 bp, Homo sapiens
agcatatgctgaaattttcattccagatgtctacaaaagagaacagataatacgaagttcgttacctatttcaagttacctctgagattccttacgctgaagacaaatattctattaaaaaagagtccttaaataggccataagaacccgaatcctttcataaagagtgaaagagtatggttatttttgataacaattattatcaaaataaattatttttacttctaaattagtactgattacatctgaaggtttttgtttctctgataccaggatttaaaattatttcagaaagcatgattagttttagtgtctgtagatctttgctgtcagtgaattaaagtatttttgaaaaaggaatatgtattcctgaaaagtgatctatactttatagaaaattacctatttgtgtaaatataggaaaacagctctaacattaaaatatgtgcatcaattggaaaaagag

SEQ ID NO: 229886 - DNA, 1097 bp, Homo sapiens
cgcggagaaacgtgacacaccagccctctcggaggggtttcggaccgaagggaagaagctgcgccgtgtcgtccgtctccctgcgcgccgcgggcacttctcctgggctctccccgaactctcccgcgacctctgcgcgccctcaggccgccttccccgccctgggctcgggacaacttctggggtggggtgcaaagaaagtttgcggctcctgccgccggcctctccgcctcttggcctaggaggctcgccgcccgcgcccgctcgttcggccttgcccgggaccgcgtcctgccccgagaccgccaccatgaacaagctttacatcggcaacctcaacgagagcgtgacccccgcggacttggagaaagtgtttgcggagcacaagatctcctacagcggccagttcttggtcaaatccggctacgccttcgtggactgcccggacgagcactgggcgatgaaggccatcgaaactttctccgggaaagtagaattacaaggaaaacgcttagagattgaacattcggtgcccaaaaaacaaaggagccggaaaattcaaatccgaaatattccaccccagctccgatgggaagtactggacagcctgctggctcagtatggtacagtagagaactgtgagcaagtgaacaccgagagtgagacggcagtggtgaatgtcacctattccaaccgggagcagaccaggcactcattagaagaattcctcaattgctgcttcaacacccgccacgatggcgttcaacctggcagattaatttaacaactctctgatgggttgccctgaaatttgaaaaacagtgcctagggctgggcgcgatggctcacacctgtaatcccagcattttgggagaccgaggcgggcgaatcacctgaggtcgggagttggagaccagcctgaccaacatggagaaaccccatctctactaaaaatacaaaattagcggggcatggtggcgcatgcctgtaatcccagctactcgggaggctgaggcttgaacccgggaggcggaggttgcactgagccgagatcacgccattgcactgcagcctgggcaatgagcaaaactctgtct

SEQ ID NO: 229887 - DNA, 814 bp, Homo sapiens
gtcatattatgtccttatcatagtaaatcttgttatttactttgagtttggggcactgtgtcttctctttatatttgtttcaagggggacatacggaattcaagcggaaatgcagctttggagctgtgggctggtaattcccacccctgcatttgtgtcataggctgtgttcttgtccccaaccactgcttgcttatttatttatttttattttattttttgaggcagagtctcactgcgtcacccaggctggagtgtagtggtgtgatctcagctcactgcagcctcctcccaggttcaagcaattcttgtgcctcagcctccttagtagctgggattacaggtgtgcaccaccacacccagctaaattttttgtatttttagtagaggcggggtttcaccatgctggccaggctggtctcaaactcctggcctcaagtaacccacccgcctcggcctccaaaagtgctggaattacaggcgtgagctcccgtgcctggccaccaaccacctgtggattgagacactgctggtctgagacagaatccacagtaacagacgggtcatatttctccagtcctttcattgcccttcccaaagttgtacttgattgtccttgtttcaagaagagcaggttctatgcctttgactgaggaggggtagtggggtggggagcctgaagtactggtatcactggggacaactaaccagccttgtccttgtggcccccaggatagacgtgcataggaaggagaacgcaggtgcagctgaaaaagccatcagtgtgcactccacccctgagggctgctcctcc

SEQ ID NO: 229888 - DNA, 2431 bp, Homo sapiens
cgcggagaaacgtgacacaccagccctctcggaggggtttcggaccgaagggaagaagctgcgccgtgtcgtccgtctccctgcgcgccgcgggcacttctcctgggctctccccgaactctcccgcgacctctgcgcgccctcaggccgccttccccgccctgggctcgggacaacttctggggtggggtgcaaagaaagtttgcggctcctgccgccggcctctccgcctcttggcctaggaggctcgccgcccgcgcccgctcgttcggccttgcccgggaccgcgtcctgccccgagaccgccaccatgaacaagctttacatcggcaacctcaacgagagcgtgacccccgcggacttggagaaagtgtttgcggagcacaagatctcctacagcggccagttcttggtcaaatccggctacgccttcgtggactgcccggacgagcactgggcgatgaaggccatcgaaactttctccgggaaagtagaattacaaggaaaacgcttagagattgaacattcggtgcccaaaaaacaaaggagccggaaaattcaaatccgaaatattccaccccagctccgatgggaagtactggacagcctgctggctcagtatggtacagtagagaactgtgagcaagtgaacaccgagagtgagacggcagtggtgaatgtcacctattccaaccgggagcagaccaggcaagccatcatgaagctgaatggccaccagttggagaaccatgccctgaaggtctcctacatccccgatgagcagatagcacagggacctgagaatgggcgccgagggggctttggctctcggggtcagccccgccagggctcacctgtggcagcgggggccccagccaagcagcagcaagtggacatcccccttcggctcctggtgcccacccagtatgtgggtgccattattggcaaggagggggccaccatccgcaacatcacaaaacagacccagtccaagatagacgtgcataggaaggagaacgcaggtgcagctgaaaaagccatcagtgtgcactccacccctgagggctgctcctccgcttgtaagatgatcttggagattatgcataaagaggctaaggacaccaaaacggctgacgaggttcccctgaagatcctggcccataataactttgtagggcgtctcattggcaaggaaggacggaacctgaagaaggtagagcaagataccgagacaaaaatcaccatctcctcgttgcaagaccttaccctttacaaccctgagaggaccatcactgtgaagggggccatcgagaattgttgcagggccgagcaggaaataatgaagaaagttcgggaggcctatgagaatgatgtggctgccatgagcctgcagtctcacctgatccctggcctgaacctggctgctgtaggtcttttcccagcttcatccagcgcagtcccgccgcctcccagcagcgttactggggctgctccctatagctcctttatgcaggctcccgagcaggagatggtgcaggtgtttatccccgcccaggcagtgggcgccatcatcggcaagaaggggcagcacatcaaacagctctcccggtttgccagcgcctccatcaagattgcaccacccgaaacacctgactccaaagttcgtatggttatcatcactggaccgccagaggcccaattcaaggctcagggaagaatctatggcaaactcaaggaggagaacttctttggtcccaaggaggaagtgaagctggagacccacatacgtgtgccagcatcagcagctggccgggtcattggcaaaggtggaaaaacggtgaacgagttgcagaatttgacggcagctgaggtggtagtaccaagagaccagacccctgatgagaacgaccaggtcatcgtgaaaatcatcggacatttctatgccagtcagatggctcaacggaagatccgagacatcctggcccaggttaagcagcagcatcagaagggacagagtaaccaggcccaggcacggaggaagtgaccagcccctccctgtcccttcgagtccaggacaacaacgggcagaaatcgagagtgtgctctccccggcaggcctgagaatgagtgggaatccgggacacctgggccgggctgtagatcaggtttgcccacttgattgagaaagatgttccagtgaggaaccctgatctctcagccccaaacacccacccaattggcccaacactgtctgcccctcggggtgtcagaaattctagcgcaaggcacttttaaacgtggattgtttaaagaagctctccaggccccaccaagagggtggatcacacctcagtgggaagaaaaataaaatttccttcaggttttaaaaacatgcagagaggtgttttaatcagccttaaaggatggttca

SEQ ID NO: 229889 - DNA, 384 bp, Homo sapiens
aggcaggaagatccctgaactcaggagttccaggttgcagtgaactatgatcacgccactgtactctaacctgggcgatagaccttgtcttaaaaaaaaaaaaaaaatcccggagaattattgagtctaattatcccctcaactataattgaattatatccttccatcctttgaatgctcactgactgtgtgctttggtggttttcttttttagtttctaaaaaaaaataagagagaaaggatggctctacaaaaaaaaaaaaaagtcttgctgtatgcagcgccagtagtcccagttacccaagaggctaaggcaggagaatcgttgagagtccaggagttcaagtccagtctaggtaaaatagatcacgtctcttaaaaacc

SEQ ID NO: 229890 - DNA, 581 bp, Homo sapiens
acatatgttgatatatgccagcctatctcagaagcgtgtctcaaggccaccaccatgtagaacagggtgctggactccccaggaggtactttaaaagcgcgcattgaggactacaccctccgcaatccttggaactagggattgtccggctgtctccttgttcttgttttgctttgcaccatagagagcgcagtgtttcccagtgacaccctaattaaatagtggtcaccaaataaatgaatcaccagagtcaatcttacaaaaactattttagaattttcctatcaccctagctcaatttgaaattgaaagcagtatctcctcatcaaataattaagccgattgcttttgtacattggcaacatcattttctgtctaatttgatattctgtgggaagctgcaaagccaatttaactaataaaatgaggcatcttttatattagtgttggtgattaacagcaatatgtgcctattttatttttgtttaacttgccaaagctgcagtggttagaaactgagtcgaattctgggccctgccagaagcgtggaccagttatgacactgcaggaaagaattatgt

SEQ ID NO: 229891 - DNA, 557 bp, Homo sapiens
agtgaggcaggtgcccaccctggtccagtcatctgtagcctactgggaaggatcaaagagacatgcaaacagggttctcagtgccccgctcagagaagggggatcttcgttagcttccaaacacatctcctggaattcttagagtgccgatgtgggtgcaggcagttgggcctgagccccaaacttccatctggacagcagctggagaaaaaaggcctggaattgtgacttaaaggagagtcttttcctgggcagcagtgctcaggacaggctctgaagaacctgtcaaatgtcattcagaggcctgaggagagagagggagaagaaagcctgaattttctcaccttgctttggagtgaggagagagggaagaggaagccaggaacaggcagaagagtttttccccacgaaaatcttcatcctccaagatgtaactcttttcatcagtgaaaaaccaaaccatgtctacctcaccttccccctgtcactcattcttgacctgtattgattctgttctttgtgcttccctggtaataaacattttttttaagcaaaaa

SEQ ID NO: 229892 - DNA, 443 bp, Homo sapiens
tccctcgccccagtgcctgtaaatcaccattctactttctgtctctatgaatttgactactgtaggtacctcatataagtggaatcacatggtatttatccttttgtgtctggtatatttagataagcatgtttttgaggttcacccatgttgcaacatgtatcagaatttcattcctttgtaagactgaaaaatattccactgtatgtatataccatcttctatttattcattcattcatcaatgaacatttgagttgtttctaacttttgactattgtgtataatgtagctataaacatgggtgtacaatatctgcttaagtccctgcttttaattcttttctttgtgattgctgtggttcagcatttcccaaatgatgttttgaggaattgtgtttacaagggtgttaatcaaaatatataaagaaaggattccatggcc

SEQ ID NO: 229893 - DNA, 427 bp, Homo sapiens
tgcgtcacctgtaagttaatcagaatgttactttcaaaagttccctgcaggtgaggaagctaaaaggtattcttgtatttttttaaatgaaacttcataatagaggtgtaaacagagtccattctccccagccttagaatcagacagcttgagtttaaaacccacttatgagcttgagcatactactgaacatagagtcacttgtctatgcctcagagtccccatggtcgaatggaaaatacagtgcctacttcaaagtgttattgtgaggattaaatgagataatatatgcaaagcacagcgcctggaacatggaaagtgctccagaagttttattgttattaacattattattattgccaccatcatcattaaacttggtaatttttactctccccaatcctttagttactttttcaaacttcta

SEQ ID NO: 229894 - DNA, 551 bp, Homo sapiens
ctctgtatatgttggtgttcaaatttgctctccttataaggacaccagtacacaggattaggatctaccctcctgacgtcattttaaatgacctctgcaaagaccctgtgtccaaccttggtcacgttctaaggcgctgggagttagggctttaacatatgaattctgagggagtcacaattcagcccatagtaggaggaaaacagtaatcattataaactacaaaatgcaagtagtatctcagcctgttctttcctgggcttatccacagttctgcatttccgaatgtctttcagtccctaagaatattcagtaactacttactgactctctgtggtttgtaattttttaaagttccgagtctatgaaaagggtggtcatactggctactttttgaaggctttttatattatggcgagtttatcttatgtttaatcaaatagcattttgtttccacattgccaaaggcaatggttttcagctagacaatagaatcacctggtgttttctgaaaacatctattttttattggtctattcaaagaaaaaaaa

SEQ ID NO: 229895 - DNA, 396 bp, Homo sapiens
ctcaaggagaagcaggtttgcttccacttcactcccccttagcctctttgaactcactgcacttgccctgtgagatgaagttcttaagagatttctagagatagagaggttttaactgggtttagatttatctgagacagacacctgaacaaaaactaagttaaccaagtgttgccatctgaattcattctcacttaggaaagagcaaagcccccactgaatttgaaagaaaaggtcctgcatgggcccatggaatagctgctcccctgagctgacaggtggaagggactgacttcctcatgcttgtaacccccataggtcctccacagatgtacactggatgaaagtatgagaccaaatgacttagggtcttggcaaataaagatggcacactca

SEQ ID NO: 229896 - DNA, 579 bp, Homo sapiens
caggtgatattgtgccatatacttgagagaagataaaaaaattataacaacaactcctgtacctagagccagaacatttgcaggatggtgactctcatccctgaacctttccacaggtgttgttgtgacatacacctttgccaagctcctgagtgatttaataatcctgcctatttatagcccagagataacagtttgatatatacattggccaaaaaccttggtgatttgacttccctgtcttagcagtgtcctcagaagggatcgtaacaaatctctggacccatcatctagggtatttgacttttctctcctgcatgaaccctgcttccagtgaagagtgtagcatttctaagcactgcatttaaatgacatgaccctcttgcctgggccctttcaataggaggcattgttacatttctctgggcccatcatttaggttatatgactctcctctcctgtgtggacactctccagcaaggacattatgccaacgacctgggcctatgaccaaattttgtggcttttctgttatggcccttcctgcaaataaaatattggaacatttttggctcatgg

SEQ ID NO: 229897 - DNA, 638 bp, Homo sapiens
ccattctacagacgaggaaacaggccaaaactggttaagtaatttgcccaagagcacaccagtaaacagtgtagctgagatttgaacccacacagcctgactccagagcctgctcttaaccatcgcatgttatacaaaggtgagttcacctgtgttaaaaggcccaggcagggcagataaacaaggatgatgcttcagcaaatgctggtgagaacaaaaaactcagagtgacagcaagtgcaggtggaaggtcgcaggacaaggtcagatgctagagagcttggccctagatcccagagaacatcaacaggctgagtttcaaatggagctgagctagaggagtacaaaaatccccaaaactgctgccctccactcagggagcagagagccatttgccccattggcaaaacccacaatcacagtgagcaaagtgtgctcagctctcacaactttaacagaatttgtaaggcaaagagacagctatgaaggggagggctgggcacagtggtgcatgcctgtagtcccagctactcaggagactgaggcaagagtttggagttgtagcatgctatgatcatgcctgtgagtagctactgtactccagcctgggcaacatagcaagaccctggttctaaaat

SEQ ID NO: 229898 - DNA, 354 bp, Homo sapiens
tgttatttacacgcgtgcctggatgctctgacctcaggcccgcggactttccctctgagcacatgctgagatgcggtccgggggcgccagcctcagaatgcctcccgcagggctcggccccgaggcagcagatgccagaacgccctgcgatttctcaggtggaccagtcggcatctccaaggaacaaattctcagaagcctcctttagttccagaaatgggcttaaaaaaaaccttgcttacaaaggaaatgaaaactttgcaaacattagaacgtctccttattttgttcccaaatgataacacaagcatttcctctacagcataacttactgataattctttaacttttgac

SEQ ID NO: 229899 - DNA, 492 bp, Homo sapiens
aattagtcaggcgtggtggcatgtgcctgtagtcccagctactcaagaggctgaggtaggagaatttcttgagcctgggaggcagaggctgcagtgggctttaattgtgccactgcactccaacctgggcgacagggccagacctggtcttaaaaacaaacaacaaacaagaaaaccaaacaaatgttgtcatggcagcataatgatgttttggttaaggatggactgtgtatacaatgctggtcccataatattataatagagcggggaactttctaccacctgtcataactccacagacaacacattactcgtgtttgtggtgaacctggtattaaaaaccctacggtactgccagttctatcaaagtgtagcacatgtaattctgtgccatatataatacttgatagtgataagaaatgactgtgttgctcgtttatatatttactatattatacttttatccttagagcacactccttctacttatta

SEQ ID NO: 229900 - DNA, 376 bp, Homo sapiens
gaaagatgccatagatgtccaaaggtgatcatattatagttattgaaattggaaacaccaataatgctgagaactgaatatatatttggtttcaagacacccagtatgttatgaacccacagcacttacagggttactgcttcaaaattagtgttttgatatacatagaataagtcctaaagagatactacatgtagggtataaaccaaatggatgtaattcgttcatagctggcaaaaacacagagcccacattatttctatgttcttttatagaaagtggtgcagtagaatgtactggatctgtacttaaaattatgtaatgtcagaatggtctatttagaaagagaatcaataaataacatgttaaaaatgct

SEQ ID NO: 229901 - DNA, 397 bp, Homo sapiens
ttttgttcttcttcaaaacagttaaaatttgacctttaggaaaccttcattaactcctctcggtctgggttaggtgtctgttctttgtgcacccagattgctttctcctctggaaacacttatgtaactgtttctgtcttcctgtgtttatgtgtctatcatgtgtagcacatatgtttactaggtgattacatgaatttgtgaaagcaggaactacacacatccaccactgaagtctagtgtgttctaatgtgaaggagataaaaaggacagaaaaaagtggagatgatggaggatattataatttaaaattagtgggaaaaaaaacccacaaaaggaaagagagatttatctacataaaaattgaataacctaccaaagaaaagaaatgacaacc

SEQ ID NO: 229902 - DNA, 497 bp, Homo sapiens
ataagacattctgaaagtaaaggaatattccatatatcttcaagctcttggtttttaatttatccttttaagtactggacaagttatttcatgatgaatttaagttaaaaataaaaatcagaaaaccaactgttttttgcattatactaagaaaaaaaaagtcagtataatccaggagatattttaatggcactcaagaatattctccagaaagggctgggcacagtggctcacgcctgtaatcccagcactttgggaggctgaggtgggtggatcacgaggtcaggagatccagaccatcctggctaacatggtgaaaccccatctctattaaaaatacaaaaaaaattagccgggcgtggtggcgggcgcttgtagtcccagctactcgggaggctgaggcaggagaatggcatgaacccaggaggcggagcttgcagtgagccaacatcgtgccactgcactccatcctgggcgacagaacgagactccgtctc

SEQ ID NO: 229903 - DNA, 236 bp, Homo sapiens
tgcatgcagttggttgattacttctatagcacttctgaaaaatgggcaaattttttgctggcgtttggtctaagaactgcctctaccaaagggcaggtaatttaagcttcttacataagggcagggactacatctcactcatctttgcatcccagtgacacctaacacagtcactcgaagtacattagtcatacaaacgaacttcacactttttagttttatgtatttgttattac

SEQ ID NO: 229904 - DNA, 536 bp, Homo sapiens
aaccatttatatttctacataaaccactagaatctccatactagaacaaaataagtagaattataatacgaattaattttgtacttaaggaaaattaaaactaacatataaaataatttattgggtctatattgtgggctgagtatacagtgatttataagcataatcttctttaattcttacagtaactctatgaggaaggtaaggaaggcatggttatttcctgtgatacaagcataccttgccaaatgcacacatttagcaagtgggtggtgagttaagacttgagcctaattttgtcggaagcataagcctatgtccttgaccagcttgaatagaaatgtttgatgggagctaaaacactacgtttaagtgactatagtatcttattttcttcagctatttataatcaattactagaaatatacactcttaaggaacaaattatccctatattctatgaattctttgaaagagaaaacatttttctgatttatttaataagaagcacaataccaaaaaagtaaaaaaaaaaa

SEQ ID NO: 229905 - DNA, 138 bp, Homo sapiens
caagtccaagcttttacaggtaataaaatggcaaagctgggattccagctgctgccgacctgactccaagcccattctgtttacatacagcatagtttctagggaaattaggctgctcgggttaaattatgtgaagga

SEQ ID NO: 229906 - DNA, 403 bp, Homo sapiens
gcacctccctgaccagcgatttgcaatatttttatcacatacgtaaatttccacattgtaattgggtctaagatatattttcttttttccccgcattgatcttattgtctacttatgggctaatatactgtttttattagagactatatttcagtatctggtagggctagactgcatcattgctgttttcttaagtgtttttttaatgctgggttattttttcatgttaactatagaatatagccccataaaagtactttcaaaaaaaaaatcttctgcataccttttcagtttatgatgttgcattttccttttgaaaagcaaggtttattttttctcgtgctcaagtttcagctttgtgtctttcaaggaagcatcataaaggtttttcacttgttaagtt

SEQ ID NO: 229907 - DNA, 497 bp, Homo sapiens
ctgtgcccagcctatcttgaacccactccctcaaaacagctcttgccaaaggtaccagtgaccttcatgttgctgagtccgctaacctctcagcttttggcacagctgttgactcctttctgtttgaacataacttccaggacaccacattctccacttcactggtgcctccttttcagtttcttgggctggctcttccccatcctcaaacccttcatgttggggtgccctcaagtctcagtccttagtactcctctcttctccacactccattggtaatctcatgcagtctctcagctttagagaccatccagaagttgacaacttcttaattaaatggttcaaatttagtgcctgggttcaaattctggttccacaatttaaagctgtgcaactttgagcaaggcactttacctttctgtgcctcagtttcctcatggtagatactttagtatttgctgaaggaatgaataaaacaaaaataaaactaatcaaga

SEQ ID NO: 229908 - DNA, 2137 bp, Homo sapiens
  misc_feature (496)..(496): n is a, c, g, or t
gatgccatcagtcactgtgacaaatggtgtgtggggggagcttgctggctgaagcattgtcaccgtgggtaattatacacttaatattcatgtgttatcgttccacctggaatctttaaactcttcatccaggagacactaatcttcaccttattattacgtcctaatgtcactctagcagaagaatggggctgccaacagggggagagaacttcctccttctcctctaggttgtaataaacatggttatttgttatttgaactctggctgaagataagacgctatatgcccctgccagatatggcccaggtgtagagatgagtccaggttattgttaaaagagtgaaaatgcccctgtcacattccccatcgttttcttccatctataaagatgatggcaatggtgttggcaatggtggtgataatgatgattatcaagtgagcattattccatttttaggcatgatggaaggaaaagtcaaatgcagtgttctnaacacttcttataacgttcagaaaccaccagatagagagaatgctgtctgtccttaatgcaagcagcccttggaattgtttctagagctgtcatgagctgccgatgggaaggtgacatcagtgtcggtcacaaattctcccttcagcctgatctatgcctctagagagaattcccaggaaggcaagtttttgccctaactttgggaatccagtatgtatggactgaaccagggttccccataactacccctcttttatgtacaccacaatcaccctgtgattgacccatttgctgagcagagcgtaccaagagggagcctagatcttaaacagagctttgattgattggggctgaaagggggcagattctgtatgagaccagcaggcattacaaacttctcaatttgaaacaaaaatgctttaatgctacttattgttgttgtcttattgtgaaagttagtcattcttatatatggttggctttctttcaaggtcaattgcacagtctgttctttgggggcaccgcatagccctatagcatgcttaaaatgcataaagcttagaggaagactagttctctggagagaattctgtgtttgtccaagaactggatccctgcctcctcccacacagtcactccacagccagttgcatacttgcagagagatttatggggctgaacatacagctgcaagttttcttttcttctactttttttttcttccaggaacagtgtcctgctgtcaggtctgtgtgcactagacacaaacacataacttatttactacagcagtatccaaaactcctaagtagtgtccttgctgaatgtgagtgttttcatgaatatgaaacattctgaagatgtaaggaattcctagatacaagccaatcttgactcagtttacatctctgtctaatattttggtgaaggaccatccaggagtctagttacactgtacagctgtttcagttctaaagcaacttggttaccttatggtcaagatcagaaattccttaacggaatttgactgctctgtttcctttaaaagtatgctgattgtttatagtagcttctggattctctgtccttgggaggttctcttagattgaagcaaattctctctcataccttgtgttggtttttgtttttattttaatttttcctttgtgatctgaatgaataacatcatcacttaacacctattgccatttcaaagacagaatcccaacaggcttttctgggtatggacccatgcaatggtttgtctgcctttcaacaatttgtatcatcttggccattttggggaacagggattgtgcatggggaaggatggaagaggaaaaccaatatttatttaacattcagtggtagtaaacactgggattagtacttaattagagttgatcctcataataaacttgatccccattttacagatgagtaaattataactcagagaatttctaacttgcccaaagtcatacaactaataaattgtaaaggtgggagttaaagcaattttttattgaactatatagaaaatgtacaaattatttatacacatctccagttattacaaagtgaactgctaggaatgtgagtggaattggtaatgtcagttaaaggcagaaggacgcgct

SEQ ID NO: 229909 - DNA, 174 bp, Homo sapiens
caatagttttaaaaatagaacggtctgcatttagtgaccgtggaatctcagtcatattaaaacagaatataacctttaggtatccgcatgtttcaaggctaaaatataacgtggtgtcatgggtgtttctggttctctgccacggggtaactttcccaacttgagataactatg

SEQ ID NO: 229910 - DNA, 157 bp, Homo sapiens
tgccttattatactagctatgacctctggtacaatgtcttaagtagctttattcatggtcgcaaagggaacactttcaacatttcactggtaagattgatatttggaagccgaggatagcctgtagtctcagctacttgcagccacttgggagggtg

SEQ ID NO: 229911 - DNA, 321 bp, Homo sapiens
atggttgtgcatcaatgtagaatgtacttaatatcacagaactgtactctttaaaatggttaaccattggtaaccattgttacatttttaaaccatgataaatttttgttttatatatatgtgtttttttgttgttttttgttttttttttcttgctctgtcgcccaggctggagtgcagtggcgccatctgggctcactgcaacctctgcttcctgggttcaagcaattctcctgcctcagcctcctgagtagctgggactacaggtgtgtgccaccatgcctagctaattttttgtagtttttagtagagacggggttt

SEQ ID NO: 229912 - DNA, 488 bp, Homo sapiens
ctggggtaggggtgtgtcctgtcagccgtgggggctgctcttcctggtggtggaggccaggtcccagtccttccccacacttgtagaaacatgcattctctggtagggcctgcaaacctgccctaccaaacctgaaagagggtcggctcatctcggaacccgctgcgtgccaagccaggcacgaggaggtggcaggcatcccgacccccgtggggcctgtgttctagagtgcagagacagaactggctgggaggtgcggggcattggattgtaccagtgctggggaggagagcaaagcaggggaaggtctcggcagcgccgaggtgtggccgagagggttgtgctctgcaccatgctgggatgcagaatggaggcctgtgccgcccagatggactcagcctgcacagccgtgacccctgactgcatctgggtagcttcgatccacgcacatgtggcgggcacagtgaggctgccacctggtcagacct

SEQ ID NO: 229913 - DNA, 302 bp, Homo sapiens
agaagaacccagcaaaatggggatctccacagtcatccttgaaatgtgtcttttatggggacaagttctatctacaggtgggtggatcccaaggactacagactacgcttcactgattccctcggaggtgcccttggatccaactgtagcagaaggttctccatttccctcggagtcgaccctggagtcaactgtagcagaaggttctccgatttccttggagtcaaccctggagtcaaccgtagcagaaggttctctgattccctcagagtcaaccctggagtcaactgtagcagaaggta

SEQ ID NO: 229914 - DNA, 541 bp, Homo sapiens
tgatggtgtgagcttgagcgagatgaatcccgctgccctcagcttgcctttgggattgatttaatctctgaccgaaaccacggtgccacagaggcagcatggggctgtggggacagaagtcttatgctcaagtcccgcctgtgcactggccggagtccctaggcaaggtccttccccactccgaacctcagttttctcatctgcaacatggggaaaactgcgcctgtaaacttcgtggagttggtgagggactgatcgaaaagtgcgttcctaataggcgtgatcattattggttttataaatagtcctcatttagaaacctctccccaacctctgctgtgatatccttaattctttctttctttagaccctgtgttattccacagaaggtctgagtgccttacagaaaacaggctgagtaatattgagaaggtttaaaaagcaaaactaggtccgggagacagagattagaagacgctagcacagctgcacacagagaggcaggtcatgggtcctgcctgggggtcaaagcaaagaaaaa

SEQ ID NO: 229915 - DNA, 348 bp, Homo sapiens
gccttcacgtctcttcctggctcactgttaccacctccaattctggcatctctccagctgctgaagccccagaatgaacttctgctcatctgatccactgtataaatagtttctgggtttatgcaccggtactcaaccttattgcctgtccgtttaatagctcatagtctcttaatccctgcagtctttggcatcctgtctgggcttgagtatttactatgtagtaggtgagtgaaaaaagcctgagatacttggaagtgactaattttgtagataaagaatcaaaacttgaacagatctgtaggctaaaaatagcagagactgaattaaaactttgatctccatata

SEQ ID NO: 229916 - DNA, 510 bp, Homo sapiens
catcatattcaaccagtggctcaggcactgctaaagggagtagctccaccaggtttaatcctcacgacagcatcgagattgtaagtgctgtggttatctgcattctacagagtcattcaataaataccaaaaaaggactaagttctggacacttcctctaacacttaaatctttaacaaagaatataaagggccaagtgtggtggctcacacctgtaatcccaacaatttaggaggctgaggtgggaggatcgcttgagacctggagttcgagaccagcctgggcaacacagcaaaactcccatctctacaaaaaaaaataaaaaattatccagggccagccttggtgcctcacgcctgtaatcccagaactatgggaggctgaggtagaaggatcacttgagcccaggagtttgtttgagaccagcctgggtaacatagtgagatcccatctgtattaaaaaaattaaaaataaaaaaaaattagccaagtgtggtggcacccacctgt

SEQ ID NO: 229917 - DNA, 526 bp, Homo sapiens
actcacagtgtggccagatgatggttaccttaaaaattaaaaggttagcttttgcaagacaaaaaaagtgagcgactaaatggaatatggatgaacttttgcatgcagagctgaagtgatcagcaatgcccagtgtggctggagggagctggctctgagtgtccctacctggcaggcagcatgagggagctgtctcctgccatatggtttaaactcagtcaaagaactaagagttgagtacagcttatcagaatggcttgcgggattcgagcccctgtcgtgtgaccgccagggccacccgggcatctctattcttgctgtaactgtcctgaatcttctcagcaccagagcctgctggatctctacttcagaaatgaatttcaaattcaattaaataaagagtttgctattgaatctgaaatggaataagagatttgattttccaagagatactttttacccagttaagatattaagtcagtcttttataacactgtccaagatatatcttatcagaaggcaaaga

SEQ ID NO: 229918 - DNA, 484 bp, Homo sapiens
caggaggcaaaaaaggattaatagtaggagaaaccagtaaaaataaaacctgattttcaaaagatctttaagtttccacatgtaagtttcatatggtagaacagtttttttttttgactacattaaagttcctcattttatttaaaccataaaaacattgtgtcaagaagatattaacatgcattaatgttatttaaacatgattaaaaatcatggaatctggaattttgaaaatatgggtcctgaaaacttttggccatgggcttgtttttaaagtaattgcttttttcacccatgcttcccaattagcagcagatccagcaatctggaatcctcctagccaagttcacaccgatcatctcaggcttgttctttgctcccacttttgttttcatcatttgctgcattctataactatattcagcttctggtcctttattttttaaaacaatatttaattgacaataaagattgtatatattca

SEQ ID NO: 229919 - DNA, 518 bp, Homo sapiens
gtttataagccactcagtttatatttttgctataccagccccaatggactaagacacccttaatgcaaagtacaattgtgtattttttattacttttattacttcattatccactccattaggccgtaagttggaaccacatctgttatgttcatcaataaccagtgcctagtactgtatcaagcatgtagttggcattcaatacatatatgatgaagtaatttaccaataaattaacagtactataacaagaaagaaatatgagggtcaataacagagaaaataaagctttaactattaaatatctaagtttttgaatttgacataaaaataaataggcagatgggtaatataggtttggatacacaagtaagagttaggaaaaacatttaaggcagggcacggtggctcacgcctgtaatctcagcactttgggaggccaacacaggtggatcacgaggtcaggagttcaagactagtctggctaagatggtaaaaccccatctctactaaaaata

SEQ ID NO: 229920 - DNA, 781 bp, Homo sapiens
ttttggatttttagtagagatggagtttcactgtgttagccaggatggtctcgatctcctaaccttgtgatctgaccgccaaaaaaaaaaagaaaaagccaatgcagcggttctatcaaacagggcgttctgagagacatttgtgaaaaagtgcctttaccgaccaccccttccccgagagaaagagagagagagagaagaaagtgcccagggagttaaacaacttgagggctgcaaagagcctttaaagtcccttggtaaaacctgttaactttcagatcaaaaaatcatgctcagggaggttaaggccaagctcacgatgatttaaaggccactctgctctccaggcacatccgcaactcctgccagttacgactttgctcccctggaaaaccctagcccagtggttcccacccctggctacacactaaaaaccccagggggagcttcaaaagctccctctgcccaagctgcacctgagatggaggcaccagtgttgtttaaggctgtccgctggcccgatgtgcagccagaacaccggcccaggcagatctcactgcaggtctcctgttaatccgccttccgctggccgccctagctgcgggctttccaggggtgtctcgcttactcactgggtgtagtgataagaaagctgtgtgaggctgtgcggaaggaacctcgcagaagcatctcctccttctccttgatgagaaagaggcgaaagtcctgtagtccttggctgcgccatctttcactccctcttgcccaacccctaaaagcc

SEQ ID NO: 229921 - DNA, 482 bp, Homo sapiens
ctgctgcagcatttgtaaagcaagagatgaaattcagtgtatgatcccagggaactaattaatggaagtcttctgggaatacatattagcgatgattacacctcaaagctgctgcctaaagactgaaacataaaataaaataagtaggaaacagactactttggcccagcacatctcataaacccataaccttgccttgataatgttttttcaataatataataactattattaaaagtaagcaaataaagccgacagtgactaaaactgccaaatttcattatagatccaaaaagttgcagaattacaccttggcatcacagaaaactataaatattcaccaaggataaacaaataactactgcctaccataatgctttggactaccagagtgtagtccattatttgagtcaaataatgaatcaaatcactgatgcaacaaaaaaattagaaattgttagctgtataaaaaattgaccaaa

SEQ ID NO: 229922 - DNA, 557 bp, Homo sapiens
aagcctccagattcctttgtgatattctgcaaagtgagttctcaactctttatacaagaaaaagacacactcaagagtctcaccctgtgccactcaatagaacgtgacatgtattataaaatatataataagatctggaaacaaaggtcttatatttattctttttttcttttgagagatgagatgttgctatgttgcctaagatgcttggaactcctgggcttaagcaaccctctcacctcagccttccaagtagctgggactacaggcatgagccattgctcccagctaatatttgctttataattgcagtaaaactctgttgagaatcattttttgctaaaaagttatatttcaaaagaagtttatgcatctgaaattattaatatgtcttgaatataagaacgttttctggaactctcagactcaaaattttaacctatagtggccaagtacttaagattggaagaacttgacacttacctgtcttgtggtgtctgctattggcacagtgagtattttgatgatcatatgggctaatcctgttaaccagcatg

SEQ ID NO: 229923 - DNA, 1273 bp, Homo sapiens
gaaaacctcttccttctttcccactgtgtgctttacgaagtgaaagtgaagattcgcagagacacggtctgatacacctctatagtatgactatcatcatttaaatttttttttttttttaatgggagtaggagacagaaatgtgtggctattccagatgattaaacttcttggttcttgaatgttctgagtcatagttaactcaggtggccagccctttgcactgacagagacctgcatttaactccccataaaatatggattttattgcagcagtgacacttcttagcaccacgctgacctctccagcatctcccatctcgagatctacggtaactcatgacagaatatctaactacggaagaagtaatctcagctctgcaactgctgcagtccacaacattgcagcgtccctttttattaaattctgggattaacgcattgggggctccaattttccagcatctggcaccgaaaaccaagcgcactccaaccactctccaatcagtccggggaaggctttatcccccagatttgagcctggccagccgtggaggagcacgagcgaactgcgccttccatatgacttttccctggacagtgtgctccattttcggagtccaatgttggactttccttgcaacctaagcatttctgtcctagatgagccggcaggcgttgcccggaacgtgcaagctaacagttttctttagctccttctaccagccaaatcgtctctttagtttaagttttccttactgggagcattccagagttttcagactacctgattttctgctttaccccaaaagctaagaaatgtaactcagcccaagcagtcaccacgcagacccttatgatgcgggcaggtggagataaatcaagccccaaacggctcggcgggacctgcacgcaccagcgccctttggtaattgaccagccaactttgcaaatgccagagctcccctggcagcctctgccggcgtagagaaaggcagcgggttcttctgcggcggcccgcttcccggtgcccccacccagccccacggcggatcggtcttaccaggaggcggaggagcggtgcccaggctccccgggaagcggcgtcggtcctgagcagcggcagcagcgccgcccgcgcagccggacccgcgcgcccgccccgacccgggctcgcaggctgagagcatccctcccaactccggcgcgcggcacccaccgggcggagagggctctctctctgattggcttctatcaacgctacagaattaaa

SEQ ID NO: 229924 - DNA, 690 bp, Homo sapiens
acataagttaaagagagcctcaggggaaccccgagccctctcccaccactctcccaactccagaatgagatccgcggcggcccggcgagggggttctggggaggcgcaccccaggctggctaccctgagcccaggcccaaggctgcccctctaggccccagcacccagcccccttcctctctccgctccccgcccctccttcctcgcatcagacaaaggtggatgaagttcttttcaagtttcaaaggcagttgctgggcagctttgcagaaacaataactcttttattgggaacaaatgttgacatttgacgggcgcgggaggcagcgcccgcgccggccgccgggcaagcgccccggtgctctcggcagcccccggcccccggggcccacctgagattaaagcgcgaattccgataaatcagctctaaggaaaccctgggccgcggagagcagaagggctgtcgcggatccaccacgcgggcgccgggccgcggagccgggagcgcgcccaggcctgcacccgcagcaaagccaaggccaccgccccaaagcccatctgctcctggtcgccccgttttgccgacgtctccccggcctcagtcaacaacagcaaacttctatcttggagggctaggtaatttttgactatgaaaattttaaagcaaaaataaaattcagaccccattaa

SEQ ID NO: 229925 - DNA, 3577 bp, Homo sapiens
taaaggtacaaaaattagccgggcgtggtggcgggcacctgtaatcccagctactgaagagcctgaggcaggagaatttcttgaacccgggaggcagagcttgcggcggtgagccgagattgcacgccattgccctccagcctgggcaacaagagcgaaagccagtctcaaaaaacaaagaaagaaagaaaagcacctggggtgcgtctggagccgcgttctgggagccgcgcttcactcgctggtggtacagctccaaggctggagcttacttggcatttttgttgccacagaagcagatgggaaaattctaggtctgtaccttgtgtgaaaaaaggctaagtaaaattttgcatttacgtgacttctgtgtggagagcagcgtcggcttttgtttgtctttggttctgtttggagcacaactagggtagagaggggtttggaaggttaggacagcgccctcggacgccagtgagacccagaggcgccaccaggccctgaacctcatgaacctgcgcggccctaggcatgcggtgaaaacgggacgttgccctcgtcctagcaccagagcaggcaggggcaccgctgctggagagcgccaggtggctcctgcggaggacggtggcccagatcctaccctgacgaagaaaggttcacgtcgtgaacagatgcctggcatgagggaaccttccgtgtgttccacctgtcagcagtaaaaagccaacaaatacacggaaatgcagaggcgcctgtagctacatgcctcgctgtgctgctctaaccttggcctccagacgcgcgtaagaaggtgactgagtcagctgcatgatcgcactgcgctgtggatgccgttctgaagccttttacttctgtccttcccaccttccctacgtgggggagatgggaaggggtggaaggagacagggctggggctggccctaaacctttgagttttccattctcccaccatctttatattaagattccctctctcctcattgtcctgtttcctgaagacttttctcccaaaacttcaatcatgttcatcagtttgtctagaaacaaatgtaagggaagagttttagcaaacacgaaattctgcccatggaatcaattccatttcatgaagttgtgttgccaaagcaaacaacctcttcctgtgagccgcccggacagtgtgaattacagctctgcagcccagccagccctttcccctctcctttccttcctgcggcttcttggggcttcagcttctgtcacaggccttccttttggaatggctgtcacacatgcacacaggtggcagagtggaaagaccccagggctgacccctgatgctcttcgtacagctgcagagctagcaaactgggtgcaactggctctaaagagaatctatgcggagcagacggccccctggccacctcaagtccctgctggggctggcatttcccacatcattcatccgaatggaacagtggaaagggattgtgccccccatggcttccagggtcaacctccctcacggtctgcggttgccgtgggggtcagtttccacacataggggacctggaggtaccgtcattgcagggggacagcgcgggccacacgtcaccagggagaggccccggggacatcaccagggacacacccgggaggcttctgagtgcacagctcggatttacagtggctttctaggaaaacctcgggaagaaaactctaaggcaacacagggcaaccagcccgggtgggaggtcccgcagagttgatcttgccggatctgccggaccacgcacgtgtggtgtggcctcctttgtataggtagctcccaacaaaaccccgtagaagactgaagtgccgctgatcttaggctcttccgtgaacaagcatgtcctgaagttgggttcgacagtgaggaatgtgctggacgtttcaaggtgtctgcagcagtgccgggtgaccttgctggggatactgatgcaggcggccctccctccaccgctgcaccctgatctgtatgaaactcacatcctgtctccccagcactcagcacccttgtggctcccatcgccttagggtctcccctgctacctgcggccgcccctctgccaccctggggcccagtggccctttccacccctctcagtcactgggtccacctactctgggcttctcctcgtgccactgtccccggcttgactggccctggggaggaggggcccctcctgctgctgatccttcgggcctcggcttagagttgcacctgcccacccccgccagccgtggtcattgtgtctttacccatgggtggctctggccgctctcccccgccacagggcaggctccccggggccagaacttgccccaccattgaccacagcttcccagaagtctctccgcaattactttttgagttaatcgtttgaggagaccaaagtagacgtgaaacagaacagaatgcagtgtggagctgcgggaaaggcgaggaggaacagcagccttggcagttgagtgaccaggacccctcaaagggacagagccctttggccagatcacgtagatgccgctaccctggtgccctcgaatgctcacggaggggcagcacgattcccaaggacccactggcatcggctacgtggccctgtactcaacaggcctgttcagcctccactggcacgccggggaccacgctagggtcagcgtcagccacagagacggctagggcgctcttgactttccttggggaactggcattcctcttagagagatggggaagtcattaatctctgtgtccccagagggtggcatttggcagggccttgccctatgtggagggtcaagcttgcagggaaggctctccagactctaaattaaaagtgggaaggctaaaccatggagcaaagcacagagcgggtaggcagaactgagcccggcctcctgccctgaggcagcctgccgggtgccctagcagtgtggagccaccccagccctgagacgctgggtccctcgaggcccacctggaaagcccctctgcctgcctggcactggccagcatcacacgctgcttcctgaactgttgttttattgttatttattttcttaagtgctttttgtaacaaaggagttttacttattttcttaagatcagtgtcatagcttttgaaaatgcgtcgtttagagcattagaatgggtcgaccattctaatccagacatgacctccctgtgcatggttggctgtgttgcttgccataaacacgagctcaggcctcagagcatctgtctgcttccaagaacactgtttctaaatatagaagacgaaggggctggggcggtggctcaagcctgtaatcccagcactttggaaggccaaggtggacagattgcttgagcccgggagtttgagaccagcctgggcaacatagtgaaaccctgcctctacaaaaaagtacaaataattagctgggcgtggtggtgcacacctgtagcctcagctattcaggaggctgagcccaggaggtcgagtctgcagtaagccgtgattgcaccattgcactcagcctgggcgacaaaaaagagaag

SEQ ID NO: 229926 - DNA, 559 bp, Homo sapiens
tacgataccatgttatatttttcaattaaggaaccaatattggtataattaactaaactccacgctttattcagatttcactagtttttacccatatttggtcatcatgtgtccttagacccctcttagccgtgacaatttctcagactttccatgcttttgatgaccctgatagttttgaggagtactggtcaagtattttgttgaatgtacctcacattgggtttgtctaatgtttttctcatgattcagctggggttgtggactttaaggaagtgaattgctcttttcattacatcacatcgagggtacgttcttatcacctggctgaggtagtgtccatcatatgggcacaatttaagcaatccatcaaacattcaggttgtgcctgttttttatcactgtgaataacaatcagagatagagaaatatatatcttgtcagaatttccaattattgatcgaaggtggtaggtccttaaaatgaaagtacaaagcatgaactcttaacagtaagcaccagcctgggcaacatggtgagactccgtctctacaaaaaa

SEQ ID NO: 229927 - DNA, 733 bp, Homo sapiens
ataagttggaaccattcctgctagactagacttactgatttttgtttcactctaatgacagaaaatcaatgtgttttggctgtgtttttctaatcttgaatctatttttgttgtacctgctgtgcccaatttaccattcattcattcaaaaagtgtttactgagtgcctaatatgtgcccagcgctttgcttggtaataggaatacaataggagacaaaagagagatggttgctgtattaatggaacttccagtctagtaagggagaaagacaagaaattagttacagttcaaggagcaggattgtctgaaaatagccttgaattctcactctaggtttcctggactgtgagaacgggggagttctcttctatgtcatgggaggggctgtgctcaaatcttatgagactggtggctttgtcttcccagcagaggtgatttcaactttgcaggaaagctggcattcttaaacaactccagtaagcagcctgctgggctgtcaaagtcagactgcctggcaccaagtgtattcctccaatgttaaggctgtataaacagggagaatagcagagaggccattgtctctctaactagaagcaaatccccatagtattggttcttgtaggaggagaatgagatacccatatcttttgttctctcactaaccgtggcattttacttgtaagttttctctttccccaataaagtatatctttaacccatgctatgtaatg

SEQ ID NO: 229928 - DNA, 460 bp, Homo sapiens
aacctgcgaacgtgaccttatttggaaacggggtctttgcagatgtaattaaagattttgagatgaagtggtcatcctgattatccaagtgagcctgaaatccaatgacacatgtcctgataaaggacacacagaggaaaagacagaaacatggatgaaaaggcaaagtgaagacagagcaaagccgtccaagccaaggaatgctgatggcactagaagctggaagaggcaagaaaggagcctctcctagggccttcagagggagcgtggccctgctgacactgccgacacctggatttcgacttctggcctccagaactgaaggaccatgtaagaacatagcaagaaggcagccatctgcagaccaggaagagagaccccaccacaacccaaccataccagcaccctgatcttgggtttccataactatgaaaaaataaacttctgttgtttaagctat

SEQ ID NO: 229929 - DNA, 296 bp, Homo sapiens
aatccccagtgtgactgtatttggacatggggcttttaggaggtaattaaggttaaataaggtcataagggtggggtcctaatcaattgaattggtgaccttgtaagagagggatgagagagatattgtgctctctctccctgtgcatacatccaggaaggaccatgtaagaacatagcaagaaggcagccatctgcagaccaggaagagagaccccaccacaacccaaccataccagcaccctgatcttgggtttccataactatgaaaaaataaacttctgttgtttaagctat

SEQ ID NO: 229930 - DNA, 449 bp, Homo sapiens
gtctctctcctttcagggttcaacctccaaccttatttctgcttccttcatgttggaattcacactgtgagtgctgctaccatattctgcgttggatgtgagttctcaagttctggtccatggggaatgggcaagtgaagatgagaattgcaaaaaactatactccgaccaatagaattgttgtcatcctttctctacgactccaagagaaactttatactggaggaagaatattctaccactttgggatgcttccaaagaaatgggataccaaaggagtgaacttcaggtcattggaagtggccaagctggagggcgacctatggagacatgaccttcagttcttcctgagatcgataaagcttaaaagaaaagaaaaagccaactcagcttgtgcgtggatcctggaccttgctctaatacagaccccgctcctggagtgtaagcca

SEQ ID NO: 229931 - DNA, 443 bp, Homo sapiens
aggagagaggaacctgcagcttgaggaagttcagagaaaacccagccctttcaccaagctgtgaagaagccaagcagttctcatggaaaaaccacatatatgtatttctgccaagaggcccagccaagatcccagcaacagccagcatcaactaccagacataaaccggccgggtggaggatgcagccgggcgtggtggctacaaggaagtgccctggtgttaagaactcagcctctgaaacccgccgcccagcttcgagtcagcgacgtacttttgttgtcccggccttagtatccccgctgcaataagaggtactcagctcaaaccatctgggtgaggattaaaggagttcatatccataaaggactagaacaggtcctggcaccacgtaaacattcttatcatcaaatgtgaaaaaacaaagttctctaagatttcgaaa

SEQ ID NO: 229932 - DNA, 333 bp, Homo sapiens
aggttcttcctgcccactgaacgaagaaaatcaattctcagcattgggccagctgcagtggctcatgcctgtaatcccagcactttgggaggctgagacaggcagatcacttgaggtcacgagctcgaggccagcctggccaacatggtgaaaccctgtctctactaaataaacaaaaattagcccagtgtggtggtgtgcgcctgtaatcccagctacttgggaggctgaggcaggagaatcacttgaacccaggaggcaaagattgcagtgagccaagatcactccactgcactccagcctgcgcaacagagcaagactctgtctcaaaaa

SEQ ID NO: 229933 - DNA, 188 bp, Homo sapiens
aaactgcagccagaaataacaaagagtccctactcctcagcttcagaactgttcaaaaatcactttagggacaccatgatcactgaaagatatacaaagcatggggatgggagagtcaaaactgcttccttagattttacatcttcccagtcctctactgcattaagatcagtaacctcaaataccgt

SEQ ID NO: 229934 - DNA, 539 bp, Homo sapiens
tactcacccacaaaagggagcaggaaaatgtaaagaggtcacctaaccaggcgacagccccagcgtaccccagtgcctcataggaggggatgggagaggagtcaggtgaacactctgtccttagtgagctggaggaggttcaaggaaggaagctcatcccagtttatttttacaaagattagaaaaggatagcaagaccagagtgcagcatggattttcctagctgtcaagagtttcagttgggaggactccaccatggggccactatgattgagctgaagaggagacagagggtgtggtagatgccaagcctttgcctccagtctgacctcacctgacctggaggtgattgggggtaagtattaaattcttcaattataaataggataagactctaactctgcaatgaaaacacagcctgatgaggtgctccaggaatcttggaagaatctttcttttcttccaaaaatgtatggaagaaaaaatgtacataacatgtacattaaaatgtatgtaacataaaattcaccattttaata

SEQ ID NO: 229935 - DNA, 505 bp, Homo sapiens
caaaattggtagttgcggaataaatttgtagctcttgggaggttcggactccgcaactccagagagctactctcgcgtggggtttgggcagtctagcatctgctgcttcaaagagttctgcaagtccacgccctctaaaaagagatttctcattcccaatttagtatcctgctaattttcacccctccttgagccaaaggccctcaactactccaacgagaagagtacaaattcattggtcagtggtgtgtggatatggaggcttgccatgtactcttaccggaatctctttcttggagattccgtctagattttgaatttcttaaggacgaggactggtcatcttagtttttcgtgcagtgctttccatacggtggccgttaataattattaatctgaacagtcagcctccctttgcgccaatggacccaaatctgtaatcccctccctcgagctccagaccttttcctttcaacataataaaagtaattgtcgtatatttaaa

SEQ ID NO: 229936 - DNA, 378 bp, Homo sapiens
ctcaagggcaagtttgctaaaacatggagggtatctttaggtcattgtgacaaagagaaatgagaagatcctccaaccttatccctttgcaatggtttgaatatttgtgtccctccccaaaaatttatatgtagcaattttaacccttataagtgggattactgctctataaaagaggtcccagagagctgcctggtcccttccatcatgtgaggacacagaaggctccatgtatgaagcaggaagtgggctcttaccaaaaaccacaagcaccttgatcttggacttcccatcctccagaattgtgagaaataaatttctactgtttgcaaatcacccagtgcaaggcatttttattatatcaacccaaatggacca

SEQ ID NO: 229937 - DNA, 446 bp, Homo sapiens
atggctctcctctctgctccatcttccactgggatatgtgtggtagactgcttgcaaaaatggcaccaactctccaacccccacttctgtggagtcaatttccccccttgaatatgggctagctgtgcaattagcttgacaaacagaatgtagcggaagtgacatgtgccttacctacattggtttctcagaattctacaaccatcaagagaaaaaaacccagctagcctgcaggaggatgagagaccatatgggtcagtcacccccatcagctcaggggacagccagccagctcccagaagcaaggctgcctagctggcctgtagctcccgacagatgcatgaagcaacctggccaatatcagaaccacccagctgggaccagcctaaattgctgacccccagggtcctgaacccaataaacggttgttattttaagccattaaa

SEQ ID NO: 229938 - DNA, 571 bp, Homo sapiens
aaaaaactgtcaactaagaatcgtttgtctgtccaaactgtccttcaaacatgagggataaattaaggcattcacagacgaacaaaagctgatggagtttgttaccactagacctgccttgtaagaaatgctcaaggtaatcctgcaggatgaaatgagaagacaacagacagtaacttgatgctatatgaagaaataaagatctcaatagagataaattcatgagcaatatacaagctagtttataacttcacattttgttttctacatattttaagagactaatgtgtctgaaaggattactagtttatttttggggtacacagcatataaggttttaattttttttatgttaaccgaaaggagtaaacagagctttaaaggagcagcatttttggatgttactgaagtaaaactggcataaattagaattagagtattataactttcgaatgttaaatgtaatccccatggtaaccacacacacacacacacacacacacacacacacacacacacacggctatagaatatacacaaaaggaaatgaaaaaggaacttaaacatttca

SEQ ID NO: 229939 - DNA, 472 bp, Homo sapiens
aatcttgccccctttttttactgctatgtccctagtgtctgaaactgcccagtattgaatctgtccattaaatatttgttgaataagtgtttgtggaggcacactaattgaccggtttgtctggaggacacttgaatgtgagctttttaggactgggatcattgtggccttgtttattgctatagtgccatatagttttggcaaaatgaatgaataaatgttgggatcagtggcgttgaggctagaaggcagaaattgataatgtggattcttttttttgttgagatggagtctcactctgtcgcccaggctggagtgcagtggcgtgatctcagctcactgcagcctttatctcccagctacttaggaggctgagacaggagaatggctcgaacccgggaggcagaggttgcagtgagccgagactgcgccatagcactccatcctgggtgacacagcgagtctctatatc

SEQ ID NO: 229940 - DNA, 493 bp, Homo sapiens
gcctcagctggggattcatctgaaggctgcttgctcacgtgtctggctgtgaatgctacctctcagctgggcccccacaagggtagttggcggcacactgcacccggcctctccgtgtggcttgggcttcctcacagcatggaggccaggtcccaagagcaagagccagagccagctgcaagctgtatcacctccttgcccttgtctcaaaggaaccaacctgccacttgtgctgtactctgttttcctgcctgcctgcctgtcttcctccctctctccttccttccctcataaatatttgataagttgcttgctatgtgcaggacagtcttccagtgctggagatacagaaatcaacagaagactaaaaaaaatggccaggcatggtggctcacacctgtaatcctagcactttaagaggccaaggccgtggggtcacttgtgcccaggagttcaagaccagcctgcgtaatatagtgagaccccatcttgg

SEQ ID NO: 229941 - DNA, 657 bp, Homo sapiens
ccaggatgctcgctccattttgtgtctcagccttccgtcgaaagttttcatttgttcgtttgctttttaagaaagagtttttgataattctgtcttagaaggatgagtagttgtctcattaagaagactcttggtggtagcatggtctgactagcttaaggtacagtctttcctctttgagtttcctgtggttttactaactctttgctttccctctgacataaaaactagaagccataaattacggataaattccactacgtaaaataagagatctttaaaactctgcatggcaaagccactataagacaagtaaaaaactaaactgggagaaaaatagttgcagcttatatctcagaggataatttccctaatgctggggttgggaactacagcccaaggcccatatctggcctgctgcctgtttttatgaatcaagttttattagaacacagccacactcatttgtttgcatattgtttgtggctgctttcaccctatggtggcagaattgaatagctgcaacagggaccttatggtccacaaaaccaacagtatttattatctggcactttacaaggtttgccaactcttgctctgatgaataaggagttgctacaactacaaatcaatatgaaaagaccaacaaaccagtag

SEQ ID NO: 229942 - DNA, 613 bp, Homo sapiens
ccaggatgctcgctccattttgtgtctcagccttccgtcgaaagttttcatttgttcgtttgctttttaagaaagagtttttgataattctgtcttagaaggatgagtagttgtctcattaagaagactcttggtggtagcatggtctgactagcttaaggtacagtctttcctctttgagtttcctgtggttttactaactctttgctttccctctgacataaaaactagaagccataaattacggataaattccactacgtaaaataagagatctttaaaactctgcatggcaaagccactataagacaagtaaaaaactaaactgggagaaaaatagttgcagcttatatctcagaggataatttccctaatgctggggttgggaactacagcccaaggcccatatctggcctgctgcctgtttttatgaatcaagttttattagaacacagccacactcatttgtttgcatattgtttgtggctgctttcaccctatggtggcagaattgaatagctgcaacagggaccttatggtccacaaaaccaacagtatttattatctggcactttactatgagaaggacaacagcccagttgattaggcaggg

SEQ ID NO: 229943 - DNA, 378 bp, Homo sapiens
ccaggatgctcgctccattttgtgtctcagccttccgtcgaaagttttcatttgttcgtttgctttttaagaaagagtttttgataattctgtcttagaaggatgagtagttgtctcattaagaagactcttggtggtagcatggtctgactagcttaaggtacagtctttcctctttgagtttcctgtggttttactaactctttgctttccctctgacataaaaactagaagccataaattacggataaattccactacgtaaaataagagatctttaaaactctgcatggcaaagccactataagacaagtaaaaaactaaactgggagaaaaatagttgcagcttatatctcaggtggcctgctgccttgtttt

SEQ ID NO: 229944 - DNA, 361 bp, Homo sapiens
  misc_feature (329)..(329): n is a, c, g, or t
  misc_feature (361)..(361): n is a, c, g, or t
ccaggatgctcgctccattttgtgtctcagccttccgtcgaaagttttcatttgttcgtttgctttttaagaaagagtttttgataattctgtcttagaaggatgagtagttgtctcattaagaagactcttggtggtagcatggtctgactagcttaaggtacagtctttcctctttgagtttcctgtggttttactaactctttgctttccctctgacataaaaactagaagccataaattacggataaattccactacgtaaaataagagatctttaaaactctgcatggcaaagccactataagacaagtaactctggcagatgngaactacaagccggcccatttctgcctgctgn

SEQ ID NO: 229945 - DNA, 378 bp, Homo sapiens
tccccccttatccacagaggatctattccagaacccacagtggatgcgtgaagccccaaggatagtgccaggcccagttgccatcagttggaagatgtttctgttcatgtcttctacccacaaattttatgccttttccatcttaactaagcttttgtcatgcactgtggccctaacttttgcagtttaaggtgtggcagcaaaactagaattcgtttttccttcttcatgatttcacagatagaagattcattcctggctgggcgcggtggctcacatttgtaatcccagcacttcgggagaccaaggcgggcagatcacatgagcccaggagttctagaccagcctgggcaacatggtgaaactcttgtctctaca

SEQ ID NO: 229946 - DNA, 509 bp, Homo sapiens
ttcttctttcccctcctgtagcctcgtcatgtgggagggctcctctttgttctgaggagtggcacccctgctgatgaggaggtgatagacaggcgggaggccccaggtagggacaaagaatgactcacttgttaccttaagatctcaagatgtcccaagcacagacgggtttgtccctacagtgccaaccacagcatagaatcatacaattctgaggatggctgaagggggccctggcagtgactcatagctgtttgtgacacagacacttgtcgctttcctgacactttgcattgttttatgagtgtagctccacagttttgatcaacactgggagctgaggatgcatttgaaagcattcacagttaaacaaggtagctagggtgtccctattcactcttttcccagcatcctgatttttcatcaaagtcaccaacagcaggagggtttcagagttcattagatgtgatcattctataattaattggcatctcctcttttgcattgtt

SEQ ID NO: 229947 - DNA, 532 bp, Homo sapiens
cagggaagagagctcagcaagatatatcaaaatgttaaatgcagctacccttaaacctaatgattccactcctaaaaagtttacacaaacacacacacacacacacacacacacacaatactgattaaggaggttcattgtagcatttgtttatattaccataaaattagaaacaactaaaaaaagtctgttaatagaagcctagccaaataagttaaggggcagccataccatggaacactcttaatcacttaaaatgctgaggtggacctctatgttctgacatcagaagatatccacaatgtattttatcctgtttgtgtttttaaaaatatatgtttgcagctgggcgtggtggctcatgcctataatcccagcactttgggagaccaaggtgggtggatcacttgaggtcaggagttcgagatcagcctggccaatatggtgaaaccccatcgctactaaaaatacaaaaaattagccaggcgtggtggtgggtgcctgtaatctcagctactcaggaggctgaggc

SEQ ID NO: 229948 - DNA, 602 bp, Homo sapiens
gggtagagatttcttttagtaaaaaatcttctaaaggtcagaagaggtaggatactatggctcatgcctgtaatcccagtgctttgggaggtggaggtaggaggattgcttggggccagggatttgagaccagcttgggcaccatagcgagaccctgtctctaccaaaaagtaaataaacaaaattagctggcgaggtggtgtgcacctgtagtaccagctactcaagagcctgaggtgtatgtgagtccacttgagccaggaaggttggggctgcagtgagccatgatcgtaccattgcactgcagcctgggtggcagagggagatcctatcttgaaaaataaataaataaatagctacacttgctgagaagcatttattgtaaatcatgttaatccagttaatttgtggtaggcaagaagagatcaaattatggtggataagaataaacaaaagctgtaatgtatactacccagatatgtcctatatatagtcttcccttggtgaagttaggggattggacctacagcataccaaaatacattcatactcaagtgccacagtaggccctgtagagctcacatacaggaaaagtcagccct

SEQ ID NO: 229949 - DNA, 1316 bp, Homo sapiens
tgttcatcttatgtgaaatatgcttggaagaaggctttaaaactcgtgattatatatacgggtatgcgtacatatccatacacaccactgaaaaatcttaaaatagttttgttactcctctgcgtattataattactcagtaaatttagtttaggtacatttaagatctaaagtacaggacaattatttgtgtgagatttttactgtgacacattttaaatacatcggtctaacaaatagggtttttttgaaattagatatttttattaactctttaaaaaacgaatcattcatcttgggtttataactctttcatctgccatgttggataaattgcaaaattggataaattgatctcaacttatccaattatctttggataaattgatctcaacataattacctaattggtaggatgcctttgcaacgatactaacgttaataaaatgttgatgcttttaaaaaatacttatgttaaaaaagcattttctcgtatttctggcaagaaaagtcatggaacttttttccttctatctggaacaaggtcagccataaatagtttctaatacatagtgggcacacatttggtaactaagattaattatatctactgaatttactgaattccatgtccttcaagggcagtgactaggtgactttgtatcttcacacaccaatgttgcagtaaatgtttgagtcagattgaagtttcatcccggctaggtaggtgctaacttaatgacaccagtttccacatcttcagctttgatgtttcaacctgcagaaggatttgggcacggaagtggctgtgtcctaattgtcttcaaatatttgaaggtctgtcatgcagcaagggatttcatttattttgagtaattattgagtacagaaaaacagatttcacttctatatgaaggcaaaagttgtttatggtgagaactagcggtggaaagaaggggctgctccttccctaggggcttttgggatcagctggttccccacttggcgtgaatggctattaggaggtatcacagaggtataggagggtctttctgagagggactcctgggtattccgatggcaactatattcgaggacttctgtacttcccttttagcactgtggcttttgttttttgttttcttatgctggcttctagagttgtggacgtagcaacatccgcagacacctacatgaaccctaggaagattttttagtagattaaagacccacctgctatcgaagatgattcttagtcgtgctttgcatttgtatggcacattacagggaataaagcactctcgaattcaatgtgt

SEQ ID NO: 229950 - DNA, 771 bp, Homo sapiens
gcagatgtaattagttaagatgaggtcacactggagtagggtgggtccctaatgcaatatgattagtgtccaggtgaagacagaaacacgggaaaacaccacgtgaagacagagaattgtagtgatgcatccacaagccaaggaatgcccaagattggtggcagagccaaagctaggaagaggcaaggaaagattcctctctacagttttcagagggagcatggccctgctaacaccttgatttcagacttctggcctccagaactgtgagacagtaaatatcggttgttctaagctacccagtatgtggcactttgtttcagcagtcctaggcactaatacagaggttctgccatggtactgatccctcttctctgcatcccctgagtacacttggttcttggtcttgaagatggtccaactgagtagtggctacaccctgtccaagctgtggctctctaaactgactcaaaaactgcctctcttgcttctgcttactccctgtctgtgatgtgccctgggggcagacaagtttcattatcattatattggtttttcttcatttcttgactctgctctttactacactttgagattgagccagtttgcttcctgacatgctccaggttgagccttgcagacctgcccttctgcaccttgcctgggtctctgctgaagtgttcttattcatcctcctagaccagattggggccacacctctggtgtccagtttttcccagttcctttggccccaaaaatatctttgatagg

SEQ ID NO: 229951 - DNA, 483 bp, Homo sapiens
ggtgtgtatcaaaaactcagctgtattgatggaccacctgcctgaatgagagcctgatcacagactcgggatctttgtgagagtgtgttcagggtatacatatatgtttttttttcaaagataaacacataattatcacctaggtctggttaaaatcaagtggtctaattttctggatcatgtcatttttatcttctccccccctccatgttcactcattttagattacagattatgccaatatggtcctgaaatacttacaccccattgaacttgagcaatatagctgcctgtaatgtctataattaatacaaagaacacttaggtttatttaaaatttgggaagccctttcattttatatccatgaatctttgttaagttcaagaaagtattattttattctattttaaactattgtttctattgtaattagtctggtttctaccacagaataagtaataaatcttacgttggatttcaat

SEQ ID NO: 229952 - DNA, 438 bp, Homo sapiens
tctgtgaaggaaaagaattaagtgggtaatgaagaactttctaagggctcacgcatacatgagagcctagaagacagcatcactggcacgtgaatggcaggctgggcttagtcttctaccccctgaacagctccatcttaggccacatctctttgtgagaaaagccaaagagggtggctgaagtatgtttaatcaggtgcccatctcagaggttacaccaggtctctctcccctctcatatttcagtgatgctgggtttttttaataccagcctcatctttgccaaattaaaaccctccttgtatcttgtttgccctaattattttgaatttagtccatcataaataatatacatgtaataaggccaaggcaggcagatcacttgaggtcaggagttcgagaccagcttggccaacatggtaaaaccccatttctact

SEQ ID NO: 229953 - DNA, 421 bp, Homo sapiens
ggctggtctcgaactcctgacctcaggtgatttaccggccttggcctctcaaaagtgctgggactgtaggcatgagccaccaaacccagcccacattaaaggctgttaacataaaagagatggggtctttgctctattgctcaggctggagtgcagtggcattattatagctcactgtagcctggaactcctgggctcaagagatcctcgtgtcttggtctcccaaagtgctggattacaggcgtgagccagtgtgccgcgccacttttaaccttttaatgcttgagtttgttttgtgccacaaatatcacaatttgctcacatttgcttgagccactgagtacttttaaggttaagaagcttggggagtatcaggtgctgattacagaaaatgggcactactttctaatccttggaatta

SEQ ID NO: 229954 - DNA, 414 bp, Homo sapiens
ctagggtataattgacttactaggtttgttggaaatccttctgtgtgactcttcagtacaataatatctccaagaagtaatatttgttaggtagggatcttattttttaccctctaagagtaagaggctgggtgcagtggctcatgcctgtaatctcaccactttgggaagctaaggcaagaggatcactggagcccagaagttcaggaccagcctaagcaacacagggagaccctgtctctacaaaaataaatctaaaaattagctaggtgcttaaaaataagcacactcctgtggtccatgctacttgggaggctgaggtgggaggatcacttgagcccaggatgtcaaagctatagtgagctgtaatcacgccactgcattcaagcctgaagatcctgcctcaaaaaaaaa

SEQ ID NO: 229955 - DNA, 519 bp, Homo sapiens
cctcactgttttagaattttgattatttatgcaagagctatgctaaagtgcactttattctcttcatgaatttaggaagcctatttgtcattgatagtacaaataaaactgaaagaaactatttatctccttgggatactacaaatagtataattaccttttaaccagaagctatcattatttagaatctgcttttcatttaataattatagatcattcacagttgttcattgaaataagtcaagactttaccagacagagtcaggtgcagccacctaagtcctgatggcccgctttgcgtcccatctgctccagttcacagtgtgtcttgccagtctctcctataccattgtgtttgttttgttccttatccgctctagagcctcacacaatgcttgctactgagaaggcacactgtaaatgttgactagttgtggctgggaggccgagttgggtggatcccttgagcccaggagttcgagaccagcatacgtaacatgacaaaacctcatctctaca

SEQ ID NO: 229956 - DNA, 440 bp, Homo sapiens
ttggcctctgctgtgagatggcagagaagcaggaaacacgttggggaggagggcaccccccagagatagaattccagggccattgtctgtgcagccacagagcaaacactcggcctttgttcccgggaccctgcgggaggggggcctcgggatgcccattccgccagtgtggcccgcaaacccgccggacaggtttggttctcctggcctcccggccccccgccaccccgttcacccgaagcctgggacccagccttcatccccagtgtctcccccgcccgagccagcagggcggctgggcctccccgcacgtgcacgggttcgaatcccgccgacgcaccgggtgccaggaccgagggtcagccctctccgcgcgcagcgggagcgcccaccccaggggcggaggcgcggacgtcctgccggggtaacccgcggccgcc

SEQ ID NO: 229957 - DNA, 534 bp, Homo sapiens
aattaacttattttggctaagtatatatacaatgttatagaatcacagtaatgtttgaaaatgtaaatttagaaggcttttgtattaaatcaaaatgtatttttttaacttttatatctacagaatatgtaattttaaaattataaatagactttaagttaccaacttttaagacatggcagccattgaaaaactggcttcctgatgtttttctaaatattaaagtacttaaaatatttctatgcaataaatattgataaacagacattatttaatttgaaaacccattgttaaaaaagataaatatttttatatgaaattttcattttttaaaactttgtgttaacaattcagaagaataccaagagaacatatatattgagtaaacagtcaaaggaaagtactcttgaatgttttataggaaagctgtctcagtttccttccttttgttgctatatcatgtatgaattgaataaattgctctagaaatgtaaaaattttattaaaatattataatcttcgtgttatgctatt

SEQ ID NO: 229958 - DNA, 655 bp, Homo sapiens
ctctatagtatcttcactctggagttagtatgcacacaaatacctaacctttccaatgtaggccctagttacttccaaaataatttagaagtgtttacagatatgttttgacgattttgctatgatttttcatttattggtatcagaattgaatatatttagctgttgctctctgctaagtaaactgagacctaggtgtgcttaccattgttttctgtgaaaaccagctgatccgtgttacaaatgactgttttagctatggaaacaagacacctctgtgaatatgattccttgtgtggtgggcatcactagagagcaatgactgtattccctaaagagaaagtgcgagagcggcagtacagaccaaggcagaggtggctgaggagattgttccggtcagcaatgtagaattcctgcccctgtgttctgtgaccccaacagagggagccagcacccactgtgcacctcccacacagcccacactgcacaaggcatttagacagtgccttaaattcactccatcaatactgtgagagccccactggcttcccctttggggttttagacatttagggtattcactgaatactttacgttgaagtgtttttctataacattagaaccaggttcaacttaaaaaaaaaaaaaaagctct

SEQ ID NO: 229959 - DNA, 582 bp, Homo sapiens
cgcagtttgcctcctccgggaagccctctgagcccctcccttgctccttcagcctcgcctccctctggcccagccctgatccactgacctagggaatctggccctgtctccccaaggctggagacccctgggctggggcttagtgggaggggacacagaggtatgctcaggagcaaggggagggggtgatgctgacatgtctaattctcatgggaaaacggggcaaatagcgacacttctgacttccataaccatcacaccccagggcgatggactgtagccccaggagccgaatctcggttagagggtacccccagcttcctctccgccagataagggagtggggacgcccctctaaacccggatcctctgcaaagatgcccccgctttcgctggcatgcctggcgcaggtgcctgcagcgccgcgcagcagcccgcaggtcccccacctacgctccgcccccgcagacggggcggcagcctcgcagggtctgcgggttagagggcggctcaggtttcggcctgggaagagggtgtcccgggtgggggcccggcgcaccccctactctggcctgcggccgc

SEQ ID NO: 229960 - DNA, 666 bp, Homo sapiens
gggtgtacctttcccagtccactgactcaaatgttaatctcctttggcaacaccctcgaagacacacccaggatcaatactttgcatccttcaatccaatcaagttgacactcattattaaccatcacagtaagcattttttacaatatgtttagtatgtgctaggcaccatgctgagtacttcacatgcattgactcagtaatctacaaaaagtattgttagctagaacttacagttgaggaatttgaggcatagataatttgataatttaggaaagttttccaaagttacaaaggcagtaagtggcagaatcagtattccaactcctgcaacttcagtttatagtccttatgtttaacctctgcacgacactgtttcttttctagtcgatcaaatatgttcatttttaacatttttttactaattattacctctatgcagatatatgtacaaattccctctattcctgtctttcctcacccacctcccagacttacgcttctcagccaagctgcatctttctccacatcactcaagattcacttttcatttttttcaaagatggtggattagaggcttttagcatttttcagccacctggaaacagaaaaatagtgcatcaagatcaactctgtgagctttcattcaagaaaaaaaaaatagta

SEQ ID NO: 229961 - DNA, 612 bp, Homo sapiens
gggtgtacctttcccagtccactgactcaaatgttaatctcctttggcaacaccctcgaagacacacccaggatcaatactttgcatccttcaatccaatcaagttgacactcattattaaccatcacagtaagcattttttacaatatgtttagtatgtgctaggcaccatgctgagtacttcacatgcattgactcagtaatctacagataatttaggaaagttttccaaagttacaaaggcagtaagtggcagaatcagtattccaactcctgcaacttcagtttatagtccttatgtttaacctctgcacgacactgtttcttttctagtcgatcaaatatgttcatttttaacatttttttactaattattacctctatgcagatatatgtacaaattccctctattcctgtctttcctcacccacctcccagacttacgcttctcagccaagctgcatctttctccacatcactcaagattcacttttcatttttttcaaagatggtggattagaggcttttagcatttttcagccacctggaaacagaaaaatagtgcatcaagatcaactctgtgagctttcattcaagaaaaaaaaaatagta

SEQ ID NO: 229962 - DNA, 475 bp, Homo sapiens
ttggctctgttgacattttagaccaggtaattatttgttgtcagcagggggtaggatggtgacagggcttgggggaagacctgccttgtacattgtagaatgtttagcagagtaaggccagaagattctacccactggttgccaatagctgcccactagttgtaacaatcaataatgtctcttgacattgccaaatgtccactgaggagcaaaattgcctggagatgagaactgctagtatagaataactcactattaccactgaccaactgaatctgacatgtataaagcactctacctagcaactgcagaatacaaactcttttcaagtacatatggaatatccactaacacagactatattttgggtcatgaaacaagccttaacgaatttaaaggagttgaaattgtacaaaaaagtacaagctggttctttgaaaagattaatgaaacagatagccagactgacaattta

SEQ ID NO: 229963 - DNA, 535 bp, Homo sapiens
  misc_feature (522)..(522): n is a, c, g, or t
tcttcctgcactggggtaggatgggagcagagagtccaacatggatctgtaaattatgtggaagtcagaatggggttggagggcttgggcggcagggaagggagacctcaggcagcaggtaagcaaaaggcttgagtggctgggaagggaggcctccctcagaacggcttttgtacagggacctaaagtgggggcagccatggctgcctctgggattggtgttccagctggtggacctgtggacagaagctttgggcaagcagcaaggaggtccctgagggtggccagaagcttggggacaggtgcagggtgagaggtgacagggctgggggatctggccggaggactgctggcattttcttgggagccactggactgttttgtgccagggaatggcctgtgctggcccacgtgttcacaggggtcaagaggagagggcttggggcaggcaccgggttccccttaggaaaaggcagatccactagttctagaacggctaataataagcgggccgctctagangatccaagcttac

SEQ ID NO: 229964 - DNA, 467 bp, Homo sapiens
cacttccatcatccatatatgatagtaatactagtatctacctcataggattgttttgaaaattaaatgagataacacacatgaaacaacttagaaccatttctggcatatcataaaatttatcttcaccattatcattattcttcgtttggtatcacagtttgctatttttaatgtgaattatcagctggcacacatgattctttcttgacgttaaattgataatatctatttttcaagactaatatgttaatttttgaggagaaatataactcataaaatatgcttgaatccctcaagttacactgatcatataaatctttgaaaactttataatttttcttggtagccataacaaatttctcctccagacaacatgagccagctcatataaagctagtagatgacatttatgacacaggtccaagctgggcagacaacagctttccctgtcacataatgataaa

SEQ ID NO: 229965 - DNA, 402 bp, Homo sapiens
ttcgagttcattccattccattcgagtccattccattcgagtacattgcattccattccattgctttcgggtccattcaattcaactgcattccataggtgtccattccattgcattccattccattccatcccatcccatcccatcccttccattcccattcccattcccattccattatattccattccatttgagtccattctattccattccattccattctattcgagcacctttcattccattccattccattccattccattccattccattccattccattcgggttcattccattctgttataattctattccattcgagtccattcaatgccattccattccatatgagtccattcaactccattccattcgagtccattccattccattcg

SEQ ID NO: 229966 - DNA, 1085 bp, Homo sapiens
agaagaaaaatcacatcatcttatgtcagttaatacacaaagagcatttgaccatattcagtacccattcatgataactcagaaatctaggaatagaaaccttacttgataacaagcatttacaaaaagtctgcatggaatattatacttaacagtgaaagactgaatactttgccactgaggtcagaaacaagccaaggatgttcactcttaccactcattcaacacagtcatagccaatgcagtaaggcaaggcaaggaaaaaataaaactatctcattttccagatgacacagttgtccatgtataactcccaaagagcctccaaaaaaaagtcttctagaattaataagtgagttcagcaatgtcacaagatatacagacaatgcaaatcaattgtatttctatatactaacaaagaatatttggaaattgaaattaaaaacatatgtaccatttacagttgctcccctaaaaatgaaatatttaggaataaatctaacaagacagatataagatctatatgctcaaaagtataaaagttgggtgaaagatgatgatggagttaaatcaaagaagacttaattaaatggagtgacccactgtgtccatggattgaaacattcaacatagtaaaaatgttaactctctctgaatgtataagtttagtgcaattcctatcaaaatttcagcaggatttttttgtagatgagcttattctaaagtttgtatggaaagttgaaggaactagaatagctagaattttaaaaagaagaataagtggaagaaaacacaccacctgattttaaggcttactctgtagctatagtaatcaagacaatgtggtattggtggagagaaagaatcatagatcaatggaacagagtagagaacctagaaatagacccacactaatacaactgactgatttttgacaggtgcaaaagtagttcaatggaagacaaatagtcttttcagcaaatagtgggcatccataagcaaaaaatgagctgtcacttaaacctcataccttaaaaaaaattaattcaaaatagatcatagatttaaatgtaaaatgtgaaact

SEQ ID NO: 229967 - DNA, 448 bp, Homo sapiens
cagaaatgcttgggttcaggtcctaccaagccactgctgatggagtgacctgcttgttaacttctctgtgctcagtctcctgatcgttaaaatgggaatgacaatagtaactaacgatacaaaggtgattgtaagggatgaatgaattctatgcgagtcccttggaacagtgcctacgacacggtgtgtgccacaaaattgctagctgttattaagtcggctttgagaagtgaacatttagaaataatgtagaagatctcataacagctgggcctcagagtcccacatgaagatgaaacaaacttcataaacttggatggagcaagtataaactaccaaacataatacaaataaatgtaaattttcctttgaagttaacatatttattttattataactaaataataaaaatatatacttacaataaatattaaaaaattaaaaaaaa

SEQ ID NO: 229968 - DNA, 390 bp, Homo sapiens
gttaataagcaataacaattgcagtggacagtattattaatgcttgggatatgggaatttgatgtttctatcacaaaggttaaaaaatggtttatccttggccgggcatgatggctcaagcctgtaatccaagcactttgggatgtcaaggcaggcggatcacaaggtcaggagatcgagaccatcctggctaatacggtgaaaccccgtctctactaaaagtccaaaaacattgctgggtgtggtggcgggcgcctgtagtccccgctactagggaagctgaggcaggaaaaaggtgtgaacccaggaggtggagctttcagtgagctgagatcacaccagtgcactccagcctcggagacacagcaagactccatcaaaaaaataaaa

SEQ ID NO: 229969 - DNA, 354 bp, Homo sapiens
ataaaatacgaggaaagtagagaggtatataactgttgttggggtgaattagatagttaatgagaagaaagtcagaaaactactgaaggcaaccacggtgaaattggcttccagatcaggccctcaggccagataggtttggccttgatggaaagaccattagaaagtatccaaagctgccattatagccttaatcatatgacctatccatcctcagtttctaacttggtaaactgagtgttagattacataacttctgaaatctcttccatcttcaaagtctgaattttgccctgaatgctttttagctcacagggaactagatttcaaggacctaaccacagatatcttaaa

SEQ ID NO: 229970 - DNA, 920 bp, Homo sapiens
ggtaaaaggatctcacctgcttttgtcagattggagctgcttcttgccatgtattttcctcctgactcaacagcaaatctgttttagttctaagtgttttgattctacaaggacctagtgatcagtaaccagatcgggccttgaaaaaaaaatgaagagtatgtcgtgtaaacattcttcgggggccaaacaacactgcagttgtatgctttaatttaaaacacacatgtgcacacacacatcctctgcggaaacactatatgaagttcgaatccctgaatatcaataaaaggaactgagaaatattttggtgcaagaacaatgaggaagttgatcctgtaacatgaaggaagtgtaactgtttcacgtagactaaatatttaaaaatgggtttcatgttttttatactgtttttaactaaagttataaaaatgtttccaacaagttctctctccttatgttttaagaatcccaactatctcagtaaattgaaataagggtattagcagttttctaattagtaacacaaatctgtctaaacaagaggacatcctagtacacaaaataatgtcactgtttcacaccagtctagaccaaaaaaaaataaaattgaaatgttcagagtcaaaaaggaacttctgaagataaattaattcatccctaaaaattaaagtgtgttcaaaatagaaaaactattgtcaaaatcatttcatagtttaattgcaacacgtcactaacagatggtgattcttctcttggaaagattcaagtaaaaactctgatacaaaagcaaggtaaaacgcacagggttcccttatgtagatgtacacatggcattgcatatagagattaaattattatacttgtcgttaagttctttattaatttttaaataaaaaaatcaaagatgaaaaaaaaag

SEQ ID NO: 229971 - DNA, 977 bp, Homo sapiens
ttggagttttgaacaaagaatggaacaaaatgcccagcaaagcagagaaagaatgaggcaacgaaagaatgaaagcagggatttattgaaaaccaaagtacactccacagtgtgggaacgggcctgagcaagtgactcaagggcccagatacagtcttctcagtccaaataccccttggaggtttccccttggccacttcatgctcacctcatggaaatgaagtagtggaccacaattggtctgattggttgcaggaagcaaccaatcagagactgaagtggagttacaaaggtcacgctcctgtgcaaacatctgattggttgcaaaaagcaaccaatcagaggctaaggtgaagttacaacgttgcaacgaagactcggctggcaatcagtctgattggttacagacagccaatttcccagcgttgaccaggttttggggggaacaaaattatctgaataaaatgaagacagcaaccgtcgtggatttggtgaaagttttctcccatctccctctcaaggccttaaacaggtatgagttgattatagccaatgtttacttttctcattctgattcattataaaactggggtaaatacgttcaggaattagaccacgtaacaattataattgtcgaagactttgaaactgcatagtagattgtgacattggagctttttgttgtgctcattagaaagcagggtctgaaactcagcctgtgtagcaagcacgggtggctcacaagcagaactgggaaatgacacttctgctccccagagccccctttcacatctggggttctcattgtttgcctttttacttaatgtattttgtaatggctgtgaaaattaagctacaaaatgagtgaacattgaagacaatgattgctattgaaacttaggatttctcatttcaaacttagcgtgtgtttatccttcgtattcattcaataaatatctgtggagcaactaccatgt

SEQ ID NO: 229972 - DNA, 1183 bp, Homo sapiens
  misc_feature (1)..(1): n is a, c, g, or t
  misc_feature (3)..(3): n is a, c, g, or t
  misc_feature (6)..(6): n is a, c, g, or t
  misc_feature (8)..(8): n is a, c, g, or t
  misc_feature (706)..(706): n is a, c, g, or t
  misc_feature (754)..(754): n is a, c, g, or t
ntnggnangaggaattatagcattcttaaattttagaactgtaaagtatttttaggtcctttttagctttattttttattatcccctcattttatgtctaagaaaaatcaaggtttaggtgaatgagatgtatgagtaaatgtggtaaatgtttagcaagcttagaatgttttaaaatttgcacaataggagctttcatattttctgacagttggtggtaatattgcaggagagacttttttttttaaccactagggaatgctgaaatatcaactgatcaactataatgggaaaaattttttttaaaattttaggtattctgattgctgcatcttttctgtttagcaaaataacaggacttacttagtagcctgtatgcattggggtgagagggtggatgtcgagaacactagtttagatttgtttcaagtcatatcatttcacattgattctaactcagaacattccttgtagataaacaaattttattctcctcctctagctttgcagttctcaaaagtgtactagaaaaaatctgcctcttttgttagttaagcaaagctgagcccatattcatggaagatgttggaccataacctgtattttagtaatttggtgaaaaaggaatgtagttacagtggctctgccctcaggaaattgtccaacctcagagcctcccaggttgtatggcagctgagtgagggtntgcgacttcttaggcaaacctcgtcctgagatttggttagggaattgnatttgtgagtcttttgttctttctctacctttactctgccatttagaaaattaaagttattaaatttccatttttattcctcgttccagagaatttttaaaaggaaattttacattaaattccccgtgtcattttttaaaaaactcatctttcttgtgttttaggttgttttagcttctaatcagagaatgaggtgcctttgcaactagatgtcccagtgacataagaaaatgatgtgtaatctctgtatagtcacaatattgagcttgttgattatctccttcagatccctaatatgtttcctttagcttacttgacctgtcagattatgaaagaattaaaattttccactgtgatcagattttatcatgttctctttgtatttctagaagtttaacttggtacttgactcttacattggttgtccaa

SEQ ID NO: 229973 - DNA, 846 bp, Homo sapiens
ttctcctgcctcagcctcccgagtagctgggattacaggcacctgccaccatgcccgggtaattttttatattttaagtagagacagggcttcaccatgttggccaggctggtctcgaactcctgaccttcaggtgatccacctgcctcagcttcccaaaatgctgggattacgggcgtgagccaccgcacccagctggagcaacaggatttaatatagagcaaatgtttagttttatcatctgtaaaatggagataagtattgtcagagtaaacatgaagattagaaagaacacttaatgtgctgggccttttataggttaacactgacatctcaggctgaactatatacattttccttcacaaccatatcaatccttataaactatggatttatgctccttaaaacaatatataatgctgatcactactataaatgcgtggttttaaccaactgtactgaaacagctttgagtttatattctgtttggatatttggagaaaacaacaagtgctctcaagagtatttgcttagaggccggctgtgtgagtggataactttgaaagctgcttttgagacgccagtgtctggcatttcctgcattctggcctggaggccggacgtgaatctgacttctagtaaaaatacacggttcccttgacaaagtcgagctgtttatcccagagactgcacaattttccgttgataggcatggaccaatgctaactggaaatcattgcaaaaagtttttttgtcgggcggagggtgtggtgttaagataaacagtgtgcaacagaagaaattaaaactggaagaaattaaagggttttttttagaattttctgc

SEQ ID NO: 229974 - DNA, 457 bp, Homo sapiens
gttgtctaatttcagtaggtacacagggtatgtatttaagaccagtttaatagcgtttctttttttgaggatgagttcgtattatttgtaacatagaattcaaagacacggtcatcaggacagaagtacccaagttaaaacttcatcagtggggccacattcttgatcaaatgctttacgaaaacattctatcatctttgaactttgtgtgttataaatctttcttgcctttaattatttattaggtactgatagaggcgttatgctggcatatatcagccatcctttaaaaatgacctcttaatcagggaaatatttgttttaaaatatttagctttaatgaatgtttaaagaagattttgttttgtaggtgcctggaacattaaggaagattcttatttatttcatttttctgggaatcatatgtacttgtcaataaacagttacggagaagtga

SEQ ID NO: 229975 - DNA, 498 bp, Homo sapiens
ggtctgcagtcccatgagtagcctagttggctactatgtcttgattctccctatggtcattcatcccctggaagggtcactcacattatggtcttggagttccaagtatagcaaaagaaggcaagccccagtgcacaagcactcttctagtctctgcttaagatatatgtatttaatctcgactaaagcaaatcacatagccaagctcagagtcggagtgggaggcagctgcccaagagtacagatagagaaggaggaagaatctgtggccatttttgttatctcccacagatggccaggaaccttggcacctttaagactcaagtcaccagtcgagtgtggtgactcacgcctgtaatcccagcactttgggaggccgaggcaggtagatcacaaggtcaagagatcgagaccatcctggccaacatagtgaaaccccatctctactgaaaatacacactgcactccagcctgatgacggagcgagactccatctca

SEQ ID NO: 229976 - DNA, 474 bp, Homo sapiens
cagaacctccaagccacgggtcttgtctgcagctgggccaggtggactgcacctgccaagggagcctccagggtgggtgctggctggccgggcgccctcctcacacacgagggcgggccaacttgagtggagccgtgtctgcatgcaatgctgtctctgcccccagcagctgaatgccacctgctgagctaatatttgctgaaccatcgagtcatggattccttcctgacaacgttgcttaagtgtttatccgagcaagagcttgggtcaaggttgccctcgtctccctgcctccctctgcaaacaccattcaactgccagcagtgcccttgatgtcccgtgtccagctcctctgagtgtggtttcctggctcatagttgcccaatgtacggcattccttgtggtgaaccacagggctggcccaggattcttagatgtcggaggaggcgaagatgccacgtccagcagaaagag

SEQ ID NO: 229977 - DNA, 654 bp, Homo sapiens
caagattgcaatttttacctcctcatggaagtaacactttgatttcaaacaagtaactcagcgttggtggaagcaaaatttaggatttatcccctttttaatgcagttaagtacttcaattttggcagattcttacatagaactcaagattttcatatagggacaaagacatatgttaaatttgtaaggtttaaaatgaattatagctgaagcacgaaacaagaatgagagtccttaccacatttagtgactgtgcagtgtattagtaaaatgaaaatgctgagatgataacccaaagaggagtgattacttatgcagacctgaatgttaaataggtaaaaattaaatattaagaaattcatttatctttttattttatcttttttcttttcttctctctctctctctctctctctctttctctccctctctctctctctctctccctctctttgagacagagtcttgctctgttgctcaggctggagtgcagtggtgcgatctcggctcactgcaacctccacctcccaggttcaagtgattcttctgcctcagcctcctgagtagctgggactacaggtgcctgccaccacgcctggctaatttttgtattttcagtagagatggggtttcaccatgttggccaggctggtc

SEQ ID NO: 229978 - DNA, 444 bp, Homo sapiens
ctcacattggtgcttatatgacctcttttgaactccttctgtgtcatctctcttaatcacttctatagtaatcctcacctaaattttctatcatcggctgtctaaaaccgaactcatcctttccttcaaacaagttctctttgtggaattttcaacttttaaaaatgttatcggctgggtgtggtggctcacacctgtaatcccagcactttgggaggccgaggtgggcggatcacgaggtccggaggtcaagaccatcctggctaacacggtgaaaccccatctctcctaaaaaaatacaaaaaattagccgggcatggtggcgcatgcctgtagtcccagctactcaggagaatcgcatgaacccaggaggcggaggttgcagtgagccgagatcatgcctctgcactccagtctgagtgacagagtgagagtctgtctcaa

SEQ ID NO: 229979 - DNA, 448 bp, Homo sapiens
aagcttgctgaggggcctgggcacacctccttttataagggccctggggcactgactataactctgctgcatacaaagggaaatatgagggactgttttataacataatatcaaacatttcatttgaagaccatgtgaggaaggatagtgttttcaaataccatctaaagtactttgtttctcagtgtgaggcccttcctttgtgaaaactagcccaaaaactagaggctaaatatcaaaaaggagagagcactaaagaacaaagaaagaacagggtaaaattcttgtctttgagcttctttgtagacttttacaaagatatagaaaatacaaaatcttgaaagccatgaccatcaaattcagtagtgaaaggaaaaatattttgacatgccaaaaagattggcttagaagatcaagtaccaaaatctgagggaaaattgtacaaagc

SEQ ID NO: 229980 - DNA, 185 bp, Homo sapiens
cacctcatgacaacacttcaaaaaaaattatagcagggtgcagtgacaggcatccatagtcccagctactgtggaggctgaagcaggaggatcttaattgagaccagttcaaggctacagtgagctatgatcatgccacttctctccagcctggatgacagagcaggaccttgtctctaaaacat

SEQ ID NO: 229981 - DNA, 225 bp, Homo sapiens
ggtcttaagaccaggcctttgacattcacctgaagatggctctctgtgtgagagcgggggagtgcggatgagagacacagttggcaggggttctcgcatgccatatccctccgtgtcccatcctgccctgtctgaccccatcagccccactcacttcctcacctccacgctcttgccagcttgtgcctcatagccagctcttttcattgccttctggggatagga

SEQ ID NO: 229982 - DNA, 270 bp, Homo sapiens
acaatcccccctcccctgccactcagtcttcgtgtgacattggatgtgtcacttcttctttctgtgctctgggccatgagaacggggtccttgggctatgatggtgacctctgattcagactcctgcctgtctggtgcctctgagtcagtgagaagagcgcggctgtgacctccctagactgttgtggttaagattgagggactgccacttcctagaaattaccttggtcacagtggttaagccgtccaatctaagataaatattgtacc

SEQ ID NO: 229983 - DNA, 529 bp, Homo sapiens
gtacgtaaatgtgctttctggtggctagtaacagtcattcatttccatgtttagcatttcctcaggatctcttttaaggaaggtctggtgatcattgccttagcatttacttatctgaaaagaattagagatttttttttcttatgaagcttagtttggctggatatgaaattcttggttggaattttttattacggatacagaatataggccctcaatctcttctggtttataggatttctgctgaaaagtctgctgttaagctgatgggattccctttgtttgtggcctgccctttctctccacttgcctttagtattttttattttgtattcaccctgaagaatatgctgactctgtgtcttgaggagggccttcttgtctatcttgaaggggttctctaaattttctgaccatgaatggtgactttgctagcaaagctgagaaatttttcatcaacaatattctcaaatatgttttccaagttgcttgctttctctccatttcagggacactaatgcatgataga

SEQ ID NO: 229984 - DNA, 544 bp, Homo sapiens
cagagcattttgttggcacattgctggcttccaaggtctgggtgcagtcacttgcaggaaccagcagtattgactatttagcacaccactgaaccttttttaggaattcatcattttgttctctttctctcttaagccagttcaaagggggtctgtcactttaaataatgcctaatccgtgtttatccttttgaagatctttacagaagggagaagaatgccttttgtgactactgaaagtacaaagaactacccttcactcatggaaatgaacatggccataggttttcttttccttctttctcttttctcccccttcacttcataccttttgactctgctaacgtgttgagttctcattatgtactgtggattgtttcacatagctcttctcattttatctcagcgagctattcagtattttttaatttttttcataagatgaggtacacctatttcctaatcaaacccgttttgtattgtgtttgtttccagcctttgacatttagagaaaaaaaaaaaagtcgacgcggccgcgaattta

SEQ ID NO: 229985 - DNA, 391 bp, Homo sapiens
atttgcattttcctttaaataagccaggtataatgacacttcccaagttccaggtatttcacagcacaactgtcagtacagaaccaccatttaaggctagattatagaaggtaattcctgtatagtgttgaaatacggcattacaaatattataacattttccttcagcttttcatatgctttccatctttagtgttcaattcactacagttcttggaaaaccacataaactttatacaacaatagacctcgcatttttagccttatgttctatggtacgtcaagctgacagcccacacaggagatcactctcagaagcaggagaacctcaaacagatctgtgctgaaattatggctaggtggctccaggcatgatccctctgttatacta

SEQ ID NO: 229986 - DNA, 433 bp, Homo sapiens
ggaagtgccctatctatgttctttatagtataaatcacctacttaggcactagctgttctatgtttctaaggacggattcaagaaccacagatttagcagctcaagaaagccagatttgcttttccataaaaggagtcaggagatatgcaagggtatctttgtagcaaatctggtaacttttagtcttattttaagcacttaaaaaatagttatactccaaatggcctctgggagtaactgcttggcaggttaagtgaataacccacagcaaagttccaacatccagagcttggacttgggcaagaggaagagactctcagactctaagatcctgcagatcctccccttggacatgggttcaggggacatgattttaactgttagctagaaaatgtccctttttcttctttggaggtctttaaccaaggccca

SEQ ID NO: 229987 - DNA, 479 bp, Homo sapiens
ctgacttctttttctgatctagtagtgtgtttcttcaccactttggctttgagcactcaaagtgcagacagtcatcagcagtgggatggataaattctggtacattcattgaaatgaatgctacgcataaatgaaaaagagcaacttgcaacaacacgtagtatattcatcaaaataatgttgagcaaaataagccagacacaagtaatacattctgtatgattccattacataagtttaggaaaaaccaaccaatagtaaatagataatctgaacagtggctactttttgggagaaaggtctagactgaagtgagagaaagaagaatctttctggagtctgaaagtatcttgacctgggtggtgactacatgagtgtatatatacgtaaaatttcatgtaaaatttaacttaagatttatgcatttgacttatgtaaattatacttcaataaaatgtttctacaataacctaaagaaa

SEQ ID NO: 229988 - DNA, 532 bp, Homo sapiens
atccttgatactttcccctagaagtccagcatctgcttgtttaaatacatatctcatgtaaaatgggaaagataaaaaatattgaaaagtgaagttttaaaaccttatactaaagatctttatactgcagtctgtctcacacaatatatcattgtctggctttcaacaacaaaaaattactaggcgttctaaaagacaaataagtcacagtttgaagaaacagagcaagcattagaaccagactctggttttgcagaggtgttagaattaatcagactaggatttttttttaattcctaagattaatatgttaggggctctaaagggaagattggacaacaggcaagaacaggtgggtgaaggagagaaatggaaaccttaggaaagatcaaaaggaaatcctagaaaccgaaggcaccataacagaagtgaagaatgccttcgatgggctcatcagtagactggacatggccactgaaagaattagtgagcttgaagaaatgtcaaccaagactcccaaaactaaaataca

SEQ ID NO: 229989 - DNA, 629 bp, Homo sapiens
ctgtagctgcagaacctgatgctatgtgcgctgcagaccgtcaatggagcagaggcggggaaggagtcacggggcgcgcacgccggggaagactacaaggtgcgccttctcgccacgcccacctgcacctgccttttcctcccgcctggtgggactcagccccacccctgcattttctctgcattttatgtcgtttccccaaaagtatatccaaaaaatgcctttttccctctggtaactttgatccctgggttctcgccattttctggatcactgtgacctgttccttgctttgggtcggcatccactgatgccagcagtggcatctccaagccaatgtgctttgctgttagaaggccaaggttagaagtgcagccagcgtggcatgaccaggaaataaatgccagtttattaaataacgagtaagccaccgtttcaagcctgccctatggaggaaatgccagtttattaaataacgagtaagccaccgtttcaagcctgccctgtggaggaaatgccagtttattaaataacgagtaagccaccgtttcaagcctgccctggggaggaaatgccagtttattaaataacgagtaagcctctacctgcacgacaacacataaaaaaaa

SEQ ID NO: 229990 - DNA, 193 bp, Homo sapiens
aaactaaacacccaaaggaagaacaagaaagaaaacaacagcatactggataagtcagtaagttttggaaagatagcaagcaaatggagaaatagtaactgacttagcagatcaaagaaagctgaagtctaactgcccacaaatggggattccaacaataagcaactcaattcttactacagaacacacacat

SEQ ID NO: 229991 - DNA, 389 bp, Homo sapiens
tgagtaattctcttaatcacctctcatcctcagctcagctccatgactctgctttgtgctgcttcataaatgcagcaagtatgtgtatttcaagaatgccaaaatattaaaaatttttgaattttaaggaaaaaagtcgttaagcaaatatactattaaaatatcagtttgaataaagtgaccaattacttatggaaatgtttgtgtcattttgaaataagagattatactgaagtttgatcttcatagagtgagaatgtcatgttgtcctgaatgctttcccagaatacgtggaaattatgtgttaaacatgatctctaacagcttacctactccattgtttatgtgcttatacttttacacacttatctttttacgattaattgttc

SEQ ID NO: 229992 - DNA, 526 bp, Homo sapiens
actgggagccctgacccccgggcctgagtgtgcctgtatttggaaataccgtggttgcagattagttaagatgaggccacacaggagcagggtggcccccaatccaacgtgcccggtgtccttaggaaggggaattaggacacagacaggtacgcagggcccacgatgtgaggaagcaccccggagaggcctcgggagaagcagccttgagcctccagcctccagagctggaagaaagtagatttctgttgctctgggccgccgggcatgtggtgctgtgttccaggagccccagacatgcatgcagagccctgtccagcccggacacctgctccacggggggcttgctggggctgagggctccagggcttcgctgggatgggcagagaggagccctccagccggtgctgccagcagccaagggctcctcccacagcttccctcactcgccctgatcacccctcaccacacaggaagcagggaggggccggtttccacccagaagtaaaaccaagcagagcggccg

SEQ ID NO: 229993 - DNA, 439 bp, Homo sapiens
tgagagtctaatcagctcaagctcctgcaaagaacacacagcaaggtttggtttcacctgtctgaaagctgacaagggaaccacagaatgaacactggataaggagtcagaagaactgacgtctcctgattttcttcactgtttgatcttggtcaagtcacttctactctcttagcctcagcttgcttgccatgaaatggccaggctgggattgccaatatcccaatatcccagttttaatagtctatgccaactgtggaatttagtctagtgatgaaacagataaagtcacaatttagccttaatctgcaggaggcagagagatggaccaccccaactcttttaaggattcatgtttctagcttattttgaaatatacttggccgggcatggtggctcacaccaataatcctagtactttgggaggcccaggtgggag

SEQ ID NO: 229994 - DNA, 475 bp, Homo sapiens
aattgccacatccataccttcaaaacatgcaatgtgtgcaccccaatcactgcttacagtataatcagtatgacgatgagattgagggggtctaaatttaagtgtatcatctcctgtgttatgtgaaaatatccctcagtacaaaacatttgtgtatttcacagatgactcttgttttgccataacgctacaaagtttatggaaactagtcaactgaaggatttttctgttgtgtgatatgtaaaggtctgaatagtaaaatcatctttgcattcctgaagtgttaaaaaataataatcaacatgtcagattgttgggcttttcttagcagatgttttctaattcaaagtttttggttgtgtttttgttttttagttcaaagttaatttgtttgcctcttgaagattaatttgtctcagctttctaggaactgccaaacagtgatattctcaaaaggattcaataaactagttca

SEQ ID NO: 229995 - DNA, 285 bp, Homo sapiens
gcatatattcatatggagatagacaagattactaaattcagtagtggaaaatgggcaggagctatgcttacaattcatttctatccctgattctatctaaatagaagactaagcatttcatgtttttgtggactatgggtaagtccttttaatttttgctaaccgttggacaactctgcagataataaaataatgacaatgttttgcattgtcaattattttgtcctgaaataactagtctttgagttcattgaaaacatttagagaaatctaaataatccaagc

SEQ ID NO: 229996 - DNA, 548 bp, Homo sapiens
atttgcatcagatattagtgaccttcagtaactatccatccatagtagcagaaggagtgtctgtctctcattaccaagctcagtactttttagtgtctcctgaggatagttaatgggaggatagttaatgggaggagtgacctgatgggtcttcatcagggagctggataggaaggatttgaggtgggaggaggtagtgtctcagtatgtgtctccagtagaggactgcatacgctattttctaggatcaaaaagttacggttttggaattttccgttcttttgtattttcattgtttcttcctccccttagttccatttaaatttggctacaagttttacggtttctgctgtggtgaatttcactatatatccttaaagctgatcccagactgtcttacctgcactagattttgaggaaagcagtgtgaatcgtagcataagccatgttttacggggtttctgctgcaatgtcatctctagtagtattgccgaatagaaataaaatgcaggtcacatatacagtttaaaattttatggtaactacat

SEQ ID NO: 229997 - DNA, 921 bp, Homo sapiens
cttcctccttgcttgtatgtcattgtgacctacgtatatggcatatgtttttctaagcaaagtgataattttacatcagggataattgaagcaaatgaatgcttcaattcatctccctcaagaaacgatgaatgaaaaagtctgggttaccaaatattttgaatagtttatgtgattcgcttctgtaaatcagtgagagaaacttactgattttcttgtgcatgtggaagttatgaggtggttcataatgattatgaattaattgaaatgaatcatataccaaaagaaatgattcatataccaaaagaaatgaatcatttcttttggtatatgattatctaattgtataatagaaataatttgctttattttccattggtttttatagtttcttataatcagtatagtttattagtaaaagaatctgtactaagctttaaaaagtatttgggtagctcattgatcaggtattttctattttctttaaaaactgattgttaaaatttgtatttagtaccatgatcagaataattaaaaaaaaaacaaaaacaactagtcactgtgaatgttgctttgctgtcttggaattatagtagatattctggctttctcttatttatgcaatttccaaatcatggaagtattgtagagccaggtcatagatgtagcttgttttgaagtcaagtgcattcctggagatccggttttgaaatgggtcactgtaaggtgatccctcttctttggacatcaatagaaaccatcaaatgagaggattaagttggtgagacattaagtgtgtatctttttatagggagtgttgaatgtgtgatgctagtttcaaagcttgtagttgccacagtactgtttaaagactaacaaaggtggaaagcaataaataattattaaaatggtttctttgca

SEQ ID NO: 229998 - DNA, 363 bp, Homo sapiens
agcttagcgacagccaagctgttcagagacacagcaagtagcccgggcaggtgatgggggccctgtcttaggaacagaggccgctggacgtggtggctcacacctgtaatcccagcactttggggggccgaggtgggcagattgcctgagttcaggagttcgagaccagcctgggcaacacagtgaaaccccatctctactaaaatacaaaaaattaggcaggcatggtggcgggctcctgtaatcccagctacttgggagactgaggcagaattgcttgaacccaggagacggaggttgcagtgagctgagatcgtgccactgcactccaccgtgagtgacagagcgaaactccgtctcaaa

SEQ ID NO: 229999 - DNA, 746 bp, Homo sapiens
gtggatactgagcattgtatgtagctcaccatggtgctgccgttggccggatgagggtgcctttgcctaccttggttctgctgcctttgaaaaatcatgaccgctggtcgtggtggctcatgcctgtaatcccagcactttgggaggctgaggcaggtggatcacaacgtcaggagatcgagaccatcctggctaatgcggtgagaccctgtctctactaaaaatacaaaaaaaattagccaagcatggtggcggcgcctgtagtcccagctacttgggaggctgaggcaggagaatggcatgaaccccggaagcggagcttgcagtgagctgagatcacgccactgcactccagcctgggcgacagagcaagactcttgtctcaaaaaaaaaaaaaaaagaaaaatcatgaccagcggaccagttgtgataagattgacaagttggtgacagagcatgttttgtgaacctctgaactcttctgggggcatttctcataatttatgtcttcttgtctcccggcttgggtgcctagcactcatggtttttcctgctggtcccgtaacaaattccattttcttggaaaggtatgtggtctgtcatgtagcttctagtcttggctgggattcagttgccatttgccctcttagggtattgacactggaaactttcttatcgtggttcttcagtggaagtttggtggaagctgtggataggggaagtggtgggacgggaagatagggttt

SEQ ID NO: 230000 - DNA, 104 bp, Homo sapiens
gcctcagcctcccaaagtgctaggattacaggcatgagccaccacgcccgacctccactttcccttcttttcaggggtgagcagagcttgctgcaatggtctga

SEQ ID NO: 230001 - DNA, 618 bp, Homo sapiens
tctgtcgtgtttatccatgtttttattatttctatttttcttcattcctgatgttatgtttccttattttatcattttgtttctgaattaagaacttccattagccacacctttaagaaggttgctgtgtccttccttgagtcccaggtccccctggcagcccacagtgtggatctgggatacacagggtgagcacaggctgtaggagttcttgaaattctggcaggggttctgcacttgacctaagaggtaaggcaccagcacttctgaaaccagacagaattggatggaagctgtattttaaggtgattgtctgtatttatgaggattaatcttttggataatctggaaggcctgggggactcactggaaagatatggtaataatttcaataaatatttaagggctataccaagttgaggctggtaggaccagggagaagcagctgtatgctacatattgagatcatctaaagacagcaaattgatgttttacatgaggttgattttgaagagtaaggaggcatatctggtccccagtctcatctctggaaagaactgcaccagacccaatccaccctaattacctgttctctcctgattgcgaagtctatgaaaa

SEQ ID NO: 230002 - DNA, 542 bp, Homo sapiens
tgactaattaaaaaaaattgtagaaaccgggtctcactgtgttgcccaggctggtctcgaactcctgggctcaagtgatcctcccacctcagcctcctaaattgctgggattgcaggcaggacctaccatgttcagccatgctcaaaaaggaataggcatgtcaaaaggtcacaggagccaacctgaaagaatacccaatggccaaagctggaacagtttgaacaacaaaataaatggtgatagtgttttattataagccagagaaaaacctaaatatctgtaagttcatagtaatataaataactgaataaataaataaataaatgggagagaaaggacagctcttccttagagaagagttgcaactagtggctgtaggagtaatgaagagaactggaaaatcaccattaaagcaccactgtaataattgtttctggcaagatccatcagtggttgctgaattagtgggttaatgtttgagagaaacaaggtatttgcatattcctaaagtatctctctcaagatatttattaattacaaa

SEQ ID NO: 230003 - DNA, 458 bp, Homo sapiens
tgggcccctgccaggctgccgaccagccaggggaagtgaatgtgctcagcgtgagagtgccagctggctaggctttctccccaggggggaggctgtaagcacagattaccagtgactttgttcagttctgctgccgtgctccccgaggagaggaacatcacagcccagcatcagtactaataggccctgatgcgccagacccaggctaagaaggccagcgtgggggtgggggtgcagcagagaggaggacaaaagccacgcctctgaagctgtcaactggctctgaggctgacaaggaagcactctctgcagcaagttccaatccctgccgcaggaaggaataatttcaccactttctcactatttactgtccacagcaaaaagaaacccccacacctccacttagcaccatcgtgagcatccctagagtccaataaattacagaagagaaactaaaa

SEQ ID NO: 230004 - DNA, 1146 bp, Homo sapiens
gtttatgctgagcgttagtgtgtatgtatgtgcgtacatgcgccaggtgcctgtgccctctgtaggatggtttgcttaatatggttttataattcagtttacacaggattctttattttttttaattttgtattttggcaaacaccattcagttataagaactttgccaaatatgatagaataattcaagagcatatacagagagttaccacttgacccagctatttaattgcaaatacagttgttttcatttcatttcctaccagaaaaaggaatcagaaacctagtttttgaaaacacaagtgtaattcctcttttgtacttctttttcacaaatgcttttatttattctaaattgaatttaaaaatccttcctaaagccattaactctttaattctcctgatatgcctttacttcctatgaagttattggtagatgttgaggcccaaaaactggtagaatattgaagatcttcttaaatgaccaatttaaccataaccaaatattgaatatcattcttcagtcacatctaagtcaggcactttttcacatagatcagggcttttggctcagtcacgaaatctacaagttagcaaagcttacaaaacattattcgtcaggtatgggaatcaaatatagacacttgtttgtctttgctttccatttctatgtgtcacatacatatatgtgtcctcttataactttagtcttcaaaattatttcaatatccttcttctcactatatttatttgtgtgatggaaatgctttcaggccgtagatcattgttggtgttaatctgtggttaatcctcattttagttccgtcttatctgatacttagaaatatctcagccattttggaggctgtgcagtatcagaagacgtggagtttgttctgtctctgcctgtagctaattatggtggttcagtcatttaataaatatgttttgagcatctattttgtgaaaggcactgtgttacctgtgtgtctttagtgtcctcactggtaaaatgaagaggctggccatgagctggaagggttaagtttataattccagctatttcacacccgtcttccttgaaggaatgatagtgatagatataaaaacactgtaagtccctcttttaataaactaaatgaaaga

SEQ ID NO: 230005 - DNA, 523 bp, Homo sapiens
gtaccttaacaatgctacaagtgaatttaattctttttttaaacttatatacaggtcaataagtataacatctagcataaaaccacaaatacttggtggaaatgactttggatactttggataattactttggaactgggtaggttttatttcttctgtagggttgggagggtacttttaagtcactacttcatgaaaattctgggccttggggcttagctgggcgtttagtcatataactagattcactgaatttgctattactgattgtctgaacttcaaagttgtggacaagccaacaagaggtaatcatacttatcaaagagtagaaaactactttctctcactacttcattgttagctcttttgcttcaatctgcagtcaagtactcaagtttgttatgaaagactccccagctcccagaaaaaagttggtgacactgtctaagctttaaatatttgagacaactggtcaggataataggtcgacgcggccgcgaatttagtagtagtaggcggccgc

SEQ ID NO: 230006 - DNA, 554 bp, Homo sapiens
gtaccttaacaatgctacaagtgaatttaattctttttttaaacttatatacaggtcaataagtataacatctagcataaaaccacaaatacttggtggaaatgactttggatactttggataattactttggaactgggtaggttttatttcttctgtagggttgggagggtacttttaagtcactacttcatgaaaattctgggccttggggcttagctgggcgtttagtcatataactagattcactgaatttgctattactgattgtctgaacttcaaagttgtggacaagccaacaagaggtaatcatacttatcaaagagtagaaaactactttctctcactacttcattgttagctcttttgcttcaatctgcagtcaagtactcaagtttgttatgaaagactccccagctcccagaaaaaagttggtgacactgtctaagctttaaatatttgagacaactggtcaggataatagctggtaagtacatccaaataagtatgaatagaattagtcttctggtcaacccctaaaatactgaaactgt

SEQ ID NO: 230007 - DNA, 636 bp, Homo sapiens
  misc_feature (38)..(38): n is a, c, g, or t
  misc_feature (57)..(57): n is a, c, g, or t
agacaagggtgccgtcaaagctcactgagtcgagctcncaggtcaagttgatcctcnaccaggtagagacagggtcttgctatgttgtccaggctggtctcaaactcctggcctcaagcagttctccaaccccagtctcccaaagccctgggactgcaggcatcagccaccatgctcagcttgttgcctaattagtagtttaagatgacaaaactacatggatgataataatttcaataataattctaaagcagtggtagcaaattcttagattttgcttactatatagcagggactattctatgaattttacatatattaacttatttatttatttatttatgttttgagatggagtcttactctgtcacccaggctggagtgcagtggcacgatcttggctcattgcaacctccacctcccaggttcaagagattctcctgcctcagcctcctgagtaactgggattacaggcgtgtgccactattcctagctaattttgtatttttaatagagacagggtttcatgttggccaggctggtattgaattcctggcctcaagtgatccacctgcctcagcctcccaaagtgctgagattacagacatggccaccatgcctggcctaaagtgagtt

SEQ ID NO: 230008 - DNA, 297 bp, Homo sapiens
aactcggagcctattgctgccacctctgtcagggaagataaatgggcatgaataatagacagatgagtttcccaaaagcccagacaggctgcagggaacacgtaatgagcagacagtgtggttcacgccggggagcccaggtttatccaggcctcatcctcactccctttctctactgataattggacccaacaggaccattccgaatcatttttctctcttcagttattcttcagttctactcaaagggtcagtttagggcataattaaagtcaattactttctgaaaggccatca

SEQ ID NO: 230009 - DNA, 603 bp, Homo sapiens
acaaacccatcagcatctctgggtgatcatttcagcaaagatgcaaagggaatagaggacagggaggatgacctccagcagtgaactggccttgacccctccagtttgacagactgtccagccagcctcttttggtgcagaaccttcttacaagacagctgcaaacgggctgctccagggctctgaacctaagcttgcactggtttgcacagtgactacccatgctgagttctgagttacagatatttctactttccagaaccccgtttccttctcctttccaatttgctaaagtggatatttattgcaaggaaaacagtactgaaagcttttattgcatttatgcagcactcagccaataaaacctcaactcagaggtaccatattttatgtagacagggatttggctttgacaagattctccccaaactgattttcagtggaaggagccacttcttatacaactactcgctaaatttccagattttaggaccagtgtatgaaatatactgggatagatgtcagtgagatggacaatgtagttttttctcttttttttctggggccgcaaaggacttcaaggcaggtaagagatgaaaccgc

SEQ ID NO: 230010 - DNA, 250 bp, Homo sapiens
tccgagtgtttggattttgtaatcctcctgtctttggccaactccccatccttggcggagcgctcgcccttggccgggctccgtgctgccagccttgcggaaccctaggcccgggcggctctgtcggaggcccacttctcactgatgcggagtggcccgagggtgggagcagcggttaatgccgcactgattaatacaggctccagtgaaagcgaaagtaagaaaataaaacggatttcattatacatat

SEQ ID NO: 230011 - DNA, 156 bp, Homo sapiens
ggatagttggagcaatggctgaatataaactatcagaaaaattgaatctgtaattctgtcaataagtgagaaaatattctaagattctttaaattttaattctgggtttttgaacacattgatgtgtaaaatataacaaaataaggtggacactgt

SEQ ID NO: 230012 - DNA, 367 bp, Homo sapiens
gtggcatgatctcggcccactgtaacctctacctccctggttcaagcaaattcccctgcctcagcctcctgagtagccgggattacaggcacacgccaccacgcctggctaatttttttgtatttttagtagagatggggtttctccatgttggccagactggtctcgaactcctgacctcaggcagtctgcccaccttggcctcccaaagtgctgggattacaggtgtgagccactgcgcccggccgagaacttgtaaaggatgtagatttgcactcacaagtttgttaaaacacataatttcttctctggaagatattttctgtcttgaattattgctaaaatagtaagaatgctaggaagactt

SEQ ID NO: 230013 - DNA, 491 bp, Homo sapiens
ttggataatgtgatgcctccaggtttgttctttttgcttggtctttctttggctatgagagctcttttttggttcctcatgaaatttaggattgttttttctagttctttgaagaattatgataatatattgatgggaattagattgaatttggagattgcttttgcaatatagtcatttttacaatattctacccatccacaagcatagggtgtgtttccatttgtttgtgtaatctgtgatttctttcagcagtgttttgtagttttccttgtagaggtctttcatgttcttggtatcaggctgtttctccagtttgtatatgagattctgccagaaatagatttgctgtcatgccctctgcttgcctttacccagctatgctagggtctcaaaaatgacaactcagaacactgggttaaatacaatttctctctcttcacccattttccactatctgcctgtccggccctggggttattaatctagtt

SEQ ID NO: 230014 - DNA, 568 bp, Homo sapiens
aaaacccaaaatgaagcccttctgaaaaggataactgctaactaatgtgtagatgatgggagctccttccctttttcacttcgtgggagattttttggagggaattcctgaggttcacattgttaacacatagccatcctcatccgctctgtttctgcaggggtacacatgccacccttgagctggctggctcagtgggcgcacacgggcgctgtggtctgggtctttctgccaccggtatcacagtgtagctggtggccttgctctgggctctcctgccacaggctgtcccctccaggaggacagatgggtaggtgggctgctctgccagcccgtgacacaggtctagcccagccaactgtctccaaggaagggtttactgctatcgcctcggtgctgtcctcatgacagcgagttcccccgagacctggctgtttaaaggtgtgcggcacctccccaccttgctgctgctttcgccatgtgacgcgcctgctcccccttctcttccaccaggattgtgggtttcctggggcctccccggagccgagcaatgccagcacatggtgcc

SEQ ID NO: 230015 - DNA, 640 bp, Homo sapiens
aaaacccaaaatgaagcccttctgaaaaggataactgctaactaatgtgtagatgatgggagctccttccctttttcacttcgtgggagattttttggagggaattcctgaggttcacattgttaacacatagccatcctcatccgctctgtttctgcaggggtacacatgccacccttgagctggctggctcagtgggcgcacacgggcgctgtggtctgggtctttctgccaccggtatcacagtgtagctggtggccttgctctgggctctcctgccacaggctgtcccctccaggaggacagatgggtaggtgggctgctctgccagcccgtgacacaggtctagcccagccaactgtctccaaggaaaggagggtggaaggggccgccctgtacaggagtcacttgggattgatgctgtgctttgcaggcatcacccatgtcgatattccctgcgtgttgctgttcctcccgtgttggtattccccccgtgtcgctgttccccccgtgtcgctgttccccccgtgtcgctgttccccccgtgtcgctgttccccccgtgtcgctgttccccccgtgtcgctgttccccccgtgtcgctgttccccccgtgtcgctgttccccccgtgtcgctgtt

SEQ ID NO: 230016 - DNA, 306 bp, Homo sapiens
ccgaccaccgtgtctgggtacgtgcagttctctgaacgtgcagctctgtggcttgcctctaaaccagagtttctcaagcatttgggtcctggcatccttttactctcttaaaaagaaggaccccaaagaacttttgtgtgtgtgggttagattcatcaatatgtaccattagaaattaaaacagacatttttaaagtgtattctttaaatgtggcaataatgaatctattaaaagttagaacaaataacacatttttttctttaaaataaccagtttccaaagtaaaactaatttaatgacaagac

SEQ ID NO: 230017 - DNA, 486 bp, Homo sapiens
atgttgatgatataatgagagtaatacatttataagttttatttgttttcagttaatttcatttggttaattagttcctagtactgatgtgttaaaattcatgaaaataattttaagttaaactcttaagttttctaactctgtgaatctgtgttagaagggttttatttaactgaaataaaagctcataactgcttcttcgagctatttgacattaacattcagaaacaatctaaattttctctagaaaagaatttacctgaagttttaacattagaatttgaaagagtatgatgaaaagaacactgtaccagttatgttgactaattttgataaaacaaaaagttttaatctaatgctattacagttactattgtttatagattgcaaatatatttgttctaatgaactttacccaaatgatatccaacatgtgggatttttccttataatgactataccactaaataaaatcatttgtttgat

SEQ ID NO: 230018 - DNA, 616 bp, Homo sapiens
gcatagtagatgatacatgaaatcacaggataaaacatacatcttcctgaagtgtcagtatacttattttttcagagttggattaaatattataactggtaatttaaagtttgcttttaactttaaatatttttatggaatgaatgataaattagcatgaattcttgagataaagtgagaaagcatcaaataagttacaggattatagcaggccctttgacttctaccccagggtgggtctggcatcgccagacctctgacatttttaagagcagctagaaatctaatttttttaaaagtgagatctgattttgaatgttggcagttaactcagaggtttttaagtaaatttttacatatcagacaaaaacatatccttgggcctaaacatctgcttgtgacctatgagatgtgtcagggatatctcctattctgagtctggctccttcagatttgaaactaaccataagcaggagtggaaagaataaagctagagacttgattagaacaaattcccacattaaacatcctctgtaggaaacagcttctataactcacaggctaccatatcccttctcgttgactccccttgttttgcagatgaaactaaggtcca

SEQ ID NO: 230019 - DNA, 437 bp, Homo sapiens
gctgggtccctggtaggttctgccaatggagggcgctagagggagcctgggggactggtggagggagaggagttgggctcatcctgtctttgtccacatcacctagcatagacagctgggtccagcagcagtgttgagttactgtttgcagtttatccacattcccagaaccagcctcaacatctccccttagagatacaagcactgtccagcctgggacccctcctcagaattctgaagccctctggggcccctcctctaactttttaaatttcaataacccctaacactgctttttgtttccccagttctaagggtggtagttgcttcctgtagttaccacctctgtgattcctctgggtcccctctttgccattttatttgtccaatttttgattaataattctttatattaaattctgtctgttaaaatactt

SEQ ID NO: 230020 - DNA, 406 bp, Homo sapiens
cagaatatacattcttctcatctgcacatagaacatactctgttatctaccacatgcttgcccataaagcaagtctcaataaattcaaaaacactgaaatgataccaaccatactctcagacttcagtggaataaaaatagaaattagtaccaagaagaaccctcaaaccacatcaataaatggaaattaaacaaattgctcctgaataacttttgggtaaacaaagagagtagggcagaaattaaaataaataaataaataaaaacacagatacaatatatcaaaatctcaaggatgtagcaaaagcagtgttaggagcaaagtttatagcactaaatgcctacatcaaaaagatagaaatataccaaatcaatgatctaacctgaaacctagaggaactagaaa

SEQ ID NO: 230021 - DNA, 528 bp, Homo sapiens
tcagttaaaatatattcttctatgttctgtgcctcttcatcgcgaacaactgttaagaattgtgtttccttcattgggggcatcaataatccaaatcaactagaacaccagtcttccatctcagtcatactacttcttgcatttaatacagcaagtcaggtttgcacaaagactttcagggacattcaaaagtggtttacaattttaaacgttttttcatctttcgttgaaatgacagtatcttaaaaaataagagctaacacaccaaatatgaaatctatgattttttaatccttcaaggtatgaaaaagatttattcctgaaaactgtttatgaagaaatatataagtcagtaaaatcctactttttaacttccattacaaagtagaaataatcctatataaaatattagatataatggcattaaaataatgttcacaatgtaagcatattttaatcacatatctaaatctctgaagtttcacataactgcaattctttatcttcgatggaaacttacaatttcct

SEQ ID NO: 230022 - DNA, 2336 bp, Homo sapiens
  misc_feature (578)..(579): n is a, c, g, or t
  misc_feature (584)..(584): n is a, c, g, or t
  misc_feature (586)..(586): n is a, c, g, or t
  misc_feature (590)..(590): n is a, c, g, or t
  misc_feature (593)..(594): n is a, c, g, or t
  misc_feature (597)..(597): n is a, c, g, or t
  misc_feature (606)..(606): n is a, c, g, or t
  misc_feature (1121)..(1121): n is a, c, g, or t
atttttttttttcctctgtgctcttagtgctattattgtaagttcttagctggttccctctcaaccattatccttaaattgaatgtgttattgtcactatgttgtgtcctggtagggcatttttgacagtgaatgttgagaaagcatatgcatgtgacagggcggatttgttagaagcagtggaaaggtgagtactaaactgggtgtttaaaatgcaagcttcagctgggcacagtggctcacacctgtaatcccagcactttgggaggcagaggcgggtagatcacctgaggtcaggagttcaagaccagcctggccaacatggtgaaaccccctctctactaaaatacaaaaaaagtagctgggcatggtggtgcatgcctataatcccagctacttgagaggctgaggcaggagaatcgcttgaacccgggaggctgaagttgcagtgagccaagatcgtgccactacactccagcctgggggacagagcaagactctgtccccctcctgccccgccccccgcaaaaaaaaaggccaggtgtggtggctcatgcctgtaaggcaggtggattacnngaggncngganttnnagnccagcctgntcaacatggtgataccccatctctactaaaaatacaaaattagccaggcgtgttggcatgcacctgtaatctcagctactcaggaggctgaggcaggagaatcacttgaaccagaggttgcagtgagcagagattgtgccactgcactccagcctgggtgaaagagtgagactccatctcaaaaatatatatatatgaataatttttccaatgtctggtgaaaatctgtcttgtgtgtcttttcgtgtgtgtgtgtgtgtgtgtgtgtgtgtgtgtctgtgttttaacctttaaacaacagggaatagtgtcattttggtatgtaactgatcatatataagtatatgttaataattcaccgaaaaccctatctctattaaaatacatctaaaggaaaaggtctacatttcaattagttctatatctctaatttggatctcttgctatcccagaggatataatttaaaataagatttcttgtttattctcggtaagaagtaattacagagcacctntaagctgagtattgcttcttaaattgaaggcactaaagataaagattgctaaatatttcgggaactagatttaactgtgtgacttgaactgaaaagcattctaattttccattcttttatgggtgctggggaagaactgctttgacatgaatgtataatagaattaaaatgtcggtcttaaattttggggagttgttctcagtttgctcttggaatttattattgtaatactgtcattagatagtttgttggaagcagctaatacgtgaaagtgaagcatcttaatatgcatctcttttctttctgacaatgaactgtcaaaaaagctttgagtttatctaacaaacacagctgaggctgggattttaactccactattaatatattctaattttaaactactgtaactgaaagggcatacagcactaattcaatccagacatgtttgagtgcgtttgatagtctcatccttgtaatagctgctgaaaaagatgtggtagagatttcagactggaccactgacgtctgggaattgacactagcacacagactgggtcaggcaaggtacaacctggtgccgccagctgttttgcatggaagaccttatctgtaaaactcatagagagtcaaacaagatgtgtgcctctgaatgaatgggatccttggaaaggagttttaaaataggttttaaaggttttctattttcccctccagaaccagcaggaactgttctggatcacagcaacacgagtctgctttctgcttcttggcagagccgttgcccctgtggtggcagttgtgtggtgggtgatagctgggagtgggaatcgactctactccagcatgagggagagattcttttccaacttccccagacccgtcccacattgctcgtgtattctgccactaacaagaatgaagacatcacattggccgggcgcggtggctcacgcctgtaatcccagcactttgggaggccaaggcgggtggatcacgaggtcaggagatcgagaccatcctggctaacacagggaaaccccgtctctactaaaaatgcaaaaaaaaattagccaggcgtggtggcaggcacctgtagtcccagctactcaggcggctgaggcaggagaatggcgtgaaccctggaagcggagcttgcagtgagccgagatggcaccactgcactccagcctgggcgacagagcgagactctatctt

SEQ ID NO: 230023 - DNA, 401 bp, Homo sapiens
aaccctttgaatgtgggaaattagtttcctcctcagcattgtcctctactacttttcggagtataatgtgtatgacattctctcagtaaaattttgatacacttgatagttgaaggttaaagaagagtagaaatcatcttaacaccttactaatgggaaattttttcataggaatacacataatttccagaaagttacctttttatagagggcatcatgcataataacaccttttggctcaaaatagaaattatttttaagcttatacttttgccatacgttagagcaactactgatttagattgttctgttttactgttctagaatcattccacacttgcctcttggcatccataatcagaaaagtaaatcaagaaataaactataaactgatcaatgtt

SEQ ID NO: 230024 - DNA, 1471 bp, Homo sapiens
gaaagattaacataaaatatacatttatttcactttgtgttatggaggaaaaacaggaggcctttgtagagttcctgcgtggggatttagaagggataggaaagccaggatttagagatgtgcaaaggtcttcctacccctccacatttcttaccagttaatcgtattgttcatgtatacagcttatggagcttataaggacattggacacccacatttatagccaggccctttgattctcggcagataatgggctcaggaagggcagcagtgggtggagacattttactagaattagtctgccgctttgaatacaatctggatttcttgctatttcttgtgcaacctgtacgccatttcctctgaacttgctagtgctctggagacttggttgtttggccaaggaatatcccctagcaggagggctcactaaggaggggcagcttgacaggcagaaaagtgatgtttgtcaactaaagaagttttcttttaattaatgttagagtcacccatggttttttgtcaaataaaaaatgcgaaatccttggagagcttgccttactgaatggggttttgataggtgaaattatcaccaggacctctacatgggtcaggatatgactcagtttgggttttggacctctgaggaatgtgacccctcttagtgtaggggatttggagtacaaaaacctgggttaaagttccagctttgccatttattcagaagttcctggaatttgatgtttgagagatctctgagctcagttttcctagttcttctagatcagggtaatcccttagggccagatagaggtggtcacaccctgattagcaccttggttccttctcccagtttgtattttgtgtcacctgaaagtcattttattttctctgtagcctctggttataggttatgtggtcattcctccagagaatggcaaagctcattgttggttggggatcatttggtatgtcttcccgggagaatgctcttgaacctagttttgagagttggggcctcaagaagagactttggcaatgcccttatttaaatgttagaaatgtttggttgcatttttgatgcattgcttacatagttaatgtttttgtatttggtacttgtcattttaataatttattaaacaggtgatttaggttttctaagatagctaagagcttagaaaaataggactgcaggtcgggtgcggtggctcacgcctgtaatcccagcactttgggaggccgaggcaggcggatcacaaggtcaggaggtcgagaccatcctggctaacacggtgaaaccccgtctctactaaaaatacaaaaaattagctgggcgtggtggcgggcacctgtagtcccagctgctggggaggctgaggcaggagaatggcgtgaacccgggaggcggaggttgcagtgagccgagatcgcgccactgcactccagcctgggcgacagagcgagactc

SEQ ID NO: 230025 - DNA, 1471 bp, Homo sapiens
gaaagattaacataaaatatacatttatttcactttgtgttatggaggaaccaggatttagagatgtgcaaaggtcttcctacccctccacatttcttaccagttaatcgtattgttcatgtatacagcttatggagcttataaggacattggacacccacatttatagccaggccctttgattctcggcagataatgggctcaggaagggcagcagtgggtggagacattttactagaattagtctgccgctttgaatacaatctggatttcttgctatttcttgtgcaacctgtacgccatttcctctgaacttgctagtgctctggagacttggttgtttggccaaggaatatcccctagcaggagggctcactaaggaggggcagcttgacaggcagaaaagtgatgtttgtcaactaaagaagttttcttttaattaatgttagagtcacccatggttttttgtcaaataaaaaatgcgaaatcaaaatatgatctcggttctccacacccatttttacctttaagagcctctcacaccttggagagcttgccttactgaatggggttttgataggtgaaattatcaccaggacctctacatgggtcaggatatgactcagtttgggttttggacctctgaggaatgtgacccctcttagtgtaggggatttggagtacaaaaacctgggttaaagttccagctttgccatttattcagaagttcctggaatttgatgtttgagagatctctgagctcagttttcctagttcttctagatcagggtaatcccttagggccagatagaggtggtcacaccctgattagcaccttggttccttctcccagtttgtattttgtgtcacctgaaagtcattttattttctctgtagcctctggttataggttatgtggtcattcctccagagaatggcaaagctcattgttggttggggatcatttggtatgtcttcccgggagaatgctcttgaacctagttttgagagttggggcctcaagaagagactttggcaatgcccttatttaaatgttagaaatgtttggttgcatttttgatgcattgcttacatagttaatgtttttgtatttggtacttgtcattttaataatttattaaacaggtgatttaggttttctaagatagctaagagcttagaaaaataggactgcaggtcgggtgcggtggctcacgcctgtaatcccagcactttgggaggccgaggcaggcggatcacaaggtcaggaggtcgagaccatcctggctaacacggtgaaaccccgtctctactaaaaatacaaaaaattagctgggcgtggtggcgggcacctgtagtcccagctgctggggaggctgaggcaggagaatggcgtgaacccgggaggcggaggttgcagtgagccgagatcgcgccactgcactccagcctgggcgacagagcgagactc

SEQ ID NO: 230026 - DNA, 575 bp, Homo sapiens
acatactatggagggagatgctctctttggcggggaggattgggaaagcctctaaaaggagctgctattttgaccagggcttgaaaatagcacttccacaggtacagttgctgggaaaggcatattgagaagaagaagagtttaagtaaaggtcctggggcagggaaagagaggtgctggtagaacatgccacaggctggctgtgcattgtcacatgaccagtgcttctccaagtttcagttgagaaggagacaattcccttggccccagaggagtccaggagcctttagggccaccaaagcccatctttattttgggtgtaccttgaaggctctgctgttgaccttacctgtacactcatggtacctctggtccctaagatgttgcagaaggcaaatctggccctttgccaggctcaaagccagcctgctagatcctcctctataactgcagatccccgggattgctctgactcctgaataagcatgggcgggaaccagtgcccctgtgggactccccatggtgcccagtctgtgcccagaaaataaagtggcaggcagtgacccctaaatggt

SEQ ID NO: 230027 - DNA, 453 bp, Homo sapiens
aatgttttcagaattacacacgtaggctagaatgacaattagtgaaatttattgcagaaataaagacaacacaatcaaatttttaaattgactctagtatttattaatatcctccatgtagaaaagataacaacaaaactggaaacataatactttaaaattacaaatactcagccgggcacggtggctcatgcctgtaatcccagcagtttgggaggccaaggcgggcagatcatgaggtcaggagatcgagaccatcctggccaacatggtgaaaccctgtctctactaaaaatacaaaaaattagctaggcatggtggcatgtgcctgtagttccagctactcaggaggctgaggcaggagaatccttgaacctgggaggcggaggttgcagtgagccaagattgtgccattgcactccagcctggcaacagagcgagactccatcttta

SEQ ID NO: 230028 - DNA, 792 bp, Homo sapiens
ggaaacagtaatgtctaagggctaggaagaagacgggaggaaatagggatgggggtagggtagtaaaaaagcccagagaagtatgtgcaagaaactaacagtatgtggttgtgggcgtagtttttcaaaggaagaagtagtcaaatgctgtaacaaggacaactcatcttgaaacacttacgcagtggtgtgtggagctggcttggaccagcttttgctagccagttattgtgtagtagctcttcccagcccatgttcagtgataccatgttggtaacttgaaactggttaccatggaaatagtcatgccatggaagtctgcaaatgatacaaaacttattttgagctgatgattatatggtgatgtggtcgtaaatatttaacactcattagaagacattgactaagtaggatgttgaaggttgctgaaaccagaggtgtttggagaaaagtaattttcagaaggttggttatgaaaagaaaatggggtgcagggagtgggggaacaatttattcagaactgttgttcatttcttgagaactgggttcactcttgatgtagttctctgcagctttctccaccctgggtcctcctgtgaattgccatgagtcttttgtgctatagctctctttggtgctgtaaagggggaaagcagcaagggcttatctgcagaaaatgcatcagttgactgacactagttgaagaacaaacctttaggcggtttcttttccgggcatgtgtaccgtctgccgaagagagcaagtgagaagtgaaggggtagttaaacaatg

SEQ ID NO: 230029 - DNA, 734 bp, Homo sapiens
ggaaacagtaatgtctaagggctaggaagaagacgggaggaaatagggatgggggtagggtagtaaaaaagcccagagaagtatgtgcaagaaactaacagtatgtggttgtgggcgtagtttttcaaaggaagaagtagtcaaatgctgtaacaaggacaactcatcttgaaacacttacgcagtggtgtgtggagctggcttggaccagcttttgctagccagttattgtgtagtagctcttcccagcccatgttcagtgataccatgttggtaacttgaaactggttaccatggaaatagtcatgccatggaagtctgcaaatgatacaaaacttattttgagctgatgattatatggtgatgtggtcgtaaatatttaacactcattagaagacattgactaagtaggatgttgaaggttgctgaaaccagaggtgtttggagaaaagtaattttcagaaggttggttatgcttgagaactgggttcactcttgatgtagttctctgcagctttctccaccctgggtcctcctgtgaattgccatgagtcttttgtgctatagctctctttggtgctgtaaagggggaaagcagcaagggcttatctgcagaaaatgcatcagttgactgacactagttgaagaacaaacctttaggcggtttcttttccgggcatgtgtaccgtctgccgaagagagcaagtgagaagtgaaggggtagttaaacaatg

SEQ ID NO: 230030 - DNA, 508 bp, Homo sapiens
agaacctgcaaagatgagctagaacaatacacaggacagactggaacccttgtgggttttcagccatctccaagcctccacattcactgacggaggtgaaatatagaaaatgccaatgcctttcatcctggggctaaacatggagctggcaaaggggtcagagaaggtgaaggagaaaattcagcaggagccatggtggctgtgctcatgattgctgaaccctgccaataaagtgagccagcagagaagcaaaactgtaccgcaacagtgtcttccagacataagaagaattcgactgctgcatcatttccaccttctaaatctcatacaggatgtctcttttgcactaaccctggtaataaaaggaaaggaattctggaaaatgcagttacaggctacttcaactgacataatataagcctaccactgtccagcccttgtcaacttgacatccatatatacctctattaattactcttaacttccaaataaagacagtgtcaaaatc

SEQ ID NO: 230031 - DNA, 390 bp, Homo sapiens
ggagaaggtgcattatatctttaacagaaatagaatgctggcatgtgaggtcaggtgatgcgttctgcttcaggcatgtggaatctgaggtaatgataaacatcctaatggagcagtccagaaggcagcaggagtctgaaaagaatttatggaaatgtttctgagaaggaaagaacctgagagataacctctctttcatgccctctcattttacagatgaagaaacatgtgacatgttaagtggcatgatcatgatcaagttgtatttatgagggagatcctatttcataacgcaaaggaattctagttttataaagtgaaaaagactgggaagaaagatctgaaagatgcctttgtagaatgaaacttgacactacagccctgaagccc

SEQ ID NO: 230032 - DNA, 702 bp, Homo sapiens
cctctacggtactggctgagctggaagtgccaaaaagcactcctggctgcttctggttccatctgatgatgatgtgacacacactgctgaaaaggcccaagcagggcaagtgggatggctgaaggagggaaggagggggttcagaacccactggcctggatgggagaactgggtggaggcttccccaagagggaagacagataaacaaaacaaaacaaaaactgggtaaagaggaatgaatcactcagccctgatgtttcaattctacactgcattcctggccagtcgcatttgttttaatgcaggcatggccacagctctcctagagaattatctcaaagaccagaagggacctggagaggcctatttcttaggtttttccagttggacaaggaaggagtggtttcactcagcttctagaaggagttggagcctaagtttatctgcctccgggagctgcttgctttgttttggctccgaagaggtatcagatagttttgacacctcaggaaacttgaaccaagctgtgaaaccaagacctccctgcgtgaaaatcaaggtggtctccttgtggcttcaccaggatgtttgtgtcaggctgtctcagcagggtggggaatgaccagccagggagcacagtgagccaagatcacaccactgcactccagcctgggcgacagagcaagactctgcctcaaaaaa

SEQ ID NO: 230033 - DNA, 288 bp, Homo sapiens
atttgcggctgtgtcgacgcgagaacagcacccattgttcacatgaatgtgttgatcagtactctgctgaactcaagaggcaacccctgcagttctccagagtcctctctctatgaaacccttattttctcctacactattgtgacctttggctgcctcagattaatgccttgagagaatttcctggactagagcagagaggggaaatcaggtgtagttcagcaaactccctgaattaaagagacagagctgagtatccagggagaccaaggcagctaaagctcacaa

SEQ ID NO: 230034 - DNA, 754 bp, Homo sapiens
tcaagtgatcctcccaactcagcctcccaagtagctgggattacaggtacatgccaccacgtccagctattttttgtatttttagttagagatggagttttaccatgttggccaggctggtctcgaactcctaacctcaagtgatctacctgcctcggcctcccaaagtgctgagattataggcgtaagccactgcgcccagccttattgccctgcttctgatttgcaattatcttttaagttgattcaggggtgtgaactgtttcttatttaatacatttgcttgaaaaatatgagccatcttttagtctccaaagacttttctttgtgaaggctggattttggagatagtttcagcttttttacaccattccttggttgccagtagttatgatactggctgcagtccagacatagggatgctcttagtattccttagagcatctccctgcaccctgccacctgccctggtgggcagggtgagcagccaggaaggcatagcctgagggcctgtatctagcccctgctttctcgcctgggtccttcctacccatgctgtctcccaaatcaagggattgaataggaagtgctgctcagaacatcccccagaatcagcctcccgaagagactcaccctcccctaccagaggttgggctgtggctggtgttaggggaacaggagtaggaggggagccagaggaggaggaggtgggcccttgcctaaggggtgcctgctggttggtgtgggggctgga

SEQ ID NO: 230035 - DNA, 670 bp, Homo sapiens
catttatacgtacttggttttgcaattagaagatgcagagaacaggtgatgcaattattttacataactgtgttcatgaactaagtgttccaaccttcctgcccagattgatatgcctagaaggcaccccatttggaagtaaacacaggctccatttaaggatgcacggaaggttggaacactttattcctgaacacatttatgtaaaattaattgcatcacctgttctctgcatcttctaattgcaaaaccaattaactttaaaatgctcagcacagtgtggccaagggaagggaaggcaaagaccaggctggctttgcaaactctgtgccatttgtagtggccacagtggccctaggaagtcccagccattcccatctgctggccgaggaggccctgtgggatgctgggagactctaggagatgagcaagaccctcagagtctggggctggaaacttcctagcacaagtgagctgagtggtcatgggccaggtgatggagtggacattccccagtggtggccagaatgacccaatatcaactgcccctccacccagcacccccattccctttaccctgtattttgttcccctctgccattttcactgcccgactggctgtgtagctatttgtttatcatgtttctcctcagtaaaatgttgactccac

SEQ ID NO: 230036 - DNA, 506 bp, Homo sapiens
  misc_feature (51)..(51): n is a, c, g, or t
  misc_feature (61)..(61): n is a, c, g, or t
acaacctcctatcccccacagtacgatatattagaataagaagaaaaaaanacaacgctgngagagtagacgtttgttccacttcgcatctgaattgacaaggaatggactcttcagctctgacagcaaatctctcttcagaagtctggaaaagcagaaagagaagaatgaagaaatgtccacaaaactgctcctatcctttacaccacataggaccaaactcttacctttcatcagttttcagtttgtacattaatgtatcctggtgaagttcctcaaccacttctgcaacattcaattttaatttatatttgcccacatcatttcatttgtgatttggacacatgcaggctactgaatataatggatacaaatctctcactgattcccttgagctatttcatagttctgctttcacaggcaggagacagtgaagaaataatgattcagttatttcttaaagatttcacaattctacattcaataaagaatatgtgaattcctgg

SEQ ID NO: 230037 - DNA, 440 bp, Homo sapiens
aataaataataaactttccactaatataagaaccacaaaagggtgacaaacactgtttcacaaatctctcttcagaagtctggaaaagcagaaagagaagaatgaagaaatgtccacaaaactgctcctatcctttacaccacataggaccaaactcttacctttcatcagttttcagtttgtacattaatgtatcctggtgaagttcctcaaccacttctgcaacattcaattttaatttatatttgcccacatcatttcatttgtgatttggacacatgcaggctactgaatataatggatacaaatctctcactgattcccttgagctatttcatagttctgctttcacaggcaggagacagtgaagaaataatgattcagttatttcttaaagatttcacaattctacattcaataaagaatatgtgaattcctgg

SEQ ID NO: 230038 - DNA, 809 bp, Homo sapiens
aataaataataaactttccactaatataagaaccacaaaagggtgacaaacactgtttcacaaatctctcttcagaagtctggaaaagcagaaagagaagaatgaagaaatgtccacaaaactgctcctatcctttacaccacataggaccaaactcttacctttcatcagttttcagtttgtacattaatgtatcctggtgaagttcctcaaccacttctgcaacattcaattttaatttatatttgcccacatcatttcatttgtgatttggacacatgcaggctactgaatataatggatacaaatctctcactgattcccttgagctatttcatagttctgctttcacaggcaggagacagtgaagaaataatgattcagttatttcttaaagatttcacaattctacattcaataaagaatatgtgaattcctggaagttatggtatttgtgaaatatttaacatcagttcccatggaaagcgtggacacatcaacaagccccagtctcttagaatttcattctgctagttcactgaattcccaaatgggatttgagcatcaccatgggagttgcaggtaatgttagcagaaaaggtataaaaatattctataataaagtttaactgctgactaaaatggcagctatgtttttcagtttggaagatcaataaagaggaggcttggtggatacaatcttgcttatctctctatctggattatgaatgtgaaaggatattactaaaatcaaaagcataaaaagcaatatgatgtgacaccttgaatttgtttacttactgaatcat

SEQ ID NO: 230039 - DNA, 577 bp, Homo sapiens
ttccgggaagaatgaagtacatatgcaacctccttttgttataggagtgttggccatgacccttatgacggatggggaaagacatcacatccttcctctcctacttgcagaaatatgaatactcaaggttaatgtcaaggacgtttgttccacttcgcatctgaattgacaaggaatggactcttcagctctgacagcaaatctctcttcagaagtctggaaaagcagaaagagaagaatgaagaaatgtccacaaaactgctcctatcctttacaccacataggaccaaactcttacctttcatcagttttcagtttgtacattaatgtatcctggtgaagttcctcaaccacttctgcaacattcaattttaatttatatttgcccacatcatttcatttgtgatttggacacatgcaggctactgaatataatggatacaaatctctcactgattcccttgagctatttcatagttctgctttcacaggcaggagacagtgaagaaataatgattcagttatttcttaaagatttcacaattctacattcaataaagaatatgtgaattcctgg

SEQ ID NO: 230040 - DNA, 1145 bp, Homo sapiens
agaagaataaaaagatgtatttttaaaaatttaaatacaaggatattagcaaaagtcatctaactttaaaataataatttagatgccaatcacatggatgtaaactaataaagtaaataaacaaattactgagaagtggagattcttccatccaatcctctttcctcctttcttctttccttccacaggatttacttaatttgtctcctcagcaattcctcacctagattgttaacattatttttcattctctcttctttctaccatatttaatacattaaatttgatcttagttcaatgtctccaggcttttttttgcatacgcacatctgattgtgtcactcatctagttgtgagctgcagatggcttctcaaaaccttttgttataggagtgttggccatgacccttatgacggatggggaaagacatcacatccttcctctccttcagcatcactgaaatttatatatctttttatttttcctagcaaatctcctttcatcagttttcagtttgtacattaatgtatcctggtgaagttcctcaaccacttctgcaacattcaattttaatttatatttgcccacatcatttcatttgtgatttggacacatgcaggctactgaatataatggatacaaatctctcactgattcccttgagctatttcatagttctgctttcacaggcaggagacagtgaagaaataatgattcagttatttcttaaagatttcacaattctacattcaataaagaatatgtgaattcctggaagttatggtatttgtgaaatatttaacatcagttcccatggaaagcgtggacacatcaacaagccccagtctcttagaatttcattctgctagttcactgaattcccaaatgggatttgagcatcaccatgggagttgcaggtaatgttagcagaaaaggtataaaaatattctataataaagtttaactgctgactaaaatggcagctatgtttttcagtttggaagatcaataaagaggaggcttggtggatacaatcttgcttatctctctatctggattatgaatgtgaaaggatattactaaaatcaaaagcataaaaagcaatatgatgtgacaccttgaatttgtttacttactgaatcat

SEQ ID NO: 230041 - DNA, 251 bp, Homo sapiens
ccgatcacatttctacacaactgtccactccattgaatctaagcataaagatggatagttttccctggttctttgagccttctttcagaaggcttctctgtcacgtaaaagcatgattaaatatttgtcatgcttttttctcgttagcctaccttttgttataggagtgttggccatgacccttatgacggatggggaaagacatcacatccttcctctcctacttgcagaaatatgaatactcaaggtta

SEQ ID NO: 230042 - DNA, 206 bp, Homo sapiens
gcccataatgtcctcccactatgacgttcccaaagaatctcccaaatgtggtcccatccatccctttgttgtatttacattttagtatattctgacctggttcattaatttaattgaaaatttttaactactgtgtgttacatatcgcgttcccttttctccatttttatttgtcctactttactttggacgttccttaccttgcc

SEQ ID NO: 230043 - DNA, 602 bp, Homo sapiens
atagggaccctttccttttaaataggttgtacattactgactaaagctaagatttatattcagacattatgctttctcaaccctttttacatagtagccatacaactccttaaaaagaaaatcattctgttacctttgactatgactcaatatttaagaaatgtatttactcataacatatttttgttgaggtagatattcatataaatcaaattaaggaacattgaattgtgtatgaaatgtgaacttttttttaaaggactcctgatgcttagtttatctttagagataatatagtcttaattgtactacacataaacatcctgtagtttaagtaggaattttcaggcatcagatttctagaaggaaggtaattctcaatagaaaggtcattttaaaagttcaaactttgatttacagttttttctgttgaccgtattaagtatgaaattatgggtaataaatatatttaattcattttcaactgcatattgagttataaaatattggccacatgttttctcctcttaacacttttccacaaacatgcactcattaatcaaagacggtgcactcctgctgagggcagagaggttcatcaa

SEQ ID NO: 230044 - DNA, 434 bp, Homo sapiens
tttgattttaataccatgtctcaccctcatcaccatgtaaaacccccagtttattcactgtttgaagatctgttgatgaatatttgatgttagtaaataaacagcttagggggacaaaaaaaaaacagccctgcctacctattgtaggttacttcagctgtaggctttgttttatacagtttgactacactggtagcagtttgacattgacggtccacaaaagcctgttcaaacagaatcccagtcatttaaaaaaattcttctttagtaacatattctttaaaaatacaaaatacaggaggagggtgagggttgagagataacctatcgggtacaatgttcactatttggttaatgggcacgctagaagcccagtccccatcagtccgtggtgagacccatgtaacaaatgtgcacatgtacccccaaatcaa

SEQ ID NO: 230045 - DNA, 254 bp, Homo sapiens
tcaaagccaagactcccattccttagccctagctcaggtctccatctcttaaatccgagtgacctctacaaactctccctgagaaggtgtaccagaacccttttggaaagcgagggacagtgtcactgtctttgggttgacacctgctctgagtaactcacggaaaacaagttccagctgggaagcccttggacgctccacacctccctacccgcagcccgtcctgtggcgcccgggactccagagtgcgttta

SEQ ID NO: 230046 - DNA, 97 bp, Homo sapiens
tggaaaatcctttatgtacaactaccgactcatgagacataagcgagttcacactggagaaaggccttatgagtgcaacacatgtgggaaattcttt

SEQ ID NO: 230047 - DNA, 429 bp, Homo sapiens
aggatgttgtagccgttcatcaaaaaaatcttgattctctagagaatgtgggtcacaaactggacaaaaatagaaatctaagttccttggacaaagccagagtcaagcagccaaaacactaatgtaaaaaacagtctcactaactaaagtaagcagcaggaaatagcatcatttggacctgattccaggccaaccacaggtcctgaggcctagctcagtcagaaaatatccctgccatgttctctcacagctgaagttttaaggcagcagccagagaaacaaccatctaaccaagttcgatgtcaagagataaaattttgaaattaagattaacagtccagcaaacacaaaaagtaaaaacacaaaaagaacaaacattttacttcaggattccaaaagcactgagaaagggataatgtgaaaaatgag

SEQ ID NO: 230048 - DNA, 333 bp, Homo sapiens
ggcccagggtgctagcaggggaaaggaagagagggatactgtcaggtaactgagttgcctgttgctagagtgtgtaggtgttcactcactaaaaaggggcttctctccacctccatcttttatgtttaaggaattcaaccgcaagagctcttcagaaatggatgccaagtgtgtctcctcttcctgaggttgagggagagctacctgggactgcttgttgagagcccaggccagtaaaggctttattcacagtcaccaaggcattgcctgacagtctgcatatccatcagggtgcaaaaacaaaccaggaggaaaatctctctagagccaggg

SEQ ID NO: 230049 - DNA, 304 bp, Homo sapiens
aatctcagcaggtgtaaatcttctttcccaaagagtttaagtttttggatctcaagcagtgagacaggccggaaacttgtcctagggaatcaactgctctctggtggttcaaatatattagcataaagaaatcctctgtttccctatcttgtacttcctgtcccaactcaatcacaaaatgagagaaaaattgtagtagagcaggagacttttcaaatctccgatagattcctttcttagctaaaccattccatttatacatcttggcagtagtcattagcagtgagaaagctaaagagacaac

SEQ ID NO: 230050 - DNA, 245 bp, Homo sapiens
accactgggcggaggggtgggacacctgaaatgtgttcagttttctgtgcttctggtgaaagggcctgtgcaacccacagcctggtcccacactgtccaacacacctggtgctctgtccctcctccaggcctctgcacagggtgcacactctgcctctccccattgattgtgaatttcacattcttcaccaatcagcccaaactgatacccactgtttatacctaaactaaaaccattcttggta

SEQ ID NO: 230051 - DNA, 438 bp, Homo sapiens
tattggatttgtgtgactaagttaaagtagacttacgaatgtacagtttagagagaaaaaaatgcaaatttacattatattaaaacacaccaaaaaacagtgtttttgcttataacaaagcacttaaaaaaaaccctgtattcttgtcattagtattacacagtacttcattcatgaatactaaaatatctttatacataccatgatacagtaatagacagtagcacacacttttgcatctatttagtgacattaaaaataaattattcaaattaatgtactgtgggctacactgctgatttgaagtgatgacatattttttaatcaaactttattttactctttcactattcatgtcctaaaacagacttcactgtttcttttacactgtcttcaactataacttaaatgtgataataatatacttattgtgagtgg

SEQ ID NO: 230052 - DNA, 537 bp, Homo sapiens
ggaatcccagtgattcaagatgcattggagagaaatacagactgaagataattggttacccatctagaaaggagatatatgaagtctgggtaagacctgcagtaatttcccttaagttactgatcgtggagcctctccaggactacaggctcttcctcagcggctgccaagctcctcttagggaagccggggaacttctgaatgcccaagtataccctgctggaggcacaggaatcctcttggaagctttgtctggacatgctttaataccgtccatttctactgttgccataccaagccgctactggtcaccactgtaaatctttctgctgttttttataaccacaaagtatagcacaatttctgtctgctttcatgcacctaaaactattgtggtttttgcctttcccggtctcattagctaaaacaaagagttgataaaggcacaggccctttctcaagaaacaaaatgttgtctgtcttctttctgcagtgaaacagaatgcaaagtccagaaataaacgtgtaattaaataa

SEQ ID NO: 230053 - DNA, 499 bp, Homo sapiens
taagagcaccctggttttctctgggggaatcccatccctcccatgcatgcagtcttggtgggagcataattccaggtacctgctgccaacaagcatcaaggagcggtgccattcctctttatggcttttatcatagccaaggcatggtgaggctggccagagctgttctgggctgcttgcaactaagaaatcctaactgaagtacacaagcaacaaagccaaaactcaaaccccagcccgtctaatgcccagctcatacttttctactccaccatgctgctcccggggtttctgcactcagaatatgtgtacatggagattgttcacaaagggccaatatgagagcgtttctacaaaccattcggtgcttattccagggtaagtgaaagatctgtcaggcaattaaataaaatccagtttgttgaggtataacttgcgtacacacaatttatcctgtttagccaaccaattctatgatttttaacacgaaactgccatc

SEQ ID NO: 230054 - DNA, 447 bp, Homo sapiens
tgcgcccactaccaatgccacagtttctcactggattattggggttgcacccgactgcctgcttcagctcttccccgtcctcaggacagcactgggatgatgagtgccacgagccaggtcacttcacacccctgccctgcaccgcacagtggggagtggaggctgtggccctagatgcctgcacccgcctgccacgcttttggccccttccccctccactggcccccaacccccagccctgacgccatgcctgtagttgcgcccccaacacccacgtctcttccctgggtcctcttgttttccttggcgcgtgaccgtgtctcacactcaattatgtctcttaccacccactacagagagtgggaccgttgtctggttgggttcctgttgtttctcccacacccaggactgtgcctaatgcacaggaataaaaaatattaaatgaat

SEQ ID NO: 230055 - DNA, 238 bp, Homo sapiens
ttttacataaatatgtgcaatatcatttacttacaaaaatcatatgtaatatctgacacataaattgattctaaacatgattaaactaggtcatttctttccattagaatttattatttatttttatttttaattattttttgagacatggtcttgctctgttgcccagcctggggtgcagtggtgtgatcttggctcactgcagcttccacctcctgggttcaagctattctcccat

SEQ ID NO: 230056 - DNA, 221 bp, Homo sapiens
ccccacctgcgggcatatccccaagagaattgagagcagggtctgtaagagacatatacacgcccgtgttcacagcagcgttactcccaatagccaaaacgtagacgtcacctaagggtcggtctgtggggagtgaatacacacaatagggcccatccatacaggctaggaaggtggcaagagctgaaaaccttgcaaactgttaacaaaaaaagagttga

SEQ ID NO: 230057 - DNA, 268 bp, Homo sapiens
cctatttttattttttatttttgcgtatatgtgatggagtctttgccatgttgcccaggctgttctcgaactcctagactcaagcaatcctcctgcctcagcctcccgagtagctgggattacaggaagctcaattatttttcttctttaaaaccttttacttgacgtattcattgtttcatattttaaatttaaaatcccacaaaagaagccatgtggctccgctgcagcagccgaatcatggcacttgtttgggggcttcctgggg

SEQ ID NO: 230058 - DNA, 483 bp, Homo sapiens
aaggctctaaaggttggttctagagctgttcttagtttctagatatgatgtagagtagaaccctgaattcagcatccagtcggttttagcagtaccctcaggtagtctccgaagagagatggtttgataatgggtctcctagattttctaattgcatccatggattgtgtaacgaaaaccttaagtttgcctgtgtcatgcagagttctgagtggggtctagtgcctaagtgacaggactgtggaatttaattcacaagaatactattttgctttgctagatagcttagtgatttggccatttagagactgtcagtaataccaaatgatttaggagggcaaattacatttcagaatgagttttgtgaaattttcttgagatttgcatgttttctgcctgtcttgaaaatatctgtttattaattatatttcatacacccccacttttaaaaccagttcagttatctctcactgtggccaaaaa

SEQ ID NO: 230059 - DNA, 633 bp, Homo sapiens
ggtatatcaatgaatgctattcttcaggagtctaaaggaagtataatataactctactatatggcagaaagttttatggtctataaaaggatgtgaatgccctggccctgtggctcacacctatctataatccaagcactttgggaggccaaggtggaaggatcgcttgaggccaggagttcaggaccagcctgaccaacgtggtagtctaaaaatacaaaaaaagaattagccagctgtggtggcgcacacttgtaattttagctactcagaagactgaggtgggaggatcgcttgagtccaggaggttgaggctgcaatgagctctgatcatgccactacactccagcctgggtgacagagtaagaatctgtctctaaaaaataaacaaaaggaccggaaaagtcgaggggtgcggtggctcacgcctgtaatcccagcactttgggaggccgaggtggatggatcacctgaggtcaggagtttgagaccagcctgaccaacctggagaaaccccatctctactaaaaatacaaaattagccaagtgtggtagtgtgggcctatagtcccagctacttaggaggctgaggcaggagaatcgcttgaacccaggaggcagaggctgcagtga

SEQ ID NO: 230060 - DNA, 653 bp, Homo sapiens
tgtaagacatacttttcatctgctgctgattgtgaggcctccccagccacatggaactgcgagctcagtccacatggaactgcgattccatttttctttataaattacccagtctcaggtatatgtttatcggcagcatgaaagcagactaataccatagtcatttttattgactattttcacgttatttttaattattatttaccatttaatagtatgtctttatttttataaaggacatttctgacaaatagaacaatgtagtgatcaaattattctttctattggtatgcttttgctgcttatgtcaaataatatgtattggagattctatacagaaagattatatacaatagaatacctcacataatcgtgaaaatatatggaaatatatattactttattataactccctgaacttttatgaatattaaagggtcccataatgaaatcttgtatcttttgtgaaatcactataaaaattatattatattggtcagtaaatctttatatattggctgatgtcatagaattccttaaagaatttagtgataggaaaatagtttggctcctaatgagtcagtaagctttctttcatcagatattgatttctaataatttcattttacttcaatgcaaaaaatctcagggtt

SEQ ID NO: 230061 - DNA, 374 bp, Homo sapiens
gagtgatttgtggacacggagtctttcaggaggtatatctaagaagacatatttattttattcttaattttgttattcaaatactgcttttgagaaaattatgaagtagcaaaggaacttaggccagcatgaggtcatatgggcttggaaggaagtgtgggaggtgagaaaaaaagcacagaaaaaacaaggctatttaaaattttccttatcatctacaataaataatatgacttattttctgagggtgaaagcctaaaattcattttcataaactatttcccagaatttaaactactagaattcaccatgcagggttttgtatcttactgatcaatagtaaacatgcaaataatagcttgtgattcaatttt

SEQ ID NO: 230062 - DNA, 440 bp, Homo sapiens
cttttgatgggcatatgggttgttttcagaatttggctagtaaaattttctccaaattgatctagagattcaatgcattcgcaatcaaaatcccaacagctctttttttttttttccttcctaatttaagaaattgacaaaattatggctggtcgcagtgtctcacacccgtaatcccaacacttcaggaggccgagacgagaagattgattgagcccagcagttggagaccatctgggcaacatggtgaaacctcgtctctacaaaaaatacaaaaatcagctgggtgtgggggcaacgtgtctgtagtcccccagctactcaggaggctgaggtgggaggatcagttgagctcaggagctcaaggttgcagtgagctgtgatcatgccactgcacttcagcctgggtgacagagagaccctatctcaaaaaaaaacca

SEQ ID NO: 230063 - DNA, 455 bp, Homo sapiens
tgtttctaaggggcttgtgaagttaaccaaaattaaggtgaatggtacagctgtatcaattgattaattaattgataccaagaacaaacatccctggagcactctagatgtaattcttgtctcccttttcctattccaaatatacttagctatagggtgttgttttgttgtcttgtcttggaaatttgttgccttttaaaatctttaagcacagaaatgctgccagtaacaacaacaacagagagactgagagtgccctgtgttgtcagggcagccatttggaaacctgttccccaaactatgctgattaatgccctctcctttcccccatccttccaggaaagactgcccactctttgcactgaaactcctgacactccttttttaaaaggataatgcgacattggttgacgtgttatttcaaatgcataatgttaataaatctgttcacgcat

SEQ ID NO: 230064 - DNA, 393 bp, Homo sapiens
aactggcaagcctgaattaagttttcaaaaagttaaatctatgggagattttttggcaagcagtgcccaaatcccttggaataaaagattcatttttgaccactggatctactattatgttaatgcaatcaatacagtttgtactgaccagagcaggcgtttgagattgagtgaccttgcaatcatttccaaaacatgtacagggcactcctctcagccttcttaatggcttttcaactgaaaaagattcactgaagctggttcatgggagttcacttggtctcgacttggagtttaacacaactggtaccctcctggggatgaggaattaattctaatatgtaagaagactagataacaatagatttcctatgaataaacataaaaatccca

SEQ ID NO: 230065 - DNA, 367 bp, Homo sapiens
ggctgcccggtctaccccacacactgcctctgccccactgcccggcccaggctgctgagggccccctccttcccaccctgctgccaccttctccacctctccccacccacactagatgattctttcctctgctgtcatagagcctgcggctgagtgctctgatacagatcctggtgatttgtttatcatccgacttcttcccctcctatatcaaggagggaactttcctctctctgatgcctccgtctctaagcctggagcatccccagcacataactggcttacagatgttcgaaagagtaaatgaatcatacctatttcctaacttctttttcacattggggaggcctcgtctgttgcctgcagg

SEQ ID NO: 230066 - DNA, 785 bp, Homo sapiens
ccccagcacataactggcttacagatgttcgaaagagtaaatgaatcatacctatttcctaacttctttttcacataaaagctcagtttcctgagcaggctttaggtgccgttggctgctggggaggtggtggggaggcctcgtctgttgcctgcaggagcttccagtctcctttgcaagttttgccctcagtgactcagggctttgaaatttgcttctctctcatcccgaataagccacggcaggatgtaagaggaagagaaactaactaaagggttaactgtggaatgtctctgattggtgaaaaaaagacacttttctggagttgcagtgttagtccactcatatggggtgcaggtccctggtaacaagtggttgagccaccttcctgggccagttgagggtcagaacaggagacatcagattcaggcagaagcactccgcccatcagaggagtgggcagcctgccctcctgactcatgattcactcatgcggatggagtgtaacttcctccaggcaggcgcaggttcagggcacagcgctccttctcagaaacgaagaaactcctgttctgcctttgactccctgtgttttttaagttgcagggaaatttggtttccaaatggtcctgcctcactaatttaccagctttctatcactctgcccattttgtatttggttctccatcttactacagaacttggcagaacccaagaaggaaagggtgccagctgccctggagaacccagggacgtgcctcaatgccaggagaggggcagggggc

SEQ ID NO: 230067 - DNA, 994 bp, Homo sapiens
ggtccctggtaacaagtggttgagccaccttcctgggccagttgagggtcagaacaggagacatcagattcaggcagaagcactccgcccatcagaggagtgggcagcctgccctcctgactcatgattcactcatgcggatggagtgtaacttcctccaggcaggcgcaggttcagggcacagcgctccttctcagaaacgaagaaactcctgttctgcctttgactccctgtgttttttaagttgcagggaaatttggtttccaaatggtcctgcctcactaatttaccagctttctatcactctgcccattttgtatttggttctccatcttactacagaacttggcagaacccaagaaggaaagggtgccagctgccctggagaacccagggacgtgcctcaatgccaggagaggggcagggggcaagacccacccacagagggatgccctgtcttaggcagtctttgcctgcctggcagtccttggtccttaggacgtaagacacttggcttcactggctactggaggaattcattcctttttggcagtgtgaatcaaaggggctgggcagttacctttgggagggtcagcaagcgctcagaacgtgcccatgtgccaggctgcttgtggcttttgtccctcagctttctctgaatgctgtggatctgctgagctgtgggcttactctttggggttttctggtgatagctaagcctcctggggatgattcactacatgttcaaaacaccaaacgaggccaggtgcggtggcccacacctggaatcccagcactgcgggaggctgaagcaggcagattgcttgagcctaggagttcgagaccagcctggacaacaaagtgagaccttatctctacaaaaaaatcaaaaaattagctgggcatggtgctgtgcacctacagtcccagctactcggaaagctgaggtggaaagatcacctgagcctggagaggtcgaggctacggtgagcca

SEQ ID NO: 230068 - DNA, 175 bp, Homo sapiens
ggataatttccattggcctacatacaagtccactaatgctctctgcagccttgtccaattggctgatgagtctgacaaaaaaattttatatctctgacattgcattttttaacatttgtatttgactccattttatggtttccagctctgctgaaattccccttctgttcatgtg

SEQ ID NO: 230069 - DNA, 421 bp, Homo sapiens
gaatgcatggttatgcctcattgcatggttatgcctcagtggagtttggcattcggggtagatggttaacagagtcacttcacagaatcacttataactcaaggggggtgagcaacttgatgattgtatttgatgatttatatatttctctaaccccatatgataaccatggggtagcaaatgaacccctgccatgactgtataggctagtatgaatgcccccaggcacaagggcatacattcttgctcatgggtgttggagagccaaccagcagagggattcttctattagcactcctagggcttggaacacacacatgccagttaattcatcatctagtttccaagtgttcctgaccctccaggaaactggaaacttgtgtcattgttgggaacagtgaataaattgttttaaatatta

SEQ ID NO: 230070 - DNA, 386 bp, Homo sapiens
agccactgtttccaactgagacccaataatttaagtagaagggctgggactggggcctgaggctgctgctccctgcctaaggctctgagactgcttgatcacagggtcaagatctttgatgaagccgctttctcaagctgtgggtgggcttttcctggtaggaaatttgcctgagacctggcaaagatgggaccttttaaatagtgaagggaaatgagcaatccttccaaagtcaagttcctcaacgaagcccttctaaacactgtctctcctccctgcacacatgcctatgtgcacacaatacacatgcttgttcatgctttatccctcttggttaggggtctatccccatcaagccattaaagttgttctggtggaatctctga

SEQ ID NO: 230071 - DNA, 352 bp, Homo sapiens
agctgttcacaggtggttctcacattccctaaactcgtttatttaaagatgttgccatttttggctgggcacagtggctcacacctgtaatcccagcactttgggaggccgaggtgggcagctcgcttgagtcaggagtttgagaccagcctggccaatatggtgaaaccctgtctctactaaaaaatacaaaaattagctgggcatggtggcatgtgcctgtaatcccagctactcgggaggctgaggcaggagaattgcttgaacccaggaagcagaggctgcagtgagccaagatcataccactgcactccagcctaggtgacagagcgagactccatctgacaaaaaa

SEQ ID NO: 230072 - DNA, 512 bp, Homo sapiens
  misc_feature (11)..(11): n is a, c, g, or t
  misc_feature (31)..(31): n is a, c, g, or t
  misc_feature (35)..(35): n is a, c, g, or t
  misc_feature (50)..(50): n is a, c, g, or t
  misc_feature (66)..(66): n is a, c, g, or t
  misc_feature (89)..(89): n is a, c, g, or t
  misc_feature (92)..(92): n is a, c, g, or t
  misc_feature (96)..(97): n is a, c, g, or t
  misc_feature (113)..(113): n is a, c, g, or t
  misc_feature (115)..(115): n is a, c, g, or t
tacaaaggganttcaaaagatgtgaacctcngganctctggatcatcatnagagactgagctgaancccattgataagtctccagaccnaancccnntcatgactgatactcnanttcctcgcaactctcaagatatcacacagttgacaacccatggacagcaatatccatcaaaggcgaaattcatacagaaggatagatagtttacaaagggagaaacctgtgtggctagttctagtttctaagacagctgcaacaagacctccagtcctccgtgctattcttgaaacatggcattgagactcctccctactgagaggtggggtctgtgtttcctctcctggaaaccgagcatgcctgtggccacagcagaagtgataccataagacctctgggctgctgggccatagaaacccagcttctgcctggtcttctcagggtgctagctctcggaacctagctccagagagggcacacctgggtgtgctagttccaacagccagatgtgagt

SEQ ID NO: 230073 - DNA, 595 bp, Homo sapiens
agctttaggctggcattctcattgtgccgttttacagatgaagaaactgaggtccagtgtcaaggacagagaccttgcccaaggcattctcctctacaccacagctgcccagacagcgaaggggaggccagatggaccccagccacctccagcactcagttctggggaaagatgtgcttggcaggttgggtgcaaaacaaagcacttcatccttcaaacccaactcgtttccaagctcggccattatgagagatattctggggcctctcagccacacctgcttaggagctgcctatccctctgaacttttcaaaggtatatgatacaggtcgggcacgaaatgccagcactttgggaggccgaagcgggcggatcatctgaggtcaggagttcaagaccagtctggccaacgtggcaaaaccctgtctctactaaaaatacaaaaattagccgggcgtggtgacacacgcctgtagtcccagctacccaggaggctgaggcaggaaaatcccttgaacccgggaagcggaggttgtagtgagccgagatcacacctctgcacttccacctgggagacagagagagaccccatctc

SEQ ID NO: 230074 - DNA, 507 bp, Homo sapiens
aatgttctatgtcttgatctaggtggtgcttacacaggtatctacatatgtaaaaattcaatctacatatttaagatttctgtacattttaagattaaaaagtaaggcaaggaattatttgttttacatgtatatatatcctcatacaattccaaaaatgatttgaacctttttacaaagatatgcacaattaccagattgtaaaataaataagggagaaaactggaggaaagaaaaataaagacaggaaataaaaataagccaaagttaatgctattactgcacccaagcaccgcccccccaacccccgccaaatacatgacattaagtgtcacttgttacttgtggtgggctacaattctggctctgagtctatgaaaagagggagatgccgggcgcggtggctcacacctgtaatcccagcactttgggaggccgaggtgggtggatcacaaggtcaggagatcgagaccatcctggctaacacagtgaaaccccgtctctact

SEQ ID NO: 230075 - DNA, 449 bp, Homo sapiens
atataggatctctgcgtatgtagtcaagttaagatgtggtcatgaaggattagggtaaattctaatccagtgactggtgtccctataagaagagggaaacttcgacaccaatatactcagaggaaaatggctatgtaaagacagaggctgagattagatttatgctgccacaacctgaagaagagcaaggattgatggtaactcccagaggctagaagaggcaagaaagaatattttgatagagcttttggaggcaatatggacttgccatactcattgattttgaacttttattctccaagaactttgagatgataaaattctgttatttttagctgcacagtttgtggtaatttgttatggcagccttagaaagtagtacatagaggatgttacccagaaaaaacataaatgaacccttgatatacaaaacatggatgtattttaaa

SEQ ID NO: 230076 - DNA, 368 bp, Homo sapiens
gatgataacatggtgcaattatatctccccttcagttcttgggaggggtgacattagtaaagagatgaaggtaagcctccagcagccgagtatgcactgttctcgccacccttcccaaaaagctccctgttatttacaggatttcaactatgcagcatgttattttgaattaagggttatggattcttgctttcagttgtctgggtattactttaaatcctctcatttggaataaacatgtcaagattactttaaaatatatcattcatcaaatcaagaacagaaatagtctttgtaaaaataataatgtttctatacttattacaatattatgattggttacttcaataaaaaaaatctcaaatgga

SEQ ID NO: 230077 - DNA, 390 bp, Homo sapiens
ttttccctcaagcatgtgataggtgccagcagggaggggaaagtggccaagctcttttgccattgtgccaggagtaagggcatggtgtccatgctcagcttcccacaaaaggggaagaacacatctaactggagaccaccaaccacaggcctggaaggaactttgagacagcaaagtgaggtgatgaagagtcagactcaagactcaggctgtctgggttgcctgctaattctgccatttcttaacaggatgccttgggcaagaccccaaagccattgttgtccctgtacaagaaggttaatattaatatctattgtgtagaattttctaaggactaaacgaagtaatgttaacactttaaaactttttttaaattcctggcacattata

SEQ ID NO: 230078 - DNA, 451 bp, Homo sapiens
caccctctccagaaagaagagccaaaattaggaataaaaatacctcaaatagaagagaacactagagtccaagggtgaattcacagcaaacaccagaggcatagaaagagaagaaaggaagcagccagcttaaccaagatcaaccaagagccccgagggactccctattacaggaaaacggtcctgaattccagcagaatggctgaagccaaccagtctcaagacctcaaccaaggaaccaaccaactctgcacaggaatgcggtttcttcatctccctgtcccaggaattcccccttgcttcttgaccaatcagcaatccccacattttagccctacctgttcagaccctttacaagctccatccccaaaccctggagggaggaggatttgaaggttcctctgtctcatttgactgccctacaattattaaactctttctctactgcaaa

SEQ ID NO: 230079 - DNA, 549 bp, Homo sapiens
ttggcagagatctaattagcaaaggcttcatcatagaacagcatactcagtcttcatggagcatactgaagcacatgtttgtaagcagtctgcttgtgacaatatcataatattggatacagtaaccagtctacttagaaaaagtgtgcccttcggttaactggaagataactggggcaaagaacaaaacttcactggcctgtgagccatctctgaaactgaaaccctttgataaatatagatcaaagaattcactagagcgtatttgatttctcttaaaagacaatccagagtagttgttgccatttggtatggcttttttaaaatcacttgtctacactattcaggtgaaagtcggcctgcattttcttaacctttggagtcttcattggcatcctttttaatttttttatgttcttcatgttttataaccttttttttaactatatatgcaacttgagactttaaagtatttttaaaaattgatcattgtgtaaaacattatagtgcttctctttttaaaaattgccttatgatttattattttcc

SEQ ID NO: 230080 - DNA, 482 bp, Homo sapiens
  misc_feature (32)..(32): n is a, c, g, or t
  misc_feature (51)..(51): n is a, c, g, or t
  misc_feature (56)..(56): n is a, c, g, or t
  misc_feature (92)..(92): n is a, c, g, or t
  misc_feature (157)..(157): n is a, c, g, or t
agaagaagatgatgatgatgaataagtggttntagcgcagttttttttttnttgtntataaagcatttaacccccccctgtacacaattcantccttttaaagaaaaaaattgaaatgtaaggctgtgtaagatttgtttttaaactgtacagtgtntttttttgtatagttaacacactaccgaatgtgtctttagatagccctgtcctggtggtattttcaatagccactaaccttgcctggtacagtatgggggttgtaaattggcatggaaatttaaagcaggttcttgttggtgcacagcacaaattagttatatatggggatggtagttttttcatcttcagttgtctctgatgcagcttatacgaaataattgttgttctgttaactgaataccactctgtaattgcaaaaaaaaaaagttgcagctgttttgttgacattctgaatgcttctaagtaaatacaatttttttatt

SEQ ID NO: 230081 - DNA, 469 bp, Homo sapiens
aagactcagcattttgttgcaagacagctacctcagggaagaccattagagtttcctagaacaaagcaagcttaacctcctcaaatgggggctacttttgctggcaataaaagactcagcagaatttaggggcttggtgccctcagcttcatcaggatctgcccatatatcctctttccaattttcaggatccattccttcccagtaagtgccctcactttaacagcagttaacctatgaagttgagaattcaatttgcattgtaattcagtcacttgtgaaaagaaactctgcgtttggttttcagaaatctcatctctgtgattattagacatgagagtttttcgaatacagacatagaaacctctaggtcatttatgcagtgcttggactggggatttaaattcctgagctcatccttttctttcaccacattgtccagtgcaattgggaataaacagtcaatctc

SEQ ID NO: 230082 - DNA, 984 bp, Homo sapiens
ccggggcacctgtctaaaaacaccccgcctccgaacgcgcgctcttgcggaattctcccgaaccgcatagcaaccgggggcagagtgcgagcccccagcggtgtgctgggatggaaaagcaggagccgctgaggatggactacggggcgtgttcccgaaaagccgggaagagatgtggcggggctgccgcgggcgtctctaaggccggcacgggtggcgtcttgactccctgcccctccagccgcggacctcggacggggggaagggggctcctccaagcggggagacggtcgccggccgagcagcagggctcctggccggcggagggtgctatgctctgcgggaccgccgggaagtcccagacaaggatctatgaaagataaaatgtggtgtgaggacacggcccagccccaccgtcgtcttccagccccaccatcgtcttccagccccaccgtcgtcttccagtcccaccgtcgtcttctagccccaccatcgtcgtcttggactctctgggtggcaccacgctgtgggtgctgctctcctctgtgtcccaaacgagtttgtgcctcactttgtcgggttttggctgtgacttggagcctcaccaagctcccttttcctctgtctcccattctcctctccaggccagggtggcttccccagccctcctccccgggtcctgcctgtgccgagccttcctcccaggagggaggtgatactgacttgagatcttatgggtgttttgtttgtggctgggcctggccgaccctctctccacggccttagatcacactctggatggataggacagtcgtcctcaatactgagcctctttggagcatacccactgatggtggttcacaagctacccacgcccacaggctgacccagatctccgtgaaattaaaaaatactgtgaaaggaaaaaagagccaatgtcatgtggataatgaagtgtcagccactgaaaaatctcaaaataat

SEQ ID NO: 230083 - DNA, 743 bp, Homo sapiens
tgggcagcaaagcaaatcatcgggaataacccgggagcctggcagggaaaccgctgcactatggagaggacgcttccagatacagaggacaaatcaagtgaagggacggaacaggtcacacccagagcggcacagaggtgtgtgagctgttcccacggtagtcagagcctctgttccaactgtcctcccgctgggctctctccggtccccagtgcatgggctggagtgtggcccctggcagagccctggaggccggctctgcttcctgcccccttccagcctggagcagcccgagggcgcagcattcctggggcaggcctgagccctgtggtgggctgagttgagtccccagaaaggtagattgaagcccaaactctctgtatgtttgaacgtgaccttatttggaaaaagagtctttgcagatgtgttcaggttcagatgaggtcatcctggattagggtgagtcctaaatccaatgctgtgaccttataattgggggatgcacagggagaggccgcatgaagatgcaggccaagactggggcactgctgctccaagccaaggagcaccaaggactgaagacgcccgcggggcgctgggcaaggtgcagagggattcttcctgggggcttcagaggagggtggtcctgcccacacctcacttttggacttctactctccggaactttgaaagaacacatttctgtggttttcagccacctggtttgtgggaatttgttatgg

SEQ ID NO: 230084 - DNA, 785 bp, Homo sapiens
cgctgggctctctccggtccccagtgcatgggctggagtgtggcccctggcagagccctggaggccggctctgcttcctgcccccttccagcctggagcagcccgagggcgcagcattcctggggcaggcctgagccctgtggtgggctgagttgagtccccagaaaggatctatgaaagataaaatgtggtgtgaggacacggcccagccccaccgtcgtcttccagccccaccatcgtcttccagccccaccgtcgtcttccagtcccaccgtcgtcttctagccccaccatcgtcgtcttggactctctgggtggcaccacgctgtgggtgctgctctcctctgtgtcccaaacgagtttgtgcctcactttgtcgggttttggctgtgacttggagcctcaccaagctcccttttcctctgtctcccattctcctctccaggccagggtggcttccccagccctcctccccgggtcctgcctgtgccgagccttcctcccaggagggaggtgatactgacttgagatcttatgggtgttttgtttgtggctgggcctggccgaccctctctccacggccttagatcacactctggatggataggacagtcgtcctcaatactgagcctctttggagcatacccactgatggtggttcacaagctacccacgcccacaggctgacccagatctccgtgaaattaaaaaatactgtgaaaggaaaaaagagccaatgtcatgtggataatgaagtgtcagccactgaaaaatctcaaaataat

SEQ ID NO: 230085 - DNA, 815 bp, Homo sapiens
tgctttagttgggtctgggggggtctctctggagagtggctataaatgctagcctttgtgctgggcagcaaagcaaatcatcgggaataacccgggagcctggcagggaaaccgctgcactatggagaggacgcttccagatacagaggacaaatcaagtgaagggacggaacaggtcacacccagagcggcacagaggatctatgaaagataaaatgtggtgtgaggacacggcccagccccaccgtcgtcttccagccccaccatcgtcttccagccccaccgtcgtcttccagtcccaccgtcgtcttctagccccaccatcgtcgtcttggactctctgggtggcaccacgctgtgggtgctgctctcctctgtgtcccaaacgagtttgtgcctcactttgtcgggttttggctgtgacttggagcctcaccaagctcccttttcctctgtctcccattctcctctccaggccagggtggcttccccagccctcctccccgggtcctgcctgtgccgagccttcctcccaggagggaggtgatactgacttgagatcttatgggtgttttgtttgtggctgggcctggccgaccctctctccacggccttagatcacactctggatggataggacagtcgtcctcaatactgagcctctttggagcatacccactgatggtggttcacaagctacccacgcccacaggctgacccagatctccgtgaaattaaaaaatactgtgaaaggaaaaaagagccaatgtcatgtggataatgaagtgtcagccactgaaaaatctcaaaataat

SEQ ID NO: 230086 - DNA, 576 bp, Homo sapiens
agagcatccagataagaactcagtccactcaacatcttcagctttgtgatattccaggcatattgtgctgaacttctgacttacagaactactgtacgcattgggcaaactagtttctgcggttacgctgtgcccacaaaggccttgtctccactcaagctaaaaaaaaaagaatccagaaagcctggaagatacttttccaagaatttattttctgtttagattctacccctgaaagtcagtcctgaaaggattataaaagcaagaaagaaacatggactctaagaattaacaacagtgtgggaagccacggaggagatttatgactaccctaaattggtttgtgtttggatggatgactatttcctgctctttattactagaaattggcagcaacatctcagattggataatggtactggtggaataattaccagaaagaaaaaaacatccccactaaagtgatgaaaacatgtacagattgtccaaccttttgcttttgtaccacttccccttccagatgtcagggttgtgatttatttctccctaagagtttaaaaataaaactctcatcat

SEQ ID NO: 230087 - DNA, 1254 bp, Homo sapiens
ggtcactcaagagggctaactggccaagaagtcctgctgtccaatactctgccttaccagcccttataaagagtgggggattatgctctgcctttaaggaaaactgacacccacgagttctcttacccacctttctctctgtgggtaagccctactttttcaagtcaatcatgaagcagacactcagaactaaagccagtgtttctagtcccttactttacattgtacattagccaaggcttccagcaggcgctgtacattagccagcaaacaggtagcatacacacaacatgcatgctgggcaaggctcagggcatctcttacaaatgtgttggaaaaatttcaaaaaccctacactgggcctcatctctaagtgagctgcactcagcagaagcatgcctgtgtgcataggcatgaggtgccatacagatgtgtcacagtggtttgatgcatcacatattccagaagcttccaaatacaggaaacctctccaagaacacatggtgagtggctggcttcccagccaaaaagtgcaagccagttctcacaagagctccaagaagtctgaagaatcagagagttggagaacctggacatgctgaggttccgtttcccattcaacacatagaaaaggcatctctaggccctctaaggccttcagaaattaaggaaactgccaaagactccactcccctactcctgtccctgccccactagtcagaacccagagaaataacagctgaagtcagaggacctagatgggagacccacgagaagcggctacaagcagtcagatcttggcaggattgactctcaggttcagttttaccaacgacaaggataagaccacctaccctctcagggttgtgtgaggaccaaatgagccagcaagtatgaaaagaactatgtgagctgatacgatggttattactccattcctctcctgcctgagtcctagcccagatcgctgtttgctattccatactggcagtggggtggcactcagctattattaatcccaggtaaacatcccacaaagcggcaagcagatagtgtcttggagaaaggtagctattttaaaactctacattctgcttagcagattgcacaatgtgccccctcagccccaggggctcctacccacacagccttgcagaagtggtgtacgtctgggactaacgctgccatggagaagctaggccagagtcccagccactcctagcccccatctggctgggagtgcatcgatcggct

SEQ ID NO: 230088 - DNA, 465 bp, Homo sapiens
gatcgatgccacccatgatatacaaagccaaccgtggactagtggtgtttatcgatgccacctaccctctcagggttgtgtgaggaccaaatgagccagcaagtatgaaaagaactatgtgagctgatacgatggttattactccattcctctcctgcctgagtcctagcccagatcgctgtttgctattccatactggcagtggggtggcactcagctattattaatcccaggtaaacatcccacaaagcggcaagcagatagtgtcttggagaaaggtagctattttaaaactctacattctgcttagcagattgcacaatgtgccccctcagccccaggggctcctacccacacagccttgcagaagtggtgtacgtctgggactaacgctgccatggagaagctaggccagagtcccagccactcctagcccccatctggctgggagtgcatcgatcggct

SEQ ID NO: 230089 - DNA, 269 bp, Homo sapiens
caccttgggcacatgttctcaggacctcttgagactatgcctcaggccagggtcactcattttggttttttcggctccaaataaacctctttaaaaaagtttatttgtctccaaataaacttctttaaatattttatagcgtttgactctctttgtcaataactcacaagaaagtaagataattttcaaagacttaacagacaaacaggaaggtgaactcagagatgtaatgataaacaaaatataacagcagcagcacagggcagggg

SEQ ID NO: 230090 - DNA, 413 bp, Homo sapiens
acaataaagacgataaacagattaacgggaaaccaatttattaacatgcaagtgtgtaggtgtcacacaaagtttgaaactcaaacaaagaccaggtggttgaagcttaaatagcctcttcatacgagagtgagaaatgggagatgtaggaaattttagaggaagggtaaatgatgtttaggggagattaatggacccaaagaacagacaatagcctgggaccaattctgtctgggctctgggtgtggtgtcaactccagtcttccttcctacaactatgcatcagtttctcctggttgatgagatatctggggaagggattcacaacagttgaatatcttctggaggatccagcctttaggtagacaggtgaactttagagaaagctcttccctgcatttgctgctccccag

SEQ ID NO: 230091 - DNA, 452 bp, Homo sapiens
agaatccattattattgcttttttaattattaaaaaaagatttaaatcataaataatttaaaataaataaattattttaaaagatttatataataagaacatatatatttaactatgtacataccaatttccagtactctccatttctttatgtagatccagttttctgtctggtatccttatccttaggcctgggggactccttttgcatttcttgcagtgtgggttgctgagttctttcattttttgtatgtctttaaatgtcctcatttcagtcacattctggaaagatttttcatttcgacatagaattctaggaaaactttatttctttcagtactttaggatgttgccactttgtttttgtaaaactggcataaagtgggcttcctgtacttgttatacaatttttggaatgtgtatttaaattaaaaacattaaaatgggctgga

SEQ ID NO: 230092 - DNA, 164 bp, Homo sapiens
caaatgacatctaaggatatttaggacttagtcttttcatcataaaagtttctagggttaggtaagtttggaaaatgaagtttaaacgatttatttattgcaggtcttctcacaaatctccaagaaaggtctatagtatggagtagttttccagattcatttga

SEQ ID NO: 230093 - DNA, 369 bp, Homo sapiens
ctttttattgtttcaccttatcctgtaatttaacattgtagcttttatagtactttgtaattatgtgtttatttctctgcatctaactctcctcaaggcactaaattgatatttagagtaaacataggcaccatctctgctgtgtcccccttccatagtgattgtctttactttccatcccttagttgaaaattggtaaagggaaaatgaggaaactctaagaatcgtgtcatatttaatgaaatcttcaagtggcatcagatgctagttgggaacaatgacttacaaagtgcagtaaacacatcacatatccatgggtatatggtggcagctagagtgatgtgatctagctttttctgtgatacccag

SEQ ID NO: 230094 - DNA, 236 bp, Homo sapiens
atactaagtgacaatgtttttttaaacaatagtcagtaaatccttttttctccaggtgtaacagttccatctgttactcatctttcaaattcaaagttagtaaaaggaagatacagatgccaaaataaaccctagctctaggtattagagtaggatcaatggatatttctgaagaagcttcagggttcttttattaataaactgggcagcatctcatagtttggcctaacaggaaa

SEQ ID NO: 230095 - DNA, 887 bp, Homo sapiens
agtggtccacatctgtaatctcagcacttgggggagtctgaggtgggaggatcacttgagcccaagagttcgagaccagcctgggcaacatagcaagatgcaatctgtaatttttttttttttttttttttttgagacggagtctcgctctgtcacccaggctggagtgcaagggtgctctctcggctcactgcaagctccgcctcccgggttcatgccattctcccgcccagtctgtaattaatactaaaaaaataaagtcatcttgcacactgacaagtgtcacgaagaaaataaaacaggaggatgtgttgagaaaatgactaggggagctacttcgggttttttactttttccaatttttaaaattttgatttatttaattcaggtagttttgaatgggtaataaattcacttggtttgaaatgcaaagagtgcaagatggcatacaatgaagtctttctctatccctctcacacttcagccactcaattttccgtggtgggggaggtggcttttgaaacaggggaatcaggaaaggtctctgaggaggggacagttgagcagagacctgacagagaagagtcagctccgcaaataccccaaagagtgttctaaggcagagggaacaatcagtatgaaggcttagaagcaggataaaatttcccccctttttttttttttttttgagacagagttttcactcttgttgcccaggctggagtgcaatggtgcaatctcggctcactgcaacctccgcctcctgggttcaagtgattctcctgcctcagcctcccaagtagctgggatgggaggtgtgagtcacaggcccagcgggaaaacattttctgtaaaagttcaaataggaaatattttagatatcgcag

SEQ ID NO: 230096 - DNA, 559 bp, Homo sapiens
atttcctttaggccaaagagaagagatggccttgtttgttttcctagtgataagagtcgaggattaattgttaaatctctttttgaagactgagagatgccagggcaaggtggctcatgcctataaccccagttactcgggaggctgaggcaggagaattgcttgaacccagaaggcagaggttgaagtcagccaagattgtgccactgcactcccgcctgggtgacagagcaagaatccaccaaaaaaaaaaaaaaaaaaaggaaaaggacttttagagggccaggcacggtgactcacacctataatcccaatattttgggaggccaaggaaggaggattgcttgagcccaggagttggagaccagcctgggcaacatggcaaaatgccatctctacaaaaaagtacaaaaattagcgtggtggtgcacatctgtagtcctagctactcaggagactgaggtgggaggatcacctgagcccagggaggtcgaggctgcagtgagccgtgatcgtgactctgcactccagcctgggcaacaagaatgagaccttgtct

SEQ ID NO: 230097 - DNA, 481 bp, Homo sapiens
aagttgtgtgttttcaaagagcctgtcttcaagctaattctttagcttgatcaattctattgagagattgatgcattctttagtatgtcagttgcgtttttcaactctagaatttctgcttgattcttttaaattatctcaatctgtttattaaatttatctatgaatatagaattctgaattcccggccaggtgctatggctcacacctgtgatcccagcactttgggaggctggggcgggtgatcacttgaggtcaggagtttgagaccagcctggccaacacggtgaaaccccgcctctactacaacatacaaaaaaaaaaaaaaagtagctggacatggtggtgcgcacctataatgacagctacttgggaggccgaggcaggagaatcgcttgaacccgggaggcggaggttgcagtgagccgagattgtgccaccacactctagcctgggtgacagagcaaggctccgtctgaaa

SEQ ID NO: 230098 - DNA, 507 bp, Homo sapiens
aatgtgctttattacccaggggtacagaattatagctgctgcataaacagtgtatctttctgatccttatacttccaacacaccttagccatgcctacattgtgtttctctgaaaatggatataggatttgcaggaagtgggcagatgagtcccttctgactgctaaaagccctgatggagtagcaaggcatctgaccaggactttctgataatcctttatttactcgttcaaatgccatagttccactgtcctctccccatattccacagtaggaagaaaatatgtgaatgcttattcagtaactatgggttaaaatcataagtttctagctatatttaataccaatttagatgcattccttttatgtgtatgacaatattctatcatgtgttgttagatttaccgtcacacactaatgaaataaaaacacagttttctaaattgcaaaaaagaatagctcaatcataaaaataatagaaaaataaataaatattaaaatctaaaa

SEQ ID NO: 230099 - DNA, 418 bp, Homo sapiens
tgctgtgtgtgcgatgagtctggggaagctaacacatgccttctgaagtggctagaatacacactcccacgtcacagccatgctatgatgaaggggtgagaagcagtgtcccctctgaggcaaatctctcttcaggcagccccgcagtcctcttccgaaatctcattcttttccctctcttcctccccaaaaagcccaaactcattgtcagagtggggagaggggagaagcagcatcctgactcctgtccatggtgtgaaccctgagggcacgggacagtgagtggagctctgccaccacccgtttccagagcatgggtgaggagggagggatgccgacctgttaatatttgcttcagacctttccccgatgaacgaaatctccaaaagccttaaataaacataaaatggcttagtca

SEQ ID NO: 230100 - DNA, 578 bp, Homo sapiens
aataatgaaactaaaaagagttcttggaaaagttagttaagataaagctctaattagactaatccagaataagagagaagacactaattaccagtatatttaataaaataggagacatcactgtcgatcatatggacattaaaaggccttttaagagaatatcataaacagctttaagccagtaaattagacaacttagttgaaaaaaataaattctttggaaaacacaaattattacccaggagcaatagaaaattttagtatccctatattgattagagaagctgaatttgcaattaaaaattattccaccaagacaatgtgaagcctaaatggccacactaataaattttatcaaacttcaagaaagaaatattgtgaatcttatgtaaagtcttccattaagaaaaaaaaatgagaatacttcttaactcattttattataacaaattggtaactaccattgttactgtgatactaaaattcaacaaagataacagcaaaacaaagaatcagtattcttcatggatatagatgtaaacattttaaacaaaatttgagcaaattaaattaacgat

SEQ ID NO: 230101 - DNA, 418 bp, Homo sapiens
gggtgggagatgccaactctgattgaacgatgcctgcagaggaatcaaaggtgccacacagggcaatcttctctctgttttctgcacagcggagctgcccaagccctcggtcactagcaacaactccaaccctgtagagttttctacatataagtttaagttatctgtgaacagagataattttacttctttccgatttggatgtctgtttatttgtttgtttgctgcctaatttctccagctaggacttaaaatactatgttgaagagaagtggggcaagcaggcatccttgtcttgctcctggtcttacagggaaagctttcagtctttctccattgagtatccctctattatgttgaggtggtttccttccattcacagagtgtttttatttataaaagaatgttgaattttgtc

SEQ ID NO: 230102 - DNA, 297 bp, Homo sapiens
atcaaaaccatcccagggctgggtgcggtggctaacgcctgtcatcctagcactttgggaagccgaggtggaggatcacttgaggccaagagttcaagaccagatggggcaacatagtaagaccctgtctctatgacaaaaaaaaaaaaaggtaaaaccatcccaaagttgacacagatgtgagaatgagcagaggtgggcattgaagcagtcgtttttgctgtattccctctgttcagaagttaagtagaaccacagctcgatgtcccctcaggctcattaggatggttactattc

SEQ ID NO: 230103 - DNA, 189 bp, Homo sapiens
tctgtctctttctttctttctgtctctgtctttgtccctctctctccctctctgcctgtctcactgtgtctgtcttctatcttactctctttctctccccgtctgtctctctctctctctctccctccctgtttgtttctctctctccctccctgtctgtttctctctctctctttctgtctgtttctg

SEQ ID NO: 230104 - DNA, 421 bp, Homo sapiens
agcaggccactagggagtcgggagagctcggtgatgtcacgaggggcatcagactcttccctgcaggctggcgggactgatgggctctcgttccaatggaggtacaatgggacttccggggctgtgatgggaagggcggaggagctgccgatggtcccagtgccatattagtgtcacattctgaggggcagccctgtgccggacggcagctgctacctctccctctgcccctttattacttgaatctcttcgttgtgccctgtctaggcacggtcgtccgacagcaggcagcccactgccctcccagagctcactgtctagcccagggtgacacagggtaaccgtgggcatgacttgggccgggaagtgagaggctcgattccatcacatgtaaataaaaatactcattttcaatctaaca

SEQ ID NO: 230105 - DNA, 369 bp, Homo sapiens
tataattgtgtagtcaagtggtattcagtcttctctgttgagtgattatggttgagttagaaaatggcagtgacctttgacagcagaagtgaaatggctgctgaacgtaccatagcaagttgttggagcaggaagttggactcacagagaagtgctctttccattaccccatgctgcctcccagtgggaaggtggcaatggtgttaggatgtaatctcataagttactatcttttcttcccactggacaggtggctcagaattttaggatgacttattaacttaacaatgttgggtttagcatgcaatttgagaactaaatgacttctcttcaggaaaaattaaatattttgttttatttatttcaacc

SEQ ID NO: 230106 - DNA, 193 bp, Homo sapiens
ggcttaaccaccctgagccttagattcctcaattgtaaaatggaaataacagcttcttcaaaagccaatcaaggttgggtatagtggctcacacctataatcccagcactttacaaggccaaggcaggtggattgtttgagctcaggagttcgataccagcctgggcaacatgctgaaaccccgactctacca

SEQ ID NO: 230107 - DNA, 540 bp, Homo sapiens
tactcttctgacatacactttaaagttctaaaagtaagtgtatttatataagattatagttctagacttaaactgaggctaattaagagaggcatagcctcagaactttttttccaacaaggaaaatttcatatccatgtaattccagtacctgtcttgttgaaggggctatattaatcccagggataaaaattagaccattttaaaaatggataggctgcatatccttctgacagtcacttatgaagattttttttcttaaaacttttgatgagagctgggctacaatttgagattctattttctgggaagatcagagtggcagataatcagtgttactaatctaagggcagaattgtatatgcattctctgcagtacccccagtttctaataataacatacatctgactttgactttttttttctttaaaaaaaaaaacaactcttggctgggcatgatggctcatgcctgtaatcccagcactttgggaggccaaggcaagtggaccaccacctggggtaagagttcgagaccagcc

SEQ ID NO: 230108 - DNA, 571 bp, Homo sapiens
aattatgcaagaagaatcatttctagagattcactataaaaggcagtgccaatagttaacaatgcagtattgtgcactaaaaaatttaagaggggctgtgggtggtggctcacacctgtaatccggcactttgggaggcttgggcaggaggattgcttgagccctggaatgcaagaccaagctgggcaacatagtgataccctggctctacaaaaaactttaaaaaattagctgggtgtggtggcatgctcctgtagcccaggaatttgaggttgcggtgggttgtgattcaccactgcactccagcctgggcaacagagttagatcctgtctcaaaaaaaaaaaaaaaaaaaaaaatgagagaggacatctcttggtaagtgttcctaccacaaaagtaaacaaaaaacacaaaagaatgtcagaaaacttttggagataatggatatatttatcatcttgattgtgatgatgatatcttggataaatgaagatgtccaaactcatcaaattgtatacatcaaacatacaattttttgtatacaattatacctcaataaatctgattttt

SEQ ID NO: 230109 - DNA, 343 bp, Homo sapiens
ttatccctctgaaacacaattgctttgaggcttagtgacttagaggtaacaaaagttgtttgctcactcatagcacccacctgcattcttccacaaagttaattctcatcattcagtagaaaagccaaacaagaaatggatttgggacaaacaatagatcactgtgaaattcaatagcagatgagtataaaagaaaaaggcacttaatctatttcctgtcctgcagggtgactttaaccaatagataatctttcattaattctggaacaattatttactcttctgccatgtgtccaacactggactagatactaggcagaatgaaatggaaatcaccacatgg

SEQ ID NO: 230110 - DNA, 465 bp, Homo sapiens
gattccactcttgacccttccaatctattatttcatagcaactaagaaaaatgtttaaaaatataaatcaattgatatcacttccttcattaaaacctagcttcccattgcacatagaatgaaatcccaagtccttcttgtggactaaaagacttctcccacttctgttttaactcactgtacccttcactcacggtactccaggaaccttaatgtcctctctgttcccagaatggatccagcctgtccaggcctttgtgcttgctcttccctcttcctgaatattctgacctggctctgtgtgtgtctacttcctcctcatctctcagatctcctttgcaaaagggcttccccaatgatttaatttaatatcatcttttcatgtaccccaaatgtcattctctagcactgtattctgtttatttccttcatagaatctacagtaaattctaatcgtttcaggtt

SEQ ID NO: 230111 - DNA, 377 bp, Homo sapiens
cttcagagtgtaaagagctagaaggatgaccaacaggagagaaataagtcagggagagaacaaaaagttcatctagccagggaggcttgtaggtaccagttttcttggcctagaattttcttctcctcctcatatgctgaacaaactcctactaatcctttaacattcaaattaaatatcagctctgtgaaatgttcctcaattctgcctcctaaatataacatattgtttgtttttacagattaaaatatataatagaattgtatgattttgtacataatttttaaaactctttatttcttacaagttaacaggatattcttttgcatatacctgaatgtgttaaaatgtctattaaataaaatgtttggatacat

SEQ ID NO: 230112 - DNA, 275 bp, Homo sapiens
ggattgggtcatatggtcacctatagctacagagaggatgagagagtgagtacctgaaacagtgattggaataaacctaaccatgatctactgctagagaggtggcacttagacagagtgatgatgcctaaacttctagaagtagagttatctggctcctctaagacctagactaactgtaggtcattgataagccaaacatctgattaagaatcacattggaagacttctcatcatttttgtctttgtaaataaaggacccctatctaacttta

SEQ ID NO: 230113 - DNA, 379 bp, Homo sapiens
ccgtatctataggaagagcaatttggaagcctgtggtttgggacaggcatgtggggtggggagtatctttgaagcccctaaagttgtatgaaaagcattaatttctggggagaacatctctagctttgatcagatcctcggatgggtctgtgatcccaaagggtagggaagcttcttatatgattccattcactaagtgcccatgatgagctggtggcaggcatcctagaaccttctgtgagctagcccctaccccatacctccagctagtctcagccttccccccaccttcaacctgcaccccacccagacagaagcacctgcaactctctcagctacactctgctgctccaagccttattaaagagaatgtgtgtca

SEQ ID NO: 230114 - DNA, 816 bp, Homo sapiens
tactggttggcctggtgaaaacagcttagccatactgacctcatcttagccggtcaatgatggatgaataatgctgtcatataggccatttcctctctcctgtgtgcacaccactgagtccaattggtcagaaaccttccgactttgtggaagtggtttgtggtcaaacccagcagttcaaacagtaaattttattgaaatgtcttgccttgacagtccagttttaatagttaacccaaactcaaatgaagttgtctcttcttccttgaacccatatggctctcattaaacctttaagattatgttcttattacaaagggaatgtaaatcatgctggatctctagatcttatgttttatcaatatcttgaaacttaattcaaaccaccctttataaaagagaagggaaaacacaatttcagacttaatagccttgtagttacatgttaatttttaatccccaaatttgagttgcctttgataacacttatccctactatgaatggtcatataactaattattattaaaaaggtttcagaaccagtgttctaaggaagttgtaaggataagataatttcagatgataaaaaaaaactgatgaaaaggattaaactttctaataaagttactagagataaaacaggtatagcaatatctcaccaaagcatagctctcacccccaagcccacccccccaaataaaagatgataatggccaatcactttcaataaaacttttaaaaaataaaaaaacctctttagtgcagttagctttttaggccttatggtaagcaacacattgtaaggaaacacatta

SEQ ID NO: 230115 - DNA, 183 bp, Homo sapiens
atttaaatacaaaatgtgttgaggcatttctatggtttgaatgtgtcccccaaagttcacatgtcagaaacttgatcctcaatgcagccgttttgagaggtgtttaggccatgacggctttgcatgaatgtatgctgatattgtgggagtgggttcattattgtaggagtggattccttatta

SEQ ID NO: 230116 - DNA, 329 bp, Homo sapiens
caggctagagtgcagtggcacaggcttggctcactgcaacccctgcctcctgggttcaagtgggtcccagcctatctaggattataggcgtgtggcaccatgccctggtgattttttgtacttttagtggctaacatggtgaaaccctgtctctactaaaaatacaaaaatgagccgggcatggtgggggggcaccgtagtcccagctactcgggaggctgaggcaggataatggtgtgaacccgggaggcagagcttgcagtgagccgagatcacgccgctgcactccagcctgggcaacagagcgagactctgtctcaaaaaaaaaa

SEQ ID NO: 230117 - DNA, 489 bp, Homo sapiens
ggcaatatcacaaggagacatgtatgaggttgtttactgcagcgatacctgtaatagtgaaaaccccaccagttgggagtaagatgtagaatatcatatacatcttacatgtcatacctacactcgataaaagttaagatggattagaactacacgttttaacacgaatagatctcaaaaatatagtggtcgatcaaacaattgccagacttttctgtgtatggtatgagtcaatttgtataatttttttaaaaagcccatctaataattcatacgtatgcagtaaatacataaaatcatggaaaccacacactggcatcatggggataccagtggcttggggataggaacgcagggaacttcacctctgttgtattgcatttcttaaaaagtgatgttggccaggaagagtggctcacgcctgtaatcccagcactttgggaggctgaggcgggaggattgcttgagctcagaagttcgagaccagcc

SEQ ID NO: 230118 - DNA, 289 bp, Homo sapiens
ataaatgaagatgctgttaaatgtcttttccaaattttagtttctgtgattcattctaggtctcatgaagaatgagatactttgcctcaaggaagatataatttggtggatttatgcacccaaacgctatctgaatcccactagcatgctgctcgatgagcattttaaagatctcataggctgggtgcggtggctcatgcctataatcccagcactccaggaggccaaggcaggcagatcccttgagctccagactagcctaggcagcatagcaaaatcctgtctctac

SEQ ID NO: 230119 - DNA, 629 bp, Homo sapiens
caagttctgatggaacaggttttgatcagagttctgtgccagctgaactgtcttcaaggatgaaggcaaacagaagcttctcaagatgaggagaaaggcagctggtttaccccccatgcccttccacatataagccccagcccaggctgcacgcacaccgcatttaggatgcatgcacagagtttgagagctgcttgtaattaagcaggggccaaggagaaggcagcatagatcgggggacaggggcttccaaggcaacgcagagcagctgcgagacaagaagcaggtgaaaacgcctgtgcggcagtcgctgctgggtggattctcctaagcacaggttttcaggagctggaaccacatttcctagtctgtgggttcaatcacactctgaggttcctcagggaatgacccccacgcaatgctaacatcggcttctttgttaatttccaacgtgtagaatgagtccattgacaaagggccgtcaagcgatttttggttgttccacctggattgcagaggccctcaaccttgaccgtggagctcccaaccctgatcgtggagctgtgagcctgggcagcagcctgagtggggaagggtggagggggggtcatttcttcaccctctgtgct

SEQ ID NO: 230120 - DNA, 299 bp, Homo sapiens
gtgggaggatcatttaagcccaggtgttcgaaaccagcctgggcattatagtgagaccccatctctacaaaaaactgcagaatttgctgggcatggtggtgcacgactgtagtcaccacagcaggaggctgcatgattgtgtcattgttataagtaaataaataaatgggtaacctgtaggggatatgaattatatctcaataaagctgttaatacaataccaaacaaacataattagcaactacccaggtacccatgttgaaggaaaaaaaaactgtaaaatatccaagaatattcta

SEQ ID NO: 230121 - DNA, 399 bp, Homo sapiens
cttattaacatagagagtagaagaatggttaccagaggctgggatgagtggtgcaagcctgggaaaggaggtggggatgaataatgggtataaaaattgtagttagaatgaataagacctgctatttgatagcacaacagtgtgactatagtcagtactaacttaattgtgcattttaaaataaaaacagtgtaactgcatcatttgtaactcaaaggataaatgcttcagggaatggataacctattctccatgatgtgctaatttcacgtttcatgcctgtatcaaaacatcttctgtgctccataaatatgtacacctactatgtacccacaacttttttaaaaaattaaaatatatatgtgtatgtactaataacagagcttcaaattcaatgaa

SEQ ID NO: 230122 - DNA, 276 bp, Homo sapiens
ttttagatgggttagtggcagtgtttggtgatgtgggtggtgggcaaatggtaattttagatgggttagtggcagtgtttggtgatgtgggtggtgggcaaatggtaattttagatgggttagtggcagtgtttggcgatgtgggccgtttcgtttatgtccttatactcgacatgtttccaaaaaaagtacaaactttttttttcttttaccttaactttggtcagtgatggccatttattaatttccactcagtctgaaggagggaagatggca

SEQ ID NO: 230123 - DNA, 422 bp, Homo sapiens
aggtgcagtggctcacacctgtcatcccaacaccttgggaggccaaggtgggtggattgcttgagctcaggaggtcaaggcaacatggcaaaaccccatctctacaaaaaaaaaaaaatagctggacatggtggcatgcacctgtagtcccagctagtcaggagtctgaggtgggggtttgattgagcatgaggttgagactgcaattactccagcctgagccacagagtaaaaccgtgtcacaaacacaaaaaaattgcagctttcggaaggctcagatgactgttggcacttgttaacaataaagtatttgtaaattaaagtgtgcacactttgtagacatatgctattgcacactttatacagcacagtataaacatacttttacatgcactggaaaaccaaaataaattgtataactc

SEQ ID NO: 230124 - DNA, 115 bp, Homo sapiens
ccaccccccaaccccactccccacctctcctcttagagggagacgggttctcaaatgaccccctttcctgcgtagccagccagtgttcagtttgtggagttacgctgagtttgca

SEQ ID NO: 230125 - DNA, 914 bp, Homo sapiens
cccccccccaccagccagcggcagcaacctgcgtgggtccctcaccttgtgggatctttgttcttttgctcttcacaataaatctccttgctgctcactgtttgtgtcagtgtcatctttaagagctgtaacactcaccaggaagatggagtctcgctctggcatccaggctggagtgcggtgtcgcgatctcggctcactgcaacctccgcctctcgcgttaaagcagttctccagcctcagtctcccaagcagctgggattataggcgcctgccaccacgctgtggcttcctttttgaagtcagcgagaccacgaacccaccggcaggaaccaactccagacacactttgaccgtgaagttggacggactagcgaagatccggactgctcgggaagctccatccgaatgtgtctgccccccagggacccctggacggcgcggcaagcctgggagaagaggcgacctggtcctccaggaaccctgggtcggatggcaagcccggacttccaggcccgaacaggggaaaagggtgcaccaaggagactttggaccacgggggagaccaaggacacgatggagctgcatgggcctcacggggccccatggaacctcctggggcccggggacctcctggcgacactgggaaaagatggccccaggggaaaccacaagggccagagggccccaaaggagagccggaaaagacggcgagatgggccaacgggaccccagggcccaagagtgagcatggagtacctggacagacggtgcaaccatggggacacgaggccagcccgtgccaacagtggacacaggcgcgccatggagcaggaggcacggggagacgaacggtgtggccggtgtccaggccgcaggggcacggacccggaggcccgctcgcctgatgggcg

SEQ ID NO: 230126 - DNA, 767 bp, Homo sapiens
cccccccccaccagccagcggcagcaacctgcgtgggtccctcaccttgtgggatctttgttcttttgctcttcacaataaatctccttgctgctcactgtttgtgtcagtgtcatctttaagagctgtaacactcaccaggaagatggagtctcgctctggcatccaggctggagtgcggtgtcgcgatctcggctcactgcaacctccgcctctcgcgttaaagcagttctccagcctcagtctcccaagcagctgggattataggcgcctgccaccacgctgtggcttcctttttgaagtcagcgagaccacgaacccaccggcaggaaccaactccagacacactttgaccgtgaagttggacggactagcgaagatccggactgctcgggaagctccatccgaatgtgtctgccccccaggtaagtgaaggttgagctcccttctggctcctgcgttcggccgccgtttgcttgggattgctgagaacagcatggtccggaaggtggactggggtgtcaggctgtcgtcttcgtgcactggcctggggcctttctttcccacattgaccctggcaggctctctggtcggtttccagcaaagtaaacggactcggtttgctgggtggtattggtggaggagctaagacattgtcggagatgacttagctgcctgaagatttagatggtagggaagtagcagctggcccatttcaaagatggagaaaggggtgtgaactgatgggaggtgacagcctggaaccc

SEQ ID NO: 230127 - DNA, 1801 bp, Homo sapiens
  misc_feature (491)..(491): n is a, c, g, or t
  misc_feature (545)..(545): n is a, c, g, or t
  misc_feature (921)..(921): n is a, c, g, or t
  misc_feature (1255)..(1255): n is a, c, g, or t
  misc_feature (1672)..(1672): n is a, c, g, or t
  misc_feature (1674)..(1674): n is a, c, g, or t
  misc_feature (1677)..(1677): n is a, c, g, or t
  misc_feature (1679)..(1679): n is a, c, g, or t
  misc_feature (1688)..(1688): n is a, c, g, or t
  misc_feature (1692)..(1692): n is a, c, g, or t
  misc_feature (1694)..(1694): n is a, c, g, or t
  misc_feature (1713)..(1713): n is a, c, g, or t
  misc_feature (1716)..(1716): n is a, c, g, or t
  misc_feature (1719)..(1720): n is a, c, g, or t
  misc_feature (1723)..(1723): n is a, c, g, or t
  misc_feature (1727)..(1727): n is a, c, g, or t
  misc_feature (1732)..(1735): n is a, c, g, or t
  misc_feature (1746)..(1746): n is a, c, g, or t
  misc_feature (1748)..(1749): n is a, c, g, or t
  misc_feature (1751)..(1751): n is a, c, g, or t
  misc_feature (1754)..(1754): n is a, c, g, or t
  misc_feature (1759)..(1760): n is a, c, g, or t
  misc_feature (1780)..(1780): n is a, c, g, or t
  misc_feature (1784)..(1784): n is a, c, g, or t
  misc_feature (1793)..(1794): n is a, c, g, or t
  misc_feature (1796)..(1796): n is a, c, g, or t
  misc_feature (1801)..(1801): n is a, c, g, or t
tggcggcacataaaataacatgccttataattgatgtgtcttaggttcagtcaaatatgggatgaaaaggaacactgtattcttaagaccgcatctttcagcgacgcctccttccatgtgagttgagtcctggggtgctcctcagctcccccacccatgtggaaacaggcacagaggccacagggagcaggaggccccagggagcagagaccccaagggcatgagggataagcacaaagtcctgggccaagggtgcccaggttggctgagccctaggcggacaggtcaggagcacggtgggcagtgggtgggacaggcccctaacagagcccctcgggctcacatagtaattccattgctgggtcagccacgttcccaaatcgtacatcagacaatcttcccaccaaccctcgagtgtgaggatgttttgtttgtttaaaacccacatttggccgggcgcagtggctcacacctgtaatcccagcactttnggaagacagcgatggaatgggagggttctctggagacctggggacaggcctgangttgtctgagccccaggggctggtcttcgatgtggaccccagagggtttcctgatttatccatgagcttggacctgctgtgctgaggacagaggggcagtgttcggtctccttgggtagcgtcttcaccctgtgaccccttctccatcttggcctgcgcagggggcccaatcaacagaacccaacactagccgggggggtgtaaaatccaaaaagaacctttgcaatatcggacaactggtgaacactgccagcatgagcatcttgtatattttgaaccaactctaccagcccattttctagttgctaggatggtcacctccaaactcatgggggttgttgaaaggattcgatgtgttaatacatgtgaggcgctnagaacacagactgggaaggggataggctttatataaatggtggttattaccatatttcctctaaatgcacattgttttcattttcatatctctggagtcagaatgtattttgtggattaaatggcagcattttttttttctttcttggcggcacataaaataacatgccttataattgatgtgtcttaggttcagtcaaatatgggatgaaaaggaacactgtattcttaagaccgcatctttcagcgacgcctccttccatgtgagttgagtcctggggtgctcctcagctcccccacccatgtggaaacaggcacagaggccacagggagcnggaggccccagggagcagagaccccaagggcatgagggataagcacaaagtcctgggccaagggtgcccaggttggctgagccctaggcggacaggtcaggagcacggtgggcagtgggtgggacaggcccctaacagagcccctcgggctcacatagtaattccattgctgggtcagccacgttcccaaatcgtacatcagacaatcttcccaccaaccctcgagtgtgaggatgttttgtttgtttaaaacccacatttggccgggcgcagtggctcacacctgtaatcccagcactttgggaggccgagattgggcggatcacgagatcaggagttcgagaccatcctggctaacacggtgaaaccccgtctccactacaaatacaaaaaaaaattagccaggcgtggtggtgngngcntntagtcccanctantngggaggctgaggcaggagnatngcnngancccnggagnnnnagctgcagtgngnngngancgtgnnactgcactccagcctgggcnacanagcgagacnncntctcn

SEQ ID NO: 230128 - DNA, 625 bp, Homo sapiens
gaatcacaagcattgaacattcctggactccagtagattatttgcttgtctgcaaccagtcggaagtcatcagtaaatatcagagaacagaaccagcggtggtcttccatttactttttttactcttggctgcattcaggaagaaatttgataagtactctcatattacaagggttgagttgtctttgtagttttaatttgaggccaatatctgaggcctagaattgcacgagcagaggctagagggcatgtggcagaatttattgtggtgtgcagtttgcagttattgctttggtctttttcccagttggaagtcctaagcaataggatggcacatttgtggggaaagaacactgtcctggcattctcagggatcttcggggttttaaaatttggttcatatccactgctgttacttacgcaaaaggcaaatatttgtgctttgtaacaagttgatctggtagcatggcaattctctggcttacctctccaaagatgactttggacttcttgagaatgatgattaaattacagtcatttttctacttgccagtccccaaacttgccatgtgctaggtagtcccatgccttcgctcatgctttgccttccacttgcctagccttg

SEQ ID NO: 230129 - DNA, 437 bp, Homo sapiens
acaggggaatataaaatcaattatatgtctacataataataccaaacaatttctaagtaaaaatttaaattatattacttcaaatactattaaaaacttgaagatttagggataaatttacaaaaatatatccaagacctttacattgaaaaacataaaatatcagccgggtgaggtggctcatggctataatcctagtactttgggaggctaaagtgggaggatcacttgaggccaggacttgcagtccaacctgggcaacatagtgacaccttgtctctacaaaaagtaagcactttagccaggtgtggtggtgtgcacctgtagtctttccagcctactcaagagcctgagatgggagaatcacttgagcccagaagtttgaggttatagtgagctgcaatcattccacagctctccagcctgcgtgacacagc

SEQ ID NO: 230130 - DNA, 1146 bp, Homo sapiens
ctgtgtatgttttatattttaaaaaatctatatatatttaaaatctaaatatatttttaaaaatctcagttttgttttaggaaagtgttttttctcaaaatttaagcccaaatgataaaatctgccaaatagaaaactattttaaattgataataacagtatagtttcatcaaaactaaaaataccagatcttttgatgtatttgtttcctagcagagaattaagttttcacgttcttactgttggcctcctagatatcatgtgagcatgtcttaaggaaaaatgctcttaatgccactgtggtttctaccttcatgtgcaaatagaagagagtggtggtttgtaataggccattctttccagagaaaagttcatgtgtatttctgtatatgcagcatcctccttattatgtttggatgtaaagatttattattctctctgatgttttcatattttttaaatttacaatataataaagaggtacagagttctaaatcaataaaagatgggctataaaatggaggagtaaagttgatatatgaaccatcattgtcaacattttagatttgattttaactgtaaaaagcacaaatgatatgcatcataaaacagccttaaactgaatgtccacttggtgtgttgcactttaccaggcacttaaaatatcagtcctgtcacatagcaacagaaacccacagtggcacgtttaaaaatgggtaatcaacgtattgattttgatggagctttttcagaaataactgctattttaatttaacttataaatagaatacaatatcaagttcaaattaagggaggaaatcatgctgtaaatatactggattgaaaaacatggttctggccaggcatggtggctcatgcttgtaattccagcactttgggaggctgaggtggttggatcacttaaggtcaggagttcgagaccagactggccaacatggtgaaaccccatctctactgaaaatacaaaaattagcccgcatggtggcatgtgcctgtaatcccagctactagctactcaggaggctgaggcaggagaatcacttgaacctgggaggcggaggttgcagtgagccgagatggcgctactgcactccagcctgggtgacagagtaagactccatctca

SEQ ID NO: 230131 - DNA, 139 bp, Homo sapiens
tgcctcatagggaccatgtgtgttaatgctatgtgtgtgtgtgtgtgtgtgtgtgtgtgtgtgtgtgtgtgtgtgtgtgtttctgataatgcttggcaccaagtaagcaatcagtaaaaatgaagggggaagcaagagg

SEQ ID NO: 230132 - DNA, 286 bp, Homo sapiens
atttgatatatattggacaaatgatatcaaatgatatatttgacttaggaattataaccacagtatgtaaagaacatccaaaactccattagaaaacaagcaatccaatttaatgtccaatttaaaaaaattggcaaaatatcaggacaagaaagtcaaggaagagataagaatggcaattaagaaaatgaaaaaatactcaatgttgttagaaactgggaaaatgcaaattaaaagcaaaataatatatcattacacaataattagaatagttcagaaacttctt

SEQ ID NO: 230133 - DNA, 1242 bp, Homo sapiens
atggcatgaacccgggaggtggaggttgcagtgagtcaagatcgtgccactgcactccagcctgggtgacagagcgagactccgtctaaaaaaaaaaaaaagaaagtcacctgttaaagattacacagcaaactgccagcatccaaagcctgtcctcttccctcttccatttgaataggctccttccagccaacattcatgtatattctatccaggctccaccttccccttggaaactgcagctgtgtttgctgaaaaggcaagtggggacagcttgtttcctcccaacctcaggtaccttcctctccaactgctgctcctaaatctcagaatatatggtgttgcttgcttctcctccgaaccgccccctcccctcagggtggggatagggcatggaaatggcctttggaagttaatgggattcttggggtcagattggattctccagaaccttggggaaaggaaagtcaggtttctagtaaataaataacatcctggaatggccctagcataggctatttgtaggaggaaaggagagaagtagagaagcaaatcttgactatttcccccaagaagtgccaagtggttttggaacttttttttttcggttttgaacatttttaagggaaagtttatcctactctaccatatttaaatagcatacgctacaaagaacgacttgatttcctttaggccaaagagaagagatggccttgtttgttttcctagtgataagagtcgaggattaattgttaaatctctttttgaagactgagagatgccagggcaaggtggctcatgcctataaccccagttactcgggaggctgaggcaggagaattgcttgaacccagaaggcagaggttgaagtcagccaagattgtgccactgcactcccgcctgggtgacagagcaagaatcccccaaaaaaaaaaaaaaaaaaaaggaaaaggacttttagagggccaggcacggtgactcacacctataatcccaatattttgggaggccaaggaaggaggattgcttgagcccaggagttggagaccagcctgggcaacatggcaaaatgccatctctacaaaaaagtacaaaaattagcgtggtggtgcacatctgtagtcctagctactcaggagactgaggtgggaggatcacctgagcccagggaggtcgaggctgcagtgagccgtgatcgtgactctgcactccagcctgggcaacaagaatgagaccttgtct

SEQ ID NO: 230134 - DNA, 392 bp, Homo sapiens
ccctaatgatggatatttagattcttttaagttttgtttatttcttttaagttttgtttgtggtataaacaataccacatagaatgtttcttgtgcatatatctctttgtttttgagtatatctgtaggataactttcttgagtggaattgtcaggtcaaagggtttgtgcattttactattgatatatatgttaaattgtgtcaaatatatatgtcaaattccctccaacattgtttaaatgtgcctttccctaaatttctattttaataactgtactattcctgcttctacagttgccactttctctttttaatcaaccagattaaatatgatgtgagattataataagaattatactatttaataaaaatggatttatatttttggtca

SEQ ID NO: 230135 - DNA, 482 bp, Homo sapiens
aggctgactgtcccttatctgaagtttcagattttgaactttcacattagggatgctcaacttttttttttttataacatcatactgtatttccatatgtacttattattgtaaataagtataaaacagtgtggtaagagttatctaggaagtaaaattttaccttaatggagcctgggattttggtaggtgaagtggaagaagagctagttcgaattgactcaatgacagtgatacagtaagttagtaactgacaattgaactctactgtaatactaatatattacttagacctttttaataagtgcattggttattttgtgatcctccccttcaaaaaaccaacaagaggttagtaataaagccttaacttttacttggtttagtagtcacgtaacattgattaacttctattaagtttttaagaagcttaactttttattgccagggcttaacaggactatctaatgaaatctgtgaaa

SEQ ID NO: 230136 - DNA, 150 bp, Homo sapiens
aaggtgtgacttttgtggtcagaatgaaagaggattgaatctaaaagcttagatgtagaacactttgagtataccagataatcagtgggccccatgtgattttaaaggcaatacggttttgagatgagaggtagaagatgacatagttgc

SEQ ID NO: 230137 - DNA, 481 bp, Homo sapiens
tagttcatgtgaaataaggctctgaatattttagctgagtgtgtattccatagcacatagtagtattttgtggcttctaaaaaagtacacatatccattgggtatgagtcggagcattattctttcttgaactgcgctctcacgatgcctcctcagtttaagaacttactctgaaatagtaaaagcatagtgtccagatcaggaggtcatggttcagctctgtgctgcactggtaagaacatgtgttaagcctttttccattttgagcctcactttttaaagaggtttttgatgaactggagtcatccagtgatggggaggcaggatagcctagtgttgaagcacacgcactctagagtctacttgggtttgaatcctgcctcttccatctactagctgtgaatttttttttttttttttttttgagagggagtctcgctctgtcgcccaggctggagtgcagtggcgcgatcttggctca

SEQ ID NO: 230138 - DNA, 460 bp, Homo sapiens
cagatcgattcagcactggacaggtcagcctgttacctcagtgtaacttgatccatctcgattgttctctgtgactcctccattaaaaaagaaggtgaccctctgaccctggagacagtgtcgccggggcttctggtgccttgtaataagctctacatccctattcctcttctgattttaacagattcccgagcaggtgaagaaggctcgatcagggcagtggatcatgccgtgatcggtggcgtcgtggcggtggtggtgttcgccatgctgtgcttgctcatcattctggggcgctattttgccagacataaaggttagcaaagcttcagcagacagaagcagcgtgtccccacagcttctgcctttggagactttacaaggttgtccttgataggcaatttgatgtatgtggccacacggcctatctgattcctgaaactgggagagagagaagaga

SEQ ID NO: 230139 - DNA, 444 bp, Homo sapiens
gaatcattggaaaattgcagaaatttcagactttcctaaaaactcaagtttgtttttaagtggtttgtttttgtctctcacaaaagctgggatttgaatgccacattttttttctagttataacccatgaataagttgcattattttataaaaccttacatgaggaagacaaagaacagcacaagcaaaccacacttgtggaaaagtgggtccctgattaaataaaacaaatttgtaaaagaggatgtagaaggctgggattttgtgaaaagatcaatgagactattatgaagtgtttaaacatgggacacagataaagccgcaagtaagttgctgtgataatttgtcaagagttctggctacagatcttcacagccaggtgaaacttctccagtcatttgctaacatttgacccaccaggagactttcctgagttgaaccagt

SEQ ID NO: 230140 - DNA, 555 bp, Homo sapiens
tgcccttccacactgtgggaggagtgttcttttgctctttgcaataaagcttgctgctgctcactctttgggtccagactgtctttatgagctataacactcaccgggaaggtctgcagcttcactcctgaagccaaggagaccacgaacccaccgggaggaaggaacaactacagacacgccggcttaagagctgtagcactcactgcgaaggtccgcagcttcactcttgagccagagagaccacgaacccaccagaaggaagaaactccaaacacattcgaacatcagaaggaatcattcttgaagtcagtgagaccaagaacccaccaattccagacacactaccaaaggcagaggggagctcctagacaaagatattttgcttacaaatggaacatatcaaatcaagcttttgtgaacttgagggaagaaacaaagaatatgaagcctaaatggaagtgtcaggaaatggtcgccttgcggacaaggaaacagcagcctggaaggccaggagagggcagactacccacctaaccctctgcagaattttgt

SEQ ID NO: 230141 - DNA, 733 bp, Homo sapiens
tggctttgttgtagtttatttctaagttcaaattaatgttggtgcctgagagcaaatggagaaaacgaacatttcctcctttttcttggcagatggtttactaggtgagtgtgtcctcgattattcaaatcaggggtccccaatccccaggccacagattgttaccagtccatggcctgttaggagccaggccgcacagtaggaggtgagcagtgggccggtgagctactgtgtgaactccaccccctgccagagcattactctgtgagctctgccccctgcagagcattactgtgtgagctccgccctgtcagagcattactgtgtgtgctccgccccctgccagagcattactgtgtgagctccgcctcccgccagagcattactgtgtgagctccgcctcccgtcagagcattactgtgtgagctccgcccatgccagagcattaccttgtgagctccaacccctgccagagcattactgggtgagctccaccccctgccagagcattactgtgtgaattccaacccctgccagagcattactctctgagctccgcccctgccagagcattactctgagctccgccccctgcaagagcattactctgtgggctccgcctcctgccggagcattactctgtgagctccgcctccagtcacagcattactgtgagctccgccccctgccagagcattactctgtgagctccgcctccagtcacagcattact

SEQ ID NO: 230142 - DNA, 467 bp, Homo sapiens
atatatgcacccaatactacagcacctggatttataaaacaaattcttttagtcttacaaagagacataggtaaccacacaataatagtagatttcaacaccccactgatgatattggagagatcatcaagacagattactaacaaagacatctgggacctacatttgacaattgacaaaatagaactaacatgcatctacagaaaagtccactcaacaaaagcagaatataaatccttctcatccatgcatgacacatactctaaaattgactacatgctcagccagaaattctcaataatttcaaaaaagccaaaatcataccagccacattctccgaccacagcacaataagagtagaaatcaataccaagaagatttttaaaaaccctacaactaagtggatattaaataatctgctcctgaatgacttttgtgtaaacaatgaaattaaagcagaaattatg

SEQ ID NO: 230143 - DNA, 445 bp, Homo sapiens
cagtgttccttccataaccccagtctaatcataagcaaaataatcagacaaacccagattaggagacatcctacaggatacctggacagcattcctaaagcctgtcaaggtcacaaaaaacaaggaaagactgaagactgtcataggccagaagcaaatggagagacatggcaactaaatgcaatgtagtgtcctggatcagatactagaatagtaacaggtcatcaataggaacactggtgaagtctgaagaatgtctggaatttagataacagttacgtaccaataatgggctcttagttttgacaaatgtaccatggtaatgtaagacattaacaatgggagaaactgggtgaggggtatacaggaattctctttgcttatatgtgtgacttttctgtaaatctaaaattattccaacataaaaaatttaaaaatccttctt

SEQ ID NO: 230144 - DNA, 414 bp, Homo sapiens
acaagtttgtcttctgtctccatgactgatggggaaattaatcaccctccatccttattaatagttacacttttgatgaagagattgctagtggggtatttcagatgagtaaacatgggattaatggcagtctagttgtgaagtccttataaataacacatctattgtttctgcaaaaccatttacagtattttactggtgagaactgggccttcatggctccatgtgctgctatgtactgctcgacgtctttttgtttctctgtcatggccgtttattgagccacatttcctttcaacagaacattttaaatgcgtaaattccacagaagcatttattttaaaatcccttgattgaagttgaacatactttatttctatagttccctattattggattcccgcccccccaatc

SEQ ID NO: 230145 - DNA, 366 bp, Homo sapiens
ggctatgcagtgtctgcctcatcctcccatcagccctggaggaaagccaggatcctgctctctgaatcagagatctcttagttggaaaatcaggccttctcacttaagactagtgtattctggctgcgcattcctcacaagatgtagtcaggttaggttagaccttagagtcacaccttgttcaggttcaacctgagtgaaataaggaattgaggtgctgctccctggtgattcagctcattttagcaagtgtttattaaatgctttccccaagcaccacaccaggcccagacaattctgcctgtacacatcctgtggtatttgttggttggaggaaagaggctcttgtagtttatgaattaaaga

SEQ ID NO: 230146 - DNA, 656 bp, Homo sapiens
tctgagacggagtctcgctctgtcgcccaggctggagtgcagtcgcgggatctcggctcactgcaagcaccgcctcccgggttcacgccattctcctgccttagcctcccgagtagctgggactacaggtgcccgccaccattcccggctaattttttgtatttttttagtagagacggggtttcaccgtgttagccaggatggtcttgatctcagttgatcctataactcagaacgctactaagtgactactgagcaggtagcaggtaaggcgtggatacgctggacaaagggaggatccacatgccaggtgcgatggcaggagattacatcatgctgcttagaatggcatgcagtttaaaacttacgaatagtttgtttctagaatttttcttttaatatttttcaactatggtggactgtgggtaattgaagctatggaaagtgaaaccatggataagtggggggctactgtatgactattcttggtccttgctttttccatacactgctgcacacacacacaccccctgccatcacctcatggaaatatatatacatatatgtttcacttttttcttttctttttttttgagacagggtctcgctctgttgcccaggctggagtgcagtggcacgatctcggctcactgcaa

SEQ ID NO: 230147 - DNA, 991 bp, Homo sapiens
ttccctgggtggttgggcttgtgaaatgatctgtgttggccattttgtgtagaatcctcattgtctttagcccttttccccttgagctagtctcatttcccagaaaagattctttttttctcctgcttgtaaggtgaagacctggctgctgcagcatttggggagcccagtggaaataataggctgagagtcttaggatccataattcatttacttatttgctgtattttacatatattactcctgattatatagctgtgccacatttacccttgtccagagatcttctttataccctttctagagaaattaacctctggccttctgttaggaaatggaacaggaattagctggaaagaacatatatggaactaactgcttcttgaacagactctcagccagtcctcctgttttcattcccatcttaaactcttatttccttaagtgtttgtgctgccatttgtttatccttttatgagttttacattgcaaatttagttgttgcttttttcaccatcagcttaggattcagcttcttaagtctgatcacagccgggcgcagtggctcacgcctgtaatcccagcactttgggaggccgaggagggcggatcacgaggtcaagagatcgagaccatcctggctaacacggtgaaaccccgtctctactaaaaatacaaaaaaaattagccgggcgtggtggcgggcgcctgttgtagtcccagctactcgggaggctgaggcaggagaatggcgtgaacccagaaggcagagcttgcagtgagccgagatcgggccactgcactccagtctgggtgacagtgcgagactctgtctcggaaaaaaaaaaaaaaaaaaagtctcatcacttgtccatttgttttccagctttcaaaatttggttgtatttgtctcttctccctctctgttttgtttgacatctctgttgatgactaggattatcctgtagttttcatttcctgtaatgttctt

SEQ ID NO: 230148 - DNA, 652 bp, Homo sapiens
  misc_feature (529)..(529): n is a, c, g, or t
  misc_feature (606)..(606): n is a, c, g, or t
  misc_feature (645)..(645): n is a, c, g, or t
  misc_feature (647)..(647): n is a, c, g, or t
tgagacagagtctcgctctgtcgcccaggctggagtgcaatggtgcgatctccgctcacacagcctccctagtagctgggactacaggcgcatgccccaacacccagttaagttttgtaattttagtagagacgggtttcactatgttggccaggatggtcttggtctgctgacctcgtgatccacccgcctcgacctcccaaagttcaattttcttaaaagtgaccaccaacaccatcaacatatgtttatagactagatgtatcacttgtttacccaaattgtagcataaatatctgtttttagaaagcttttccataagtctttctatatgattggattattaagcaaggctatgattaggaaataaaccactttcccctttagctagttctaatgaaagctttccaaattaaacactgtgtttgaacacttcttccattcatagcatgtgctcatcaaaaagtgctttccgtttctggtatgtcaactgtactatttataacctagttaacaaagcccacatggngaaaccttatctctactaaaagtgcaaaaattagccaggcatcatggcacatgcctgtaatcccagctacccaggangctgaggcaagagaattgcttgaacctgggaaggtggangntgcgg

SEQ ID NO: 230149 - DNA, 379 bp, Homo sapiens
gcagttctattgagatattcagcggggaaagaaaatatatagcaataatatgtaataattaaagctctatattttagaaaatatatggttgtattagaatttatactcagaaatcctaggacctaaaagtataggaaatcacaaaagataaaattgtatgattccatttatatgatatgtctagaataggcaaatctgcaggcagaaggttagtggttgcttggggttagggaagggtaggagggaataaggaggggcgagtgtgagaaatgattgttcaagtctaaatcactcttaaagtaataggacatgaccagacttgaaagaatggaggatggaggaaggtaaagagtagtagggaattaatgagtaaagcaag

SEQ ID NO: 230150 - DNA, 398 bp, Homo sapiens
gtttaactgtaatttatatttcaaaatagaaaaaaatggagtatacagagaaatgataaatatttgaggttatggatcctgatttgatcattacatatggtatgcatatatcaaaataccacatctactccataaataatgtacaattattatgtatcaacaaataagaaaataatccccccaaaactaatacaaaatagtaggcatctacaaaggggagatatttatatataaatggagaataataaagaattatcttttttaatacattaaaatgaatattcatattaagaaaggaaaaactaaagtgaaaagagaaatagcaaactgatagaaagtactgctggtactatgacagtcaatgtgcttattattcaggaaaaatactccaaaacttg

SEQ ID NO: 230151 - DNA, 640 bp, Homo sapiens
ttggaaaggaatttagagattatctgatccaagccttattttagagataagaaagatgctacagttgcttaatagatactcagactctgcccaaggcaaatacatgttaacacttctttcaggtttggtgggatctgcagatactcctatatcctacctcccaatcttatctccagggtggaaatgctgggcagtattagtcagggttctcttagagggacagaactaatatatatatgtatatataattatatatattatatagaactaatatatatatgtaatatatattatatataaatatatatatatgtaaaggggagtttattaagtattaacttacatgaccacaaggccccacaataggctgcctataagctgaggagcaaggagagccagtccgagtgccaaaactgaagaacctggagtttgatgtttgaggggaggaagcatccagcatcggagaaagatgcaggctggaaggctaggcctgtctcgctcatttcacatttttctgcctgctttatattcactggcagctgattagattgtgcccaccagattaaaggtggatctgccttccctagcccactgactcaaatgttaatctcttttggcaacaccctcacagaaacaacgc

SEQ ID NO: 230152 - DNA, 408 bp, Homo sapiens
atggcgaatggggacaagaccaatgaggctttggaaatgaatggccttgagaagacaacatgctggagtatacaagggaaaaataaggagagcaaacgtagtgtaaatagcaacccagccgtccacagaagggtaagaggatgggcgtcctgagtagtgggttggatgctgtgtccccgccaaatcgtcatgatgaaatgtaaagtggtaattcccaatgttgggagttgggcccagtagaagtcaaattaataaagacaagaaatggaatggtggttggtaggggcaaggggagggaggaatggggagtgagtgtttaaaggggctggagtctttgctggtcttctgtctgtcagggctggggaatgttctcagcgtgacttggggtagacatacggaatctcccta

SEQ ID NO: 230153 - DNA, 477 bp, Homo sapiens
caggttcaagcgattctcctgcctcagcctcctgagtatctgggattacaggcatgtgccaccacgcctggctgattttttatttttagtagagacggggtttctccatgttggtcaggctggtctcaaactcccgacctcaggtgatccacctgcctcagcctaccaaagtgctgggattacaggcgtgagccaccgtacccggcccaaaaaaatacattttacagtcagcaaaatgctgtatatattttttatccagatacaaaagttcaaattctgtatgatttcatttaaatgaggtccctagagaagtcaaattaataaagacaagaaatggaatggtggttggtaggggcaaggggagggaggaatggggagtgagtgtttaaaggggctggagtctttgctggtcttctgtctgtcagggctggggaatgttctcagcgtgacttggggtagacatacggaatctcccta

SEQ ID NO: 230154 - DNA, 474 bp, Homo sapiens
gagtgggcacctctcgcctccctccaccagcgctgctgaacctggggcctggtatgggagtttgttgcagtgaaaatactacacagatagagagatggatggacagccctgcagcaggggcctgaggaccctacccataaccagatacttcagttagtgaacttatctggggacttcccttttaggcatgggatattcatgccctctggttcaattcaacaaacactgatgagtgtgggctctgggccaggccctgtgctgggcactgggggtctgggagtgaagtgggtgtggtctccaccctcagggagctgaagccaaggtaaacaagcctggcctagagctttgcctctagtacccacggcctgggctgggttcagaggaggccacgagcagtgtttgttgaaggaatgaaaggatgcaggcaggtagagtgagggagtctgctgtgtgaggaggtaatagcaacctcgt

SEQ ID NO: 230155 - DNA, 386 bp, Homo sapiens
cgtagtggcgctcacctataatcccagctactcaggaggctgaagcaggagaatctcttgaaccagggaggtggaggttgcagtgagccgaggtcatgcccctgcactccagcctgggagacagagctagactccgtctcaaaaaaagaaactcatttatgtattaccagtatatatgtgatggcacatagaaagaataaagccagcgttgagatgtgcaggctgaaaggtggccaggcagactcagaagccaagtgtctcttcctactcccagcatggcaatgcactgcccacagtggtgcttagaggagccagttctgtgttctagactttcagtcacagcttccgtggggtgaaatcctggagtgttaaatccttccattcac

SEQ ID NO: 230156 - DNA, 338 bp, Homo sapiens
gactggcaggaagagaagcccacaaacacactgactgtcaagttcgatcaggtttccactgtaattaacctggagaacaagtcttacctgaaaaatggtgatcactgagggcaggtgctaagtaccacttctgaaagtagcttcttttggctactgggccactaacaaggccctggctgtcagcagacactctctgaggaaggaagtgcttgtagctttagaaagctcagccttgccttaaaatccctcctggatactatcatggttttcattcctgtcttccctccagataagatgaagggatttgaggctgtccaaataaagatatgcactttaaa

SEQ ID NO: 230157 - DNA, 976 bp, Homo sapiens
gctgagcgtggcgctgcgcctgctggccgagctgaccttcctgggcggccaggcgctgctctacggcttccgcgtggccccgcacttcgcgtgcgccggtccgccctgcccgcacacggtcgactgcttcgtgagccggcccaccgagaagaccgtcttcgtgctcttctatttcgcggtggggctgctgtcggcgctgctcagcgtagccgagctgggccacctgctctggaagggccgcccgcgcgccggggagcgtgacaaccgctgcaaccgtgcacacgaagaggcgcagaagctgctcccgccgccgccgccgccacctccgccaccggccctgccctcccggcgccccggccccgagccctgcgccccgccggcctatgcgcacccggcgccggccagcctccgcgagtgcggcagcggccgcggcaaggcgtcaccggccaccggccgccgagatctggccatctaggggcgggcaccgcctcgcgcggactggacggcgagggccggaccccgccacctccgcccgcaccgcagaagccggaagctgcttccaccagagctgtcgcgggacctgccccggcaggagacgcgttgtggggacggcccgcgggcggcatcgcacttgcctcgtactgcctcccagtggctgccggcaggcacctggggcaggccagggctgggggcaggagaatgaactcaggcaggtcctggatgccaccacccaggtggaaaggaaggagaccaggaccctgagagagagtggacccgagggggagaacagagcggaaggtggagagtggttgttttactggggacaaaaacaactgtgatgccagcattctcaggcactctctgtgttcagagagagagtggtccccctgtgggctctctgcgagtgtgcatacacggacacataagcactgtgagctgtgtgcacgcgcacctgtacaccctgtgtgagcgctgt

SEQ ID NO: 230158 - DNA, 209 bp, Homo sapiens
caggcagctcgtgcaatgacatcgctcgcctatcttggctccacttgctggagcataaatcattcatgtgtcccatcttccttgcatcaccagagactcctgtgctcactgcaccccctgccaagtccctgtccagtctctgggtgcatcatgctgctgccaccttttcctggccagcgtctccaccctgggggtcacttcattccaga

SEQ ID NO: 230159 - DNA, 408 bp, Homo sapiens
tcttatagctagaatatctccaaaatgctcatatatagtataattattgtgaagacctaactaaaaaatagggttggtgaaatattttttttcccctgcatctcagattttttaaaataaccagaagtcacctgtaatcccagcactttgggaggctgaggcaggtggatcacctgaggtcaggagttggagaccaggtggctaatatggtgaaacctgtctctaccaaaaatataaaattgttatattttatataatacagctgggcgtggtagtgcatacctgtaatctcagctatttgggaggtggaaacaggagaatcacctgagcccgggagttggaggttgcagtgagcctagaattgcgccactgcactttagcctgggcaacagagcaagactccatctc

SEQ ID NO: 230160 - DNA, 310 bp, Homo sapiens
aggcatggcgtagtcttcagaattgctggatccccatacgtaccttgttctgtacctcccaggaagtcaggtaaagctgatagggtcctggatcagtggaagaagaaaatttaatgtctcaattaagacattaattaattactttagaaaattatcactctccttatagaatcttcaagaagagagaaaaatgacattcaaccaagcaaatctaatgcaagtgggttatgaatacagcatcaaaatcaacacaggtaactgtggggaaatttagaaatgtgtatgaagaaaccagggaagatgaagacaa

SEQ ID NO: 230161 - DNA, 493 bp, Homo sapiens
gatagaggtggagattaaagaaatataaacaaacacatgccttgttaggcagatgataggagtaagtttaagaaatcattagcagttaagagagcaggcacagtggctcacacctgtaatcccagcactttgggaggacgaggtgactggatcacttgaggtcaggggtttgagaccagcctggctaacatgataaaaccctgtctctactaaaaatataaaattagctgggcatggtggtgcacacctgtaatcccagctacttgggaggctgaggcaggagaatctctggaacctgggaggcagaggttgcagtgagccaagatcatgccattgcactgcagcctgggcaacaagagtgaaactccatctcaaaaaccaaaaaaaagaaagaaagaaagaaatcattagcagtaagcagcaaacatgagttcaggaacttaagggtgaacaatgtaagaacaaagaattaaaacctttaaaccagcagaag

SEQ ID NO: 230162 - DNA, 299 bp, Homo sapiens
agaaaaaatacctttctgctttttctcatttggagcctgtttctgggaattttttttttttctgttgactgaaacccctttttacatatgtttagtccctttgtttgcttcttttcttgttagtatgatgtaaagttttattggccttctgaaaaacttaaaatctccccaaattggcttagagctctcccattttcttctactttttcttcctttagctatctttgataccacataaagaaatctagaggagtcttctaatatctctgagaccctttgaggaacacagtaaagtgtca

SEQ ID NO: 230163 - DNA, 401 bp, Homo sapiens
caaaccagggtgagaaagctccactctaatctcatcattttagctacatagatacatcggctcaagggaagatgccaagtgtagtactttaccactctgaggatttttgaatctataacagttgtttcaactgggccaataattatgaagggcaataattaaaaagagtatccatagtaaaggagtaagaaaaaaagttagaaaaaaagtagagaaaaatatttactagagtatttactagaacccaccactctcagatcaattttctagtgttctgttgactggcaaccagtcaacaaactttcattgagaagctattttatagtaggcattgggatagcctttgtggaataaataccgagaagcatatgtctctagcagaagacagacaagaaaatgta

SEQ ID NO: 230164 - DNA, 454 bp, Homo sapiens
ctgggcagagaacccagacactcggtaaattaccaaggattacgaaatatctccccaagagagtgttttggcgggtgagaggatatggtttaaagaaaagttttgagtgtgaatgttttcagagagtccaaggactctccattagctagtctcattattacctgtcgttttaaacgccctatcactcttacttaaagtagctgtccccgggaagcttttgtattttgtaccccttctcggggaacgggactgagtaaggaacgtaataaagcggcctaaaaggcatctccctgtatctttgatattttgcctagggaacgccctatcatgtcgcatataagcgatcgagttatgcatttgttgctagctgaagagattattccttgataaccgcttggtctggtcagaatacaaacggtactcctgttcaaagaactacaaatcccagaaggcc

SEQ ID NO: 230165 - DNA, 379 bp, Homo sapiens
tgtgtgctggactgttttgaaatatttgggttaaatgtgttttaattttttatcccttttacttgagcgagtaaataactttaatacacaaatatttcaagttttgaaatgttaagaaaggctttaaaatgctgcttttggaaatcacgttggattaaaatgcttttttgttgttcactgctatttagatttgattggggtggtggtggtggggaaatagtaaactggaatccagcattcaaacttatatgagaagattattctagttaagcagctagattgttgtataattaattcctctgtgaaactttattcttcaaaacattgagcagcactactgaaacatacagctgtagtgctgttgaaactgcaggttttt

SEQ ID NO: 230166 - DNA, 220 bp, Homo sapiens
gtcttttcacatttgtctggctgctttatattccctgggagttgattagattgtgcccaccagattaagggtggatctgccttccccagcccagggactcaaatgttaatctcttttggcaatacctacacagacacaccctggattaatactttgtatccctcaatccaatcaagttgacactcagtactaaccatcacagacatgtaggcagaactac

SEQ ID NO: 230167 - DNA, 351 bp, Homo sapiens
gtattaaaacctgtctcttctttccccctcgatcttccacattccatttcctttcagcagaatcccaagccttcaccatttttcatttttggtgctgtttcagagttgctgtgaactttacctgggtcctctatcaccttacccagccatttgtcattctgcctggtaaagggttgagcagatttatctatatgaatgatcttatttaagctattctgtacaccttctgctacttaaacaggctctatgcttccacatctgctctctatctgcctatgtgactcaaacttcaattgtccatctcagacatcacatcctccatgaagccctcttgggttatttgaagtaatc

SEQ ID NO: 230168 - DNA, 620 bp, Homo sapiens
gaaactttggagggttgccctgggccacaggtgaatgattagttcttctgtgaactaaaattaattttgagccgtttgaagccctttctggtcatttccccctcagatgatgccctgtctcctggaaggtttgggagggcacctctgctaaaaagttcctctcagctaggcttaaatgctcagagccagccattcacacatcattgctcaatcgcgatggcaaagaaagttccagtgctttttcccttgcccattttccctgatgataagccattcctactcatgccttgacccatactttaccgaggaccaggatttgaagcttcccttggctattcattgcaaggtttatttcttctctctcaggaagctcttttttattttttttagagactggttctcctgtactccacccaggctggagtacagtgacaccatcataactaactgcagtctcaacctcctgggctcaagtgctcctcttgcctcaacctcccaactactcgggaggctgaggcaggagaatggcgtgaacccaggaggcagagcttgcagtgagcggagatcgcgccactgcactccagcctgggcgacagagcaagactccgtctcaaaaacaa

SEQ ID NO: 230169 - DNA, 555 bp, Homo sapiens
tgtttttataaggactgcaaacacaaataacatgaagtgctaacagcagagttagaataagtctcctaaaatgtgtcttaatgaaattattttgaattataaaactttgtcattttcctagacttccttgggaaggcagtctgttcatggcttataactgcttcagtaccaagaggcttactatacaacattcctaccttagaaattcaaatgcatggaggctataaaaggaaacaaggaaggcatttttctctaagaacagaaagaactgaagtgtacagtgtttttctaaacttcatacctaaccctctaataatgaatggtagggctgtaattgggggaagtagctgtattttacctctaggtgagctaccaacaagaccttgtgtcttaatgcagtcactgaaagtatgccccccaaaaaatacaatgagcatttcaatatgaaaataagagctcctacaaagatcatactgttaaatggggaattggccaaagtattgcagcacaaattgctgactctggtgctctgaatgctcttttgacttaaaatct

SEQ ID NO: 230170 - DNA, 365 bp, Homo sapiens
gagaaaactgggattaaaatcaaggactgtgtcttcctgtcctataacactcatgtgtgtgctcttctctttatttctctctctccttgtgtttctctctctctctctctgccccattctcgcttacatatattatttactcaagagtctataccaaccctttgggggctgttagaatctattttatagtttgttggtcactgacctgataagtcataatcgctcagaaagaatcatcacaattttatcaggtgagagcagctgctgcagaggcacagtaaattcttagcgttatgcatcacaagactatctattcttgtttagaatttagcaatggtgtttgggaagaaataattagcaagtgt

SEQ ID NO: 230171 - DNA, 481 bp, Homo sapiens
actaaggtgggcttatggatccaacaataatctatcatgaacttttctaaatccttaatagttattccttcttaagattaaatgctgtggaaagtgagttatgtagatgaagttacccgtgggcattgctgcatttcctgatcttgtatattccgtggagaaaaagatggggatgcatttagcattgaaaggtaattgttggccaggcgcggtggctcacgcctgtaattccagcactttgggaggctgaggcaggcggatcatgaggtcaggagtttgagaccagcatggccaacaaggtgaagccccgtctctactaaaagctacaaaaattagccaggtgcagtggcaggcacctgtaatcccagctgctcaggaggctgaggcaggagaatcacttcaacccgggaggcaggttgcagtgagccgagatcgcgccactgcactccagcctgggtgacagagtgagactccgtctcaa

SEQ ID NO: 230172 - DNA, 274 bp, Homo sapiens
tggcccatcacttgtgtgtcctatgttctctatgcccctcctcagatttctgatcccccccattacctgtttcaccgacttatggcactgccacactgccaagaatagccatcatcactgaggtctgcttcctagtctggagctctcacttgccccacaaccgagattgttcgaggtaggagcctctaccgtccattcacataccccataccctacatctttccagaatcaacacagccaatctccccttagcaagtaaaaaatattcatgtcc

SEQ ID NO: 230173 - DNA, 481 bp, Homo sapiens
ttaccacccagctattgggtgagccagctggctgccatgcgactgccagtttctccaatggacatttgcacctcggtgtttcggtgagtcgtcccaccgcctttgctcatttttcctccttctatttttagggttttttttttaatgttcccggaaaggcggcacctcccaaaggtggggacatctcactggcctaggggcttacttttcagagtgactcaggcgggtagaagttactagggctggcagggccagagcctgttgtttttcaaagataatctgcaactctgaagagtggggtgaaaagatttctacacagtgtacattctacagaattctagtttctccgcgggcgcagacttttccgccctctagtctagcgtgaaaacagttcgaccactggatgtgggcggcgaagcccgcaccctagagcgcggtgtctccctgcaggagggagctccagcccgcgccgccgcggccg

SEQ ID NO: 230174 - DNA, 505 bp, Homo sapiens
acaggggaggacactttatattcatctgccgacatgtgccaggcagagaagcaggtacacttaacagcagatgtgtagcatagttattaagagcatggattttggacaatgattgcatgcgttaggttcctatgtctgacatgctaattgggtagtgttgggaaagttattagactcatctgtgccttggcttcttcaactttaaaaggggaataataaaagtatctatctcttggtttgaagtgatgattaaatgagttaacaaatgttctacatataaaacagtgccttccataaagttatgctatattttagttattattggtgttattattaaaaataaatatagtctcaatcaactattcatctaaatttctccctatccactctttctcacagttattttttgttaagtttaaagtcagttttcacaagtgcttcaagaagtacagcactttgcagtctgagactcttttatagatgaaaaccagccctggaaaggtta

SEQ ID NO: 230175 - DNA, 490 bp, Homo sapiens
ttcatgctcagctcaatgatcattcaatattgattgattgccagttccctgggaagcaggtttaatatatgccccagaatctcctcacttttccagcagacttgggctgagagaagaaccactgggcacactctttacctattacttttgtttacatccttagtcctggaagggaacagcatactctcatcaaaatagcatattctgtttctggattattaattgctggaaagtgcttccataaaaaatgggtgagaatagagaagaataaataaaatgtgagagaggtggattttgtttcttatggacatattttgactgcacagtactggattatttcttaggaaataaatattttgtgttatctatgatactttatttgtgctcctccccagcacaccttccctgtgatgcaggctgtgcacttatttgcgtttatcttttgtttgggcggaactcctatgggagaataaaactgtcatagagaatg

SEQ ID NO: 230176 - DNA, 365 bp, Homo sapiens
gtgagttgatggataaataaatgaatttattgtaggcctgagttgaaattttcagtgcctcaaatagaatgtgttttgttcttctaaatggttctcaactagatggaccatttaaacaactaagcactggcacttggttaggcagtgggataacaaagacaatcacttataatcactgcaaacaatatagcattcaatattcagaacaagtcagaaatttaaaaattttatataatgtcataggtcacatacatggtatgataaattagttatcgctacttaacatgtaatgagagcctaataaatacttgaaacaagaaggaaagaaagtaaaaaagcaagcaagaaagagaaggaaagagaca

SEQ ID NO: 230177 - DNA, 639 bp, Homo sapiens
atgaggtacttttttataactttgaaaagtttcataaactgctcacatttcttaaatttggatattcaaagctcacggtatcaaatcccatattagtgctattttaaatttacaaaaatttaaatttcttatgtaaacactttttttttttttatctactccatcactaagctggagtgcagtggcccaatctcggctcactgcaacctccaccttcgggttcaaatgattctcctgcctcagcctcccgagtagctgggaccacaggcatgagccaccatgcccagcaattttttttgtatttttagtagagacgaggtctcatcgtgttggccaggctggtctcaaaatcctgacctcacgttgatccacctgcgttggcctcccaaagtgctgggattacagccgtgagccactgcacctggcctctttcttaatttctaattgataaccttttaaatagatacaaccacctcaagtctttatatattagtcacagatgttccagtcttacttgatatcctggctttttcttcattgcttagaccttgtgcatgttgggtacagggtatatatttcctgatgcttattcaatgttttgtgtgtatgtatgtatgtatgtatgtgtgtgtgtgtgtg

SEQ ID NO: 230178 - DNA, 473 bp, Homo sapiens
cagccagccatcagggagccagcaatagatgcaaggattggaggactctgagagacgagcatgtacaggaagcacccgggctgtgcacacacaggaaagaccacgtgaggacccagcgagaaggcggccatccccaagccaaggagaaaggcctcaagaacaaacaaatctgccaacaccttgattttgaacttccagcctcctgaactgtggaaaaataagtttctgctgttgaagcctctgaggcagtggtattttcttatggaagccccagcagacccctatgtgacttggtagccccatctgtgactggagaaggtgaagtccaccggccctggtgctgggagaatcacactggatgctgagactgggcctcactaagctcacaggtgggagattctgggtaaagaggtggaatttgtgtcacagtcaatcaacgtgttcagtgacaataataacagaaactaccgttc

SEQ ID NO: 230179 - DNA, 731 bp, Homo sapiens
taagaattcatccagttaccaactcccctacgaccaacggagtccaagctagagccactcatggtgtggtccatgggtggcagcttcagcatgttggaaaagcaggatcccagggaccaccatgcacctgctccatcagaatctccagtggccaactcggggaacatagccagacctaatctctataaagaatgtttttaaaaattagacaggggtgtggtggcacacacctgtagtctcatcatctcctcaggcagctgaggtgggaggacgttttgagcccaggagtttgaggctgcagtgagcagagattgtgccactatactccaccttgggtaacagcaagaccctgttttaaaaaaaaaatctccagtggggacagcaagctgggcaggaactatgttacaggcactccaggggatgcttcaaaaccacttccaccctttttgggtctccccacaacctctccagcttccatttcagccttatctcttccacatgttataaccagaatgatcttttcaaaatgcactcctaaatcacgcaaatgcctcccattcctggccttataactgcttaaagggttgtcctcacgctaacttcagtgggacccatgaatgacatccactcccttccctaccctcctccctttttataagatccctctggcccctgccccagggccttcgttcagctccaccctatctagaaggctcccagctgcctccaga

SEQ ID NO: 230180 - DNA, 545 bp, Homo sapiens
aaagtatacttgctgtctgtacatttccactgtgaaaactccttgaaatcatgtagacaaatgaaagctaaacatcaaataaataacctaaactggtaatactcccatttggctctccttgtgtcttttcatgtgggttagctcttcaaccagattcagcatataaattgagtatgtatggttatatggtgactttcaaaagtaaatactttttctgtggaacaaaagagatggatttgtggttttccaggattccttttccctgacttggtagaaagatagccaggcatagctcagcagacctgaaaataggtgagctgtcaaggtgttggcagggagaggctcctctgggtgggacttggggcatcctaccagcgaaaaagagactaagtttaagtgatttcacatttgggctttacttactataattgctgaagtgctaaattgagtgtgacaaatctaacaggtaattgccaagtaggtttcattaccagtcattgcatagataaatgatgttccttatgttaaaaaataaaaccaaacta

SEQ ID NO: 230181 - DNA, 526 bp, Homo sapiens
gaggaatatagcacgtaaaggaagttacgtggacacatagaggagaacaacggacactgggacctctcagagggtggagggtgggaggaaggagaggatcaggaaaaataactaatgggtactgggcttaagacctgggtgatgaaataatctgcacaacaaacccatatgacatgtttacttatgcaacaaacctgcaattgtacccctgaacttaaaaaaagatgcttttaaaagtattttttctactaccaagatgtatttttttagaggcagggtctcaatctgtcatccaagctgcagtgcagtggtgtcattatagctcactgcagcctccaacatctgggcttaagcaatcctcctgcctcagcctcctgagtaactaggattacacatgttcagccaccacacatggctaatttttttttttttaagtagcaatgggttctgttacgttgcccaggctggtcttaaacaacctgcctcaaggaatccttctgccctgagtgagacatgagtctcactc

SEQ ID NO: 230182 - DNA, 1561 bp, Homo sapiens
tcttgaactcctgacctcaagtgatccacccaccttggcctcccaaagtgctggaattacaggtgtgagccaccgtgcccagccaaaattcttaaagaataaaccaaatcttaaacaatcttccaattagaattattttcagccaaattatcatttaagtgtgagagtaaaataaagacattttcttttttcctttctctttttttttttttttttgagatggagtctcgctctgtcgcccaggctagagtgcagtggtgcaatctcggctcactgcaagctctgcctcaggggttcatgccattctccagcctcagcctcccaagtagccgggactacaggcgcccaccaccatgcctgactaattttttttctatttttagtagagacagggtttcaccgtgttagccaggatggtctcaatctcctgacctcgtgatctgcctgcctcggcctcccaaagtgttaggattacaggtgtgagccaccgcgcccggccgataatgtgttgttttaaggcattaattttgtggtacatacaaaagtaatttgtgtgtacatacatgcatatatacatatatatgtacacacacatatatttgttaaacctacacacagtgtttattttattatttcgataaaactattattcacagctgagccttgtggtgcactgtaatagtttcttttcgtttttttttccctgaagttaataattaccttgtttctcatctgccttatttttttgtacctgttgctaattcctaccacaacttctaatataattttatttttctttaacaatactgttaccttaggacttctttttctttttttctttttaactgacacataataattgtgcatctctatggggtacaatgtgatgtttcaatacatgcatacattgtgtaatgatcaaaacaggatagttggtatatccatcacctccagcatttatcacttctttgtggtgggcctaccacactttccaatagccatcagtattgctttccacacgggcagtcacagcaggtaaaagatgtttcagttccattttttaagttatctatcctctttcactctgggctagttgctttctaggcacattgtagctgatgctctgtgacttccttttgtggtcatctttggaattcccattactttccggttggaatctctgttttctggctttcgtgtcctcctcatgcttggctcactcccctcattagagcacatcttccaggacacacatctgtccatatcaaaatccattcatggctgggcacagtggctcacgcctctaatcccaggactttgggaggccgaggcgggtggatcacctgaggttaggagtttgagaccagcctggccaacatggcaaaatcccatctctactaaaaatgcaaaaattagccgggcatggcggcgggtgcctgtaatcccagctactcgtgaggctgaggcaggagaattgcttgaacccacaaggcagaggttgtggtgagccgagaatgcgccactgcactccagcctgggctagagagcaagggtccatctc

SEQ ID NO: 230183 - DNA, 423 bp, Homo sapiens
caatgagaacaattaaaactacatctgtgggggagtgaataaactggcttccaactttttgtttttccagtccatctctaagaacctttaaagacacagtacaccatgagaggcttctacccccgaaaccagaaacccccgaaaccagaaacccccaaaacagatcgttgccaaattaaaacagattctgttaactaatttggttttctaaccataaaaatcattatgattattttaaagcatttgggaagaaagggtttacttccagagacatagaggataaacataacaaaattaggttaatattgtatatgcagtttatattctacttttgtcacttaatattacagaataagcctgttgccacttcatacaattgttttggaaaacattatattaaatatttttaaatatcacatttaa

SEQ ID NO: 230184 - DNA, 355 bp, Homo sapiens
cgggagggcggccagagcacggtaaatgccccagaagtttggcagattaggccaaccttgtccgctcgcctgggggccccggacctgcactggcgggagaccgcgaaggcgcggggacgcagagggcgaagcttggtaccctgcagctactgctcgcgaggagtcccagcttaccctcccggatccgctggggctcacctggcacccccggggacagacgaaatacctcgcgcgccagagagggctcggagctccctctgttatacaaagtcggagagggagaggagtccgggaggttcggagcaaagaattcaccctgcctgccttagagaaataaagtttaattgcgatctgt

SEQ ID NO: 230185 - DNA, 277 bp, Homo sapiens
ccgcgtcgacgattttaggaagtagaatcagaagtacttggtgaccaagtgaatgtggtaaaggaggaatgagtggaaggtagggagagagaaaggagggtggaagccatcagtcatttacaagaaaggggtttcatagataagctaagtctgcaggactggccttaagagtaacttattctcttttgttattgacacatctccctaacataatgttgaagaaactacatatgtttctggtaggggtgggcaggattgtatgccttaaattcttagc

SEQ ID NO: 230186 - DNA, 923 bp, Homo sapiens
ggctcaccgctgctgcaaccggaaccgcatcgaggagcgctcccagacggtgaaatgctcctgtttttctggccaggtggccggcaccacgcgggcaaagccctcctgcgtggacgacctgctcttggctgcccactgtgctcgtagagaccctagagctgcactccgcctcctgctcccacagcctccatcgtcctgcagagatggtggtgtcagatggagccctgcctgccgggggaggagtgtaaggtgctcccggacctgtcgggatggagctgcagcagtggacacaaagtcaaaaccaccaaggtcacacgatagctcttgggggtcacggcctggacaagaaaggcttgactgagccgtgaactgaagaatggtatccagtcatcagccaggaaagatggggattcacttacatgcctcatgtcaaatgcagcatcagtctttccggggcatttcagttaagctgctcagcagatatggatggatctgcaatcacatacctaatgtggagctgggcttttctggagacacgaaggtcaacacacaattcctgcccttaaggaatgtccagttgaattggagagttgatgacagacaatttagataatttaggttaaagtacttgataccagactgcggcttctgggccacatgctatggcatgatgggggtttgggaatgagattcccacagttcttcagataccctgtggccacagggcatagaaacaagaggtcacattcagcacccaccacctccctctttcgcatcagttctgaatccccagcaagctgttaacatgttgcaggaaaacactctccccttatgccagaccagcagtatctcatttggatgggattggattgacttgcggaaggaaagtaaaaataaagccaaataacttcccaaatctttgg

SEQ ID NO: 230187 - DNA, 440 bp, Homo sapiens
cttgaggacattacgctaagtgaaataagccagtcacaaaaggacaaatcccttctggttccactcatacgaggtccctacagaagtcaaattaaaagagacaaaggagaacagaggctgccaggggctggtggatggggaatagggagttggtgcttaatgggtacagagcttcagttttacaagatgacaaaagttcatcttgtaaagttgaacttgtggatacgtggtagagaaggttgcacagtatgaatgtatttaatgccactaaattgcacacttaaaataggtaagatggtaaatttcacgtgtattttaacatgtcaaattcttttaaatgacattagaattgactacataggttagataataaaaaccaacttgccttcatctgtgcaagtttctcaaatgattatcaaataaaaatgaaatttccatgc

SEQ ID NO: 230188 - DNA, 586 bp, Homo sapiens
agccaccacgctgggccactactcagtcatttttaatagttgaatgtttttcctcccatcttgttttccatgaataaaatagacattttaagtcaaaactggaagcccactgcatatataaacttttaactcctttttttctcccacataacccctgtgatatttcttttcaaagaatattttagtagctgcctgcagtatgaaatttacatgctataatttagacattccctttattttgaacatttgggctatttccagtttttctctattttaaaacatgagccttcttatatatctgattatttcacttatgctgaattgttttttaatattcacaagttggtgttgaagttcagtatttagaagacaaagagcattgacgggtgtgaacatagtaacgactctgtccaagtgacccaaatggattctataactcttctgggttttgatttttgtaaaaaacaaaatgaagctcttattgaatccagttctatgtgtgtgacaaagtattcttgacaggttcctaaaaagacatgtgaatgtagtcagtggttttctttttaaagtctaatatttctccttc

SEQ ID NO: 230189 - DNA, 521 bp, Homo sapiens
gctcggacctctctccacactggacacagccaggctcttgacaagcttgtggggagtcctggaagtgacttgcatcaatcctacattccctgtgatatttcttttcaaagaatattttagtagctgcctgcagtatgaaatttacatgctataatttagacattccctttattttgaacatttgggctatttccagtttttctctattttaaaacatgagccttcttatatatctgattatttcacttatgctgaattgttttttaatattcacaagttggtgttgaagttcagtatttagaagacaaagagcattgacgggtgtgaacatagtaacgactctgtccaagtgacccaaatggattctataactcttctgggttttgatttttgtaaaaaacaaaatgaagctcttattgaatccagttctatgtgtgtgacaaagtattcttgacaggttcctaaaaagacatgtgaatgtagtcagtggttttctttttaaagtctaatatttctccttc

SEQ ID NO: 230190 - DNA, 765 bp, Homo sapiens
cccgacctctgccagggcgcacggggactccagagcggatcctctacgagttctaataggaggccagggagccgggacatcagagacaaattcctccgaagtccccctccggttccactgactggagcctttgggctgaaaccccacgagctccccacccccatgtccatgaggggagcaaaacggagcccccgggggcacgcaggcttcgtttctgggtgttggttttgcttttggttttttcagccggtgcagtgacccggaacagcgcggccgcttctccgacgcccgcggctccccactgcgccgaggcgagcgccacggctaaagcccaagcctcggcgcccgctgcgcctgccggagttctgcttgtccgagcaggcagcggggctcaggcacggcggcgacgtcgaagggccagtcggcagacagggctgggtctctgcggccagagcgccgcaggaaagccctgcaaacggtgggacgagggtggcggcggcggcggcggaggtggcgagaaaggcgccacgggcctggcggagaagagggtttccgtgggggtggaacaaaggaattcaccctcggaagaaaggggccgagcatgcagccgggaatggccaaccctggagacctgcaggagtgcgagcgctgcgacattagtcccagggatccaacgaaatctgccccgccgagggccccagcctggcatctccattcggcctctctcttctggtcaatcccgctttaatgggggtggtgggtgtg

SEQ ID NO: 230191 - DNA, 871 bp, Homo sapiens
ttaagggaactggacaggaaggattttgcgcagggtgtgctccttatctttatggtaatctgatattgaaaagagtgtccgcatgtttgcggtggattgagtgttcacctggctgcgctgcccacctgaaatgcagcctgtggagtgaagagtcggcaatttggaagcccacctttcctcctttctggtgggcatttttttagatgccagggggagagctttcccgcctgactccccgagcctaggggctttcccatgtcttaaccccacatcacaaaattaaatttgggccaggtgcgcggtggctcacgccggtaatcccagcgctttgggaggccgaggctggcggatcgcttgagctcagcagttcgagaccagcttgagcgacgtattaagatctcgtttctacaaaaaataaaattaaccggccgtggtggcgcgcacctgcggtcccagctcctcgggaagatgaggtgggagaatcgcttgaacccgggaggcggaggttgcagtgagccgagatcgttccactgcactccagcctgggcgacagagcgagaccctgtctcaaacaacaacaaaaactttatcattatttacttaaaaggcctccgcgttgtggttagatagtgacgtgtgtgccatcctccactttttcccccggcgggttgttaaatgttttgttttacctcggaggtattttgactttttcaaagtcactgattatttaacctcctagtttctcttctcgtcgactgcagcaagcttccggttgctctgcctgccctcagtgtcccccatctaccagctgaccttccagtcctcccacccacgcccttgtcctgcttgcggctcccgcaggactaagctc

SEQ ID NO: 230192 - DNA, 548 bp, Homo sapiens
agtgtggcgaggtggttaatagtgcacactcaagcgtcgctgcctggatttgaatcccacctgggccgctgtgcaggcacgtgctcacgtggcaggcccgagcccttccaccccacacaggctgctggcaatgctggcccggagctggcgtctgggagcctggattcgggaggcctcccattgctccctaactgacaaggatggctcactgtgcctgagcaatctgtacaagtaatgtggtttatactgaccaccagcttgccttctaagggtctggaatttcagtacctgccaggcagagggtggccacatgaccagcccctagtaaaaaccctgggcactcagtctctctagcgggcttccctgccagatgacatgtcacgtgggttgtcacaactccttgcagcaagaattgggtgactcccctgggagagggctctggaaactggcacctgctttcctctggacttggccccgtgtggcttttccctttgctgatttgctttgaatccttttaccgtaataaatcatagccacgtgtacaacca

SEQ ID NO: 230193 - DNA, 466 bp, Homo sapiens
ctaaatattatacttttaaaaatacatgttgatctgatcttcattgttttattagtaacataaataaactatcatggtatgcttaaacagttaaatgtttttgtcagcctgaaagttaatagttttctttctttctttcaagacagcattattaataacatattatttcaagttgactagccctaaaaggtatcttattctccagtcaagtttgcatgaactttatggatagtgctaacttgactggagaaataggagatctttcaggcttatgttagttaactgatcaacatactttgatcactaatggtctttgaactgtttgaatgacagtgctcagtggagtggtttcactcataggtataatttttactaattacaaagtagaccttggccttcagtgaaaacaatgtctatattgatttaatttatattgtaggaactgtaacaataaaataagagtaac

SEQ ID NO: 230194 - DNA, 314 bp, Homo sapiens
cttaaaaaaaaaaaattacatctgcaaagagccatttaaaaaaaaagtaaggtcctagtcacaggttctgggacatggatgtcatcttttcaggggctgtgacccaactgactacatccttcatggttctgatggctttcaccgccccctgccagcatgttgtatattaatttgttattcgtatatgttctccttgcctggacctggctgcaaggatccagagggatagggacccctttcattgtgtttgttgctgtatttgtattgctcagaacgtagtaggtactcagtaaatattcgttgcatgaaaaaat

SEQ ID NO: 230195 - DNA, 867 bp, Homo sapiens
cttgtgcaactggaaatgcataatgtttgtttttactgtgggactggacgttggcaaagggtgagattcaggaaggttcagaaagaaggaagatttctatttgctactgttctttacagacagtttttattttggttttgatttgtgtgactgtgctgggtgtcttaccttatttgagagtattctcatggggctgtgtgtcagcccggtaactccaggtccttctttaatgctaatttcccatcacgggcagccactggcagctggcccataaatgacagtgacgtggcccctgagtaccactcatttacaattgtattgctacttttgacagttccacgaagaaagcctaacaaaatcttcaaagttttctttgagaaagcatccggtaatgtctgtcccttatctgaacagccctctctataccttgtcactcactgctcccctgacttgcttgatgtgacttggttctctgtgtcaatgataggctcttgtatgtgactggcaacacccacattcatatgaaaatcactccctctgctatttgaactttcatcctgtgatgaatccattgaataacagtgcgtttaatattcttatgcaactatttctgaagtgctttttatgcatttcattttttagggttccccccaacttacatggaaaagggatggttgcatttctgtgtcatatgcatattctttgtggaggcaccggtaattctgagcttgggaagtaaatgaaatttcctgtctttgaacttaaagtcttttgatttttaagatttgactgctttgaatgataaacttctaatatacaagcatctacttacacatgtatccaaataaagactacgctaaacactgg

SEQ ID NO: 230196 - DNA, 498 bp, Homo sapiens
gagacggagtctcgctctgtcgcccaggctggagtgcagtggcgggatctcggctcactgcaagctccgcctcccgggttcacgccattcttctgcctcagcctcccaagtagctgggactacaggcgcccgccactacgcccggctaatttttttttgtatttttagtagagacggggtttcaccgtttttagccgggatggtctcgatctcctgacctcgtgatccgcccgcctcggcctcccaaagtgctgggattacaggcgtgagccaccgcgcccagccaagcactttcttttcatttgtgccatatatattgttgaaaattggcatttatatacccttctggctttaaacaattggttccattttccatgtaactagacacaaatgcattatgcaaaattgtgtttgtaaggagagatcatccttcattccgtttcataaaggttttctcttttttactgtttacgtgagggttgaatatgtctgccttct

SEQ ID NO: 230197 - DNA, 328 bp, Homo sapiens
tgattaagtcatgagatcttagctcattgaaaccatcttctccgggatccaacaattctcccgcctcggcctcccaaagtgctgggattacaggcgtgagccaccgcgcccagccaagcactttcttttcatttgtgccatatatattgttgaaaattggcatttatatacccttctggctttaaacaattggttccattttccatgtaactagacacaaatgcattatgcaaaattgtgtttgtaaggagagatcatccttcattccgtttcataaaggttttctcttttttactgtttacgtgagggttgaatatgtctgccttct

SEQ ID NO: 230198 - DNA, 842 bp, Homo sapiens
aatctacttaaaaggattagcttccaaaagacttgggctttgctttctttttgctcactctgataaaagtgagctgccatgttgtaagttatcttatggacaggcccatgtacaaactgagtcctgccagcaaccacttgagtaagtgtggaagtggatccttcatgtgttctgttaagccttgagatgattccggtctgtgatagactctccagaggacctagctaagccatgtccaggtttctgacttccacaaattaagttacaaaatatttgttttttccagctgctaaattttggagtaattagttatccaggcatggataaacaatacagctgcctgctcacaatggtgaataaatattgaagaaatgaatataaaaataacttattaggctgggtgtagtggcacacacctgtagtcccagtgctttggtaggttgaggtaggaggattattcgagcccatgagaggaggttactgtgagctgtgattacatcactgcagtccagcccgggtgacagagcgagaccctgtctcttaaaagaaaaaagtcttattaatgtcagagtaagattatgtaagtgcaagtacttttttgttgtaaattactatgggtaagactttcttatatgatcatgttatctttatctgatagcttaccatagtgtgtacataccacatatgtactttgattttccttttccttttttttttctttgaaacagtgtcttgctgtcacccagtctggagtgcagtggcacaatttcagctcactgcagccttgacctcctgagctcaagcagtcttcccacttcagcctcctgaatagctgggaatac

SEQ ID NO: 230199 - DNA, 452 bp, Homo sapiens
ccccaaccctcagctccagcctgcatgtagaactgccctggcttccccattcctgctcccttggacctttcactggtaaaacaggagactggagaaagacctggggaggggaatggggaaaaaagcctcactccaagtcagtatgacttccttaagatgacgatgatcgcattgtaaaccagctcatcaacatctaacagggatgggatggtggaaggagatttgggggaggaagattcagctgagatgagaataaatctggaaacatcaagaatagggagctgggatcaggtaattacgtggtctgctaggaaccttaaacataattttgaaaagttcagttggagttctagtctaagccttttaaaataagtttactatttttgaaaatcactcaagcaaaaggtgttccttgttttaaaataaaataaaaatttaagtgattaaacatt

SEQ ID NO: 230200 - DNA, 423 bp, Homo sapiens
ggggaaagggtagcagggtggggatggagcgctgcccttccgaggaacgtgggtgggggcaccctcactagagcggctgtggacatacgctaaatccctgcctacacacccaaaattgctagggctgtggactttctcatccgccgcctccagggcttcggttcttgagatttgcagaagtgcacctccacctcctgcccattccgctgtcgcgtcctaaacccagtgggaggcacgggatgacccagccctcgggacccttttccccagattataggttactgaggattgcgggggttggcgggaggaatgactccctacccccacccccgcccgtaaagttggtggagcgggtggtgacagacagtttgccccttttgcagatggccctataaataaaaaacgcactttctcccctgctta

SEQ ID NO: 230201 - DNA, 642 bp, Homo sapiens
tgcagctctcacggatgccaggtgaatttggacaaggttggggaattttgacctgttcacataccctgagtctactcacccccacctgaggccacacttggcccctttcttggctctgggtttagacggattacagggggagatgctgtttactgccctctcctttcatttgcaccactgcttcctccatgaagggccctggttgttacttggccccggtccctccctctctcgaggaccccgacatgccaacagccaaggcacagttgtgccttgagagcatccagctgttgtcccctcaggaggaagtatttttgaaggactgttaaataaagaggaaagaatagaaaaaagacacacatctgcctgagagccgtgcttatcattaaaaaactaataatcagacctcattgactgaggcttatttagaagaaattataggccgggtgcagtggctcacgaggtcaagagatcgagaccatctggccaacatggtgaaaccctgtctccactaaaaatacaaaaattagccgggtatggtggcgcgcacctgtaggcccagctacttgggaggctgaggcaggagaatcacttgaacccgggaggcggaggttgcagtgagctgagattgcaccattgcac

SEQ ID NO: 230202 - DNA, 252 bp, Homo sapiens
aaaacagatcaaagcatttcattcttctaagtcagagactgggtcagactgtattttccaaagatagccacatttttgtggatccattcttaccatgtgaaaaacattgtctacacatagtattaccgcagattcctcctaagaacctactaaaattttgtgtgtgtaagtttggcatcaagaaatggggtctatgttccctccctttggacgtgactcctctaccaataaagtatggctatgtgatctctg

SEQ ID NO: 230203 - DNA, 317 bp, Homo sapiens
gcctcccaaagttctgggattacatgcatgagccactgtgcccggcctgctttttaacagtttattttttcttagtgtactaatgtggtgaatttcattgatttattattattttttaaaattttattttaatataaagttacagaaagattataagaagagtacaaagaactcgtatatcctttacccagttcatatttgcaccatttttcatttgtttatcatttccccgattgtcttaccatttccccttccatatatagtctttctatagatgtaaacgcacacacacacgtccttttttttttttaaaaaaa

SEQ ID NO: 230204 - DNA, 384 bp, Homo sapiens
gcgtccaacaggcacttggtgcagatctgaacccattgagctattggctcatgttccctatgttctattaagtatcatgagcagaaattgagctctttggcttttacccactgagtatggctataggacaggtctctctctctctctctctctctctctctctctctctttctctctcattctttgcatcattattttttgccatcagtgtgggtttttggttttgaggttatgaagtgaatttctggggacaatctctgttgggtcgtgttaacaaggatccagtccctgtttggtgatacatgacagctaatctggtctgtgagtcttctttattgtctatttattgtcctgagaataatggcatttcctgatatttgagac

SEQ ID NO: 230205 - DNA, 412 bp, Homo sapiens
gagcttctagacagtccctgacttacagtagctactataaaaaattatcgaattgaacctaggggacctgacatgttttgctccataattcagtggttcattgctgttgtccgccaggtcagtctgacttgctgtagcatatagattccagctagtggaaggtatagcttttcctaaagccctgggctggaaatggtacaagtcctttgccttcaaattttattgtcaagaactgaatcacataaccacacttaactgcaagtgaggatagaaaatgcaaaaaccaccaggtgtggtggctcacgtctgtaatcccagctcttagggaggcagaggcgggagaatagcttgagtccaggagtttgagacttgcctgggcaatatagcatgaccctattctccacacaaagga

SEQ ID NO: 230206 - DNA, 528 bp, Homo sapiens
gaaacactgagtaggagaatgccaagtaaatttgttgatattagttagtcagacactatctatagtcaaagaaatagtactctgcattggtctgagtagatggcagacccctcttttctctcctgcagtgctcactctacataattaccagcagtggcctcaagttcagactgacatacagagcacccaccaatccataacctggcttcagattcccttagctttttgcgggaggatataaggcaggaaacggcattctagcagggtagtatcagtggagtctttatacaaatccagggaatatttgttttactcatcaagttacagcttagttgtaagggaatgagacaatggaggtagtatagaaacacctgagcttaggtaagacatatggtccatagaaaccggtagcttgaaacaccccatgaacttagcttctgcgttcctccaagggccatactcagttaggagagttgcactacacacaggaaagccaaatcatctgcttctgaacaagtatttgtagtc

SEQ ID NO: 230207 - DNA, 654 bp, Homo sapiens
agtgtagtgagtggctcgatctcggctcactgcaacgtccgcctcccgggttcaagccattctcctggctcagcctcccgagtagctgagattacaggcacccgccaccacgcccggctaatttttgtattttttagtagagatggggtttcaccgtgttgactgggctgttctcaaactcctgacgtgagatgatccgcccaccgcggactcccaaagtgctgggattacaagcgtgagccaacgcacccggccacataaatcaattttaatccagctgtaacttaaggtggttacacgttgtgtacattagaccccaataaaaacgtcaaaaacaaaacgaggttccttggtgcctgctgaacctgccaactgcaaggtcgagtttccttgtgtgggctgcacccaccccaagcccctggggtccccaggtgtgttccaagttgagcagcagctccactgcctgaaatgcacacatctatgcaatattcacaaagtgagtgccagcacagagacaattcatccccatgctcacccagaaggcaggtgttctgttccaggctgacaggtaaggaaacaggctcagtgaggcaaagggtcctgcccaaggtcacagagccaatttgcaggacggctgagacccaaagccccggg

SEQ ID NO: 230208 - DNA, 430 bp, Homo sapiens
cagagtgaatgtttcctaatgccattccctttccacaactccactccacgagagagaagtgacttaagcctgctaaggagcggagggaaaagttcaggaaggtttcagcatgctatcattagcgctatcattagctcttgaggactgaataggaatttactaggggtgggtgggggagaatattccaggcaaatggaagagaggtagatacaaaggcacagaggtatgtagggaacaataagggaaattgtgtatttgctgggggagggctaaagatgaggattcaaggccaggagcagtaatcccaggactttgggaggtcgaggtgggaggattgcttgagcccaggagttggaggctgtattgatctatgatggcgccactgtactccagcctgtacgacagagcaagactctgtctctaaaagaga

SEQ ID NO: 230209 - DNA, 495 bp, Homo sapiens
ctagcattacttcatctagcattactaaaatagcattacttcaggatggtggaggatcggcaatctaatagcaaatctttattgaactcttcttactgccttaacatgtgccggatgctgagagatgaattcaaagcctcttagggagtttatattctagaaatctttgatcagaaattcctagaagagagggaccttgtgttcagcactctgtagcagttcttaaacagtagcacgcataataacagggcttttaaaaacatttttgagcctcaaaaccgggtatcaggattcagtgagtaaggggtggaggataattcgaatttctggtaagcacacacgatgctgatggggtggtcgccatcccagcagcacagctctaaacgcggttcataactgtgtgtattttctcaatagtgttagaaaagcaattgctgaaaagtcacacctggttctacaatatttactcttaggttttggttcgatagtctaaat

SEQ ID NO: 230210 - DNA, 365 bp, Homo sapiens
aagaaactgtgttctaaaaacgctaatgggctggatatgcctggtaggtaacagtttgccaacccctggtctaatcccatttcaaaatcaatgcaaaaaggacataatcagtgctgcaatacttttattcattaaagtcaacattacttctctgtaaccactctgaaaaattcctgttaccactgaaaccgaggagtgaatgaaatccaccaatttcaagttctatgctaaaacatgctttgtcgttatacctataactataataaaacaacctcatattctgcacacttcctaagtccgtagatattccccaactacaactgtataggtaaggaatttgagtcatgtgtatttgacataaaggc

SEQ ID NO: 230211 - DNA, 481 bp, Homo sapiens
cattaaacaagtaaactaatttgcataagtatatattaaggattttagggttttgatataatgttgcccaataactctctatatgccgggcgtaagaacttatcaagtatatagagggtcaggaacagaggaatgtgttcatggccatgaattatagatgaaagggtttccagattggaatgcagttgattatagaggagttcttagagaggggtaaaaacatactaccaatgaaagatgtagacaattgaatataagatgtaaagttttccaaaatgattttcagttgtactgtttatagacatttgcaaatgccattgttatttatattgattctttttggaattattgtattcttctttttctattgatggttgttttccattgtatagctgtaccacagtttatccattcatctactgaagggcatcttggttaattccaagttttggcaattatgaataaagatgctattaacatc

SEQ ID NO: 230212 - DNA, 953 bp, Homo sapiens
tctataccaggttgtatagatggctgcatggaaatggagggaaagcggagggtgacttcagcttaattcagccatattggtaagcatctcagtgtcctttgcattctgtcatagaataccttggggttcagaacatgagatcttccagataaaacagtcaaagaagctgcagcagtaggaaggacagctttgaaaacaccagccctccaccgaggataaccaaaggcgccattttgcccatccatgcagtctgtagtatccctctgcacttgaaagcccagggacttagtcactgtgtgctgtttgtagatcctccgggtgaagaggcagataactgaaagttataccatgataatcactttatgttgttagtaatttcagtggggaaaggaatgcctgagcagctagagctttcctatagatgattctgaaaaagaatacctcgaatagccatatgttttagcgatacatttctgaatatttatcaaacactatggtattctcatcaaatacaaaatatgtcatgagcaagccattcatagccagtgaaagaaaataagacaccacaggtaaccagccaccatcatagcagcacactggaaagaaagaggcgtacatccaccagcaccctgatattgtcacccaatctgttagggctggaataagagatgcacctaacagaaggatcatgacaaaatctgagtcaacatgttttgtgaaaggttatttgcaaatccatcctaattgtttcaaactttattttgatacccaaataacgcaaaactgttttcagaactataatactgtcagctctattttacaagttatgaaaaatcaagtttagaatcattaaccacattctcaataggcctgaaaaagtgcttattatcaagcagttatcacacccctccagaagaaagagggcatcatgttgaattatgtccataggtgct

SEQ ID NO: 230213 - DNA, 471 bp, Homo sapiens
acacttggagtcatatgcaaccatttctgcactatgttattgactacgccgtaagcagtagtgggggcttgagctctaggaggcagggctcacagaggggttgggggtcgtcttggagggtggatacctaaacattcttcgctgaatcctgaaagcaaaagaaaactctaaaaagatgttggggggagcacagtgcagtgcctcatgcctgtaatcccagcactttgggaggccatggcgggcagatcacttgaggtcaggagttcgagaccagcctggcccacatggtgaaacccccatctctactaaaaatacaaaaagtagccaggtgtggtggtgcatgcctataatcccagctactcaggaggctaaggtgggagaatcgcttgaacccaggaggcagaggttgcagtgagctgagatcacgtcactgcactccagcctgggccacaatgagactcttatctcaga

SEQ ID NO: 230214 - DNA, 292 bp, Homo sapiens
ttggtatttcgggggtcttttgaagaggagtctgctctctgtaatcattgccatgttttatttgagctctcggagatgggcatttcctttgcctgggttttgtggaggagacatgcactaactagatttggggtttcaaagactcaggtcctcagataatcacttggtacctgttctttggccagtggccaaacatctccgcatctcagcatctttcttctagggactgttggtcaacagcttatgctaccaacttctaccctgaaaaatattcacttttttagggtttttt

SEQ ID NO: 230215 - DNA, 230 bp, Homo sapiens
tggtgcagaggctggtctggtggccagagcagaggggacggtggaaggagctttacctgccaggctcagagtctcagtctccccaggcagcaagagttgacattctgccaccagagaataaggatccagaactcaccctggtgtcactaatcacaatggggtttcctattcgactccaatatttaaatgtaattaatgttaaataaaagcaccttcatttactgaaatta

SEQ ID NO: 230216 - DNA, 365 bp, Homo sapiens
aaaaatttccgaacaggcagcttgggtactgatgttcacatatagttaagtgatttctattttgggtttcttttatttctttcagcattttaaaatgctttccttcaattggcactacaaaaataatgaaaataataatagctgaaagggcattgcatgagaagcgcaggcatgagaagataaagagaacattaaagaaatacaacttttacaggcctgcagtggttgtcaaaattataagaagttcaataaatacaaagatttagttgttttcataactgactgatggacaacatgaaggggtgaaagaagtgaaaaattgctaaagtgaagcatcctgcctgtcctagctgggtgatatgcta

SEQ ID NO: 230217 - DNA, 531 bp, Homo sapiens
aggtttgaaaactttactttcatttttgtaaattatctttattcttctcacagatttgtagtgtttttcttctccttggtgttatgcagcccgttttaagtaatttatttttttattttaaggaattaattttgttatttttctctttttggaacactgcacatttgaattcaagcacttatatctggttttcacttgattttagccaaaaggctgagaagtaattatgtctgcttttcaattttagaaacttatgagtcaccaactctgaatactgactttgattttgaaaatatattctataaaaataatcagacttgttttactccatctcatgctccctgtcatacatgtatattttagattttgttaatataacttttttttttttttttttacagtaattaattactgcttagtgttctagttcactaatcttctcatcatttcagactaatttaatgtttcacacatatgttgtatattaagtagactgattatattttcaattgtttacttcaaaaaaaaaaa

SEQ ID NO: 230218 - DNA, 402 bp, Homo sapiens
ctcaaaatatgtaaagcaaaagctgacagtactacaaggagaaatggataaatctatgattctagtgggaagtgctaacacacatctcccaaacatatgaggaatagaaaacatcaaatcttagccgggcggagtggctcatgcctgtaatcccagcacttggggaggccaaggcaagtgaattgcaaggtcaggagttcgagaccagcctgaccaacacagtgaaaccctgtctctactaaaaatacaaaaaattagctgggtgtggtggcaggcgcctgtaatcccagctacttgggaaactgaggcaggagaattgcttgaacccaggaggtggaggttgcagtgagccaagatggcgccaccacactctagcccaggaaacagagtgagactccatct

SEQ ID NO: 230219 - DNA, 470 bp, Homo sapiens
tcggcctcccaaagtgctgggattacaggtgtgagccacccgcccagcctaaagtggcaattttgataaaacagtattctagttggaagtatgaaaatcctcaacgcttaaatagattttcacctttgaatttttaaactttgttttaggtatttctttaaatccagaacaatggagccagctgaaggaacagatttctgacattgatgatgcagtaagaaaactgtaaaattcgagccatataaataaaacctgtactgttctagttgttttaatctgtctttttacattggcttttgttttctaaatgttctccaagctattgtatgtttggattgcagaagaatttgtaagatgaatacttttttttaatgtgcattattaaaaatattgagtgaagctaattgtcaactttattaaggattactttgtctgcccaccacctagtgtaaaataaaatcaagtaatac

SEQ ID NO: 230220 - DNA, 424 bp, Homo sapiens
ctctggtagtacacttgtataactattttctctgaagctttagtgtttagacaagaagcaatacaagtttttgaaatggtgatggacatctatatacctgatagaccaacttaggaaaagtcagcaatgcgtgcttgagaataacacagcatttttttaagtataggaagtgtttctgatgcaggaaaaaattaacacgttattcttattgtggatgataaagcaaaatcaagactagtaatacagaaaattttagccaacttagataaacatggaagcaagccgtatcatacagcccaagatgcagttgtagagtctttactatttagagtgttttttggttttcgtaaagctaggcacagtgtaaccaagactggtttaaacaaacaaaaactaaaatctctgtgcaaataggtcttgtaag

SEQ ID NO: 230221 - DNA, 405 bp, Homo sapiens
ggctggggcgagggcaagaggtctgtacaagatagacaatcgctggactgctgagaaacggggcttacgtcacacagcttactgtctacattaacgtgacttcactcttcctctgtctgcaccaatctaactttacagctcctgcactctgttggagtgggcacagaggatgacctagggcccagcacctgcctcactggggacatctggccccagcctcaacctggctgtttctggccttcaaccccaacgcacacagagacagagagagagagagtaccaggaccagagcacaaccagaacactcaagagagcaaaatactggtctcagatgccccgcagtaggggatgagctgggaggaagatgaccactggccactcccccacctcctccaaataacacac

SEQ ID NO: 230222 - DNA, 162 bp, Homo sapiens
gcacaaaaccttgtcagtctcaccagttgagtaacccctccttccaatcatttaagaagtgctgcggggaaaagatgaaatttagctacatggctaccttgcattcatgtcatgttaaaaacacaagccttaattaatggcaaataatggaatacctccacc

SEQ ID NO: 230223 - DNA, 532 bp, Homo sapiens
agagaaaaatacatatttgcaacatgtcatgaacaagagccaatttccttaatatgtaaagagcttctgtaagaaaagactgtcataaaccatagaaaaatgggcaaaggatatgaatcgcaattttgcagaaatgaaatggaaatggctcataagcatatgaaggatggtcagctccacttttactgaggaacatgcaaattcaacttaatgagatttttttcttccatcaaattggcaaagataagtttcataactttcattcattgatgcaacttccatggatggtccttaagcaatatttatcaaatttacaaaatacacaccatcaatttcagaattcacacacttctaagaatatatcccttaaactgtactctcacatgaaatgctgtgtgtggaaagctattcattgtagcatcatttttagtatgaatgtgtgggaataaaaactatcagcaggggctgtgtcactaaatgatggacggcctctccatcactgactttgcagccaataaaaaataacaaagca

SEQ ID NO: 230224 - DNA, 465 bp, Homo sapiens
attttttttttcctctgtgctcttagtgctattattgtaagttcttagctggttccctctcaaccattatccttaaattgaatgtgttattgtcactatgttgtgtcctggtagggcatttttgacagtgaatgttgagaaagcatatgcatgtgacagggcggatttgttagaagcagtggaaaggtgagtactaaactgggtgtttaaaatgcaagcttcagctgggcacagtggctcacacctgtaatcccagcactttgggaggcagaggcgggtagatcacctgaggtcaggagttcaagaccagcctggccaacatggtgaaaccccctctctactaaaatacaaaaaaagtagctgggcatggtggtgcatgcctataatcccagctacttgagaggctgaggcaggagaatcgcttgaacccaggaggctgaagttgcagtgagccaagatcgtgcc

SEQ ID NO: 230225 - DNA, 258 bp, Homo sapiens
gcagaataaccaattcttcaaagtaaagctgtactttctgctttacaagttagctctacagtggatataattatcatctgaagtgaagcctggaagtcctgtggcctacttcagagttaggattaaatcagattacacagaccccagagtggttttcttcccctgtattaaggccactggtctgacttgctggtagagcagttgaaatattatactgttgctcctttgggatctgaagacctgtattagattcttccc

SEQ ID NO: 230226 - DNA, 450 bp, Homo sapiens
aaaatactttgggaaataaactatagattcttttatcttaactcacattttatagtatttccattttgtttaggtttattatgaatttgggtaaatctttggaggaaattaatttcaactgaagaaattttaaaaactatttttgggaagaaatatttatgggaagaaatattttgcaggggctcacacctgtaatctcagcaatttgggaggctggggcaggtggatcacctgagatcaggagttcaagaccagctggccaacatgcagaaaccccatctctactaaaaatacaaaaattagctggacatggtggcacgtgcctgtaatcccacctacttgagaaactgaggcaggagaatcgcttgaacctgggaggcagaggttatactgagtcgagatggcaccactgcactgcagcctgggcaacagagtcagactctgtctcaa

SEQ ID NO: 230227 - DNA, 424 bp, Homo sapiens
gtttaaatagctttgtttcatgctcactgaagttttttttttgatacagggtctcactttgtagcccaggctggagtgcagtgtcatgatcacagctcactgctgcctcaacctcctgggctcaggtgatcctccaacttcagcctccccagtagctgggaccacaggctagcaccaccacacctagctaatttttgttgtttttttttttttgtagtgatggggttttgccatgttgcccaggctggtctcaaactcctgggctcaagcaatccagctgcctcggcttcccaaagtcctgggattacaggcgtgagccaccatacttggccttgaagtatttgtaattgctaaagcatttatgatttatttaacacaactggagctgggcatagtagctcatacctgtaatcccagtgctttg

SEQ ID NO: 230228 - DNA, 377 bp, Homo sapiens
acatcaagtgaacaccccttgggacaaaggaatctgaacaacagtcttcagacctagacattccttctgacagagcctactcaaatgagaaggaaccagaaaaccaaccctggtaatatgacaaaacagggctctttaacaccctcccaaaaatcacaccagctcaccagcaatggatccaaactaaaaagaaatcctgattttcctgaaaaagaattcaggaggttagttattaagctaaccagagagggaccggagaatgatgaagcccaatgcaaggaaatccaaaaaaatgatacaagaagtgaagagaaaaacattcatggaaatagatagcttaaagaaaaaaacaataaaaaattcaggaaactttgaaa

SEQ ID NO: 230229 - DNA, 321 bp, Homo sapiens
atataattatatttaggtttgtcttctctcattcacaaaattgctagctcttcagggcagggtccattttttttatacagagtctatattcttcataaattctgagaacaaagtatatattcaataaatacctgtctcattcaattaatgcttaatgggttgaaatatattttgttgaaattacacaaatgtcagaacaaaaagaaaccaagctcctctctgaaaacaggcttgtcctcataatattcttctctatgttttaattaccatttctttatgttttaatcagcattaaaaataaaagtctgtctcattcaaaac

SEQ ID NO: 230230 - DNA, 408 bp, Homo sapiens
atttcatggatatgaatacaatgtgaatgataggacgtgtttagtcatttttgtttataattcattccattttatgctgcttttaagaaattactttgaagagtgatgccaatctgattcggcttttgtaatcttcattttgagcagggccatcaatatttaataatatttccaggagattttgtatttgatgggattgcataaagcaaagattaatctgtatgaaaacacattcaaagggaccaatgatatctattttaatctggggttcccaaagtgtgctctgggaacaacactggtggtctgggagccttctcaagggaccactgatgccactagcgctttttaaaattcaggcaagaatagttggttgacaatatttaataaaaatcatacattactggtaat

SEQ ID NO: 230231 - DNA, 366 bp, Homo sapiens
gcacgagagcaaacacttttacaattaattacttcccttaccctggaaaatctaaacaaatgcttcattatatatttttaataaatcgtttgtgtttatgggggttgtggttggagatggagagctttggggagttaaattcattttgtaatattgtctcagtttggattcttgcattctgaaattttatcctggtttgaaagacaaactcttatctttataacaggtgaataacaataaggcaatgtagaagaaagcaagtcccatcaaagggagctccagtctctatagactgataggagcctcagaacttaaacctctggatcaggagaatcaacactttctatcttccggcagagtctgctt

SEQ ID NO: 230232 - DNA, 489 bp, Homo sapiens
agtcaggctgtcctagtagccagctgtgtggtcctaggcaaattacttaacctctctgatcctgtttccttatcagaaactgggaatagtactctgcagggtggttgggcagatgaaatagaatcacctatgtagtgtgaccctcccatagtagggcctccattaatattcagttttttcctctcatttctattgtttagaaggacagaaacatgcaatgtcctgcgaacatttccaagtggcttcctctcctccaaaagcttcagctgcctggcaaccctccccgcagtatcaagcaggcgcattttaaagtctctttagcgggagggcagggttagagccttcggtcacttgttttctaacttgacataaaacaacgtaacgcagtcactcagcgagccgttggccagcctcgctcgcccggggaggagggaggaggtggcgcgggggcggcgggtacaggccttatacggaggctgcgctgctcgg

SEQ ID NO: 230233 - DNA, 439 bp, Homo sapiens
caggctcctgccttctccctgtagctcacccttttttcttttcctcatttctttgacccatccttcccaaaggcaaaaaaataaaagccagaaccactctttccattttattactcagaatagttcagctatctccaagctgaacccttcaacacagctgtggtcttcctctgaatattagcagaagtttcttattcaaaggcctcctcccagaagaagtcagtgggaagagatggccaggggaggaagtgggtttattttctgttgctattgatagtcattgtattactagaaatgaactgttgatgaatagaatatattcaggacaatttggtcaattccaatgcaagtacggaaactgagttgtcccaaattgatgtgacagtcaggctgtttcatcttttttgtttattttcaatgcctaataaacagagatcct

SEQ ID NO: 230234 - DNA, 478 bp, Homo sapiens
cattaaaaaaaaattaaggcattttatatagcagccgtctgaatccatgcttcctgaattagtctcattgggcttttacaggctccctgattattattatgggacttttgcagtttgcttccctgtgtagctgcaagcctgcttccttgtggcagaaaattacttcccagcactgttgcaagtgcatatgagaatacctacagtagactcaagacaacattacaaagaaaggagttccttctttaaccaacccgaggcctgcctttccatcctcattttctgttccagaaaactggcagtgggaaaaatttatctccttcaggggcaagtacacttggcacccatggaagtcagtcctgtgaccccaacaatcatagcagacaatctcatcacagctgcatcagcttcatctcaagcaatattcacagaaaaggaaaattttttttctttacatctcacttccatgcacagtaaaaaa

SEQ ID NO: 230235 - DNA, 458 bp, Homo sapiens
ttcctcaagcaagttgtgacaacacatgtaaaatgtttaccagggaagctcattagagactcagtgcccagggtttatattaggggttgttaatatacacactctctgtatagcatgcaccaaaattatagatcctagaaggaaaacaggtattcagcacaaaccacattttttgtaaagtgtaggcacaatgagctgttcttactaggaaatagtgggaactgtcctgaaatctaaatttgccagatagccagcgaggggccaacctgcaagcagaccttctagggatagcaatctcaggcctgctgtgttaactcttttctgtaccatggtatgttatgaaatgtattttacttaagaaacgaatgtcaacaaatctagacatttaaaaaaagctttattgagatacaattctcacattataaaattcaaccaattaaagtgtacaatgcagtgat

SEQ ID NO: 230236 - DNA, 521 bp, Homo sapiens
atagtttgccaactatttaaacctgtctatttagctattctagttatggattatacttctgaagattaaggtttggaaaattctagtcataaatctagttgccataagcaggaagccataagaaaattcatataaaaagtacgtgtctttggaatttgaccatctgatccacatactcctaattgtgggctaagaaggaaagttttttagtgctgatttaagtaaccctatgaagccctgttagcctcactttaaacagaatttataaactcattcccacttaaaattcactagaattttcttattacagttagtgctttattgttaacagaaatattgagatgtgatacagaattttctttaagaaagaatgagactgaaatttataagagagatgaatctttacaattccaagcctttctcatttcaagtttcgtgaaacactggtggatagttttaatgaaactaatataaaagaaaaagataactgcattaaattaatagaaaccttatatacaaca

SEQ ID NO: 230237 - DNA, 276 bp, Homo sapiens
attatcttttatttaaggaagaaagttgtaccagaatattataaaatattcttaggagcaaaggcgcaataacttctcagtagctattggtttaatatttctcaagaaatacaaaatatgtctatgaaatatacatgggttggagctgcctgtgcccaatcagtattcatatcgaagagatcttgggaatgggaagaagagaaaaagtttcatttaaagtggtaagggaggtttctagtcctggggaaatattaaagtaccttatttctaccgtaa

SEQ ID NO: 230238 - DNA, 797 bp, Homo sapiens
atataccccccttcccccatgttcctttatctcaatgaatggcctcagtaatcctgaaaccaaggtcggctgcatcttcttcctccctgcaccctccaggagcaatccatcagtaagtcctatcagcgtgacaccgtgaatgcctctcctcctcgcttccttccagttgcccctgcctggtcacaggcctcatcctccctctctggcccaattggatgccctctgcttgcttgcctcgtctctgactgtatcctgtgggtgacatgcatgcatacccggtaccacttaaaccccccatgggctccagggccccacttgtggtgtaccaagccactctatccccttggccctgtgtcccttccttttcctctcttgctccagccttacttgtaattcctcagttcacacctccatcatgtctgtgagtctcaagatctcctagcccttctccagacctgttcaagacacccctagcccttctccagacctgttcaagacacccctagcccttctccagacctgttcaagtgcccctttcatcactccccatgtgcagttccatagttgtccatttcacattgacttccatgtatctggagggcaggagccagctctgacccaacttgccattcccaaagtaccctctcagtgaatgtggatgggtccccctgccttgttaataagtcatgtgattgagcagattgtgtgacttgcccctcttgtcttggaaggtcatcctgcccagagcttgtgaaggtgcagtggcctgagccaggcttccaagaggacaaccgtga

SEQ ID NO: 230239 - DNA, 954 bp, Homo sapiens
aaagcggtgtagggagaggcttgggcttcggttatcatagaaacagaggccggctacacctaaaaggcggggcgtggacctaagtcgtcgccaaagaaacggcgttctggacggggacgtagggtcccgcccattccttctcgtgaaagcgggtgactggtcatgattatgattgatagcctcctctcccaatctgatttctaagaggtcccaacccggaaccgacttgcggttcgcaggctcccctcgggtgggagagttgggctgggaagcacctggggagctctgaagtgtcttggtgagcgcgttgcgagtcagaccgataacatcagaatctgggactgggcccgagcatatgcgcgtcaaaactcctcagttaagtctatttttttgtattttttttggtttgcttttttgagacggggtctcgctctgtcgcccaggctaatgcagtgacaccatcacggttcactgcagcctcgacctcctgagctcaagcgatcctcctacttcagcctccagagtagctgttaacaggggcgcgcgccaccacgcccggctaattttctttcttctctccctccccctccttctccccctcccttcctcctcccactatgtcgcccaggctggtctcgaactcctgtactgaagcgaccctcccacctcaccctcccgaatagctgggactataggtgggagccaccatgcctggatagtttttttatttttatttatttatttattttagagatagggtctccatatgttgcccagactggtctggaactcctgggctcaagcgatcctcgtgtctcagccttccagagtgctgggagtacaggcttgagccactgcgccaggcccctagtccggctcctagttgattctaacacgtgcggccccattggggaaccacagcctccccagcccctttgggtgttgctgactcta

SEQ ID NO: 230240 - DNA, 550 bp, Homo sapiens
cattgattgattgacttagcatgaccattgtgacggcagtaaatgtataagagaaggaccaatcgacattttaagttccagaatcatccatctgctgggtcacgttctccatatgtgtgggtggttctgtttcagcaaatggtcttttcactagcccacatcaagacaaagacatgttctgaactggagatgatgccaagcctgggctgtgaagaccacccacaaaggcttcagtggaaaagagagaagacactggagaggcatgaaacggtttgaggatgaagagactggacagatggatggaggaccatgaggtgacccaaccaggggcaagaaggaagagaatcggctgctgtaggtcttgggcagcaagaagtttacatcgatcagtttatactgttggattaatactgtttggctggaaaaatagtgtaaataagatgaatataagccatctggttggtatattggtgcaaaatgatgacccataagtaattgagagaaatgctagaaaaaataagaaatgtgttttcgctttttgaaaaagaat

SEQ ID NO: 230241 - DNA, 520 bp, Homo sapiens
aacgtgaaaatgaggaggaatagatggatttggactatattttggaagtctactaaagcctggagatgaaatacctgatccttattgctgtttccagatatttcaccctctcacattcctaaaaacctatagcttttactctcaggtcactagaatataccacctactatctcttgttgcattgtcaatttatcagctcccccaaagtcactcctgctttctcaaaaatactggtttctggctcactgtctgtccaactccattcctgtcttaattcttggctttttcagtgtatatgtaaatggtccttccaacaccctcacctctctgttccttcaactcatatccagtgatcgtgtcctatactcctcagctattcacttccatgatcatataactttgtcattgtgaaaccctccttaatctcattctttgacctctacctcttatctttccactccctctaatactgtactccagcctgggtgacagagcgagaccgtgtctcaaaaaaaaaaaa

SEQ ID NO: 230242 - DNA, 382 bp, Homo sapiens
caactcccagataattttgcctcatttgggaataggctgtatgagtttagttatactattccccttgggttgggtggagaagggagtaagagtatcactagtctactctgctcctttctttcctgactaacttaagttctgccttgaattcaacaagctgtttgctggggttaacgctttccagcacaagtcagggatgttttccgcttcagtccctcatccttcaattttgcagatcctaatgcattggttttcccttggccctctcatttgcaacagctcattcctaaggcccaatcccagttcctgatggtggatgttgttccagcctggaaagctgaatcacttcctctccagtaacgaataaatagactagatttca

SEQ ID NO: 230243 - DNA, 460 bp, Homo sapiens
ccaccctgtcttgattactattgctttgtggtaagttttgaagttagaaagtgtaagaactccatttgttattgtttttcaagattgttttgtctgttttgggtcattataatttaggatcactttgttattatctgcaaagaagccaggggagattttgatagtgattgccttaagtctgtaaatcaattagggaatattgccatctgaacaatgttaagtctttcaatcaatgaacattgaatttatttccatttatttaggttgtctttagtttcttttgacaacattttgtacttttccatatacaagtctggcatttgttttgttaaatttattcccaagattgtttttctttttgataccattgtaaatggaatcattttcttaagttcatttcagattgttaatttctactataaagaaatacaattgattttgtatattgatattacatctt

SEQ ID NO: 230244 - DNA, 427 bp, Homo sapiens
gcctttctcaatcactaggttcataagtgtttctcccaagctccagacttttcctaatgaccttggttgaagatttgggacttcttccgcagagctcacctgtccatgtgagatggtctcaaaactctctaacattcttttgaagtggagcacagcattaaaattatcttcattccttacccatgcttttaaggaagttatccagtgtgtatagcacattaagcacaggtaccattacagaatttttatgttgattctattctcacagctcagcgtttactttcaatagcaggaaacaagctgagggagaggtgtggtgttccccttgtgacaaaggcaggatcgaagcccatttcctctgacctccatcagtgctgtggcttccagtttggcctgactctggaattttatctcggcacgcatgtag

SEQ ID NO: 230245 - DNA, 425 bp, Homo sapiens
cactaccaacaaccacaaaactgactaaatgccaactatgccaccaaatccaataaatgcacaaatgattgttcactcacctgggcatctgggggacaactctctctctctccagcctctttgaaccactctctcttagcttcctttgtgagtcactctactgcccaaaattaaacaccaaatttcctcttaggtctatccaattcactctcctcaaatcactaaactcaacagacagtaagagagagagagaaaatcttatgtaccccatatcatcaaatatcctttataccacaataatttctaattttgttccaccattcaggaacccagatctcacactgcctacttgagacctccatttggatgtcttacatatatctcaaaattgacccaattactttatcttctcaaacctttttctc

SEQ ID NO: 230246 - DNA, 459 bp, Homo sapiens
atcatgagtgaataatatgtgtcagctctgggctaggcctaaagaagtaggactgttccctccagggtctccttccacttctaccagctcaaggcaaatgatgtggaggccccagggcattgcagaaccacaggatagaagcatcctgtgtgcatgagtcagacatcgagataagctgttcactttggactattgcatggaagaaaacaaacccaaaggagttatcacttatctgttaggatggctagagtaaaaaaaacaataacaagtgttgacaaggatgtggagagattggaatcctcatatattgctggtgggattgcaaaatgttgccgtcactttgaaaatgtttggaagttcttcaaaatgcttaacagagttaccatatgattcagtaattccactcctaagtatgtgtccaacagaattaaaaataaagacatacaagttggaagggta

SEQ ID NO: 230247 - DNA, 517 bp, Homo sapiens
cccttttcacacattggattccacttgcctaatctctgtgatgcataccaaaaactccaggaagcttaatcagccaaaagaactgaggggacaagtccactctatggccaaatgcattaactgaaagagagcaatcttcactgaaaaccaaagttatttcaaagattgaggataaacttccaaggattattaacctaatggcataattattctgcatgattctaaagatcctctctaagttcatcaagtcatcatgtttgaacattctagtggtccctgcattactagctgactggagagttgaaagaaaatgaaggaggttttgactggtcggtcacacacagtcttcactgagaagctagtattcctcttcttcaacaaaaaagaaaattcataaaatgaaatctacataattgcatctcctaaggattattggaagactacaataaagcattttgtcaaatgaatgtgctgaggtaaaagaaaataaataaacaaataattaaatggatttaca

SEQ ID NO: 230248 - DNA, 468 bp, Homo sapiens
atgcgtagaaaacagatggaagtgttggtcattagagccttgctttttaaattttattctttccaaaaattggcggtatgctatctataattttatgtttgatgttgaagaggcaacaccagagactagagagggagattactctgatatttagtgcctaaaactttcatcttggccgggcacggtggctcacacctgtaatcccagcacttcgggaggccgaggcaggctgattacctgaggtcaggagttcgagaccagcctggacaacatggcaaaacccgtctctactaaaaatacaaaaattagccaggcatggtggtgggcgcctgtaatcccagctactcgggaggctgaggcgagagaatcgtttgaacccggtaggcggaggttgcagtgagccgagatcatgccactgcactccagcctgggcgacaagagtgaaactccgtctcaaaaaataataat

SEQ ID NO: 230249 - DNA, 385 bp, Homo sapiens
gaggtttatggggctggggtccaggtgggctgcgactgcagggcgtcctcattctaggagctgaggggctataacactgcaaggcgcagtcagacagctcagagccgtgcccagggtctgcggggagaagcacactggctaggctcctgagggacacacacagccacaccccaggatgcaggacaaagagaaggtgcccctggggacgcggcatctcctggtctcccagtgtgatcctggatgagggaggccccagtgtgctcatgtacgggttgcctggtagaatccaacagacccaagtcctctctggggagggaccaccctcctgggtcccacaccaaccaaaagctctgcaatccaggcccagcacaggctacacgtctgg

SEQ ID NO: 230250 - DNA, 611 bp, Homo sapiens
tacttataccttttggctattataggcattattcaagcatgaataatggtgacaggaacattggtgtacaaatatctgttcaagtcactgcattcgattcttttgtgtatatacccagaagtggaattgctccacaaatatttgagtacctagtatatggcaggcactgtgctaagcactggggatgcagcagtgaaaaagaggggcctggttcttgcccttatggaatttacagtctagtagggaaaaaagatgttaaataagcagttgcagttaagtgggttaaatgttacaaaaacgttaagcacagagtgccgtgtgtatgtttcatataattgtaataatatatatatgttaagccaaaagagactataaaacatcaaatactttttccccttccaatataatcccctgcagcacctcactacccctggccacctaccacatggaaatgtcttctgctgcttttcttcacatttaaaaatgcaatgccgctgggtgaggtggctcacgcctgtaatcccagcactttgggaggctaaggtgggtggattgcttgaggctaggagttccagaagagactgggtaacagcaagaccctgtctctacta

SEQ ID NO: 230251 - DNA, 471 bp, Homo sapiens
gaactggttttgagaggaccctatcacctctaatttggaaatcatagcattttagaaaaattattattttttccctaggataataaaatttgcttaaaaaaattcaacttcagatgacaccaaaatttggctaccaaatgattaaggctaatcaatctgcaaggtttttgggttgatctttatatgatcattcagtaagagtgtatccatgctgttctatccataaacataccagagtgctgacctttacagatagcaacgaataatggatgatgtattcatgcgtgtgtgtgtgtgtgtgtgtgtgtgtgtgtgtgtgtgtattgcttccagggagtttaaaaataataagagaagacttagtatcctaggagacatttgctttccctttctggttttctctactttgtaaaatagttcaggatgagaaagccatctgaggccatgtacttagatttacttgaaagtatg

SEQ ID NO: 230252 - DNA, 461 bp, Homo sapiens
gaactggttttgagaggaccctatcacctctaatttggaaatcatagcattttagaaaaattattattttttccctaggataataaaatttgcttaaaaaaattcaacttcagatgacaccaaaatttggctaccaaatgattaaggctaatcaatctgcaaggtttttgggttgatctttatatgatcattcagtaagagtgtatccatgctgttctatccataaacataccagagtgctgacctttacagatagcaacgaataatggatgatgtattcatgcgtgtgtgtgtgtgtgtgtgtgtttaggtaatccttacagttccatttcccatgggaaaatatgctggagttggagttagaaaatttgggtcccaggcacaactctgcccctaatttcctgtgtgtgtgtgtgtgtgtttttaggtaatccttacagttccatttcccggtgggaagt

SEQ ID NO: 230253 - DNA, 719 bp, Homo sapiens
gattttgtgaagcacaagactcaggtggtttggtgccttactgagctccaaaaggacagaaattccaggagcctatcatcttaagaacccctggagacacccaggtttcataatcaaggctcagcctgctgtgccaggaacggctgatgcagcagttgactggactacagtggggaggcagggctggctgcagcgaggctgggctccgtggctgcaggaagaggggagaatagcaggtgctgggcatgagttcctcactctccttgaaatgaaggtggtggggtgtgctttctagagggtaatggaagttgccccctatggaaagtagagagcagcagaagcccgttgagcagagaagagaaaggcaaataattctgattgatttgtaatggctgcctggagcatttactgaaaaggactttgaggctgtattagggatccatgggagagagttctgtgattggttggtgatgtctgcctagtagagtttttgtttgtttgtttgtttggcctagtctctgggtccagtctgttagaatcctgaagaaatctgaggcctgccagagataggctatctcaatctgcaactgaatgtatgggttcttttccatcctctccagctaaactctctgagtgatcaaccatctcattagccccttcccttagagatgatgtcctacatgagaataaagaattactcagtctagaaacagaaacaa

SEQ ID NO: 230254 - DNA, 457 bp, Homo sapiens
tctccagcagacctgcatcacaagacatgttctgatgtctgatggaaatctggatctactcagggggatgaagaacaggaaatgttgactacttggatatgtatacaagatatttttctttatgtaagtctctaaaaaggatattgactttatacaaaaataacatcaaatgtattgtggggtttataacatatattgaaaatacatgacaatcacagcctgaaaaggctatgaaaaagaagtaaagtatatactattggaagattcatatatatactgttactgaaaagtacactgattaaagcttttataaacattgatgatcacagaaaatataaatggtatataacaccccatttaaaggcagagatttctggataagataaataaaaataagatccaatcatgctgcctataaaggaaacatgttagattcaaagacaaatagataaacaaa

SEQ ID NO: 230255 - DNA, 438 bp, Homo sapiens
ttacatgaccaatattttatgggtcttacaaatgtgtaattctatctaattttctttttgaaaaattacctattttaaaaaatccacagatcttactcatttctcttttctttaaaatatttacttgattctaatttttcctgattaataaggaggacatttttttctagtatctcatcttccagcttctcccacactacttgtcagtggcaagatccgtcatcaaagtcagtttagaccacataatagcatttcttaggattttgaagggctttccaattctttcttgagattaaagttcttggctgtagtcttcagtgagctcacaaataatctaacttccatttcttttattgttctaattatccaagtttaaaaaattattgtctagtttgttttccttatttaatcggtgctatgatgtataaatattgtttg

SEQ ID NO: 230256 - DNA, 403 bp, Homo sapiens
actggagccacaaaagcaatgcaggaggaagaatgaatcagctttgtaaccagcttcatctgacggcttagatggccactagaagggaaggtgctgtgatttgaacgatgttgtcccctacaacattcatattgaaactgaatccccaatgccacagtatagtaaaaacctgtggcttttgggaggcaattgagacataagggctccattttcaaaaatgggattagccttttagaaaatggctcaagggtgaagagaacattcccttggtcttctgacttccaccactagtaaggacacagcaacaaggtgccatcttggaagcagatgtcaatgccagcagcttggtcttggacttcccaacctccagaactataagaaataaatttatgttccttataaa

SEQ ID NO: 230257 - DNA, 393 bp, Homo sapiens
cctgaagtacatctttgtaatgtcccgaggcagggtttttattctggagttagagggtccataaacttgggtgagaaaaaaaaccctctttttaaaaaaaaaaaaaatacaaaaaccaaaaaaaacccaaactaaactttggctgaaagtttgcatttcctttgataggaaagtgggcaagcagccacactagagtcagcaggatttgtcaccaatagaaatcagatctgtgatataacattacatttgttgcagatatcttgaaatatttccacttgtcagtacttcaaaattatagtagttatttatttgacttgctgctagatcttgtttatttaatatgttaaaggactttttttactctataataaatttgttttttcaacattataa

SEQ ID NO: 230258 - DNA, 426 bp, Homo sapiens
aaagataagccaagtgtttaaaatgagcaaaggatctgaatagacatttctccaagtggccaataagcacatagaaatgtactcaacaccattagtcatcagagaaatgcaaattgataaagaagtcagactgtaataagtgttgatgaagacatggagaactgaaaacttcatgcattactggtaggaatgtaaaatggtgcagctgctttgaagaatggtggtaattccttgaaaagttaaacatgggttactatttgacagcgattcttgtcctaggtatatatacccaagataaatgaaaacgtgtccacacaaaaacttgggcacaaatattcatagtagtgttattcataatagccaaaaggtagaaacaaaccaaatgtctgtcagtaacaaatgaataaataaaatgtgttatatcta

SEQ ID NO: 230259 - DNA, 441 bp, Homo sapiens
ggtagactaagcacagatacttaacttaaactccctaatataatagtgaaaggactttactattttctaatctgattttttgattgggtaacacatactcatggttgaataaatttttttacttatataaaaaaggtcagctggacacggtgcctcacgcctgtaatcccagcacttcgagaggccaaggtgggcggatcacgagctcaggagatcgagaccatcccggttaacatggtgaaaccccgtctctactgaaaatatgaaaaattagccgggtgtggtgacaggcgcctgtagtctcacctactcgggaggctaaggcaaaagaatggggtgaacctgggaggcggagcttgcagtgagctgagatggcacccctgcactccagcctaggcaacagaacgagactctgtctcaaaaaataaataaacaaaaaac

SEQ ID NO: 230260 - DNA, 604 bp, Homo sapiens
gatcacttgagcccaggaattcaaggctgcggtgaaacatgatcgtgccactgcactctagcccggacaacagagcaagaccctgcctctagaaaaatgcaaaaactaaaataaacgacacagtgcagtgtatgcaggaaaaacacaaaaactaagataaatgacacagtacatttccacagaatgggtccacatggcagacttgccataggaagataacagcctccttctctcaccctcctcagaagccgtgccccggtggtaaccccagcctttccctggctcatgaggaaggcacaaacacataactgaagaacgctgacaatcctgtgggtcttattgatgaatcacagctccgaatcacagccccacagccctatgtatttttttcagatgacaaaccacaaactggggaacagataagagcagcaagacttccgagaagaaagcagttttataagggtgggtccatgaatctctatctatcacaagtttagagggatgactaagttcccttcagaacatttgctgagatagaggttagaagggtacaaagatggttggttgtcaactggctggtaatccaagtcatcactgagtgaga

SEQ ID NO: 230261 - DNA, 342 bp, Homo sapiens
tactgttgaatctggaagtttattaaaaatctaaatccctggcaatagcagtaagacatgtttataaaaattaaaagccacaccacaaagcataaaactgtaccaggtaatttttcatgttcccattacagagaagagctgtgagaagcaccacattgcaaactattaagctattcacaactacacagtgaggccaggcatggtggctcacacctgtaatcccagcactttcggaggccgagggaggaggatcccttgaggccaagagtttgagaccagcctgggcaatatagcaagaccctgtctctacaaaaaaaaaaattttaattagccaggcatggt

SEQ ID NO: 230262 - DNA, 557 bp, Homo sapiens
tactgttgaatctggaagtttattaaaaatctaaatccctggcaatagcagtaagacatgtttataaaaattaaaagccacaccacaaagcataaaactgtaccaggtaatttttcatgttcccattacagagaagagctgtgagaagcaccacattgcaaactattaagctattcacaactacacagtgaggccaggcatggtggctcacacctgtaatcccacctttccctggctcatgaggaaggcacaaacacataactgaagaacgctgacaatcctgtgggtcttattgatgaatcacagctccgaatcacagccccacagccctatgtatttttttcagatgacaaaccacaaactggggaacagataagagcagcaagacttccgagaagaaagcagttttataagggtgggtccatgaatctctatctatcacaagtttagagggatgactaagttcccttcagaacatttgctgagatagaggttagaagggtacaaagatggttggttgtcaactggctggtaatccaagtcatcactgagtgaga

SEQ ID NO: 230263 - DNA, 330 bp, Homo sapiens
gcatcatttggcggttatctattgtttgtatagtatatcgttagttaccattttatggatctcgccttacagatccatcagaccctttaaggctgtgactggcttctctgggatttccccggttgccagagtgtttcttgcacataccaggagtaaaaagttaatggaactttttttttctgttcattgatccacttacgggatcttctgcagattacctaattctaaggattggttcacctcttcttgcatgatttgcttggtttctaggctatccgaattttttgaaaaaataataaaagtccccttttttatatgagcctgtacaga

SEQ ID NO: 230264 - DNA, 357 bp, Homo sapiens
atctgatctctcttgcttttccccacatgtacctgtctcataatccccttaaacatatgcaaaagactacagatttaatagcttctcttctcataaagggatgccaacgttgcgtccagctgtcaggatatgaccctgctattcttttcctacctttaagcgaggaacaatctcatactctcttagtttgtgatcttgattggcaagtagcaatgactgactttattggtaatatcagctttcatttaccagcttctaagctcctgaactttttacaaactgtgcctgttaaatttgtatctattgttgtctctgagccttttacttcatgccaccactgtctttacagatggctca

SEQ ID NO: 230265 - DNA, 490 bp, Homo sapiens
gtatttttagtagagacggggtttccccatgttggccaggatggtctcaatctcttgacctcgtgatctgcctgcctcggcctcccaaaatgctgggattacaagcatgagcctggccaagtgctattctttatttcagattgagagttgggaaaaactggagcaaataatggatttctttcttgcttaaaatgtatttatatgtatgtcttattatatacaaggcagatttccctggaataaaagtctagaatgtgctgcttaattttacacatgtgtgcaggcaatattatctgtgagtgaaaagtggaataatacgtggattgggtcaactgattatcagcttgttaggagtcctctgtgtgagacatggtggtataattgtgaagttctcactgtatgtggatgttcatgtgaaagatagtactttcttcccgtaaatatcttttgatttccatttgtatggaatcccaatgaatgtatctttgga

SEQ ID NO: 230266 - DNA, 518 bp, Homo sapiens
gagggagaggttgctaatacatcagaggtaggtgatacagagatgatggaatgggtgaagatgtcttgtggtgaaaggtgatttttgttttttgcatgaaactgtagggaagggtgtcaactagggaaagtggagggaggactccagaattagtcatagattttaggaatgggaattctcaccttggttttctcagtgaagtaggaggcaagtttcatttgctgaaagagggggttgatgatgggaatggaataaggaaattgatgaagaggtggactggctactttgggaatggggagaggcacctagaaggtataaacacagttgaaaattcgaagggctccatggagtcccctgtacctactcacttccttgagggaaaacatgtttctgactgtcagaaaataaaaaagaaatttacacaatacatgaaatcagctaactagattgtgaaacagaaatcatattctattttaaggaagtatgagaatccacagagtttttatatcaagattaaa

SEQ ID NO: 230267 - DNA, 498 bp, Homo sapiens
atgcatttaatagtatttgacatagttgaaaattttagtcttttaatatactagggatgactaaaagttgaaagacatctataactgttatagaaacctgacatcaacatgtttcaaatttgtaggtaaggaagttttattataccttatctagctaatgcctaatttttgttgtacttctaagtaattaagatatctagttacctaaatggaaatctttttattaattaatattgctgatacaagaaaagaaaatacaaagtattttccatgcagcaacatggaaaatacattgagttctctttttgcaacataggataaattatcttttcatctttctttgcccctggcagatagggacaaaaccagtactgaaagaaatgtctaatgttgaatcaactaattaagaattgtcgactgaaaacaaattatgtcaaattattacattgactttaatataattaaatgtgagatatgcattattaacgttattggatt

SEQ ID NO: 230268 - DNA, 350 bp, Homo sapiens
gtaacagggtcttgctatgctgcccaggctggtctcaaacacctcgtctcaagcaatcctcctgcctcggtctctttattatttttacaatatttgtcttcctcaataaagtagctatgttcagtcaggattccagcacataacctaataccaggaatccacaatcatttggctgacagagacacatctagaccaattaaagaaacagacctaagggtgacagctttaaggctcttgatataattaatttgagcagaataacatcaactgacatttaaattaaaaaattaggctgaacttttcctttaatagtcactatttcaataatcatatcataactttctgggtcc

SEQ ID NO: 230269 - DNA, 304 bp, Homo sapiens
actaactcttagacaggtactgcgcccagggctgaaaagggagctgtctgcgttcttccctgctttttcaggagctcacggaagaggccatgctacccaccaggggcaaacaccaaagaagagaaaggggtctttgaagatgacaggaaggtagtccattccaaccctaaatgatgaactctgtgaggctcagtttcctcttctgtaaactgcagacaatcctcatagcatccctgtgaaaatggaaaagctaagatgtccagtgtgcttggcacagttgctaacatgtcataaacaccccaaa

SEQ ID NO: 230270 - DNA, 564 bp, Homo sapiens
aaaaggaattacttttttctttgattttctttttcttccttctcttgaggatcatgaaagtataaaagaatactttctaaatgagggtgcctttttctttttttttttttttttttttacaatttttacatttggaattaaaattttaactagaaaagagtttttattaagcaagtttttttaaaaaaaatcttaagttgttaatcctgctctcaagatgtaagtaaggtgtgtttcagacattattaaaatactgaaatagtggtatttgtaccaaaacactagtatctcattacttaccatgatatataacactgtataactgaatagtggaataccaaaattgaaattgcacactgcatctaatcctgtatgcatccaagtatattcttctgtgcctgtactgtctgcctttttcatgttttggacaaaactgtcatcctttgtgtacctcctctctgtgtccacgttcctattctcctccctcagtgcctttattctctcccttcccattgcttcctttgtatctgcttacacatgttcatatgtttctcttattttgga

SEQ ID NO: 230271 - DNA, 714 bp, Homo sapiens
taatgtagttcattttctctttttacttttcttgcctgtgcttttggtatcatattgaagatcattgccaaatccaatgtcctgaagcattttcacttgttttcttataaatgttctctagttttaggtctcctttaaatttattaagaactcttcctactgttgagctggaaaaaaaaaaaaaaaaaaaaaaaaaaaaaaaaaaaaaaaaaaaaaaaaaaaaaaaaaaaaaaaaaaaaaaaaaataaaaaaaaaaaataacaaaaaacatttaaggccttctgtccctattctttttaaactccgatcatgttaataccggcggccataattcacctctcttgctacaattccccttttaggaggtgctttaaccaatagccgggccgtttttaccaagtattctgtcgtaaaacctggtatctccccacttatattcttgggaaccattcccccttttgcccgagcttgtcaaaatcactactaagccgcccacattgtgccctctcaaaaattaccggtctcttttttggtaatcttcaatttttatcccttaatttttcttaaaattctcgggaaaattttgttaatacaatcattttcttttacccaatcgggtccaaatacttatcaacttccctttatatccataaaaatattccctccaaattggccttggttgtttttccagatttgtaacagatactcctcttt

SEQ ID NO: 230272 - DNA, 254 bp, Homo sapiens
gagtctcccacagaccagaacagtcatttaaaagttttcaggaaaaaccaacttaaaaaaaaataaggtggctaattaaaaaaaaatgaagcatttaacagtgttcaggtttcagagtatggaagaggggttttttaaactgttatctgattatttcttttaccaacatgatatagaaaagtgtatttccagtattaaaatttatcagactgagcttactgttcctgttaatgactggaataaaaattggcata

SEQ ID NO: 230273 - DNA, 236 bp, Homo sapiens
attctatcattggtaagtcaaagatgagcaggctaaaagtaatttaagcctcaccattcttgatatgaaggcaagaggagcatcgctcaccaaagagaagtcaaggacccaccccaggccacagctgtttttattgatccacaaaggataagaatttcagagtaaagtctggaaacttttgtagtcatttaactatttctgttaaatcacataataaaatattgagccttgtattt

SEQ ID NO: 230274 - DNA, 421 bp, Homo sapiens
agctactcaagaggctgagacaggagaatcgcttgaacccaggaggcagaggttgctgtgacccaagaccatgccattgcactccagcctgggtgacagatcaagactctgtctcaaagagaaatatctgctgaggacacatttgccattgatcttgcaacctgccaccacccaccctgactctaatctcatcctccataaacagtgacagaaatgatttataaaccacactctccattgctcttgctgtagattcctatagttaagccataactgtacctgcaggcagtcccatggggacaggggcacagataagcatctcattgctgtccagccctttcctggagatatgcgccctcaatcttgctatttggtggtgttatttgaataaaatgaattccctttcaagtggaaattattc

SEQ ID NO: 230275 - DNA, 772 bp, Homo sapiens
ctccatttttgtaacaacagtgacaacaaaaagatgagttacagtccacacgtgtgatggggagagactgaggaagcaagagttggaaggaaatcttcctggtttgtatggatacccccttttccatcatcagagataaactatcttcatgccatatgacttctaccatgtaatcagtatttggaagtacctacctctgtgaaaagacattttcaaagatgaaacacgtaaaatctcacaaaagaatgtcatggttaaaccaagtgtgggttttagagcccaacagctgacttctagttctaaggctgaaggctaggtttatcaccatggaaatagatttttcagtggaaagtccagtggaagcaaggtgggtcctcactttctgagcacacacaggaacccagttctctagagcatctgaaatggccatgtctgccctcacaggtgtgaaatcctacccaatagaggatcctctgacttgtgaaggttacagattaatgccttgaaatattagttttaaaaaacaacaacaaactaggccaggtgtggcggctcacacctacaatcccagcactttgggaggccgaggtgggtggatcacttgtagccaggagtttgagaccaccctggccaacatggtgaaacctcgcctctacaaaatatacaaagattagccgggcatggtggtacatgcctgtaatcccagctattcaggaggctaaggcatgagaatcatttgagcttgggaggtggagggtgcagtgagccaagc

SEQ ID NO: 230276 - DNA, 390 bp, Homo sapiens
ccgccatccactcagttcctgaaccccagaacctaggaatactgccaggttggctgcagatcaccccgtgactctgctgcaagcctctggaaaaagccaaccatgacctccacattgccacagatgagcaaagagtctcccgtgaaggctttgtattggcagagactctctacaggcatccgagtggaggcccagaccctggcttgggtggcccccacagggaaggccaaagagcagacccgggccctgtaatgtatctcagagaccgaaatgctcatctcctccgagaactcagcagataacctccaaatccctaaatcgggacatagcagtaggagcccatcatttagagacacagaggttaatattcagaagaaatagctgaagaaa

SEQ ID NO: 230277 - DNA, 484 bp, Homo sapiens
aagtgtagagcttagggtaaagttagagccaaatgcgctgattggtggtttatctgaggatgttagagtgaatggatccctagccttggactcctctgtgggagaagggctcatctcagagtgagtggggtacctagcagtaagtgctcccaggctccaaagtggtagcatgccattagctgcaagaaaaaggaacctctagccgggcgtggtggctcacgcctataattctagcactttaggaggccgaggcgggcggatcacctgaggtcaggagttggagaccagcctggccaacatggtgaaaccccatctctactaaaaatataaaaattagtcaggcgtggtggtgggcatctgtaattccagctactcagaaggctgaggcaggagaatcacttgaacccggggggtggaggttgcagtgagctgagtttgcgccacttcactccagcctgggcaaaagagcaagactttgtcccaa

SEQ ID NO: 230278 - DNA, 434 bp, Homo sapiens
taaggaactgccatgtgtactgttaaaatatatccagctagaatgcccattttgtttattgatgtttcccaagtgcctggaagaaagtctggcacatggtaggcattcttgaaatatttattgaacaaatggtttaaatttcttccaattagtcgaagccactcttcagcacaccagatcttatttctagaaagtactagattcctctgttctttagagaatttgcagaaactaatatatggagagagaccactgttgagaattctatgcagattttttattttactataaactttcatcaagacttaaggattcagaacatttatatatcatgagaaatttgttaactatacagaaaaccgttttgtggattgaggtgattagattctaaacagattgcccaggagacactggactctttctcttaaagttaa

SEQ ID NO: 230279 - DNA, 476 bp, Homo sapiens
aagaattcatcttctcacagcactgcctcagctggtgtttcaaatgtttcttttggatatgttgtgcacacctgacctgctgccaaggcagaagcctgctatgccttcacgtaattctgctctactgccctgttcctttctttctccctgccttactgtctctccctaagaagaatgatctctcccatcatgctgtaccttcatttgacttcctatcaccaatatctgctgcagtcgatcctccgtgcttttcctaaaatagtcttttttggcccaaaactgtggccatgctaattcttttctatgtccttccagtggcttatatttacatcatggaccaatatagtcattctttattctgaagcctctcaccagcataacttactttctgtgcaagctctggatccttctgctttgagatatgttttcaaattattttctcctcattaagactctgctttttgaaacttctcaga

SEQ ID NO: 230280 - DNA, 677 bp, Homo sapiens
aaccccacagccttctccgccctccgctgtgggctggatttccatgtgaatcttaagtcagttctcaagtcccgtctccctcctagagtttactttgggggaaatttcacatctttgcaacaggaaagcttccaacccagaaacgtggtgcgtttccgcatttactcagatcttccttcaacgcctctcaactttctgcattaacgtcttccacgtctttcaccagattaattcctagaaagttggtatttttgttgcctttgtaagtggtaggtatttttaaaaagtcattttctgttcattgcttatatgtagaaaaacaagtgacttttgtctatgttcagtaaactcactaaacgttcccatgtcgctaactgatccgtggttcctgtgggtctcggcattcccagcagcgtgtctgtgagtcacgctggtcttgactgtcattctccaagcatcgtgccttttcttttttatctttctgcactgggtttggccgccagggcaaagtgggctgcaggtggtgagagcaggaacggggacgcttctgtgagctgcgtttgtatgttcttgttttcagattaaggaagttcccttctagttctagtttgcaaacactttattatcagaaatggatactgaattctatattaaaaattttacatctttgaaaatga

SEQ ID NO: 230281 - DNA, 622 bp, Homo sapiens
acctgccagaataggtgtcaggtggctcctcaccactctacatcattagtgtgtacaatggacacagcattatctgaacttccatggctctatgtaaagcattccattgtattttaataattacgcaagacaaggcctctttcacataaggcaaataagtgtgattgattcagacttctggcattactgggccatgctgccgcaagaaacaggtgcatgtggaatcaagcctgacggagttattggtgtgcagaaaaaaaaaaaggattactacttatctggtttttaaagatgagagtgttttatctgatgccctgaccaaatgaaacaacaacctagactgaagcagggaacattcgctggacatttcaggcactgtgctaggctctacagtgaagcattcacagtctagtggtgtctataaataaaaccaaaatgctaacttttaaattcctatgaggaatataattgtaatgccactatagctgcatcactaccatggggtcattctctccctacagacagatcaataaacaaaatcaaattacaatccaaaggaagcaaggtgggcagaaataacgtagggattcatgatgaataaagtcattaatccttccattta

SEQ ID NO: 230282 - DNA, 382 bp, Homo sapiens
ttggttgtttttgtgcctcattatgctatagcccagcgggtacctgggaggctggccaggtccctctctaattgcaggatgctggcaagtgagcccaggcaggcacctgtgccagtccctgaacggcactgggttccaggcagagagagcttgccctccctgactctcctaccaatgctccagctctagcttccatctgactgcaaagcaacctggtctcacaccagccacttctgctgctcaatgccatctccttccggctgttcctgctgcttcaaagagtggggagtagagagaagagaagcgaggtgcgaacaatagccaacttgcctaaaactctgatgctggagttaataaaaagaaatgaacccattcaggctag

SEQ ID NO: 230283 - DNA, 509 bp, Homo sapiens
tgtatgtagttggttgttgatatttatcaatttgatgtcagaagaggactgtcagtaaaacgatgcgtgtatgtgtgtatgtgtgattgttgtaagtgctatagagcgtttaggaaggtccagtgtggtcagcagggcttcatggagcatctgaaaaggggtttggtttatagaatggctatgatttccagatatggagaggtgtgcacatggtacctgccttgtagggcactaacatgcaggaggtaactattcaaagcatgttcaggaaggaatcaatggatccatctggcaggaattcaagaccatcctagctaacacagtgaaaccccgtctctactaaaaatacaaaaaattagccgggcgtggtcgtgggcgcctgtagtcccagctactcaggaggctgaggcaggagaatggcatgaacccaggaggaagagcttgcagtgagccgagatggcgccactgcactccagcctgggtgacagagcgagactctgtctcaaaaa

SEQ ID NO: 230284 - DNA, 576 bp, Homo sapiens
cagccctgtcaataggatgttccgggtatcacctggtttgagtatttggttttagacgggcgcccagcttcttactgttatatttccattctttttggcctaagttttccatgagtagcaagctttgaagaaaaacacatggtaagcctgcctaggaagcttcaataataatgcctgcaagatacctttcttagcttttcctaaatggcaagccactgtgtacacacacttttctaggaagggctccccagactgtcattcttcctgggactgatggaagatattgatgatgatgatgatagtaataataatagcatttagcatttttaagatcatcttttataatgcttagagttgcccaaatagtagatgccgtagtcctcccttatccaccgtttggctgtctcagtttgttacctgcctcagctgttgtaggaaaatattaagatattttgacagatcacagtaatataacttttattacagtatattgttataattgctgtatttgttattattgttcatctcttactatgcctagtttataaattaaacttgatcattgatatgtataca

SEQ ID NO: 230285 - DNA, 642 bp, Homo sapiens
gtcatgtccattagaccggtgacgaggccagaggaggtctgtgtcgtgtgtgcctcggtgtctgtccactgaaactcataagctcagccacggaggagctgtctcattttaggctttggtgctggtacttactgacagttacttgagaaagatgtgatttcggtcccagagccacaggatatcagctcatggaatgtgtcgctgcatcatgttactcagggtgtgcccaagtctcgtagcccagaaatcaatcctgagggccctgaaacagcccaggggccgcagtatacgcccaagagcagcgggggcaaagggcaaggcatgccgtctttccaaagcacggagtcaccagacaagtccacgcctgaagacgaatgttgtaatgttcagcttttgaagaacctgaggaagtgtctttcccttaactcacacagacgttcaccattcacgaaggtggcgcttagctcagcaggagcgcgcagcactggtggcacctgtgctatgtgccgtgttatcccgctcttccctggcgctggtggcacctgtgctgtgtgccgtgttatcccactcttccctggcgctggcggcacctgtgctgtgtgccatgttatcccactcttccctgacactggcggcacctgt

SEQ ID NO: 230286 - DNA, 265 bp, Homo sapiens
ggtcatagacacaactgtaaaaccttgaattataaagcttctaggagaaaacataggagagaaatctttgtgaccatgggttaggcaacatttttagcatgatccttaaaaaaaacagacaaatttggcttcatcaaaattgaaaacttctgttctttggaacacactgttaaggaaatgaaaaaataagcccctgactgaatcaaaacaagtatttgcaaaacacagatcaaaggtctgtattcagaatacataaaaactcaat

SEQ ID NO: 230287 - DNA, 466 bp, Homo sapiens
ttgaatgaagggctaaatgtgagctgatttcttactagattactcagtgatcaaatagaatatctaattaacctgaaaaaaaccatataaaaatccatttgagcaataggaacattgattgggagtgtcaagatctaggcttgagtgttatatctgctgcttatttgctatctgaccttgtataattcatttatagtctttgattcttagtttacctgatctgtaaactagaaataatgataacaattaaaattttaccacaaataatacctcctgcctggaagagccttgttgacattgagaacttctggatcagacctctgctgaaacccaaacactacaactggaattttccattataggaaccaataaatctttactggttcagttccagttgctggtgttacttacaaacaaaggcatctttatgctaagcattaacactaacctataaaagaatagcaaa

SEQ ID NO: 230288 - DNA, 450 bp, Homo sapiens
tctctgcctgggtctggttacactgggtggagcattggggtgtacatggtgggatggccaggagagcctcctgaagaagttggtggggttatttttaggctttgggtttgcatctaatgttgcccttttggccacacttccccccacctgctacagtgtcactgtcaccagtgaggtccaacaggcaccaagaggagagaggaagagaaagaaggagagagaagagagttctgactgttggacaagctgaggaagggagggggcagaatttctctagtccttgtaattaagactgggtgctccatggcaaccccatcctcccaaattttagttggggctggacacagctcatgcctgttatctcagcactttgggaggctgaggcagatggatcacttgagcccaggagtttgagaccagcctgggcacatggcaaaccctgtctctagg

SEQ ID NO: 230289 - DNA, 412 bp, Homo sapiens
tttctcttttaatttgtataaaaacacccatacccatacccacaaacacacacacagtgtttgatgtatacgtaagtttgtatcactcactttgttttataaatattttgggatttctactgtattttgagctttttgatgcaaagtttaccttttagccaccgggagctcccaaaggggtgagcatagttcccagcaccctgataattgaccgttgcctttatgattttgcaatactttgtatatcaaagtaaaatcctaaaatttgctgatattatttatagcctattctttgtaacatatgattaatctttacttcttcaaatattttgtttaacaagggccaaatacatttgaagatgcaggaaactacatcaagaaccagtttctagacctgaatttaaaaaaagaa

SEQ ID NO: 230290 - DNA, 528 bp, Homo sapiens
caaagcccatgacatcagagacaagcaggaaggactacccaagtaaagaaagaatcgtagaaaccaatccctgcacctccccagtgaagtgattcagtttggactttagaaggaggtatcctttaaatcctgcatgactggaagtcagatggtcaagtccccttgccttgggaaccacagcagtgggctctgagtcattgcttcagagtcaagctactcaagccgcaggagacagccaagttctccctgagagagaagggatagagaccaaacaaccggccgcctttatctacaaggtggagtgtggaggttgcctttccattgtattttccctaagaccagaggaactggttcaattgaaaagggaggcagtcagtcccctgcagtgcacaccctccacttgagagacagcctcaagactctcccctcagcccttttgggtgttgcaattgggcaagcctcttcccaaagagtccacggactctgggccatgcactcaggctcaatacagaccttatcttttcaatc

SEQ ID NO: 230291 - DNA, 463 bp, Homo sapiens
  misc_feature (14)..(15): n is a, c, g, or t
  misc_feature (20)..(20): n is a, c, g, or t
  misc_feature (425)..(425): n is a, c, g, or t
ccccgcaagtatgnntactnaaaaaaaaaaaaaaagaaagaattagctatcagctccattttatagatgaggaaactgaggcacagaggaaggagggatgggtttcaaggccggtcttggttttgccaagaacttgacttccagcaaatcgtaagccttctgggctttcatttccttgtctctgaacgaaacagctggcaggagtcgaatgcttatcatgtgccaggccctggccgaacactctgaacatgtgcgcacagagtgtgtgttaaccagtgggggagggggcaccaagcaggcccatctgggtgggaatatgaagccaccttcccaacagggcagtcacatatgcccagtaggaaagagctgtatctgtgctgcagagagggtcatttcaaattaaaaaaaaaactttttagtaattnaaaagatcagcttgataatcacaataacttgctggacg

SEQ ID NO: 230292 - DNA, 1463 bp, Homo sapiens
  misc_feature (1425)..(1425): n is a, c, g, or t
tagcacctgcgtcatcgaatacgcacaacaagatggaaaatgccttgggccatccagatagggaaaacaagtaggacaccagattgataccactggcatcaaaaccatgaaaaaaacacatgcatgaagaggactgggaagaagtacacaagaagtggctgcattagggtgagaaggagtattcatgtttttctcatccgtctttttcaaaccttttgtaatgggtggttttattaattttataatggaaaatgttaatttaaaagcaagttatttacagtttagtaagctcatggcagggaaaggctgtgctctgtttattgctcttactttttcccaacgcctactcccatgcctggcaattatagagataataaatgtgggtgtggaatgagtgcccactgggaaacctctcagaggactttgacccaggaacatatttgcacagggtttccctcagctggagaaggtttctctgggagagcaccagccaggtgtgtgtcatgggatatatttacagggtggtgagctctcctggtccaacctaaaaggtcccagcaaggtgtagggcccttctggccatttgacatcaccagggcagttagtgctgatacaaaccacagagaatgaacaaactccaactcaaacgggaatggattttatgtcattctgggactttcaaacttgataatagaccaagcatggtggctcacacatgtaatcctagcactttgggaagccaaggtgggaggatcgcttgcggccaggagattgagaccagcctgggaaaggtagcaagacccagtctctacaaaaaaattttttgttctgttttgtttttgagacagagtctcaactctgtcgtctaggctggagtgcagtggtttgatcttggctcactacaacctcgcactccgggaaaatcactggaacctgggaggcagaggttgcagtgagccaatatcacgccattgcattccggcctgggcaacaagagcaaaactccatctcaaaaaaaaaaaaaaaaaaaaaaaagaaagaattagctatcagctccattttatagatgaggaaactgaggcacagaggaaggagggatgggtttcaaggccggtcttggttttgccaagaacttgacttccagcaaatcgtaagccttctgggctttcatttccttgtctctgaacgaaacagctggcaggagtcgaatgcttatcatgtgccaggccctggccgaacactctgaacatgtgcgcacagagtgtgtgttaaccagtgggggagggggcaccaagcaggcccatctgggtgggaatatgaagccaccttcccaacagggcagtcacatatgcccagtaggaaagagctgtatctgtgctgcagagagggtcatttcaaattaaaaaaaaaactttttagtaattnaaaagatcagcttgataatcacaataacttgctggacg

SEQ ID NO: 230293 - DNA, 476 bp, Homo sapiens
  misc_feature (438)..(438): n is a, c, g, or t
ctttcaacccgcgggtagtatgtgttcaaaaaaaaaaaaaaaaaaaaagaaagaattagctatcagctccattttatagatgaggaaactgaggcacagaggaaggagggatgggtttcaaggccggtcttggttttgccaagaacttgacttccagcaaatcgtaagccttctgggctttcatttccttgtctctgaacgaaacagctggcaggagtcgaatgcttatcatgtgccaggccctggccgaacactctgaacatgtgcgcacagagtgtgtgttaaccagtgggggagggggcaccaagcaggcccatctgggtgggaatatgaagccaccttcccaacagggcagtcacatatgcccagtaggaaagagctgtatctgtgctgcagagagggtcatttcaaattaaaaaaaaaactttttagtaattnaaaagatcagcttgataatcacaataacttgctggacg

SEQ ID NO: 230294 - DNA, 457 bp, Homo sapiens
tctgtctttcatttttctcaatggaagcacattccccacttctcaatttgccttgggagctcttatttcaatctcttctcaatccttcgaagcaggactcctccctagccatattctacacagaaggaaacagaaactcagcgtgaggacggctcctgccctgcgacctcaggtcccccagctgccttgctaagagttgaaccgtgcccccagcccctaccctgatacatttcagcaaattgatatgcaaggcccctttccaggccctgggaacatgaagaggaagttgctgatggctgtgctcaaagacttcccaggtgctggtgaaacagacatgaaaaggcacaacccctgcctcgggatctggtggcaagatcaacaggtaaactgcaggtctgatacggattgacaggtgccactcagagtgagtacgggtggcagaaactcagaggggtcc

SEQ ID NO: 230295 - DNA, 496 bp, Homo sapiens
aatgatcacctaagatatacatgctccaaccatattgattttagaacaaaacacagcagcccataacagtttgtggcctctactaactgtcctctgctgtcccatctagaggttatgtttctctatttttaaaataaaatgtagttaaattagcctgacggatgtttcctctctatcccttatctcagacacatacaaaacagacagacaataacaaaaagacatcatctttatatgtacaaaataaggtatgcacacttttttctttgtgcttctgagattggctcctttgcatatataagatacaagccatctgcacgatcaccctcatttcctatctttgttgacatgttcctcttacaacacaagagcaaattacctctatttgaaagcaccctgtcttcaacacagctcatgacaattttatttaatattgatcctttgaatgagagatcaaaagcatgcacaggtcaatcctctgcacattaaaaaaaaa

SEQ ID NO: 230296 - DNA, 925 bp, Homo sapiens
aatgatcacctaagatatacatgctccaaccatattgattttagaacaaaacacagcagcccataacagtttgtggcctctactaactgtcctctgctgtcccatctagaggttatgtttctctatttttaaaataaaatgtagttaaattagcctgacggatgtttcctctctatcccttatctcagacacatacaaaacagacagacaataacaaaaagacatcatctttatatgtacaaaataaggtatgcacacttttttctttgtgcttctgagattggctcctttgcatatataagatacaagccatctgcacgatcaccctcatttcctatctttgttgacatgttcctcttacaacacaagagcaaattacctctatttgaaagcaccctgtcttcaacacagctcatgacaattttatttaatattgatcctttgaatgagagatcaaaagcatgcacagcatcactaaaactttctcctgtggtacatcaattattggtcttcctattgaaaagtacaatttcacttcataagaaatcctcagtgaagagatatcaagtaacaccaaaagcccacaataacagagctccagcatctcataaagctttctgcacagcttgctggaaaacgtatatattatttagcattttagtaaccagacacaaaaccaatgagccaaaggtgtttttgtttttgttgttgtttgtttatttgttttaagacagggtctcggtctgtcgagtgcagtgtcatgatcctggctcattgcaacctccgccttccgggttcaagcaattctcgtgcatcaatctcccgagtaggtgggaatacaggtgtgcaccaacacactaggctattgtttgtattttttaatagagatgggttttcactatattggccaggctggtctcgaact

SEQ ID NO: 230297 - DNA, 798 bp, Homo sapiens
  misc_feature (638)..(638): n is a, c, g, or t
  misc_feature (658)..(658): n is a, c, g, or t
  misc_feature (755)..(755): n is a, c, g, or t
  misc_feature (769)..(769): n is a, c, g, or t
  misc_feature (788)..(788): n is a, c, g, or t
gttcctattcggccatcttggctccacctccctgtatttttctttttaaaattgcatagttgcttaaacttatttttttctctttggatttttaaaggttcactgtatgtatagtcttatatctcagtcgatcttgttagtggcttattgttaaaacatgcagtttttggctgggcatggtggctgtattcctagcactttgggaggccaaggcaggtggatcacctaagcccaggagtttgagatcagcctgggcaacctggtgaaactctgtctttataaaacattagaaaattagctgggtgtggtggcacacacctgtagtctcagttccttgggaggctgagtgtggaggatcccttgagcctgggtggttgaggctgcagtgagctgggatagagccactccagacttagtctccaaaaaaaaaaaaaaaatttaaagaaaaaaaatgtctacaacatgcactccccaaaaatcttatctaaaactgaacttattatgttctctcctaaatcagttactcgaagttcaccgctctcctggaacctcagaatacaaatcatagtatcttaattgactcatccttttatcttatcaaacccatcatcaaatccagatcattttcctttctctgnctctaattaattcattttgntcagagttgccatgatagtctccctaatatactggttatggctttgccctctgcatccaggcccgatgcctttcgacaaagaatgcacatcacaatnaccctggggacctnttttaaaaacttggacctngggccccatt

SEQ ID NO: 230298 - DNA, 495 bp, Homo sapiens
atgcctggccacctgactttgtacccatagctaggagtaaggattttgttttgtctcctgccaatacttgttatgcatacatttcactggatgggaaatatggaatggtacacattatgaacgaaacaccagagattgttaatggatggtacaggaatgctttgccatggtaatgaagtatctttatacaagaaaatgcaggatgagcatctctaatctaaaaaactaaagtccaaagtgatccaaaatctaaaacattttcgagtgccaagatgataccacaggtggaaaattctacacctgatctcatttgatggattgtagtcaaaatgctgtcaaaacattgtttcatgcataaaattattaaacatattgtataaatcaccttcaggctatgcgtataaggtgtatttaaacataaagagatttcaagattagacttgggttctatccccacgataacttgttatgtatatgccaatatcccaaaatcca

SEQ ID NO: 230299 - DNA, 168 bp, Homo sapiens
gagctttaatatctttaatttagagatgaggaaacaacactgagaaatattcagtcaggtagctgctggataccatctgttaaagcattccccaatctgaattcaagttcaacggactctgccacttttactagctatataaccataggcccttctgtgagttttatc

SEQ ID NO: 230300 - DNA, 497 bp, Homo sapiens
ggcatgattttggaacacatatattggtcatttggaaaatataaattcttccaaaagttgacatattttgttatattatatcaaaaagtcaccttcattaatataatcaccaagctcatctaaaaagtctggaatgtactggaagctcttaagctcatagtggcacatagacattttctaagttctaatttatgctttgaagctagaaattgggctgggcgtggtggctcacatctgtaatcgtagcactttgggaggctgaggcaggcgggtcacttgaggtcaggagttcgagaccagcctggccaacatggtaaaaccctgtctgtactgaaaacacaaaaattagccaggtgtggtggtacatgcctgtagtcccagctgcttgggaggctgaggcaggagaatcacttgaacccaagaggtggaggctgcagtgagccgagattgcaccattgcactccagccggggcaaaagagcaagagtctgtctcaaa

SEQ ID NO: 230301 - DNA, 423 bp, Homo sapiens
aggattactaaggaacaatagaaagaactttgaaactccatttccactctaatgatttcccctgcactcctccacacctgctgtgtaagaagagtgagaagaggaggggcagcaggaaccatggctctactggaaatgtggtgttagtgataaggtgttggagtgggaggtcacttccttccctcttatttgggaagggggtttgagccccagttctctcaaaggcaaatgaattgacagctccaagaaactggctgatatataatgggagtgattctctctgcctgcctgctcaactgctaaagttgagtcttctctgctgtggccaaaacagtgaaatgtggtgacaaagtaccagcaagaactggactgtgtttctggagcctaggggcaagtatgaatcttgagtattgagataatatc

SEQ ID NO: 230302 - DNA, 462 bp, Homo sapiens
cagcttgaatataatggggaagctaagaaaaaggttgtttagtaattgtagttctgggaagggaaggagtttctagcctcttaaagattcctgctcccaaggtcattttatttctgtttagtttttcagaaattattcctggtatcaataggttaagaaagtagaattttcccaagtactggccaggcgcggtggctcacgcctgtaatcccagccctttgggagcccgaggcagacagatcacgaggtcaggagattgagaccatcctggctaacgcggtgaaaccttgtctctactaacaatacaaaaaaattagcccgacatggtggcgggtgcctgtcagtcccagctactcgggaggcggaggcaggagaatggcgtgaacctgggaggtagagcttgcagtgagccgagatcgcgccactgcgctccagcctggacgaaagggcgagaccctgtct

SEQ ID NO: 230303 - DNA, 437 bp, Homo sapiens
tacacccatttttgtcaacagcttaaaaagaaggcaagttttgaaccttaaaagtagttatctttccattatgatcattgttcattagtgtgatgtttcatactttgtagaaagaaccctaaaatggtttctacttaagatcgaaacttgatgcttagagattaaattcatttcaaggagaacagtttgccttttacagtggtgtagtgtagacttaacatcatagtcatattttctcatgggatgttaagcttttttctaattttttaagatttgggcatgtcatatttttgtgttttaagtatttgtcagctaaaagttagttaagggagacttttttttaaggcccaaaatgttgtatactttcaaagtgattccctcattgacccacccttagcttccatgtctccatgtttactatgatttcccactaagga

SEQ ID NO: 230304 - DNA, 2061 bp, Homo sapiens
  misc_feature (1105)..(1105): n is a, c, g, or t
cactgagaatatggggtaaatacttggagacaagagagagacaaatgtcctagtttccaaaaaggaataaagtatattgcaaaaacccaagaccaattccctactttaaactgtggtaaaatttgaagagattgtaaaaaaatgaaatattgtgtttagaagagaatgggatgatcaccatgaatcaatatgaatttataagaataagacatgccaaaatgacctcattttttttttgctttatttttagttgtataattgctattggattagagaatagtaaagacatgttgtatcttgactttcgccaagtggttgacagtgtttccttaactatccttgtggaaacatgatgaaattagattgtaattagattgatttacagctgcttgcctggccattgccatgcccgcatgcccagcgtttagttaaataatagttactttatatactggttcctcacagagaactggtggtgaacattaatttgcatatattcagaaagtatggatttgtagttaacgagtttttttaaggatttgtatgttgaaacttgagttcctggatttattcatgattgaggtttctgttagggacttttttgcaaccaagctgtatttgtaagatatataaatctgtttttaatttacatatgtaaccttgacttataaattacttagaagccaaggcgtaatattagcatttagagcaaagtctggctatgttaagaatgctaacgttatgaagaatcttttctttgttcagtaacaactatagtaagctcacttggatgtttttcatacccttgaaatgtcattcctgtgaactatccctaaacaaaaggcagatgttcatatacaaattgataatacagatatattcagcagtgtctttctgagttaatgtgtctgttggccttctggtaatcccacagtcagctgcctgttcaagatatttacatattttttaaaaaaatacaaattccctggaatcatatcaaagagagaaccatatattttgttcacttaggaagttcttttggcagtccatgatggctgctacatccaatatattttttaattaattgttacttttagagaatgcnagtccatagttaacttattaaactttcataattgatatttctttgatgcttgtaatattttgtttctagcctcaaaaaagtgtgataacttttttgaatacttgcagacatatagcatatactataataaatataattaatatgtatataataatgataataattctaaaataacagccctagtcatcagtgtttccatttcttgttcttgtctcattcctatgcctcttccacagaaagaagtgtttttggcttttcctgctgtagacttgttatacccaatggtgccagaagataatcgattcaaatggttagcttagccttattttatatttcagtccagataccattttgtgaatatgttttaaaatgttaataaataaagaacaaaatttgatgaattgacatataaactataattaaaacctactttaaagactcatagagcttgctgctttaatgaagaattgaagaaattgatgaagaatttattttagtgttttgactgagccaaaataaaatcagtttcattgttgaagaaacacagtttaacataaacttgtagatagactattaaagagtgctgtatcagttaagtgagcactgtcttctaaaatttcatgtattcaaggatggagagggtcaaatgaatagttaaaaatacaaattaaggccaggcatggtggctcatgcctgtaatcccagccagcactttgggagtctgaggcaggcggatcacttgagctcaggagtttgacaccagtctgggcaacatgacaaaacactgtctctaccaaaaatacaaaaattaacctggcctggtggcgtgtgcctgtggtcccagctacttgggaggctgaggtgggaggattgctggagcccccgaggcggaggttgcagtgagccgagatcgcacctctgcattccagcctggttgacagagtgagaccccatct

SEQ ID NO: 230305 - DNA, 556 bp, Homo sapiens
tcagtagttatcaactgggcttagttccagtctgcaggataggataaggtcatttttttttcttactcgggagcaaagttgattacttggggcattttctattcatcaaagaaggcagcaacataaaagaccaactcaaaccatgcaagtatatttaaaactgtatttgcatcacatcgacaaacaatcctttcaataaaacaagtcacatgtacaaactcaaggctaatggggagaccatgtgcactttacatctttactggcaggcctttctgaatcacatgacaaagagtgtgactaaatagtctgcaaaggggatggagtgaagactttgggaaaatgattaaatctatcatagctaacatcttacatcatgtggaaacattagagaccttctactaatgtcagaaacaagaaaacagtatacttgatctccagcaccgtatttaatattgtgatggcagtattaatgaatacgattagacaagaaaattcattagaaacatgagaattggagggaaagaggtaaaactttatcagattatatataaaatcc

SEQ ID NO: 230306 - DNA, 355 bp, Homo sapiens
aaccgtgcacagagaggcgagctgctgggacttgaatgaagctgatgcgtcccatctataaattattgtggcttctcctagttgggaggcaggaccagcctcacaatttcccagaagaccgtaatttctggagcctgcaggcctgggggcaaatggagaaatcaaaaggcagatggccttggagataggcagccagaaaggatgtgaaaggccctggttctggactcaagagacctcacgtttcctagtcttctttctgtctctgctcttttgtgttcatgaggttcatgccctcatgagggctcccccacctccagtggtctaggattctaggatgtcttggtattctttttca

SEQ ID NO: 230307 - DNA, 463 bp, Homo sapiens
gagttctctggatcagctctgtttcctctgcatgtaacttggatgagtgttgaaggtggcacacagaaccttgtgaaactgtcagactgagactctaaggtccattcagccagtttgactgaggctggggaggcctttgagaacaagctccctctgctgtctttcaggtataaacaaggtctgcatggtagctttggaactagcacgccagctgcttggtatttctgggatcccttgcacgaaatatgggctccctagcattacctgtcagatctggtgctttttgtttcattaaaaataaaacagaaagccctctaagcaatggcattaaagaacatctagaaaataaccctctgctttctcaggaaagatgtcagtatgtccacggcaggattgatgaaagaattcttgaagcagtgaagaaaacggaccaagcttcagggaagttggcataagaagtgag

SEQ ID NO: 230308 - DNA, 521 bp, Homo sapiens
ggtggaggtggagtctctgggactctgatgtggtgccttttttccattctgccccatttagccttgtagagaagtagcgagtcagggtgtatggtaagggagaggacttagcatatctctagttattggaatcgagagaaagaccccagaagagaggacattaagtttcacaggacattacgtgaaagctgtctcgaccatgggcagctgtctcaccccttcactataggaggaggcgtctttgaaggcatttcacttttgagaagaaagcccatgtggggcatggcagggctcaggcatcgcagccacattgaagtccattactcatagattcactccatgcaagctgcttaatcttgcttagcctcagtgttctcttctgaaaatggccatcactgggcaggagaaaatgaaggtggagccatgtagtttctctacatatgtaatattataatatcggtgaagtccataagaatggttattgaatattatatactgatcacagtgctagtatttcataa

SEQ ID NO: 230309 - DNA, 413 bp, Homo sapiens
atggagtctctctctgttgcccagactggagtgcagtggcacaatctcggcttactgcaacctccgcctgccaggttcaagcaatcctcctccctcagcccctctagtaactgggattacaggcacacaccaccaggcccagctaatttttgtatttgtagtagagacagggtttcaccacattggccaggctggtctcaaactcctgacctcaggtgatctacctgcctcggcctcccaaaatgctggaattacaggcatgagccaccgcactagccaagccttgtttttataataagctattttgttttaaatatactggtatgtagtgtagtacatatgtaactgtcatatgactatatgttaatctagcttaaaggaataaatatttaggatatttactatttttgttg

SEQ ID NO: 230310 - DNA, 514 bp, Homo sapiens
cacaaacttcagcattagcctgcgtttaaatctattactgtcaccctggcctttccatagttgctggtgtcttgtccactattatatatgtggcttctgtaatttatttttttctaattatgttttttattttgagaacattgtagactcacgtgcagttgtaagaaataacacaaagaaatctccttacctgttttctccaatggtaacatctttcaaaactgtagcataatatcacaactaggatattgacagtgatgtagtcaagatgcagaacggttccatttccttatggctacacctacttcctgccagctccctgccccctccttaacccttgatgaacattaatatgttctctatttctataattttgtcatttaaagagtgttacataagctaggcatggtaacacacgcctgtagtcccggcttgagaccaggaggttgaggctgcggtgagttaccatcatgccactgcactccaggctgggtgacagagtgagacactgtct

SEQ ID NO: 230311 - DNA, 277 bp, Homo sapiens
aattgtagccctgttattttaaaaaataattacatatgcatgtatctgtaagcaatgtacttaaattttttttttgagcttcatataaatggcaccattgtgtgtataagtcatctgggactcgcataattcaatgttaagtttccaaattcattctgtgtgtagcttctgggtaatgttccattgtaaaaactgtatgaaaatttatcgatgtattttcaatggacatgtgggttgttttcagtgttttgttattaaaatgtgctgataatatttt

SEQ ID NO: 230312 - DNA, 476 bp, Homo sapiens
ttactgccagtgaggaatgagctcccatcagacataacctgttcaggagctatgctgtcccaatgccgcaggatactcctttatacatgaaggcctgtgatcattgccctttattcatcagataatttattataatgactgcctgaacctctgaaagattttgctgtacttaaacacaaaatatgcttagcaaaacaacctgacaaggatgattcatggatagcaattaagtgcagaatcctgtgcctaccaaatcctaaattgggttgaagatctggccatcccgctgacaacttgatatggaatacagtaggctggcccttgtcagtccaccccactctcaaccctctcattgctcctgggcatgggaggtatccctgaaggggcaagctctatggatgacacaattccaattccaattttggcctctggcaagttgcttcacttctatggccctgagtttcctaatcataata

SEQ ID NO: 230313 - DNA, 430 bp, Homo sapiens
acctgttttatggtgaaagaggtgtgttaatggacacaagacgattgcatactaaaccccatatcacccaaagaggtgaggcctgagaaaatttaaagtgaagctaagcataaacttggaaataatatgcatgggattgtagtgttgtcctttgagatgcagaatgtgtgttgacctgacggtcatttaaccattaagatagactgtatgagtccaagaaccaaagagtaaaaagtggagtgaccttattttcatgactctgagaagcccagtgcttaagcttccatgagccagccagggactagtccggaaaatagatatttcttgggaatgtggaaggtttgagcaatctcatctattgggttaaccctcctttgcacagttatttagaaatgtagaggtaaataccaggtgaacaccaaaaaaaaaa

SEQ ID NO: 230314 - DNA, 426 bp, Homo sapiens
cctggttggcctccaccagtgcaggtaccttagacaagctctggacccctctggcctccatgtccatacttgacatttaggggtggatggtgatgcctctcccagttagtggctctaaggatccaatgagttatgagagcaagtgcagggcttggcacctggtagaaggtccctaagcaattaacaaaagagagttggtgttttgaagggactgaagccacaatccaccctgcagacatgggcacctctgtcttttccattttggctcccaagtcagccttataaaaagtcatcaataagtctcacccccaatttgtgttgcttttgaggggttggcagtgtcatgcactaggagtgactgtgataagtatttactgggtacccgctgtgtgctgggtgcctacagatgcccgcattcatcttcac

SEQ ID NO: 230315 - DNA, 690 bp, Homo sapiens
cttaggggccccacaacacagaggcacattcattctctccacgtcctggaggtcagaagccaagacggagctaaggccgaggtgcgggcagggccgtgcccttgtggctctacgggacaggtttctcctctcctttcacagcctctagaagctgcagtgtccccgggctcggggcccttcctccatcttggaagccgacagtgcagtgtcttctcggcctgactctgaccctcctgcctcactgtgacgcctcccgtgatgacactggcgcctcccagatgatcctggatcaccccccaccaaggtccctctccccaaccatgtctgctgccccctgcttgccacacaggatgccgttcagggcctggacagcagccgtggcagccccaggtgccatgtccccgctggccactggggggctcaccgcgtgtgcacaggcaggcagcggctcaccccgtgtgcgtgggtcaccccgtgtgcgtggacaggagggggctcaccgcgtgtgcacaggcaggcagcggctcaccccgtgtgcgtgggtcaccccgtgtgcatggacaggagggggctcaccgcgtgtgcacgagcacagagtcctggtagagccggtcatacatgcagatcttcaggtccacgctgggcttcggcacccagaccggcacatcgatggccacgcccacgaccctg

SEQ ID NO: 230316 - DNA, 468 bp, Homo sapiens
ttattttcaaataagagtagagatatgtgttcttgactgtcctcagaatgagagtataactaatctggagagtcataagtctccagattaacaagaggaggctgtgtaataactctatcaaattgtgtaataactctataaaaaaggagtaaacaaaaacccaatcagataaataagaaacataagtgagatcaagaaataaaattaaatataacatttgctatgctaaatgtgaataatctaaatgtgtctgctaaaacatagagactgagaatggctagaaaatattcattgaaaatgaagacatttagaagaaagtaattagcaaagtatgaaaataaaaacatgagaaataggaaaattcaaaaatcaaaaggaaaacaaaagtaaaaataattacatgcaagttatatttttaaggaaaaagacattaaaaaactgaatagttttaaaggacattatgcagtg

SEQ ID NO: 230317 - DNA, 422 bp, Homo sapiens
agaatttcaaagccgggggctctatgactggctggacgctggagctctcctttaaaggatggaggcaacttggccaactgcatattattttctatggcagtggcccccactgttctcaggccatgaaactcgggaacggattgtggctgtcacgcagaatcaaagagatggattggccgtgttgcttcaggactcaatcttctcaaagcttctgactccagacagacagtgcctccccattctgctggctgagacaggaggggtataagaccaaaaatcgaagtgtgtaagatcctgaattccactgcctgccaagcaactgaaagtgcagttatcatcagctgcttctccctgatctattttcccattaaaaaataaagacttggatcctgcaagagctctgggatcccttcgatggcaaa

SEQ ID NO: 230318 - DNA, 373 bp, Homo sapiens
gctattcagggtcccttgaaagtctatatgaattttaggattaagtcttctatttctgcaaaaatgttggggttttgacagggattgtattgacattagttatttttatgtatttgtgggattcataaatttagcatgattaaaatgacaggacacttgtttggttttcattttgaatcaacaaaatttcatgtattttgtggcctttggctaggctgtctaaatatgaatttatatgttttctgtgctgttgttaaaaaaaattggaaagcatgggagcagtataaagaacaaactaccacctgtttatccatgcatttgtgtgttttaaaagtaaaataaaagtatttctatgtatgaaaacatataccta

SEQ ID NO: 230319 - DNA, 409 bp, Homo sapiens
ctttagactggggcatggttgtgcttatgagaaatgctactgagcattaggaactcacggttaccatccatgctatttcgcatttagggttctgtcctcaaagttagaaatgttttatattggccaggcagggtggcttatgcctgtaatcccagcactttggaatgccgaggtaggcggatcacctgaggtcaagagttcaagaccagcctggccaacatggcgacaccctatctctattaaaaatacaaaaatttagccgggcattgtggtgtgcgcctataatcccagctactcaggagactgaggcaggagaatcacttgaacccaggagacggaggttgcagtgagcccagatcgcgccactgcactccagcctgggcaacagaataagactccatctcaaaaa

SEQ ID NO: 230320 - DNA, 433 bp, Homo sapiens
gcctgcagtagattagaagcagtacatttaaaaatgaaagagggattcttgcagatagtactgggaagaaaggacagctggtaacccaaatataaggaagtgggccaggaaattataaaatgtaatgcccagaagaagtaaagaaccatggcaattgaagaacagctggcccaatgcccaagaatgtgttctacaccctcctcaggaatgaatgtgcttccaagtccaacacctactgccctgcctgtcaccaagcacagcttctgtggatatttgatgaactataacatgaagaaatttagaatgagtgagggaaattaaaatgaagtccagaagaccagcagagatttcaccgggcatgtgggtaggaaagacgtgtgagaaaaccatttgaaatggaattaaaagaaaacgtgttcagctcactatataa

SEQ ID NO: 230321 - DNA, 434 bp, Homo sapiens
ctcattagacaggcttagagtctttctcttctgccagaggcttctgagtgggctctgagatacagtcctgagggacttcttcagtcatgaagttggggaggagcatgcagatcagaaacagactgagtcaacagcgaactccacctgtccctttgggaaggggagtggcctttctcagactgtgaatgcagcccatgtgtaggggcaccgtgctggtgtgggaggtgaaggctccatggctgcccagctgggagtccgtggtagcaggagggcctggcgttgcagaacggctcaccccgtgtacggccctctctcagagttccttgcctgcatgagtcccttctaccgcctgcaagtcccacgttgggaagcaagtgggctggaaagctccatccacccatgggttgactgtccttaaagggcaggttcagctc

SEQ ID NO: 230322 - DNA, 418 bp, Homo sapiens
tagttacatatatgttctgccttcactgctgattcttttagtgtcctaaatgggaagttttccatgtcctttgttttgttttgttttgagacagaatttcgctcttttttgcccaggctggaatacaatggcataatctcggcttactgcaacctccacctcctaggttcaagagattctcatgcctcagcctcccaagtagctgggattacaggtgcatgccaccatgcccggctaattttgtatttttagtacagacgaggtttcaccatgttgaccacgctggtcttgaactcctgaccacaggtgatctgccgctttgttggcctcccacagtactgggattacaggcatgagccactgtgcctggccatgtgtcctgtgtttttgatacaaataaatttgttgtagccaaagc

SEQ ID NO: 230323 - DNA, 1127 bp, Homo sapiens
tgagggagttatgaatggagtgactgggctttttcctgggaattacgttgagtctatcatgcattattctgagtaaagctcagcagggctgtgcttgcctcacaggaatagtcaggtcttcccagattatctgaaggccctggggattccactccagtaaagtagaatgaaggatacaaatgataaaaattacacttttttttttggtttattccccagtattaaaaacaaagcaagctgagtctgaacaaatggatctttctgccatcatttgtacaatgctgagctgtctggattgaaataaaatgaccatttttatgtatgtcaaaggtataacagcataactgtgtagccaaaacaaaatcagattaagactgattcagaaaaatctgggatctttctcaggaatactgtatacccttgggatttctcctcctgcagaatctgtggcattggatgttcttcattgcctgtgctaaggggttaacctcatggcccagtgggtaccctagcccctccttttcttccacttgtatgaagaggagggaaccaacatttaaataccacacttaaccatttttacaattatttcagatggcttttttcctctgtgacactgtaaattctgcattctctcagcacttgagtgcaccaaacgagtgaatgctgaactcacttgcatcccttcatgtttctgtttgtggattataaggatgatgaaatgtgaaagtctcccaacactctgagggtggtgaacgattgccacccgtttgattttaatgtgctgctgcatgagactgcattgttgctaatggccagtgtacccagatgtgaagtgtggtaggctggttcatatgtggaggtgggtgtgtgaagctagacacgaaggtccctaaggttctgaagagacttgaactgtggaaatgctcttagcaggcatcccgaacccctgcttcggtgctgttttgaggagtaggatcttggagttcagaccaactatgactatcatttccttcactatctagaaaaacgctattctactttggaagagaatagtagttattttcaagtctcctgacagtcactgggagtacaaggttgctaatgtgctctctggacgttattaa

SEQ ID NO: 230324 - DNA, 728 bp, Homo sapiens
ccgcacccagccatatatttttaaatggtcttactgagatgcaattcacatgccataccgttcacacatttgaagtgcagaattcatagttttcactatattcacagataagtgcaggcttcaccacagtcgattttagaacatttccgtcatctcaaaaagaaaccctgcacccttctgtcatcccccggcccctggcaacagtggtctactttctgtctctgcagatgtgcctcttctgagcatttcatataatcaatatgtggccttttgcgtctggctccttccccttagcctgatgttttcaagcttcatccatgtcgtagcctgtgtcagtacctcgtctctttttatggccaaatcatattctgctgtgttgacagacgacgttttgttcatctctttatctgtgtgacgaacgagtggttctttttgttgttgttgttgttgttgaagactgtgtgcacagaatcaatgtttctttgaaaaaataaataaatttaaaaagccctaggtcaagagattgagaccatcatggccaacttggtgaaaccccgtctctactaaaaaatccaaaaattagctgggcatggtggtgtgcgcctgtagtcccagctactcgggaggctgaggcagaagaattgcttgaactggggaggtggaggttgcagtgagccaagattggtgcccctacactccagcctggcaacagagggagactccatctc

SEQ ID NO: 230325 - DNA, 907 bp, Homo sapiens
gattactgactcaaaactctctcactgctgggcgaaaagaatgagccagaaacttaaatgcttttagaatttggcccatggccctttgatttgcgagtattctttatggtttaaaatctcctcctagtagctcataaacatgtatttccatattgatttggggctcttggtaacccaatttgtgtgattttaaagctgcagaggctgataggatttatctttggatgacatgttggcatgtgcgtggcttgcgcctggtcatggatacggtgtcccacagggtatttggaggcaggaaaggatcatggagagaggcctgtatgttagccctgtagccagcggccttgacaaggctcagaggcatcttaaggacacctcaagagcttttcagcaaagatgtcacatttgccttaggattgctgcccccgggcctcacacccagttcacccaagagggctctcgggaagcgctgcccggggtagtgtggtggtggtatgcaggggtcggggggaaccactcttggagaaccaactgtgctaagaccatggagcctgcagtgagttgcccaggttcacaagcaagctctgtcgctttctagtgtctgacctcaggcagctcttcccctccccaagccatagctcctgcatctgtaagatggggagaacctgtctcagaaggctgctgtgagaatgaggtgaagtgctgtatgtacagtgctcgcatggtggctggcacctagaagaaagtgcctgttacatgttagctgtctttattgttataattagtgtccaagctcacccaggaacagagatgctcagaccaacataaattctggatctccatgtaactctgggcaagttagtaggtaacatatttaagtcttggtttcctcctctgtaaaaaacac

SEQ ID NO: 230326 - DNA, 200 bp, Homo sapiens
gggttgtgtggtttgatccttctcatcttaaaactttgtttagttatgggacctactccaacttactttatgcacagtaaataatgtgtactttaaaaaaatctataacgtatatcataataatgacagcctgagattaagactgcaaaataaaaagctgaaagggaaaaagtttccttttgactttttctcaatagtgc

SEQ ID NO: 230327 - DNA, 418 bp, Homo sapiens
aaataatcgctaaattaccaagccaagcaattgcttatggagaaagccacaaaaggaaaaggcatccttaacactctgatattaaaacaacaacaataaccaaaaaagactttccaagtttataattttttaaagtctgtgttttcctcatgttctcactcataggtgggagctgaactcgagaacacatggacacagggcagggaacatcacacaccggggcctgtggtgcagttgggggctgggggatggatagcattaggagaaatacctaatgtaaatgacgagttgatgggtgcaggaaaccaacatggcacatgtatacctatgtaacaaacctgcacattgtgcacatgtaccctagaacttaaaattttaaaaaaagaattttccagaaaaaaataaagtctgtgtttta

SEQ ID NO: 230328 - DNA, 294 bp, Homo sapiens
acgtccagctaatttttttatttttagtagagatggggattcaccagattggccaggctggtcttgaactcctgacctcaagtgatctgcccacctcggcctcccaaagtgctgggcaactccggctttttacttctaacccctctttttctgtgtttcttggtctccaggtgttgatgaggggattaggacacggaggtcactgcctggtttcctgctggcccctgtgaggatctcagtggtggagagtggttcaatgagtcctgcagggcacccccttttgtggctcttcag

SEQ ID NO: 230329 - DNA, 445 bp, Homo sapiens
gcctctttgcagtcaagataagaggaaggcttctgtctcctgctcatttctgggaatggaatgcctcggtgtaaagccgaccattcattctattctgaggtaggagaaaaccgccctgtggttggaggtgagacatgctggcagcaatactgctctgtgactctttgctacactgagatgtttgtgtgaagagaaacataaatctagcctacgtgcacatccaggcacagtacctttccttgaacttattcatgacacagattcctttgctcacgtttccctgctgaccttctcgccaccatcaccctgttgccctgccacactcccctcacaaagatagtaaaaatagtgatcaataaatactgagggaactcagagaccagcgccggtgcgggtactcgcacactgagctccggttgtctgggcccactgctgtttctctata

SEQ ID NO: 230330 - DNA, 385 bp, Homo sapiens
aatatgtcattctccccatattccacaagctgtgagctagttgtaaagttaatcgtcacacactgtgtgaaaaataatgggaaaaaaggtcaagaaaagataagtcagccaggcactgtggcttccgcctgtaatcccaacattttgggaggctgaggctggtggatcacctgaggttaggggttcgaaaccagcctggccaacatggtgaaaccctgtctctactaaaaacacaaaattagccgggcatggtggcgcatgcctgtaatcccagctacttgggaggctgaggcaggagaattgcttgaacctgggaggcggaggttgcagtgagccaagatcacgccattgcattccagcctgggcaacaagagtgaaactctgt

SEQ ID NO: 230331 - DNA, 488 bp, Homo sapiens
ggagaaaagatgggagattacaccttctcccttgaaggccaagtcccagaattgcatatatcccctcggtctcagcttatgacatgagtacatccagctacaagtcaggaaatgtggtctttatccagaatggccatgtgcctacccaacagcctggccccattactgaggaccaagaagagaatggatgtggagagcatcaagcatcgtctgccacgacacttaagcaacggtgccaaacacatttcatcccgagaggctggggatttgaggtcaatcattactgagaattaggaaaacttttctaaatgagagttgagaaaaccacatgcttttatttaagcgtgttttattcctccggaagttctcttaagccagatcaaataccaggcagtacactgccagatcctgtccgctattggaaggaaaataaaacctacacaaaagaaggtcagcttactcactgtcatatgaaagatcttactctg

SEQ ID NO: 230332 - DNA, 245 bp, Homo sapiens
tttgtttgctgtgcaggatgccttacccttggatggtattggaaacacactaccagcaaattctggctctttggatcctgtccaggagatgccacaccatcatttacaccctgagaagtaatttcctctaagaaaacatttttgattctttatctccaaccaccaacccaggtagaatctcagctctgtcttcaatcaagtcctttgcccattttaaagaattgggttgttcttttattttttgc

SEQ ID NO: 230333 - DNA, 352 bp, Homo sapiens
cttctgttcatagtctgtaaaatcagatgaactgccaatcagagaatgagagctatccagcctggccttaacattctttcaattaatacataaacaagaagggggagattttgggagccaagtaaactatcatgaaggcaggatgtgggcaaactcacgactgtgcctgccaccaggaggtttgctgagggtggtcactccctggcgccggtctccttgaggttatctactgtgacatctagagcctattgttagaggaatgcagtcttgcaagcctactctggaccaaacagctgacctcttcttccacccccacttctcaccatctcttttgcctaataaacacagaggg

SEQ ID NO: 230334 - DNA, 381 bp, Homo sapiens
cgctgggacggttacccagcgggccgccggcggtcgtgggcaagcttcgccatgcagagcactgacctaggcaacaaggagagcggcaagatatggcaccgcaagccgtccccggccacgcgggacggaattatagtgaacattattcacaacacttccgattaccatccaaaagttttgcgatttttgaatgtggcttttgatggcacaggcgactgcttaattgctggggaccaccaaggaaatatttatgtttttgacttacatggaaacaggtaccttgcaaaatactgtcataagtgctaaaggacgaaagtgggaaaaaacagaatgataacatggttcacattttaaagaattaaagtgctggttttaatagta

SEQ ID NO: 230335 - DNA, 569 bp, Homo sapiens
cgctgggacggttacccagcgggccgccggcggtcgtgggcaagcttcgccatgcagagcactgacctaggcaacaaggagagcggcaagatatggcaccgcaagccgtccccggccacgcgggacggaattatagtgaacattattcacaacacttccgattaccatccaaaagttttgcgatttttgaatgtggcttttgatggcacaggcgactgcttaattgctggggaccaccaaggaaatatttatgtttttgacttacatggaaacaggttcaatcttgttcagcgaacagcacaagcttgcacagctctggcctttaatcttcgtaggaaatctgaattccttgtggcattagctgattattctattaaatgttttgatacagtcaccaaggagctagttagctggatgagaggacatgaatcatcagtattttcgatctctgtgcatgcatcagggaaatatgccatcacaacttcttctgatacagcacaattatgggacttggatacctttcagagaaaaagaaagctgaatattcgccagtctgtgggtatacagaa

SEQ ID NO: 230336 - DNA, 360 bp, Homo sapiens
ttcagaaatggggacaatgaattaagcatatatgtatattaaaaagtgatatgcactcctagggtttacatatgtatatgttaaaggtatttatggaataaatcctaggaaagcttaagttgagtcacttgaggtgttttgactgagactgaaaattaaggaagataacttctgcatgttgacatacaatactttcaactgagtaacaataataatatcctaaattcaagtacggttggtgtaccataaagatgtacatttctagtcatttaaaaaatgttacttgaattgaaatgtcgttttttttagttagcttgttagataaagcccccaaggaaataaaaaaaaaaacaatgaaga

SEQ ID NO: 230337 - DNA, 204 bp, Homo sapiens
aaggctctttctcagtatgactcatgtgaacaatttaaacaaacagctgtggcaggagatggccactgcagcctgctcgagtaggtaaaatgtactgaacctgtgtggttaattagatcaatcttgactcattttctttaatgagacagtataacacacaacgtccaccagacctgttttctgggttttgttttacataatttg

SEQ ID NO: 230338 - DNA, 356 bp, Homo sapiens
gtgagccgagattgtgccattgccctccagcctgggcaacagggtgagactccatcttaaataaataaataaataaatttgtcatccagttattctgtcacctcatcttacttcaatccatggcacagctcagaccataactggattttctgggttcttatttatgtgtttgtttattacatgtctcttccagtaaaatcaggaatcatggccatcttatttattctgtattctccatatataagaaagtgcctggcacatagcagacattcaaaaaatatttttgaatgaatgttactaaattgtattgttagagaaggcaatatggcaaatttattaaaaccacatattttggg

SEQ ID NO: 230339 - DNA, 580 bp, Homo sapiens
aacaaatagacactatacgtaattacagtaataaatgctactaaaaagaaatctatgagagaaaataacaagagaactctttataatggtcagagaagccctctctgaggtgacagttaagctaaaatctaaaggataagagagctcagccatgccaacagccagaagagttcaccacgcagaaggaatacgtgtgtagggaaaggcctatgtgatttggaatgttgtgaacaatccggagctcaagaagagactgaagagttaagagtcaaagatgactctcatatttatggtttatccaaccagatgtatggtagtgccaatcagatgcagaacactgggagaaacacaggtttaggcagcacttacacgtttaggcttgagaatcctgggaggatctaaacagtgatatcacgtaagtagctgaaagtataaatcttgcttcttgtgaggctggtgcatcactccctcacctatactgtaccatgtgattagggtcccagatgtctcaaccctactggcagtgtctgtcctagactcagcctagtggtggcagcagctgcttgaacagcagtggtgg

SEQ ID NO: 230340 - DNA, 706 bp, Homo sapiens
aacaaatagacactatacgtaattacagtaataaatgctactaaaaagaaatctatgagagaaaataacaagagaactctttataatggtcagagaagccctctctgaggtgacagttaagctaaaatctaaaggataagagagctcagccatgccaacagccagaagagttcaccacgcagaaggaatacgtgtgtagggaaaggcctatgtgatttggaatgttgtgaacaatccggagctcaagaagagactgaagagttaagagtcaaagatgactctcatatttatggtttatccaaccagatgtatggtagtgccaatcagatgcagaacactgggagaaacacaggtttaggcagcacttacacgtttaggcttgagaatcctgggaggatctaaacagtgatatcactatcctaagcgaaggcacttaaagagagcaacacgaactcagaagcaaagagttgcagaccctcatacagccagtctttccgatgtaaaataaatctcaactgctcaaaacctaaaggcttctgtggtctacattcaccaaaaaaggcagaaaatggcgtctatcattaacaaagtttggcctacctacctagcaacattagccagtgaacagatacctttacttcagtctcgtcagattattctaccttcccaagtattaaatgaatatcgttttgtttcacttacttta

SEQ ID NO: 230341 - DNA, 435 bp, Homo sapiens
ccagtgtgacgtgtgaacaggtccctgtgtcccagcagcaagcaggtcctggtccacacacggacgactgaaggactgcacttctgaagtgggggacagggaggggaggggcaggagaggaaggaagaggaggagctgctggacttctgactttttttatggctttgcccagcaaggaagtctggaattcacattaacataaactataaacgcagaatcagttgatgaggacagttagtgaggagatggtcttttggggataaaatctggcaggattgctgacctggactctgtcatctaaagttctcacacaaatgaccattacgttgtgatgcatgaaacaagtaacttaatatgtatttttgtctgagtataaaatcattgtgttcactttggaaaatatagaaaataaaaataaaatatactttaacagca

SEQ ID NO: 230342 - DNA, 753 bp, Homo sapiens
aagagtccagtttttacccactttctcagttcaggcttcccatagcacattcctcagtgccatagccgagctttgtgcatgctcgtttttctggtgatttctcttactacctacttcccgggtcaaacatccccattctgggcctaccaagcagacagttattatagacacatcaaagggaaaagaaggacctttcttagattgagttcgagcagggaatgtagttgtagtctcagctccagtccctgaccaggtcctaaagctccagcccttggggcacgtgtccctccctctggcccccatgggcctcatggcttctcctcctccctgagctcctcccttccatgggcattagatcatgagatctttgtttgtggcatctaaagatcaacttttctttgaagttggttgtggttttctggtttttctttttcataatttgtgttggaggtatggaagagtatgctcgtcttccaccctttaaagcaattctaaaagactgaaaaggtagtttttttaaaatggagtcttgctctgttgcccaggctggagtgcagtggtgcaacctctgcctgctgggttcaggcaattctcctgccacaacctctggagtagctgggatcacaggtgttcaccatcatgcttatttttcgtgtttttggtagaaatggggtttcacaccatgttgaccagctggtctgaaactcctgacctctagtgatctgccctcagcctcccaaattggtgtttgtt

SEQ ID NO: 230343 - DNA, 495 bp, Homo sapiens
gtggagtctgaagttgtcatgcagtgactcatgcaagcttaggcagatttggtgatatacgacacagagatgcaaagaaatgttgtagctgacacacaccggctggctctgggagatgcagaaggagcacgtcacccaaaatagagccagacagacatccttaaggaaagagccaaggggctgcatcttaaagaatgaagaaaggatttgtcatgagagatgggacaggaagttcttgagaggcagagggagattgtgagaatgttgggaagggaggagagattctcgcacatctgggaagctgacaatccatcagcatgtccagaaggaaaataaggaggaggagcagaaacagatgaggctggatatagaagcagggctgaagctgtgtcgattgtggtaaagagttgcgattctatccagaaggcaataggtagcattctaaacagagatcttttaaaacaagagtcagcaaatattttctgcaaggggcta

SEQ ID NO: 230344 - DNA, 407 bp, Homo sapiens
ggacacttgtcattctatttgccctgttaatggtaagtttcatggtacatcataggtgttcaatacatgttttgactttttaaaaagtttgctttcactgtcatgatttagttcatgagcatttagtaaacaagcaggaggagaaggatcccctcaacactgatgacaacgatgatgatgatgttagtaatgaagaggaaacaagatagaaaaagaacctgtatgtagggtaacctgtcaattttctaatgagcatgcctaggtcaaatgagagtgccggggtcttaattcaaatccctcttctaccacttagcaggaagcatcaacaaggcacagtatgacccattctcactttctttgtctttaactagaaataaagattcctcacaagctgtgaaaatcaaata

SEQ ID NO: 230345 - DNA, 395 bp, Homo sapiens
gacagtttcttttttacaaaactatttccacatttgtcaaagatgcaatgaaacatctctaatatataatgtgaccctataaaagtatattctaagtcagaatataggaaggtataacaaacgtacacattaaaagggtgactggtttgcacaaagctaaaaactataaaatccctactaataccttggttacaccttcaatacacttttagcattttgtacatacatttgttttactttcttccctactgatcacaagcctcaaaaaaaagcacgtctcgtgtccagctccgtgacaagatttacccactattttggctcaccttaatacaatctagacaaatatatcattaatattgacaagtacgtttctcatccctactcagtatctgcac

SEQ ID NO: 230346 - DNA, 142 bp, Homo sapiens
agaacctgttttagaatggcataatggtccacatttgggtttaggtgttgattttattatgggtaaggcttgtgcttgttcccacatgttaaccatatggcctcagccacagggcacttccaaaggaagtgactgtttctgg

SEQ ID NO: 230347 - DNA, 384 bp, Homo sapiens
ctttttgccactatactagccttacaagagaccctcaagggaattgtaaacatgaggaaaaaagaataatacttgctcccagaaaaatacccttaaatacatagcccacacaccttgtaaggcagacaaacaatagagatgacaaagtaacaagttaacaatttcacaataggatcaaaacctcaaatatcaatgttaaccttgaatggtaatgattgaaatgcccccagttaaaaggcactgagtcgcaagttggataaacaacaggacccagctgtccttatctccaagagctccatcttacatgcaatgacacccataggctcaaataaaaggttggagaaatatctattatgcaaacagaaagcaataaagggccagagt

SEQ ID NO: 230348 - DNA, 378 bp, Homo sapiens
tcatctgcttaaaatgcttgtgggcaaaaaacaaaaagtaaggtccaccaatatgcactttaagttgagatcccagcatgaataaaaacaaataagagggctgggtgcagtggctcacacctgtaatcccagcactttgggaggctgaggcgggtggatcacctgaggtcaggagtttgagaccagcctgaccaacatggagaaaccccatctctactaaaaatacaaaaaactttagctgggcgtggtggtgcatgtaatcccagctactcggaaggctaaggcaggagaatcacttgaacctgggaggcagaggttgaggtgagccgagatcgcaccattgcactccagcctgagcaacaagagtgaaactgtctc

SEQ ID NO: 230349 - DNA, 377 bp, Homo sapiens
gtaagccagggattgtacatattggaaaggaagggattgtacatattgctcacaaatgacatgattgactatgtatgaatcccaaagaatcaatttttttaaaaactggaactaacaagtaattatagcaagtttgcagtatataagattaatatacaaaattcaattgctttcctatatgccagcaaagaacaattggaatttgaaattaaaaacacagtaccatttacattagcaccccaaaaatgaagtacttaggaataaatctaacaaaatatgtataagattgatatgaggaatactgtaaaacttggatgaaaaaaaatcaaagatgatttaaataaatagaaatggtccatgttcatggataataagaa

SEQ ID NO: 230350 - DNA, 400 bp, Homo sapiens
ttctcctactgtcctgtctccaaagaaaaggagaaagtaaaaactgaaaaataacagactgattggcgccactggccaggcctgtaggttaaagattaacccccaccccaaccgcttgtgctatccatagatcacagacaatggtatgaagaaatacttgccttcctcaccacccctacctagtcatgcagacaatggtatggagaaatacttgccttggtcaccaccccatctagtcgcgtaccccatgcttgctcaatctatcacaactttttcacgtggaccccttagagttgtaagcccttaaaagggccaggaaccctttcttcagggagctcggttcttgagatacaaatctgccaatgctcccagccgaataaagcctcttccttctttaacc

SEQ ID NO: 230351 - DNA, 395 bp, Homo sapiens
accagcctggccaacagggtgaaaccccgtctctactaaaaatacaaaaattagctgggcatggtggcagatgcctgtaattgaagctactcaggagactgaggcaggagagtcacttgaacccaggaggcagaggttgcagtgagccgagattgtaccacggcactccagcctgggcgacagagcgagactctgtctcaaaaaaaaaaaagaaagaaagaaaagaaaaaagaaaagaaaagaagagccaagaagtgaaaaaggaaaacagacaaattcctatcaacacccccacctccctgccagcccccagcgttcctgcagggagctagggccttgaacccctcacctcccgctgtgggacctgggggtgggcgtctcacactctctgagcc

SEQ ID NO: 230352 - DNA, 288 bp, Homo sapiens
ctcctttgccttccatcaggattgtaagttttctgaggcctccccagtcctgcagaactaaatctaatcgacaacgtgatgggactttgtggtggtgattaatcccctcatataaaagacctctgagtgctgctttgtctccttctgccacgtgaggatacggtgagaagaggctttttatgaatgaggaagcaggacctcaccagacagtgtgtctaccagtcccttggtcctggagttcccagcttccaaaactgtgagaaataaatttcagttgttcataagcta

SEQ ID NO: 230353 - DNA, 433 bp, Homo sapiens
tcatacataaaatttatattagttcaacagactttttgcttgtaatagagtgatatttaaatgatattttagaaaaagctgtttcctcaaacttctgcagatttccttctagccaaataaaatcagattacaacactgcttactactgtcagtattcagactcataacatttaatgttccagtatattgcgtgttcattatatccatatagcaaatatcctcattgcctgatgaataatacaagtaaaatttatgtaattatgttctttgcatgtaaagaatgtatcatttgagaaaagtttatagtaagaccaccgtaaaatgctaaagtcacttttagtattcgtttttaaactcagtgtactttggtaccttctccttcgcatttttttttctgtttatagttttaccttggaaagataaaaaacaaaaa

SEQ ID NO: 230354 - DNA, 398 bp, Homo sapiens
tgaaacagggtcactctgtcacccaggctggagtgcagtggtgtgatctcagctcactgcaacctcagcctcctgggctcaagtgatcctcctacctcagcctctccagagtagctgggactacaggggcatgcaccatgcctggctaatatttgtactttttgtagagatggggttttgccacgttgcccaggctggtctcgaactcctgagttcatgcgagcttcccctcttggcctcccaaagtgctgggagtacaggcgtgagccaccgcacccagtccctcatttgttcttataacaaccctaaggcctgtgattcttctctatgtcaatgtcatggaagctgtgtgaggtagaaactcaccaggtcacctgctggagctcacggggccttca

SEQ ID NO: 230355 - DNA, 428 bp, Homo sapiens
cataaaatgaattcttctagaaataacaagacatgaaaaaatagataccagggtggctgtaccttccaaccacaccataatgctagtaaattactgcccccttcctttaagatttagaaagcgagataaatagcatagaaaatgttgatagtggcagaaaaggaagtaccagattcctaactcaagttcagctactccttcaattcacacatgcacacacacacatacccctgcctcaaaaatgtcacacatacccctacctcaaaaatgttaagaaacaaaacaaaatacatcctttccaattctgatttttcagattccttttccagccaatagtagtcccagctacttgggaggccggggcaggaaggtcacctgaggttaggagttcaagatcagcctgagcaacacagtgagaccctatcaca

SEQ ID NO: 230356 - DNA, 266 bp, Homo sapiens
gtgggcttgacattaccatcctgctggagatgttggggagcacttgtaccacaccttcagtatccaccatggtcactcctttttgggctaggtgagcgcatgcctccttctgccaggtgtagaacttgatccatgggtaaaagagcctaggcccccactccatttccagactgaagctcagggtccccagaaactcccaggtaactccagagtctagggtgaggtatgggaacaagaatggtaagttcacacccaggaaggatttt

SEQ ID NO: 230357 - DNA, 489 bp, Homo sapiens
atactggacatcacaggaccctctccggctggataccaggctgtagaaccaccagatgcttcagatgagaaaggttggatctgtttcacagggaaggggctaaactgtttcaagaggcgaccacgcgctgggcactctgtactttgcaacctaccaagtatcatcacaagagctatgaaagtgaagagagacatacgttatctaagaatctgagagagatgactcagtcagcatcctctctcttggtgtacaatggtagggacagctactgtgtcatctggagcatgacaatgagaacacagacactggatcgtcctgatatagcctgcagtccatctgggcctctagacattcatttgcatttgcattcatgcgcatcccctactactccaactcctacaccttttggcaggatatatccacacagctggattggaatcacaagatgtttttattttttgcctcattaaactagtttctctcaaaaaa

SEQ ID NO: 230358 - DNA, 430 bp, Homo sapiens
gagccaccgccgcccatacccctacccccagcgccgaaggaaaatgctcctccccctaacgaacacggcccctaaccacatactttgcaacctaccaagtatcatcacaagagctatgaaagtgaagagagacatacgttatctaagaatctgagagagatgactcagtcagcatcctctctcttggtgtacaatggtagggacagctactgtgtcatctggagcatgacaatgagaacacagacactggatcgtcctgatatagcctgcagtccatctgggcctctagacattcatttgcatttgcattcatgcgcatcccctactactccaactcctacaccttttggcaggatatatccacacagctggattggaatcacaagatgtttttattttttgcctcattaaactagtttctctcaaaaaa

SEQ ID NO: 230359 - DNA, 402 bp, Homo sapiens
  misc_feature (9)..(9): n is a, c, g, or t
acgagtcgnaatcaaacacaccgccctcatgaagtaaaagaagaaggcttcatactttgcaacctaccaagtatcatcacaagagctatgaaagtgaagagagacatacgttatctaagaatctgagagagatgactcagtcagcatcctctctcttggtgtacaatggtagggacagctactgtgtcatctggagcatgacaatgagaacacagacactggatcgtcctgatatagcctgcagtccatctgggcctctagacattcatttgcatttgcattcatgcgcatcccctactactccaactcctacaccttttggcaggatatatccacacagctggattggaatcacaagatgtttttattttttgcctcattaaactagtttctctcaaaaaa

SEQ ID NO: 230360 - DNA, 415 bp, Homo sapiens
ggccacaaggaactgggtgcaggaaggtggtgaagggcccaaaggacgcgtgcgtggcctcaggaagtgccggaagaaagcctgagtctgaatctgagaatttctccaggtttaccttcttgaggggtcgccaaactgttttccaaagcagctgcctcattgtaccttcccattctgtatctgttcatccatacagccatacatgacagtttctccacatccttatcaacacttgttattggcctttttttaaaaaatcatagtcatagctggtgggtgtgaagtggtgtcgctttgtggttttgatttgtatttccttgataagtaatgatgttaagcatcacctcacatgcttaatggccatttgtgtatctttgaagaaatatctattcaaatcttttgcccatttaaaaac

SEQ ID NO: 230361 - DNA, 327 bp, Homo sapiens
gattaaggattttgagctggggaggtgactctgaattacatgaatgggcccagtataatcacaagggtccttataatagggagactggagtgtcagagtcacagatgagctgtgatgatggacgcagtggtgagagagagatgtgaagatggaaggagagggccatgggccaaggaatgtgggtggtctctaaaagctggaaaaggcaagaaaatggatcctcccctagagactccagcaggaacaaaaccctgctgacaccttgactgtaggacttccaacctccagaactataaaataataaattcatgttgttttaaaccacta

SEQ ID NO: 230362 - DNA, 582 bp, Homo sapiens
ctcaaatcacaattggaatgagagactcaaccagctgtgttataactgcactcagcactaagagctttctgttagctattaacctgttaacagcccgcaggtgctagcgacctgtctgtggaagaagggataagatctggtctggtggtctggcggtggcttaaaagtagccccattgaggtgctctgagaatgccgttttgttttgaatgctacagctgcggtgtactcagcttactaactcctcttggcaggtcaccctcagctctgattgtttgtccaccatgtgtgtgtttgctttcatctgcgttaattgctgcttcatctgtggcatcatcggtcacctaatgcttgaatgttagtgccatgtcttcattcttcatccgtgtccctgtctgggccgcagctgcagccaagccgcagtgcctgccttctggaggtgtctgaggtaatatcttcatttggtcacccttcactgtataacacacttctaagattttttgatttgggtttttgttcgttttcttttctgttgtgcatttggtctgcatattttcatttttggcttgattatgaaacatta

SEQ ID NO: 230363 - DNA, 623 bp, Homo sapiens
tatttgacttctttactgcaacctgttttatccgcaaggtctttaaaacttgtatcttttgctgaccttctatcctgtcctgttacttagaatgcctaaccatccaggaatgcagcccagtcagtctcagccctattttatccagcccctattcaaaatagattttctctggttccatatgcctctgacatctcccccttctttttaacatgggcacacttaatcctaagagttgtagagggatgaagattcattttctgtaactacttcatgctgaacaggggtgatgatatttttgcctaactagtcagagtcttcttgaccctgaaaaacaaaacaaaggatcagtgacattttatgcaaagtcaaaaaatataacttcagtcttctattagttcagtccattcagttaattcctattctgtttgatagtcatgaacatttcagttctccatgaatactgaaagttttttctgtattctaatgtcacaatttctaaagttacaacaaacttgcatttgagaacatctgtcaaagtcttaagttaactataaatcatcttttgaagaggatcaacacaagttgattgtctgcatgggaaagtcttagggcagtctcagcaa

SEQ ID NO: 230364 - DNA, 696 bp, Homo sapiens
ggttttcccttgtgtcttcagctttcatgtgtggaatttatttgcttacacatactacccctcttcctttgcttttctctttaatactttttattttagcaaaggagagagtcgaagttataaacatctggatccagctccttccctcaaaacttaaaaaaaacactttgagcttcttccagccacttaaaaagccaggctcattcagagctaggcaacataccggaaagtaaatggtcatctagaactattgggttcttttttttccccgagtttttactttaaagaaaggacatttcaggatgtgtttaagagatagagaagggctgggcgcggtggctcatgcctgtaatcgcagcactttcggaggccgaggtgggaggattacttgagtccagcctgaacaagatggcgaaaccctgtctctacaaaaaaattcaaaaattagctgggagcgatgttacgcgcctgtactactctggaggctgcggtgggagaactgcttgagcccgggaggtcgaggctgcagtgagccacgtcgcaccactgcattccagcctgggcgacagagcaagaccctgtctcaaacaaaagagatggagagaagaaataatctgcatttacctctgcagtcttcagtaatgactggaacagtgtttgccttaggattttctttcaattgtcaattttcgattt

SEQ ID NO: 230365 - DNA, 263 bp, Homo sapiens
tctatctcacacacttttgtctctgctcttccacgtatatttttatctactaattttcacctttgaatgtccctcttttgaagatgggtgagtggggcttccagttttgtaagggatacttgcgttatgttaggatccagcctaacattttcaggagggtgtgttttggggaagaggtgtgcgtattaataccacaagccagaggatgactctagtggacatttgtcagactttgtggcttccaagcatctgggcccacttcc

SEQ ID NO: 230366 - DNA, 241 bp, Homo sapiens
ctcctgagtagctgggactacatatgtgtgccacaatgcttcagctgtgtctgtcagtctgtatatagagacaaggtcttgctgtcttgcccaggctggtctcaaataggtcaagtcgtccttctgccttggcctcctaaagtgctggcattacagacatgagccacagggcccagcctgcttacttttctaaaacttaactcatccccacagtttttgcctattgtatgaaaccccttta

SEQ ID NO: 230367 - DNA, 402 bp, Homo sapiens
tgccttaaacagtaggagtatatatatattttgtgtcttataagcccccagcaggagaaggataccctagcgtctctttcatatttgatagcgctcacattttgtagttggtcagtaaatgctagatggatgcatgtctgttcatagtcattttcctgatgctttgttctgcttgatttttcttaagttgacatgttttgtttcgttttgtatttgttttttttgtgaggcagagttttgctctgtcacccaggctggagtgcagtggaataatcgtggctcattgcagccttggccttgctgaggcaggagaatcacttgaacccgggaggcggaggttgcagtgagccgagattgtgccattgtactccagcttgggcaagaagacacattccatctcat

SEQ ID NO: 230368 - DNA, 500 bp, Homo sapiens
tgggatgcatcacagcttctccaaagttttgctttgactttaggcccaattcaaccaacatgaaacacccacaaattaactcccaggaaaaacatggctctttgagaaaagaactgacacttagtaagcagctgagcctgtcagtccaggttgcaggatggagcgagtgagctctcggcgggtacagtggcttgcactagctgaattcattactattccctttgtgcagccttgtgctttgaccactcgcatatatggaataggacttacaaaagaaaactgttttgtttggcaggtgggaaatcatttcaattgagatattttttctgtttactcaagtaaatataaagatgctttgattttccacaaagaaagagttgttatccctatttgaatttatgttgcttcaaaaacaaacatcttacttttagtatcagaagcagaccattctgttccttagggaagtgatattctttagtagactggtgggagacttgtag

SEQ ID NO: 230369 - DNA, 595 bp, Homo sapiens
  misc_feature (558)..(558): n is a, c, g, or t
agagattaatacaactacttaaaaaatatagtcaataggttactaagatattgcttagcgttaagtttttaacgtaattttaatagcttaagattttaagagaaaatatgaagacttagaagagtagcatgaggaaggaaaagataaaaggtttctaaaacatgacggaggttgagatgaagcttcttcatggagtaaaaaatgtatttaaaagaaaattgagagaaaggactacagagccccgaattaataccaatagaagggcaatgcttttagattaaaatgaaggtgacttaaacagcttaaagtttagtttaaaagttgtaggtgattaaaataatttgaaggcgatcttttaaaaagagattaaaccgaaggtgattgaccttgaaatccatgacgcagggagaattgcgtcatttaaagcctagttaacgcatttactaaacgcagacgagtttgaagtggagagacagacagacagacagagaggcaggcagagaaagagagtaagctcgtgccgaattcggcacgaaggtttgcttaggcgcagacggnggcgagcccatgccagtggcccgggctgggtttgtcc

SEQ ID NO: 230370 - DNA, 417 bp, Homo sapiens
gtactgggattacaggcgtgagccaccgagcctggccgagatggctcataagtttttggaactgaccagagtatattatattgactcttaaaagctgagagccaaatggaatgtttattaaatgccatataccctcatcggagtagggctggaaagacatttagagaacttccactgtctttgcctcccctggacaagtcccctgatggtggctgctgtctattggtggacactaacaagcatgcaagccctgctgtcacactgcctgagtttgattctcagcccctttgctattgagctgtgtgccctccggcaagttgcttaatgctgcatgtctccattttcccattggtaaaatgaggataataatagtgcttcctcagaggtagggctaaatgagacaataattggaaaggg

SEQ ID NO: 230371 - DNA, 558 bp, Homo sapiens
aagaacaactaagtagaaaatcaacccaaaggaaaagagaaacatattaccggtcacctgagatgaactctttattagatagaactttagctctgagtttcctggcagttaaggtaaaaagaaaaacatgtgctcattgtctgataaaaatcaatgtaatatgattaggtcttgagagaaacatgtagatatgctgagtgctcagataagattacgtttgagaataggcagattcaagacacattaaaagccatgcaaaaatccatactccttaatctaataattccagttacactgaggaaataaaaaagagggggaggaatgactatgtgtgtgaaaatgcttttcacaaaattatttatgaaagtgcagaactgtaaagagccagaatgggaggtagagttaattgtggtgcactcattcaagcaaacacaatgccggcattgtaaacagtgaggttctccagcagcacagagaagcaaggtgcgtgatcggctccataagaacaatcaggagataaaattatttgttcaccaaggttctaactatataaaaata

SEQ ID NO: 230372 - DNA, 570 bp, Homo sapiens
caggtgtgagccaccacgcccggcgacagctctgtcttgaggctgacagtgatttgtgatgccctccccccagggccagggctccaaaatccagcgttttctgtgccctccagaggcaatggagaacatcttggttccgtcatcactggattgctctgaatgagctgcacctgaggcacctgtacagcactgtcagctttgggcagaccacactctctgggtgtgctctcctgccagagtgtaaccacgtgtttacttctcagagctgggtacacaaagatccggcatcagggaaccttcactggattcccttcgagccatcttggtcccatatcaaaaccctggttagggccttcaacagaaaaggtttttggaaaactcatttttcctgaataaattgctgaggtcttagtttttaagaaaattctcattatatactcgatgcttaccatgaaacagattttgtgggtgagttatctgacttgaatctgtctcctcctctctgagatgagactaacagtgcatgctctttgggtgaggatccgatgctctctccacccctgagtctgt

SEQ ID NO: 230373 - DNA, 379 bp, Homo sapiens
caatatgctagaccctcactacagctatactcctcaaatctatttgtatagtcgacacaagagttttacagcaaatgcaaactatacctatgtaggtacatgacacttgtctcactcaaaaataactgaaacagaactcaaagaattctcttttgggaaaattctacatctaaggccgggcacggtggctcacacctgtaatcccagcactttgggaggcttaggcggcagaatggcatgaacctgggagttggagcttgcaatgagccaaggtcgcaccacggaactccagcttggcagcctgggcaacagagcgagactccgtctcaaaaaacaaaacaaaaaacaaaaacttacccttagtgagggtaattgggga

SEQ ID NO: 230374 - DNA, 689 bp, Homo sapiens
cgttttacaatggaataaaaagccacccaaagaggttctctgtccaaaaagtagagaagcagaatctggtacagggaaattaaagaagcacaggaaatatacttaactgaggtttctagataatgactatatgctcaaactaaatatgacttaaaaatagctttgtggcatgcactatacaaaagtgatataaaacctatcactagaagaaacagacacatacaatatgctagaccctcactacagctatactcctcaaatctatttgtatagtcgacacaagagttttacagcaaatgcaaactatacctatgtaggtacatgacacttgtctcactcaaaaataactgaaacagaactcaaagaattctcttttgggaaaattctacatctaaggccgggcacggtggctcacacctgtaatcccagcactttgggaggccgaggtgggcggatcatgaggtcaggagttcgagaccagcctgaccaacatggtgaaacgccatctctactaaaaatacaaaaaaaaattagctgggcatggtggcttgcacctgtaatcctagctactcaggaggctgaggcaggagaattgcttgaacctgggaagaggaagttgcagtgagctgagattgtgccattgcactccagcctgggttacagagcaaaactccatctcaaaaagaaaa

SEQ ID NO: 230375 - DNA, 208 bp, Homo sapiens
gtactggcttgcctgcaactttgctggtttcagcactgaaatgtctgaatcctggaaactcttcaatcataagcaacccagcatggttggttaccctatgctaggcagtagtttaggtgggagattagggttatctcacggaagaggcaggatcgtctgttccctagacttactccagaagaccttaaagggtcagcattgtgatccc

SEQ ID NO: 230376 - DNA, 750 bp, Homo sapiens
ggccttctcctgtctgccaccacgtgagatgtgcctttcaccttccactatgattgtgaggcctcaccagccatgtggaactagttcaagatttcaacattttaagataatctgaaaaaaattggaatgtgcccccagctgcgctactggtgacttcttcaacagttgagaaactgaactatgtgttcatgaaaatactccatcattaaagtttatgcaatactctctcaacactgtttatcaaaggaaccaatatggaaggaaaaacattgctttgaagggaagatggatggatcccctagtaaactacagcttgaggtgcaatttcctaaagttcaaatgcctgaaaaaggaaacgaaagaaagaaactcaactcttgagacagcttcaatgctagctttgatctcaattatagagttatttatgaaaagtgcatttttacaactaaaaataaattaggatcaaaagcttctagaggctatactatggagtgcttaataaaaagttgagtaaagagcaaaaaaaaaaaaaaaaaaaaaaaaaaacttttggcgcggcgcggggcccgaaaaaagtttctaaacccccgtgttgggccggcgggcccagtaggttagtggcccgggcccacaccggtccaagaaaaccgggctggacacgggggggtttccccaaaaaaaaccgcgggggaccggcgttctggcaacccagggggccgggcctccggcctcaccgggccaggccgtagg

SEQ ID NO: 230377 - DNA, 371 bp, Homo sapiens
gagtcattaaatctcaaggatatctatttggtcatgttttcttgtggtatttcaaggctactggtgacttcttcaacagttgagaaactgaactatgtgttcatgaaaatactccatcattaaagtttatgatcttgtccatcattcttaacaatttgacagcgtgtccagaacattgcgcctaaatgaatctaacaagaggtaagttgaacataatattggtatttgaaagtcttcaatagaattaggcccttaatttagctttttctaagactttaaacattcaaatgtttcttctgcttatacttaaatagtctttaaggcaacttatttgttccctgaacaaacttcagttgcttaaaaaaaaaaaa

SEQ ID NO: 230378 - DNA, 429 bp, Homo sapiens
tcatggaagtttttaaattaaaaaaaacttcttcaaaaatgagattgtgggacaatggtttggggaatgttcaaattgtggaccccaaaatggaaggtggttttggaaccctggcagtcactacttcgaagttttggctctgttattgaaagtggtggggcaggatatggtggctcatgcctgtaattccagcacttgataggccaaggcggatagattgattgagctcaggagttcgagaccagcctgggcaacatggcaaaacctcgtctctgaaaatttaaaaaattacccaggtggtagcgcacacccgcggttccagctacctgggaagctgaggtggaaggattgcccgggcccgggaattcgaggctgcagtgagccatgattatgccactgtactccagcctgggtgacagagtgagaccc

SEQ ID NO: 230379 - DNA, 230 bp, Homo sapiens
aggtgcccagactgtggtctttaagtaccattccctacgagaaggaaccaaggcttcatggaaaatggtggattccagatctggagcaagaaatgtacacactgagcccgcaacgtcttatttctaaatgcaaggacatgcctcacgattgatgggaatatgtctgagggacacaggagctagcttggaggcattcccactgggacactttgagcatgaggaattatgac

SEQ ID NO: 230380 - DNA, 409 bp, Homo sapiens
gaagtgtcaagaaagttgaacgtttctgagagattggtagattagctcccagggcagtcccgcagcacgaggtcacctgtaatcctcccggatcagacacggtgccaacccaggtgcacccacaacccttgcatggcagcatctgtcatcctggtcactcaactgccttctgtccttctggtaagaacatcccgcccctgtggaaaacagcctgtccttcctccaggcaggtggctccaatctcaatcatggcacctcgagaaactacgggtgatcatggccaagctcagccaaggcagagccattcttcaggatttataagtgcagtgctccaccgaaacagggaaacactgctctcttttcctctgataccattaaactgacatgacatcagactgaagtggccttt

SEQ ID NO: 230381 - DNA, 334 bp, Homo sapiens
cggaccctccccacaccccacccaaggcacctgattcctaaggaagaaaaatctacctctaaagcacccgcttcttcgcttgagaactaccctctcttttcatttttggcctccccgccgggtgagtggaaaccgcttgcacattctatagaacccgattctaatccagacgatccggagaatttgtacggtgaccggcagggggggcgggaggagagagcgaagtcaagtctccagggccgctggcgacttcggaagccgcgcgcccggcgctctcggccgcccccggccgctcgcccccgccgcgccgccgccctcgcccccgggctcgccc

SEQ ID NO: 230382 - DNA, 241 bp, Homo sapiens
gtacagcatgggcaaagagcagctttagtggaattaacataacaatgtgggaggaaaaacaaggcaggaatcagaaccctgtgggtgaaaacattgcacaggagcccagggccagagcacagcgtgtcagtgaacagaagctgctgccatgatttagtccaccttcttacctagatcagccttcgcttgggcagggtccagatgcggagatgtgaaaaacgtgatgccaccaggcctgtgt

SEQ ID NO: 230383 - DNA, 446 bp, Homo sapiens
tgggttcaagagatcctcctgccttggcctcccaaagtgttgggattacaggcatgagccactgtgcccagccactaatgcatattaataacaaaaataatagctcccaatttttgagcattttctttgtgccatgcaatatctacgtgctttatagacattgattatcttagttaatcctcccatcagccctgtgaggtgggctaatattatctctcttttacaaatgaggaaccaaatacagagattggagggattgatctggtaggtggctgggatacaaatggaagtttaatgcttacattaagcaggacacgggagcgtttctttcttcttcaatttgttttcacctccaaggccttgccttggtcttcagccccctgagcttcacctttctagcactggttcttaacttcttactgaaagaaatgacaagccactgatct

SEQ ID NO: 230384 - DNA, 519 bp, Homo sapiens
ttagttaacataattttttaaatctatgaaatcttacctgactgcagattcatcaggaattccaacatctattaaagaaaaaggtaaaatgcattttaaatcaataataaatgtacagaatattaaaatcataagaatgcacagtgatgcatgcctctaatccaaactacttgggaggatgaggcaggaggatcacttgaggagcccagaagtttgagaccagcttgggaaacatagtaagactctaccttcataaaaaaattgtgcacacttgtgtgtatgctttagatcctgtttttgttgttgttgttgttgttgttttggtttggtttggttttttaaagcataagactgacgctttgttacaaagcattcctttgggagcatgcctgcgaccttattagaattaacattcattatacgtattggtaggtaattaatgcagtaagaactcttccctctgtatttattagatgcaaagaagaataaatttattaaaatttggtatctacaagtgaa

SEQ ID NO: 230385 - DNA, 301 bp, Homo sapiens
atgacttttcttgaatctgccagagaactgaagtggaaagacaaccaaatagccagaaatgtaagagatacatcccttgctaggaaaaaaggggcatgagcacttgcttacataaggttgactcatgaatgccataagaataactgggctagatagtttataagttggtagaggctgagtgtgggctggcaagagaaagtgaagccccagatggccttagatatatggagattttataccctcttgcaggctcttttatcacagtcccaccaggcagtttctcctacccttccctactgca

SEQ ID NO: 230386 - DNA, 440 bp, Homo sapiens
ccgcggcgcgtgagtgcctgtgcacgcgcttgtggccggcacacgcgtcctgcggggtcgggcggctcggggcggaccgaggcgtgtgcggcgggggcgtgcggggcatcgcgctgggggcgcgcgtgtgtgtgtgtgtatgtgagtgtcctcgcgggtgcgcgtgcacgggcttgtgcctggcccgcgggcccgaggggaacaatgctcggggcgctccgccggagggatcctgggccgccccgcgcgggacccgtgactgtcgccagcccggggcggaggtgcagctgcctcctgcctcgcggtccaggggtccagtttggcattttccctccctggtctgaggcgttttcagtctcgggtgcgacgggggcggggccgcggggcccgacgcctcaagtcttatgcctggggtttgagcggtcaccgcgcggcggccg

SEQ ID NO: 230387 - DNA, 381 bp, Homo sapiens
aagagataagtggtagcaatcttaacaaattagtgattttatctggttaggccgtgtaatcaaacacgtgggcaggaaagtggatccattatgttgtactcatgattgtggtgctgaaggtaacccccattgccctgtaggctgcccccagaagcagggggtacagccaatagtattcttagaagttaatcaattctgtaacgggttgagtgttttggtctcatttttagtccgaggtgccctgatgctggcctgtgactaaggggagtcagtggcttgttatgaataagaggacacatgagctgaatctgaggaagttcagaagcattttataagttgtttaaaatacatccattaaagtatatgattattttttggtaa

SEQ ID NO: 230388 - DNA, 713 bp, Homo sapiens
  misc_feature (106)..(106): n is a, c, g, or t
  misc_feature (230)..(230): n is a, c, g, or t
  misc_feature (232)..(232): n is a, c, g, or t
ttgagctgttcaacaagttccgcacaaggcctaaaactcaattgccttattcttttgcttctgctcgtccgtatacaactaacagctcaacccacacctctagacnacagtagtcgtgctttctgctaacggtgacattttcagctcttaaaaagaagcaaggagattttcaaatgctagagtatctctatcagaaggcataggacattgtgtccaaagtctcaagaacnancaacactttccttctgacctggtccaaaagtcagcaaacagcaagcaggcagaggccctcataaggacttttctgtcctcctttgaccaaactgtttaaccgagcctaggggtgagggggagcgacccaagctggcatctttctctacggagacagattttagaaaatacttttcttgcccatgaatttcttttctggttgatttttatcattttccctttacttacaagaaaataagattgcaaccactcctgctaatgatttagtagttccttttcatttcagtttttgtaaattaggagataattctaagagttactaaaggatgatttatttaagagaactacgtcaaatagcgaatgagttatgggtaacattagacgaaaataacctttcccgtgggaaaggtttctcgaaggcatggatgcaaatataaaatattaaaaaaaaatctaaataaagcttattttaaaatatgaaa

SEQ ID NO: 230389 - DNA, 470 bp, Homo sapiens
aaaacagtgatatagtattaatatctatgtaagttctgcaccagccttttagtaacttggagaaaactaggaaaaagttaattaatgaagaaatataacttatgtttcttgtagactggtaaaactccatggaagtggttaatatcaggctctagattaataaatacctggtttaagttccagttctgtcatttgttaactgtgggaggttgggaaagttgtctaacatcaaattctaggtttcttcatctgtatatgagagttaataataccatctaccagtgtggaatgataagacaaggaagactcagaagggtgaggaggtggaaggggggtggatgatgagaaattacttaataggtacaatgtatgttatttgggtgacgaatatcctaaaagccttgatttcaccactatgcaatttatgcatgtaacaaaattgcacttctaccctataaatttatataaat

SEQ ID NO: 230390 - DNA, 490 bp, Homo sapiens
tatttaagcacaatgcatctccctctgattgtgtcatgtgctggaggagaatgtgaagttctgtctgtctttagcaaacatgtttcaagtactgtctgtctgaaaaccaaatggaagagggtaaacctgatgatccacttgattttagttttaggacctggatgcataggcagatgtcagtttacaaggattctgtgtactttaaggaatgttttctgagcatgtccagtacaacagacgctctgttaggtagctgtagttaggattttttggttgtaagtatgtgaagatttaaatgtatcagctcacttactcagaaaatctgaggcagtgctagccaaaccaaatggttcaagcaaatgtcatcagtatttggcctcttccagtctttttactcctctatcctctgtgtctgcttcacttctacacaagctttctctatgtggtggctccagattttatatcttctagtagatatttttttaaaaaa

SEQ ID NO: 230391 - DNA, 358 bp, Homo sapiens
acaattaaaaaatcttcaaacagttttaacattatattctaaaggtagtcattttccctgtcgaggaaatctgaatttcatcctgattcctcttacgccttatagttgttttcccagatttaaggggactgtaagaggcatgtcagatacacaaatgttttatgtgatcacctgctgagtggtcatagaagccagaaaggcagtcaagccacagccgcagcccatagtaaatgctcggccagtagatccccctcttgctgttggccttcagtttatgcttttttccacacctgcttttccagacttccttctagaattccaaagaaatgtaaataaatataaggaaagggagatggaa

SEQ ID NO: 230392 - DNA, 598 bp, Homo sapiens
tgaaactccgtctctactaaaaagacaataattagctggtcgtggtggtgggcgcctgtaatcccagctactcgggaggctgaggcaggagaatcactagaatctgggaggctgaggttgcagtgagccaagatcacgccactacactccagcctgggcaacaagagcaaaactccatctcaaaaaaaaaaaaagctaaatttcaaaataagggaggatcgctgggcgtgctggcttatgcctgtaatcccagaattttgagaaggggaaacaagatgatcacttgaggccaggagttcaagaccatggtgacaatacagtgagaccctgtctctatttacaaaaacaaaaacaccatcctcggcaacatagtgagacccctgtctctacaaaaaagaaaaaaggaaaattagccaggtgcggtggggcacacatgtagtcccagctacttgggaggcgggggtgggagcattgctggagctcaggaggttgaggctgcagtgagctgtggtcacaccactgcactccagcctgggtaatatagtaagaccctgtctcaaaacaaaacaaaaacgtaattaggccgggcatggtggct

SEQ ID NO: 230393 - DNA, 353 bp, Homo sapiens
aggatttgcgtttgtaacaagtccccaagtaatacgggtgctgctggttgggagatcccactttcgaatcgcaggttcactctacagtcccattgttaacttataaaactcttcctctctagttcttctttttgtaaaggtgtgtcctgaggaacctcagatttgaaagaagagtgaatggaagtcaaatgtggaaaccactcaaatgtccatcaactgatgaatgaataaacaaatcatggtatatccatacaaggaatattattcacccataaaaaggaatgaagtcttaatacacctacaactggatgaacattgaaaacattatgctatccattctgcttcaggttgga

SEQ ID NO: 230394 - DNA, 207 bp, Homo sapiens
gtaactactcataataaaatagtagatatcagagacaggaatgctaaatgcctgctctaacgtattgcattcttgacatttctagcccctgtggctgttcagctcatcctaacacttcacgccacaagaacagacctaaccagatctctatttttgtctgttgttctttagaaatgatggagaaagcatcttaagccttctgcactg

SEQ ID NO: 230395 - DNA, 569 bp, Homo sapiens
aagtgcatcattgctctgtgcattgaaggacagtgaagtggtggctgcttgtctgtgtgcccagaaccatcaggaaatggcttgagtaccccctgggaaaaaggctttgttaaaaaggaactgcttgttcactctgggacacttagccttctgcttattagtccttttgctgtgttcttaccaggttgagggacacttctttccataaatgcagacactgaagctggaatctggaacatgtgttttcagtatttagagatctgcagagtggacacatactggcacatcacaagcatgattgttatggtctcaaaagtgtgggaggatctcccaatcccaagagttttgagagcagcctgggtgacatagtgagaccttgtctctatgaaaaaactttaaaaaataaaaattagggcatgatggtgcacgcctgtggtccccattactcgggaggctgaagcgggaggataatttgagccaggaggtcaaggctgcaatgaactataatcacacctctgcactgcagcctaggtggcagggtgagatgctgtctcaaaaacaggaaaaaa

SEQ ID NO: 230396 - DNA, 300 bp, Homo sapiens
ttactaaaggataaaacagttttatgtctgagaataaaataggtgaaccatatgtgataagcacgataaattcttatttggcatttacagtatgacaggcacttttaaaattacttacaggttgagcatccttaatccaaaaatctgaaatgctccaaaatctgaaatgctccaaaatctgaaattttttgagtgccaatgtaatgccacaagtggaaaattccacaccctatctcatttgacaggtttcagtcaaaatgcagtgacacaacacacattttattcagtatcctcaaaagg

SEQ ID NO: 230397 - DNA, 409 bp, Homo sapiens
tattttctttctttttctgctctacttaacagatgaagcttaatttagcattttaggcagctgtgccctctgttggccttttctgaaattgcaatcaagtcgagctttgcattgctggcagacaaagttccctctgtatttgtgcagtgagaattataacccagaagcagaggtaaccaaggagctcttgagaaagtatctctggtaactagttgaggtggaagacaactccaggataaggaggcaaaacagacttttatgattcccatttaatagatgaggaagctgaaactcacatacggcattgataagaggctgaaactgaactctggaactccattctgagtcctgttgtggactcccagagctatactatatttcttctaaatgctctagaatgttatttgca

SEQ ID NO: 230398 - DNA, 544 bp, Homo sapiens
tgtcacagcttcagcaggtccctccattcagggtccctaacttcccgcaacattcactcatgggttgaaaaccagattagtgagggttaagtaaattgtgtggtaagaaaattgaaacagggcatatatagatgactagctggactttgggaggacaagagtgatggagtgctgattggagtttttggtggaatcttaaggttttgttttgttttattttaatatgttagataaatgtttatatgcttcctggaagagattgaagataaagagaggagatgggatggaatggcaccctctctggcaccctctccattgctctcacctggtgtctcaaactagaaacttcagaaacagctctaatttcttttgtaccaagcctttgccccacttaacacatagtaaataaatcttatttttacctcagaaatattatttgaatgtagtttctcttctccacggtaatgttgctttcattacgtcagcatcatctctatagggatgttgaaacaacttcttcctgcttctcttcctttaaaaaagg

SEQ ID NO: 230399 - DNA, 2910 bp, Homo sapiens
aggaaaagtcttcggacttgcagggggaattcctcctgggctaacccgggagcggggtccaggccacaaccggccggcggcggcacaggctccatgtgcggctccccctggaggcggttgagcccctcggagcaggagcgcgtagcacacacctcgggccgccaccgcctcccgcccgccaccgcacgcgcacgcgcggttagtagtcgctgctgcgcggccgccggcgggactggtctgaagagacgcggggaccaagtggcaacgacttggacatctgagctgtcactgccgaaaacaggccgcaagagagataatcaatatgcatttccaagccttttggctatgtttgggtcttctgttcatctcaattaatgcagaatttatggatgatgatgttgagacggaagactttgaagaaaattcagaagaaattgatgttaatgaaagtgaactttcctcagagattaaatataagacacctcaacctataggagaagtatattttgcagaaacttttgatagtggaaggttggctggatgggtcttatcaaaagcaaagaaagatgacatggatgaggaaatttcaatatacgatggaagatgggaaattgaagagttgaaagaaaaccaggtacctggtgacagaggactggtattaaaatctagagcaaagcatcatgcaatatctgctgtattagcaaaaccattcatttttgctgataaacccttgatagttcaatatgaagtaaattttcaagatggtattgattgtggaggtgcatacattaaactcctagcagacactgatgatttgattctggaaaacttttatgataaaacatcctatatcattatgtttggaccagataaatgtggagaagattataaacttcattttatcttcagacataaacatcccaaaactggagttttcgaagagaaacatgccaaacctccagatgtagaccttaaaaagttctttacagacaggaagactcatctttatacccttgtgatgaatccagatgacacatttgaggtgttagttgatcaaacagttgtaaacaaaggaagcctcctagaggatgtggttcctcctatcaaacctcccaaagaaattgaagatcccaatgataaaaaacctgaggaatgggatgaaagagcaaaaattcctgatccttctgccgtcaaaccagaagactgggatgaaagtgaacctgcccaaatagaagattcaagtgttgttaaacctgctggctggcttgatgatgaaccaaaatttatccctgatcctaatgctgaaaaacctgatgactggaatgaagacacggatggagaatgggaggcacctcagattcttaatccagcatgtcggattgggtgtggtgagtggaaacctcccatgatagataacccaaaatacaaaggagtatggagacctccactggtcgataatcctaactatcagggaatctggagtcctcgaaaaattcctaatccagattatttcgaagatgatcatccatttcttctgacttctttcagtgctcttggtttagagctttggtctatgacctctgatatctactttgataattttattatctgttcggaaaaggaagtagcagatcactgggctgcagatggttggagatggaaaataatgatagcaaatgctaataagcctggtgtattaaaacagttaatggcagctgctgaagggcacccatggctttggttgatttatcttgtgacagcaggagtgccaatagcattaattacttcattttgttggccaagaaaagtaaagaaaaaacataaagatacagagtataaaaaaaccgacatatgtataccacaaacaaaaggagtactagagcaagaagaaaaggaagagaaagcagccctggaaaaaccaatggacctggaagaggaaaaaaagcaaaatgatggtgaaatgcttgaaaaagaagaggaaagtgaacctgaggaaaagagtgaagaagaaattgaaatcatagaagggcaagaagaaagtaatcaatcaaataagtctgggtcagaggatgagatgaaagaagcagatgagagcacaggatctggagatgggccgataaagtcagtacgcaaaagaagagtacgaaaggactaaactagattgaaatatttttaattcccgagagggatgtttggcattgtaaaaatcagcatgccagacctgaactttaatcagtctgcacatcctgtttctaatatctagcaacattatattctttcagacatttattttagtccttcatttcagaggaaaaagaagcaactttgaagttacctcatctttgaatttagaataaaagtggcacattacatatcggatctaagagattaataccattagaagttacacagttttagttgtttggagatagttttggtttgtacagaacaaaatattggaaaaatcagttattggaatttccacttaaatggctatacaacaatataactggtagttctataataaaaatgagcatatgttctgttgtgaagagctaaatgcaataaagtttctgtatggttgtttgattctatcaacaattgaaagtgttgtatatgacccacatttacctagtttgtgtcaaattatagttacagtgagttgtttgcttaaattatagattcctttaaggacatgccttgttcataaaatcactggattatattgcagcatattttacatttgaatacaaggataatgggttttatcaaaacaaaatgatgtacagattttttttcaagtttttatagttgctttatgccagagtggtttaccccattcacaaaatttcttatgcatacattgctattgaaaataaaatttaaatattttttcatcctgaaaaaaaa

SEQ ID NO: 230400 - DNA, 3016 bp, Homo sapiens
aggaaaagtcttcggacttgcagggggaattcctcctgggctaacccgggagcggggtccaggccacaaccggccggcggcggcacaggctccatgtgcggctccccctggaggcggttgagcccctcggagcaggagcgcgtagcacacacctcgggccgccaccgcctcccgcccgccaccgcacgcgcacgcgcggttagtagtcgctgctgcgcggccgccggcgggactggtctgaagagacgcggggaccaagtggcaacgacttggacatctgagctgtcactgccgaaaacaggccgcaagagagcatctgcccaagcaacaaagaggaggtgtttgcttgggagttaaaagcaaatggcaaccaaagctcaggactgggagagaaaagataatcaatatgcatttccaagccttttggctatgtttgggtcttctgttcatctcaattaatgcagaatttatggatgatgatgttgagacggaagactttgaagaaaattcagaagaaattgatgttaatgaaagtgaactttcctcagagattaaatataagacacctcaacctataggagaagtatattttgcagaaacttttgatagtggaaggttggctggatgggtcttatcaaaagcaaagaaagatgacatggatgaggaaatttcaatatacgatggaagatgggaaattgaagagttgaaagaaaaccaggtacctggtgacagaggactggtattaaaatctagagcaaagcatcatgcaatatctgctgtattagcaaaaccattcatttttgctgataaacccttgatagttcaatatgaagtaaattttcaagatggtattgattgtggaggtgcatacattaaactcctagcagacactgatgatttgattctggaaaacttttatgataaaacatcctatatcattatgtttggaccagataaatgtggagaagattataaacttcattttatcttcagacataaacatcccaaaactggagttttcgaagagaaacatgccaaacctccagatgtagaccttaaaaagttctttacagacaggaagactcatctttatacccttgtgatgaatccagatgacacatttgaggtgttagttgatcaaacagttgtaaacaaaggaagcctcctagaggatgtggttcctcctatcaaacctcccaaagaaattgaagatcccaatgataaaaaacctgaggaatgggatgaaagagcaaaaattcctgatccttctgccgtcaaaccagaagactgggatgaaagtgaacctgcccaaatagaagattcaagtgttgttaaacctgctggctggcttgatgatgaaccaaaatttatccctgatcctaatgctgaaaaacctgatgactggaatgaagacacggatggagaatgggaggcacctcagattcttaatccagcatgtcggattgggtgtggtgagtggaaacctcccatgatagataacccaaaatacaaaggagtatggagacctccactggtcgataatcctaactatcagggaatctggagtcctcgaaaaattcctaatccagattatttcgaagatgatcatccatttcttctgacttctttcagtgctcttggtttagagctttggtctatgacctctgatatctactttgataattttattatctgttcggaaaaggaagtagcagatcactgggctgcagatggttggagatggaaaataatgatagcaaatgctaataagcctggtgtattaaaacagttaatggcagctgctgaagggcacccatggctttggttgatttatcttgtgacagcaggagtgccaatagcattaattacttcattttgttggccaagaaaagtaaagaaaaaacataaagatacagagtataaaaaaaccgacatatgtataccacaaacaaaaggagtactagagcaagaagaaaaggaagagaaagcagccctggaaaaaccaatggacctggaagaggaaaaaaagcaaaatgatggtgaaatgcttgaaaaagaagaggaaagtgaacctgaggaaaagagtgaagaagaaattgaaatcatagaagggcaagaagaaagtaatcaatcaaataagtctgggtcagaggatgagatgaaagaagcagatgagagcacaggatctggagatgggccgataaagtcagtacgcaaaagaagagtacgaaaggactaaactagattgaaatatttttaattcccgagagggatgtttggcattgtaaaaatcagcatgccagacctgaactttaatcagtctgcacatcctgtttctaatatctagcaacattatattctttcagacatttattttagtccttcatttcagaggaaaaagaagcaactttgaagttacctcatctttgaatttagaataaaagtggcacattacatatcggatctaagagattaataccattagaagttacacagttttagttgtttggagatagttttggtttgtacagaacaaaataatatgtagcagcttcattgctattggaaaaatcagttattggaatttccacttaaatggctatacaacaatataactggtagttctataataaaaatgagcatatgttctgttgtgaagagctaaatgcaataaagtttctgtatggttgtttgattctatcaacaattgaaagtgttgtatatgacccacatttacctagtttgtgtcaaattatagttacagtgagttgtttgcttaaattatagattcctttaaggacatgccttgttcataaaatcactggattatattgcagcatattttacatttgaatacaaggataatgggttttatcaaaacaaaatgatgtacagattttttttcaagtttttatagttgctttatgccagagtggtttaccccattcacaaaatttcttatgcatacattgctattgaaaataaaatttaaatattttttcatcctgaaaaaaaa

SEQ ID NO: 230401 - DNA, 2932 bp, Homo sapiens
aggaaaagtcttcggacttgcagggggaattcctcctgggctaacccgggagcggggtccaggccacaaccggccggcggcggcacaggctccatgtgcggctccccctggaggcggttgagcccctcggagcaggagcgcgtagcacacacctcgggccgccaccgcctcccgcccgccaccgcacgcgcacgcgcggttagtagtcgctgctgcgcggccgccggcgggactggtctgaagagacgcggggaccaagtggcaacgacttggacatctgagctgtcactgccgaaaacaggccgcaagagagataatcaatatgcatttccaagccttttggctatgtttgggtcttctgttcatctcaattaatgcagaatttatggatgatgatgttgagacggaagactttgaagaaaattcagaagaaattgatgttaatgaaagtgaactttcctcagagattaaatataagacacctcaacctataggagaagtatattttgcagaaacttttgatagtggaaggttggctggatgggtcttatcaaaagcaaagaaagatgacatggatgaggaaatttcaatatacgatggaagatgggaaattgaagagttgaaagaaaaccaggtacctggtgacagaggactggtattaaaatctagagcaaagcatcatgcaatatctgctgtattagcaaaaccattcatttttgctgataaacccttgatagttcaatatgaagtaaattttcaagatggtattgattgtggaggtgcatacattaaactcctagcagacactgatgatttgattctggaaaacttttatgataaaacatcctatatcattatgtttggaccagataaatgtggagaagattataaacttcattttatcttcagacataaacatcccaaaactggagttttcgaagagaaacatgccaaacctccagatgtagaccttaaaaagttctttacagacaggaagactcatctttatacccttgtgatgaatccagatgacacatttgaggtgttagttgatcaaacagttgtaaacaaaggaagcctcctagaggatgtggttcctcctatcaaacctcccaaagaaattgaagatcccaatgataaaaaacctgaggaatgggatgaaagagcaaaaattcctgatccttctgccgtcaaaccagaagactgggatgaaagtgaacctgcccaaatagaagattcaagtgttgttaaacctgctggctggcttgatgatgaaccaaaatttatccctgatcctaatgctgaaaaacctgatgactggaatgaagacacggatggagaatgggaggcacctcagattcttaatccagcatgtcggattgggtgtggtgagtggaaacctcccatgatagataacccaaaatacaaaggagtatggagacctccactggtcgataatcctaactatcagggaatctggagtcctcgaaaaattcctaatccagattatttcgaagatgatcatccatttcttctgacttctttcagtgctcttggtttagagctttggtctatgacctctgatatctactttgataattttattatctgttcggaaaaggaagtagcagatcactgggctgcagatggttggagatggaaaataatgatagcaaatgctaataagcctggtgtattaaaacagttaatggcagctgctgaagggcacccatggctttggttgatttatcttgtgacagcaggagtgccaatagcattaattacttcattttgttggccaagaaaagtaaagaaaaaacataaagatacagagtataaaaaaaccgacatatgtataccacaaacaaaaggagtactagagcaagaagaaaaggaagagaaagcagccctggaaaaaccaatggacctggaagaggaaaaaaagcaaaatgatggtgaaatgcttgaaaaagaagaggaaagtgaacctgaggaaaagagtgaagaagaaattgaaatcatagaagggcaagaagaaagtaatcaatcaaataagtctgggtcagaggatgagatgaaagaagcagatgagagcacaggatctggagatgggccgataaagtcagtacgcaaaagaagagtacgaaaggactaaactagattgaaatatttttaattcccgagagggatgtttggcattgtaaaaatcagcatgccagacctgaactttaatcagtctgcacatcctgtttctaatatctagcaacattatattctttcagacatttattttagtccttcatttcagaggaaaaagaagcaactttgaagttacctcatctttgaatttagaataaaagtggcacattacatatcggatctaagagattaataccattagaagttacacagttttagttgtttggagatagttttggtttgtacagaacaaaataatatgtagcagcttcattgctattggaaaaatcagttattggaatttccacttaaatggctatacaacaatataactggtagttctataataaaaatgagcatatgttctgttgtgaagagctaaatgcaataaagtttctgtatggttgtttgattctatcaacaattgaaagtgttgtatatgacccacatttacctagtttgtgtcaaattatagttacagtgagttgtttgcttaaattatagattcctttaaggacatgccttgttcataaaatcactggattatattgcagcatattttacatttgaatacaaggataatgggttttatcaaaacaaaatgatgtacagattttttttcaagtttttatagttgctttatgccagagtggtttaccccattcacaaaatttcttatgcatacattgctattgaaaataaaatttaaatattttttcatcctgaaaaaaaa

SEQ ID NO: 230402 - DNA, 492 bp, Homo sapiens
attttccttcttcagtatagaattcattctaggttcatgtattgcatttagttgccattacggctaattctcctttaatctgaaacagtccctcagtctttgtttttcctgatcttgacatttttcttacagatggttgctacatggaatatccctccacgtgggcttgtttgatggttcctcatgattagattcaggtacgcatcaccatataatgatgttatctccttctcaaggtgtttcttctataagcacatgatgttaatcatctcactggcaatttcttttttctttttttcttttctaatttttatttttatttatttttaattttttaacttttattgtaggtttgggggtacatatacaggtttgttacatgggtaaattgcatgttgctgaggtttagtgcacaaatgatttcatcacccacgtagtgagcacagtacccaataggtagcttatagacgttcatcctcctcccaccctcta

SEQ ID NO: 230403 - DNA, 421 bp, Homo sapiens
ccccacgctaggtcctcttcctggaattcccttccccgcctaagaaggaaggatgtgctccctctgcaagactctaatcaaatgtgtgtattcatctcagtactgccaaggcctgccatagagatgtacttgggatttaataaggtggttaactatgttactagctgtgtgacctcgaccaagttatttaacctctctgtgctctactttcctcatctgaaaaagggggatgatggtaacataccttagagggttgtttgtgagtattaaatgaggtaacatatgtaaacagcttaggaccctgcctgccatatagtatgtgcttaataaatgtgacctcacagtaatcgtttctttggtgccggtgagtgatttttgaagatctcttctacgtaatagacaatgaactatgtttaaggta

SEQ ID NO: 230404 - DNA, 351 bp, Homo sapiens
tgggccactacccacctgccctaatcaccccagagcccggtaccagagaactagagacagcctatatgccccagagcctactgaaattattcaaatgagctaatattacacctgcttaccctgcctcacctatttcttccctcagaaatcacaataaaggctcttactttttcttcctgctccctctgcctcttgaccgaccatgttgaccacggtgctgcccccatgtggccctgcaaggcttgggaagctccctccacttgggatctgtgggtaacaaagatctttttttttttttttgagacagaatctcgctctgtcaccaaggctggagtgcagtggcgcatctcg

SEQ ID NO: 230405 - DNA, 493 bp, Homo sapiens
actttgtgtgcactcactggtaaccatttttattctcgtcaatgcaatcacttgtttcctttaaattgggcaaatgaatggggggtttctcagagacagctgcttggcatttcaaattacttgactgttggttccatgattgcttttcaggaagtcaataaattttgctgggagataccagagtaccccgctcccccaaatatgatttgtggcttagtacaccacagtaaaccgtgaatgatttgcctaaagttcagaaaaataatcattttagatcatttttaatagatttctgtgaagtctggtgcctactgagaaattacagggtgggagtcactggcaaaccctgtcttcacttcctcctttcctctctctctgtctttccttcttccctctctctcctccttcagagagggcttcctcaaccccagcactccttgagggccaggacactcagttcaccctagaagttggtatcttaatctgattatgt

SEQ ID NO: 230406 - DNA, 523 bp, Homo sapiens
cagtaatttttctgttattgacttttaattcagagaggacacactgtaagatttcaatccgttgagatttgctgagacttgtataaggtccatgatatggtctatttcgataaacatcctatgtgcacatgggaagaataagtattttatagtgttgtacacacgtgaattaggccaagttggttaatcctattgttcaaactgtgtgaggttgattcaaggataaagaaataaaccagtgggatagagttccgagacacacacacacacacacacacactcttcagctgatttatgttgagatgttggggactcctccaattcggtggaaaaaaaatgatgcttttcaataaatgatgccaggtcaattggatatctacacgaaaaaaaatgagctctagccccgtaccacaccattcacaataattaatatgtaatcaatcatagatctaaatatgagccctaaaacaagcttctaaaaggaaatacaggaggatatcccaataaaaaggtactaaccata

SEQ ID NO: 230407 - DNA, 682 bp, Homo sapiens
gctccttagcatatgaattgaggcgcatcggagccctcactgctgggccagcccctcccgggctcctccggttccgggaggtccacagcccagcagcagctgcccctgcacgttgtcccctccgtccagcatcccggggccgaggagacagtgcccctggccgggggctgcgctggcttcaacttcccatgggcaaaacggggtcccgggtcagtgttcacagagggtctcaaaccctgcaggaccctgaaattgtctgggatccacaccagtcggaagaaaaaaagaatagaaaacgcagggattcacctcctctgcaggcaccctcatgccgaacactaaacaggatgatgttgaaaaggatttggagatttatgcaggtcacgagcttgaggaatttttccattgaatgcaccatgccttgggtttcccgtttcccactgaaaatcccatggctgacactttttttttatcattaccttgggagatgaagaaaaactcatctgttagggcagctctgtgaatgcagatgctttgggttgttttgaatgaatgactgaatgttctgaaataaagcaggaaggtgcctgcgggataatgactggtttcgcaactcttggccgggagtctagacccctctgataatcaatagaaatggatgtatattaaatttagcaataga

SEQ ID NO: 230408 - DNA, 461 bp, Homo sapiens
cttgttcttccccagtcctcacttaattcttaattggatataagccagggtctgtctctccagaatatcatcggccagcgtggccaatcatgagagagcaggaccaggggtcagttgaggcttattctaagatgagatgatcaaaataccaacatgcttttaagttatgattcttgatattatggtaactaggtatgcagtgtgtctgaaagagtcaccaggccacaagacccatctgaaggaagccagggatcagaatataaccctgtttacgtgatttccagctgccacccccccgtagctgcagctgtggttgatggtccctagactctgacaggagccaggcgctctcaggttggtcatgagagatttctccacagggtcacagaggacaacagtgattattcatgatgctgatcctggggcaggatgttggcttgaaaactagacttaaaatgggt

SEQ ID NO: 230409 - DNA, 426 bp, Homo sapiens
caaatcaaatgcccaactgattatcacacaactgatgaatggtaaataaaatgtggtatatttataaaataaagtattatatggcaataaaaaggaatgaagtactgacacatactaaaacatgatgaaatttgaaaaacatgctaaagaagccagctacaaaagatcatatattttatgatttcctttatatgtactgtccagagagtaggcaaatctacaaacacataaagtacattagtgtttgctttaggttgtagaggacttggtgacaaactgaataagagtgttctcaaatggattctgcttgtaacagttgtgcaactctgtgaatatactaaaaagtactgaattgtccatttttaaatggatagatgtaatgatagttgaattagatttcaataaagctgtttttaaaaagttaaa

SEQ ID NO: 230410 - DNA, 281 bp, Homo sapiens
agccatgtgcctgcaaccaactgatctttgataaagttgagaaaaataaacaatgaagaaaagacactgtattcaataaatgttgctaggaaaattggctagccatatacagaaaaatgaaactgaacccgtatctctcactttatacaaaaattaagttggattaaagacttaaatgtaaaacctgatactataaaaattatagaagaaaacccaggaaaagctcttctggacactggcctaggcaaagaatttatgactaagtcatcaaaagcatatgt

SEQ ID NO: 230411 - DNA, 377 bp, Homo sapiens
ttcaagctgggaactgctcagcgccgatctgcctggcgttctattcagtcatccctctgctcactgagacagatgcatattctgatgcctcctttggagagacttatcagaaactgaaaacaatgcaaccatttgtctctcgcctacctgtgtaggcgagagacaaatggttgggaagccccctccctgcttcgagttgtccccacctttctggacggaaccaatgtacgtctcacatatattgattgatgtctcttgtctccctaaaatgcatgaaaccaggctgcgcccgaccaccctgggcacgtcatcaggacttcctgaggctgtgtcacagacgcgtgtcctcaactttagcaaataaacctcctaaaatg

SEQ ID NO: 230412 - DNA, 314 bp, Homo sapiens
taaagcaagaaaggtgttttattaccatggcactactgaaaagatcaagcagtacttctagcaacatgcagtataaatgtggacactaacagtcactaaaatcatgaatgtaaaaatattatataaaacataaacataatacccagataatattattgttgttattgtagcatttggtcagggaaggagtcttcaaaatgctggagcagaatagtcaagagcaataaacctgacaatgttcttaggatttaaagtgcccaaacaataatctcactaaaaaaaaatggaggcggtaagtattccttcctcttttg

SEQ ID NO: 230413 - DNA, 459 bp, Homo sapiens
gagaagtttctgaaggtacttgatggcccttgggtagaactgaggggtctggcgcccaggatggagggtgggggaacagttttaaagttgctaccttttatacagtgaggaggctaggcagtcattgaccaccttctctctcctttctacagcctcctccaggctttgatttcctctcttcaaggtcagttttgtgaaccgattttttaggaggatggggggatggagaatgcttttgtgagggaacctggtgacgacctgctgtggcaactgttcactgttgactatagatgtattgggagatgctacagcggaatcaggctttctgatatcaacggcaataatttgattctagaggtcaaggggttgcagttgccacaataagccagagggaatgattagtaatcagagttttcatccacagaaatctgtgacaatgattagctgattttaagtttt

SEQ ID NO: 230414 - DNA, 472 bp, Homo sapiens
gacctcactgctcacccctagcctagtgatgaccacagacacattgggcacaagcccagaacctacaaccagttcacctccaaatttgagcagtacctcacatgagatactgacaacagatgaagacaccacagctatagaagccatgcatccttccacaagcacagcagcgactaatgtggaaaccaccagttctggacatgggtcacaatcctctgtcctagctgactcagaaaaaaccaaggccacagctccaatggataccacctccaccatggggcatacaactgtttccacatcaatgtctgtttcctctgagactacaaaaattaagagagagtcaacatattccttgactcctggactgagagagaccagcatttcccaaaatgccagcttttccactgacacaagtattgttctttcagaagtcgacgcggccgcgaatttagtagtagtagtaggcggccgc

SEQ ID NO: 230415 - DNA, 343 bp, Homo sapiens
aatattgtgattgaattaggcccatccatagaatgcagggtaacttccctgtctcagattctttaatcacaggtgcaaagtcacttttgccatgtaaggttacatattcaaaggttctggggattaggatgtagatatccttgaggtccattattcagtctaccatactgttagcagtactattcgtataatcagaagtgattccaaattaaaagagaataatacatacatgtgactaggacaatctctagtactcagtaagaactcgatagggcttagattcttcatctcttaaaaaaaatttataacctctggtgctcaaagtgaccatcttggctcccct

SEQ ID NO: 230416 - DNA, 466 bp, Homo sapiens
ttgtaaagtagccaccagggtttgaggtgattgactgaaattttgaaagaagttctactgtggttaaaatgctgtcaaacagcattgcatgttacagaaaaatcattcctgatttcatagccatcccaatcttcaacaaccaccaggctgatcagttagtagccatcaacatcgatgcaaaactctccaccagcaaaaaaaaaaatatatgactccttcaaggctcagatgatcattactatttttggcaataaagtatttttaattaagtggtctaccatgaaacccccagtatctctgagttatgcctttatatgtaaaggtagaaatctgatcaaaagaatgaagagacaaaactggatactttataatgcaaaaggctacaatccacagtacatagcgacaactgatataaagatgaaacagcaaaagattcaaggagaaataaagacaaattcaaaaagga

SEQ ID NO: 230417 - DNA, 399 bp, Homo sapiens
taagtattcccaatgtctgtattttaaaatgttttttaaaagggcacaattgaatgaaatttttaatatgtagcttttgagagattctactctgctttgttgtaactgctggtcagatggatgtagctgactgctttggcaccagatttgcacaaggcataaggctgctgcagaaatctgggtccagaacggcactatttggtgtccacatggcttttgagcacttgaaatgtgactggtcaaagctgagatgtgttgtcaggtgtaaaattcccactgagttttgaagacttactatttttaaaaagcgtataaaatatctcaatagtttttaatagtgattacatgttgaaatgtaatatttgagtttatgagttaaataaaatgttattaaaatta

SEQ ID NO: 230418 - DNA, 398 bp, Homo sapiens
acaaagaaaaaagagagaagacagcaaattaccaatataagaaatgagacacaagttaccactacagattatgcagacatcaaagggataataaggaaacatcacaaacaactgtatacacttaaataaaagggactaattcctcataaagcacaaactactacaactcatccaatatgaaatagataacactgtatctattaaggaaattatatttgtaatttaaaaattccaaaaaagaaatgcttcattggcaaaatttcccaaacatttaaaggagaattaatatcagttcaacataatctcctctagaaaatagaagagggacaatccattcaattcaaaacattttatgaatccaatattactctgataccaaaaccagacagagacagcac

SEQ ID NO: 230419 - DNA, 657 bp, Homo sapiens
ggcgatttggagaggattaggggagagtagtgaaagaatactcccacagggtcctccaaatcctcctcctgaatcctaccaacgaagaacacatgttggagccctggaattgctttttaagttcgtttctctccctttccaagcgactcggtgcagcgctggcaagaattttaagtggctgaagcaacgtatttggggtcgctgccattgggttcctttcagttgcctccttcaattcctccaaacctcgcttcatcccagacagctcagattcatgcagagattccgatcgccctgggaggagcctgagggttgctgccttttcctcaagtctacattgctggcagctgttgtaatgtctaagtgaagggccaggaccgagttcaggttaggataaaaggggaggtgagagggtggctggataaagagagaggacatgaggaattcccttccctgtgtgagaaaaagttgaaaaaagaagaaaaaaaagctccaaatgaatgaaaggattaaatattaaaaaaaaaatctgagtactagatgaaaacttacaagaatttccacgttaaaacctttacaacctcgggatggtgatgtgtttttcactattcaaaattcagaaattacaaaagctggagaagactggtaagttaatat

SEQ ID NO: 230420 - DNA, 364 bp, Homo sapiens
agattcattgaatagtaaattcttttcccctaatgtgtggcattctctgttgcttacctataagaaaaagaagttagtttgaagaaaaaaagtttgtttatatttttaaaatttttctcaaattaacacgtgcaatatcgaaagtacaaataataaaaattttataacaaaaataactgccttcagcctcaattgtccttactgtaagtcccactttacttcctcatgtcacctcataattattttatggaatttatatttaaatcagtagttggggtttatatttttacagctgtattgataccattcctgctaagccaaatagagtcctatatccttttttaaatatatatttttctcatcc

SEQ ID NO: 230421 - DNA, 294 bp, Homo sapiens
gtgatttgtggttatcaatgtgtgcagccttttgttatgaatatatacttttaggccaggcaccgtggctcacgcctgtaatctcagcactttgggaggccaaggtgaatggatggcttgagcccaggagttctagaccagcctgggcaacatggcgaaaccgtgtctctacaaaaaatcagctgggcgtgatagcgtgcctgtggtcccagctactcaggaagctgaggtgggagaaccacctgagcctgggaggccaaggctgcagtgagctgtgagagtgacacccctctc

SEQ ID NO: 230422 - DNA, 461 bp, Homo sapiens
attttatgattctaaaggaaatccttctagttaggaactagagtagaaactactgttttttggaagccacataaacctaccatccaaaaattccactgtgtcattctagtgtgtcaggcgagatgcgggttaagccagctgttgggccaaagtagtgaacaagccagacgaagtaaaaattaggccaggcgcagtggctcacgcctgtaatcccagcactttgggaggccgaggcgggcggatcacgaggtcaggagatggagactatcctggctaacacggtgaaaccccgcctctactaaaaaaaataacaaaaaattagccggtcgtagcggcgggcacctgtagtcccagctacttgggaggctgaggcagaagaatggcgtaaacccgggaggcagatcttgcagtgagcccagatcgcgccactgcacttcagcctgggcaacagagcgagactc

SEQ ID NO: 230423 - DNA, 351 bp, Homo sapiens
aatttattcaattattgattagaaattataggtaaaaatcatccaaatcatgcaaattctgaaaaactagaaatagcagctgttaacagtattggtatatgtcccttcatatactcaaatacatatatatatgcccagtattattttctattaatttttaaataactttttttactataaaagtgattcatatataattcagaacccctggaaaatataaaaatgtaaacaaaaaatggactgaaatatttccactcaaacataaaccaatcatttttaccaattcttccaaatatgtacacttatgtctgtaaaccccacacttttcaaaaaataaaaatgacacaagta

SEQ ID NO: 230424 - DNA, 284 bp, Homo sapiens
agtagagacagggtttcaccatgttagccaggatggtctcgatctcttgacctcatgatccacccgtcttggcctcccaaagtgctgggattacaggcgtgagccactgcacctggccaatttccttttttttttttttaaatctcctattttctaatcctttatctttttgctacactttctgggagatttcttccacgttattttctaactctctttgtccctaataatgcttttcttgcttaaggtctagtttgcttaatactattatagctaaatttgct

SEQ ID NO: 230425 - DNA, 272 bp, Homo sapiens
aatagtaaataatgactgttttgagattaatttagaaacaatccctatttaagagctttcatatgcagtcatgcattgcttgccacgtgaggagcttgagaaatgcgtcactaggtgatttcaccattgtgctaacatcatagcatatacttacacaaacctaggtggtgtagccaccatacctagggtacacggtatggcttaggactcctaggctacaaacctgtactttatgttactgtactgaatactaaaggcaactgtcacacaat

SEQ ID NO: 230426 - DNA, 398 bp, Homo sapiens
aaactcagaaaacaattaactggccagcaagcatgctaaaagggaaaagagaatccaaaaatttcagtagctacagtatagaaagatgcaactctcataacaaaaaggtaagaaaaaaatcaagaaatgctttgagaaacaatgacaaataattaaggcaaccttaaagcaaaagccaacttgagggcatgccaatcttattatttgctatagcctctgaataatttcagttgattcatgataaatcctttcaattgactaaaatggcttagtgaaaataaactaatagtgagcttctttcacattatccttataaattaaacataatgagaatgaaatttatagaacatatctttaatcttttactctatactttttgatgtgtctattggcatgtg

SEQ ID NO: 230427 - DNA, 271 bp, Homo sapiens
taacttttttttcctatgagtttatctacttaagatacctgattatgaatggaatcatagactgtcactttgttcctggcttatttcaattaacatgatcttctccagaattatcatataatgtgtctttttaaagactgaataatattcgactttgtgtatgtgccacttgttattaatctgttcattggtcaagggacatctggattgtttctgccttttggcttgtgttaataatattgcaataaatttggttgtgcaaatatctctt

SEQ ID NO: 230428 - DNA, 489 bp, Homo sapiens
tctttttttgggtggggggatggagtctcactctgtcacccagggtgcagtgcagtggcatgatcttggcttttgtgcctgcaactcataaggaacaggtttaggccgggcatggtggctcacgcctgtagtcccagctactcaggaggctgaggcaggagaatcactggagcccggaaggtggaggttgctgtgagcctagaccgcaccattgcattccagcctgggtgacaaagcaagactgtctcaaaaaaaaaaaaaaaaaaaaaaaaaaaaaaacatcaactaaaagcttatgacattggtctgggcaaggattttttggatatgaacccaagagcataggcaacaaaaataaaaatagacaaatgaagttgcatcaacctaaacagcttctgcacagccaaggaaataatcccttttcaggtatatggtatacaaatattttctcctgctccatgagttgtcccttcactctgattaatatcc

SEQ ID NO: 230429 - DNA, 401 bp, Homo sapiens
atgaaacatctgcaagtagttgactgtttgtctctcctctcccctactcctgcatgtttccctatcatttttgtcaaataggagttagtgaacttgttaagtatagtgatatctcttccctaataagctatcttactatggttcaaaggcaacaccagtgtgctgccctctctctgcagtacacaagcaaagaatggtatacatctactaggtggtccgggcaataaggcctctgaccatatttgccttctccttcaagctatggctgtgaagaataatttaagaaataatctcctgtattcacttgtgcccattactggttttcatcaagatacttgggtgtaattcctggtaaaacaaccacagttgatgttaaacaagtctctgagaattaaataaaa

SEQ ID NO: 230430 - DNA, 424 bp, Homo sapiens
cctcctgggctggaggaaatggagctggagtgagatctggctgcagaggctgagaggttgcaaggtttgggcaaggctgcagaggatggcagggcttgcagggagatagagattgcacaggcagcgggggtggggagtggggggtgcgggtgctgcgactgggacctcatgctccacagctaggagaggttgcacaggctggaagaagtgccaggagggaaagattgctggagctaatagagatttgctgcctggctaggagagagagataggctgagaggtcgcacagcctcagaggttgcacgagctggggaggagaaggcccttcctctcaccttcgtcttctactgattaactgtaagcctgaggtccccaacatacctgccttcagacacccataacccaccccttgccactggcgaaa

SEQ ID NO: 230431 - DNA, 309 bp, Homo sapiens
ggacatttcccaggattggacgaggccagtaaggtgaaagagtagaggcctgaagattccagagagctagtaacaacttcactgaagtggctgagatccacagtgtgtcaggaggtgtttctagagaggtacagtagatgggaaatgagaggacatgaattcagtaagctccttaacctcctgcctcatttatcaaatgggtctgatgaaagtgatatatatgaaagcacctggcataatattggtcagattgtggtgcttgatgatggaatggtgcataaataaataaacacgggctctcaatcaatg

SEQ ID NO: 230432 - DNA, 267 bp, Homo sapiens
cattttaaaggaaagaaaatatgtaaattctattgagcaaaattctgtcctgttgaaacttagttctaaaggttttgaatcagttgttacactctgacacatgactgttgtttgcactatattatcatgtcttctttaaaagtaaatatttttggtttctgtaagaagcttgtttaataatgttgtaagccgtggctatagttttatcaagactctgaacacaagatgtaacaatgcaaataaatttatgtagtgagtaaagttgct

SEQ ID NO: 230433 - DNA, 367 bp, Homo sapiens
ttttactcagaaaacatccttcaatccatactgatataaacaaatgaattgatgaattcttcggagaaaacagacaaatcttccttaaggaataatttttaataattatataaatactatccccttctggaggtgagcttttctctctccttgtggactggacttagtgatttgtttccaaagaggacaatatggaaaagaaaaaaggaataactttatagttaggaaatcagtcagactccaccttagtcaagtgttaagtgttaaaatcaccagtgataactcatgtggtagcacatctgtggtattagtcccataacccacaatcccagcctgatcatgagaacatattaaaactcagattgaa

SEQ ID NO: 230434 - DNA, 455 bp, Homo sapiens
cagagaccaatttaggctcatactgttttttttttttaatttagcttattgtacctgatattttgaacttttaattgctatcaaatttcagctctggttttatgcattgttgtaatttctcagtgaatcccagtgcttctttccttcttgaaaaatgccatttcgcccaggcgcggtggctcatgcttgtaatcccagcactttggtaggccgaggcgggtggatcagctgaggtctgtagttcaagaccagcctggctaacatgatgaaaccctgtctctaccaaaaatacaaaaaaaaactagccaggcatggtgttgcatgcctgtaatcccagctactcaggaggctgagacaggagaatcgcttgaacctgggaggtggaggttgcagtgagccaagatcgcgccactgcactccaacctgggcaacagagtgagactccatctcaaaaa

SEQ ID NO: 230435 - DNA, 434 bp, Homo sapiens
acatgaggttttaatgggtctcttgcctgcatggctaaatgggaactgcgctatgtaacaggttgcctttcggcttggagcccggatgctcagtgatcacatccctagaatgttctctctctaaaggaaatcttgtcggaagaggctgtgttatgtgagttccagctgttcatctaaagtggaaggagcagtgagcaggagggatgccttcagcttccgtccgtcttaaaaacaagtgtaacataatgggatatggccctcaggaggaaggctgatttctcgggcatacggggtactgctgtcattatttagcatgtattaagcaccccacagcacatgcggtgcacaaggaaagcatagttccaacccacatgctacaacaaggcaggacacagaaactgggccccctgacattcagtaactacactggcaga

SEQ ID NO: 230436 - DNA, 579 bp, Homo sapiens
cacttctccagccaggactttgaatggctccccattatctgttgcgttaggcacagaccagcctggcatgggcaatatgggcaaactgatttcttgccattctgttatattttccaggtcaatggaactatttgctctttgtgctttgctgtttgtgctctgtatctttgctcatgttggctttttctatcttaaatagtctccttgactttaattgttcttacgtatgtttcagggccatttgatacggaacttcctttgtgaagcttatctgtactttttcttcccatctagatgagctgtctctcttctttaagtttaaaccaccataacattagagtctgcctttttgcgataattgccttaaatcctgcttctacccacagtataagactgaagctatttcaagacatagactgtcctcttcatcatccaactttgtacatagtaggtacttggcaaatatattttatattgaaaatagctttgaatcaggatggatgcagagataattctttatccaaacaaaatgtttatcattaaaatctataaataaagttgtttatgtgagagaatccc

SEQ ID NO: 230437 - DNA, 515 bp, Homo sapiens
ggtggagggccccgtgatggcgtggggacttgcgttttcccctatgcgcattccctgaaacggaaactggacgtttcctcaaatttttgtcatgtgccactgccccttcccagtcacctggtctaccccgtcagcccctcaggctgtgtagaaattccagaaccgtcactgttgtgaagaaaagatggtggaatcaccaggaccacgaatggaaacgctctttagaaaagcagtttgaagaaactgactttctccttgttctgtaaagtgcacagggcggcactgcgggcattcagagggaggagggcccttcctgtttgaaaaagccccagggctttttccccatacagacctgatcacctggattaaaataaaacaaaaatacacggcagccaagtagtttgtatcatgcttatatctcagatcactagaacctggcctgatgggtttatatgtttgtatgtatttttaaatgaatattttaaaataaaactcagtgaaatcgtcacagcaaa

SEQ ID NO: 230438 - DNA, 419 bp, Homo sapiens
cctccagactggtccctcagcctgtatttttatttatttatttattgagatggagtctagctctgtcgcccaggctggactgcaatgtcatgatctcagctcactgcaacctctgtctcctgggttcaagcaattctcctgcctcccgagtagctgggattacaggtgtgcaccaccaccctcggctaatttttgtatttttagtagaagagggtttcaacatgttgtccaggctggtctcaaactcctaacctcaagtgatccacccacctcggcctcccaaagtgctgggattacaggcataagccaccatgcccggccctgtgttttttagagtcttagaatattagttatgaattataagcccccttctatttcctataggtatccaatagtaaaagaatcagagagttattgaa

SEQ ID NO: 230439 - DNA, 462 bp, Homo sapiens
cggatttctatctcaaaaaaaacagcagcagccagagactacctctcttttttctccactgttagatgtgagttctaaatttcttttcaaagaatcaatatgtcaatatgttcagttcgttacctcctacttttaagcttcctcataaagcaacattttccgattacctgctccaccctgactcattccagttacctgctttgtcatacccatttttcccgccaaaccactcaccccatcactctctttaaatcagccaatcggaattatttagcctgtgcggtctaacgctagctaataggggaacaacacagcaacagggaccacttgcgtcagggataagaaccacttcccctcccgtgtccagatgtgtgctcaccattgctccatctgtaagggtgcacccttctatagaagtatcttgccttgatgagaattaaaaggaaaatgtgatattggagt

SEQ ID NO: 230440 - DNA, 393 bp, Homo sapiens
accctgactaatggaaaggatttcatgggccagcaaggttcaccagatatataatgtgatgtagctgaaacaacagagtactcttttccaaatctctaactcacatctttttgtcaataaatggctcctatcacttcagctgcagcctttcctctccactcctttgatctttcttccccacccaattagccctctaagtgatattctatacactggacacctcttggaaaaatgaaaaaatgtgagcccaatgacaccatttgccataagactgagctgtaaatgggcaggagctggaaaagaaactaatctttggaagagcaaactacatgcccttgccaccctggatgtaggtgcccagtcacactgctcatgggcatcacaggcagagca

SEQ ID NO: 230441 - DNA, 137 bp, Homo sapiens
gtcatcacagcacagtgttgacctgcttgttaacatgaaatggggtggtggggacagcttctgcttctcttgcataccatcataaataagaaaagatactttgccataggatcccctcacccacccctttgattagg

SEQ ID NO: 230442 - DNA, 477 bp, Homo sapiens
ataagattgtcttcttgttttctttcattctttaactccatttttttggttttgttttcatgattagattttccttctcatttaccacctgtttttcttccctctgccttctataatccaatctcctctgattagactttttagtcccaatagtgtcattgtgggccaacctcacccctttgtggtatttaggatcacagatttctgaactcttaatatgacctcattaattagaagcaaccagtgaaatttcaatctgatattttcaaaccaaatggacatgctttatacaggaatctaagaacattcttgatccttgatcttgataacatgtaaaatggctaactagtaactagaccagaaatagcatcggggcgatctatctggttcctgcatctttttatcatagttttccttggctgagaaagtaatccagtaccaaatgttgttaaatgaagatatattatgctagagaaa

SEQ ID NO: 230443 - DNA, 462 bp, Homo sapiens
gaggtagtgcttcaggaatgaaggaataagcaactttgttaaatggttctaatagagtcagaaaagtgtctatgaatttggcatcatctagattaatggttgctattacaaaagcatttccagtgttttggtggaaacagcagacaagtgaaaggaagtagagccatagcaattgcaccggaatcgacctaattcattcttttgaaggctgtatgatggttcatagatgcttctaccacaatttactcaacctttcactattgatgaacattccctttgttttcatttttgtcactgaaaataatagtacaataaacattcatgtttctctgtctctgtgttcatccttacacactggtacaatgtatttatataggaaacattctaggaatgggcttcctgggttgaaagataggtgtattttatataattttaaactatattgttaataacttcccccaa

SEQ ID NO: 230444 - DNA, 404 bp, Homo sapiens
cttaattacatctgcaaagacccttttgtccgaatgaggtcccattcatgggctccaagtggactaattttggggggttggggaggcatcatccaaccccttgcacagcattcttcctcaggatgcttaaaattgcgaaaccttttactcctgtttttctatatctctcaatgagcctaacaaaatggcagcccttgggaagtctccaggcagtgccattgaccaacaaggttatcgccaacccagttttcctgtagagcatgctgaccttgcctttccaaactcctggaaagcaagaacaaaagtttttttaaaaaatttacatagaattggcatatattagacacttcatgtttaattgaacggatcatttttgagtaaacttttcttgtgatagcctgtgg

SEQ ID NO: 230445 - DNA, 510 bp, Homo sapiens
cagacattagtaacgtcattttagccccaaatatatttcattctgggtttatattttttggactcacacagcttatgatgattttatccaaagttcatgccaccagagttggaatttttaatacaaacatttagaccaggcagtgattggcagttctgactgttaataccccgtagtaggtcttctaccgtggtcagaagttaagatttattttgacaagctttctcttggttttgtagactagaagctttataatgggggttaccccatgactatatatctggcataggttattagaattcatagcaaaatggtagacagccttctcccatacaaccagagcccgcagatactggaacatgatattaatgaagttatttccagttattaccttctttaatgggtagaatctggacattggatttgaattacaaccagacaataagtggccatgaatgtcagcatctcaacttaggaagactcctgattaaaaacaacaacaacaacaaa

SEQ ID NO: 230446 - DNA, 207 bp, Homo sapiens
gctctgggtgggccctgtgaattatgtagtgagctcagtctgtagctcactgttgcctgacaatgcaccaagctccttaggttaaattcaaggctatcagcctttccagtttttcctagagttattgtcctgctgagccccaggtgacaggtcaccccctgctcttgtcagaggtgttggaaccagagtgactccatcttgagtagc

SEQ ID NO: 230447 - DNA, 547 bp, Homo sapiens
ataatagaacctatacataaagtagttgtgaggattcagtaagaatgccatgcatagcgtgtctgatagtgtgctgtaagtgtccaatacattttagcttttatgatggctgaagtctcaaattctttctgctgtactatacgtactttgaaaaatattttaagactttagaagtgtttaagcaacctccaagtaaagctagactcttgatctctagttggatgtatcatttgttgtgatctcagccctctgaaatagtaagttttaaaaatagcgaaaaggagccacttaaagttgttttgtctcagttgcaaattgactctcggttgccgagctttatgctatattattatatagttttaaaactattcctttttaactttcttaattttcaattttgttaaaagaatgaatactttagcagcttttcaagccttttttaaaaatctttataagcatgtaattaaatacaaatatgttcatacctgtaacctattaatttagctttcttgtagttttaattcattaaaataaaaaaataaaagtt

SEQ ID NO: 230448 - DNA, 383 bp, Homo sapiens
atgaaatgggcgtagtaaacccccagtgtgctgtgaggacctgggtgcaggcttaatgggcagtaactgggaaaggcctgggagggatattttttttttgagacaaagtctcattctgttgcccaggctgaagtgcagtggcacagtctcagctcactgcaatcttcacctcctgggttcaagcaattctcctgactcaacctcctgagtagctgggattacaagcacctgccaccacgccgggctaatttttgtatttttagtagagacagagtttcaccatgttggccgcactggtcttaaacttgtgacctcaactgatctgcccacctcagcctcccaaagtgctgggattacagacctgagccacggcacccggccgg

SEQ ID NO: 230449 - DNA, 822 bp, Homo sapiens
ccttcaaggttttattctaatgctggagaagcttaataaaaactttgtgataagttacacagctgttaactgacccaaagaaaagtaaagtcaaggttaggaaatactgaaggaagcatacacgtcctatgttgcagagagtgattagaggaaaccccaggatgaggcatgtcaactaagaagagatgacaaaccagaccgcaatgcagtaagacaagacatttattgggcccttaggaattataattcaggagacacagatttggctgtaagccaaattgtgttccaaaccaagtgagggtttttcaaaggaaactaaaggattacacaagttgttttgaaggaattatcatgggtggaggcggccggcttagcacaagtccatagttcatttattgttgctgtttaggagttgcagcgctggtgaaattcagctgtttttcaggatatcatggttgtggtggttaggtgcacttcaaagattcaaggcaaggtactgggttgttttgcaaggttgccagtggtgcaggcagccctgagaatggattctgctttagagccctgaactgtagtgatgccgttttctatgtttcacagataacatttgagcagagacctaactgaagtgaaggggccaagtcatggtatctgggagaggaacattctagccatagagaatgtgaggtatcattcattaagattcaaaaaataattctgtgactctagcgttgcaggaaaaaaaacggggttcttgtcacacgaccaggaaagattaggctcgcagacacgtagaagggtgacaagtggaatttattaggcaga

SEQ ID NO: 230450 - DNA, 600 bp, Homo sapiens
gctttcacccccgaagggacacaatagaccgttatctggctaccacggggtacctcgacagttctgccaccatacacaatctttgcaggcaggatttgaactgcatctgacattctctaggagtacaggtgtaacatcaccctgaagacacccttctttcagcaaattcatttgacacactcaggacattactcacaaagaactcatagaaaaggatggggtttgtgtttccacatggtgggattaaactaaaacaaaaaagtatgggccactgccccaggcatagtacagggatccacaccaatttctggccattgtctggtcagttgagggatgctccatccctgacactgtcaaaaaataattattgaccctctgagtactcacagtgttctaataaacctcccagcatccttcaggcctcttgagttcaaggaaacacatccttcatttgtagattttaggtaagcccatttacgctgttacttgcaaaataagcccactttgaatggggccccttctaacaaaaggttctagaatctgtcaaattgcaatacagcagacattagtgccctcctgagtctcattcactgtggaagc

SEQ ID NO: 230451 - DNA, 262 bp, Homo sapiens
cggatgctcgggaggatttagttagaacacgtgtgcagtacttcagacgggtgttctaataaacctcccagcatccttcaggcctcttgagttcaaggaaacacatccttcatttgtagattttaggtaagcccatttacgctgttacttgcaaaataagcccactttgaatggggccccttctaacaaaaggttctagaatctgtcaaattgcaatacagcagacattagtgccctcctgagtctcattcactgtggaagc

SEQ ID NO: 230452 - DNA, 321 bp, Homo sapiens
acctctaccttcccagaactttcagtaatacttcctttgtcctgctcctacccatgatttccaaggcctgctttaacatggtacccagctccactgttgcaaatagaactaaatcaggcagcagttagagtctattcattgtacaacctttagacaaattctctatcatcatttttaattctagactgaagagttatattttaaaaagattctatcacagcaaccattgttcctacttacaactctttcaccttgtacccttctctagaaccttctccaaatctatgcctttctgaaataaaattgccattattaatctgg

SEQ ID NO: 230453 - DNA, 541 bp, Homo sapiens
tcgcagggtgccaccgccgtttccaggcactttttctgctagacgctcaagacaagagaagggcatgtgaagggccaggaagccggggcaggggccgccgtgagagagcggaggaggagggtgtgaggcgcaaccgggtctgtttcacgctgaaacgctagggccgtgctttccgctaggcagctgcgcagagcaaccgctcctccgctgggcgcgcttcgctgctggggagggacaggcagggatgcctggtgcaagcgatccctcggccccggggcggcccagcctcgccgagctccattagttggcatccgaaacatctggcaggggctcaggctggggccccagggacgaagccagtttggtgagggcccgcgctatgctgtccaggtggccgttcatggtccgcagctccaccaggatgtccccgacgtgggcctccaagctcgccgcagcggcgggccgggctcggggcggcggggatgtacccgcgtccacggtgccctcctccctgcccgcagtgctggggcgcggggcgcgg

SEQ ID NO: 230454 - DNA, 713 bp, Homo sapiens
cacgagggcttcaggtcatctgctatcaccaacactggtgtcttccagcacatcctctgcaatttcgagctctggatgaatactgcagacaatctggagctcagcctcttttcccatcttttggaaatccttcaatcaccaagggaaggacccaggaatgctgaagctgcccaccaggcacagcttatacccaagctcatcttcctattcaatgagccgagcctcatcccctccaagatccccaccatcattggcatcctggcctgtcagctgaggggccacttcagcacccaggacttgctcaggattgggctgtttgttgtgtacaccctcaagccttcgtcggtgaatgagaggcagatctgcatggacggagccctggacccttccctgcctgctggaagccaaacatctggaaagacaatctggctcagaaaccagttgctggagatgctgctcagtgtaatatcttccccccagcttcatctgtcctctgagtcaaaggaagagatgtttctgaaactggggcctgactggttcctgctgctcctgcagggccacctgcatgccagcaccactgtgctggcattgaagctgctgctgtactttctggcaagcccctccctccgcacacggtttagagatggcctgtgtgcaggatcctgggtggaacgcagcactgagggcgtggatattgtaatgggtgagcacgt

SEQ ID NO: 230455 - DNA, 339 bp, Homo sapiens
aagtttggcgcgcactattatggattgagtgtttgttgctccccaaagctcatatgtgaagccctaacactcaaggtaaccctctagactacatgggagtcgagattatcctccagtggagagaggataatggagaaaccctggaatgtggggtattatatgaagagagtgaacatgtagaagaaaactgaaggttcttttcctgtttccaacagtcaatatttcagcctcttgcaaacatatgagtgacgcagccagcataacatgaaacacaaggctcattaagtttacccaaaggaagcacaacaaatactaaaccattgttgttttaagccaaaa

SEQ ID NO: 230456 - DNA, 295 bp, Homo sapiens
ctctcttctctccctaagtgcaagcaccaaggtaaccctctagactacatgggagtcgagattatcctccagtggagagaggataatggagaaaccctggaatgtggggtattatatgaagagagtgaacatgtagaagaaaactgaaggttcttttcctgtttccaacagtcaatatttcagcctcttgcaaacatatgagtgacgcagccagcataacatgaaacacaaggctcattaagtttacccaaaggaagcacaacaaatactaaaccattgttgttttaagccaaaa

SEQ ID NO: 230457 - DNA, 112 bp, Homo sapiens
cggtgtggattcaggtttctgagcttggcaaaaagaaatctcccctcatttccacatcactgtgcctccctgtcttcagtgagcctgggctgccccagggagggggatgttt

SEQ ID NO: 230458 - DNA, 941 bp, Homo sapiens
gaggttggccaagactcagtcatccaaagcctgcctcagtccaggcaggtgcgctcacaccacgggcagttggcactggctgacgttgcagaactctcctggggccgtggactcagagcacctacagttgacttctccacatgggttgggcctctcatggcaagggtaccatgttccaagcagagtttccctaggatgagcagtcaaaagagaagatactaggatttgactccttaagatgtatcctcagaagtcacacgacagcacgtctgcggcatcatcgcagtcacagactccacacagatgcaaggtagttcagacgcacactgcatctttccacgggttagtggcgagttacattacaaaagagtatgtcagatggcagatattcttgcaggaggcttttgaaaatacaatctcctatagaattttaaaattatgaattgtgataattacaaatcatgggcagaatattgagaaagaaaggatataaatccaattaggtaagaaattgtagcttagcaaaatgaaagcattttttaaaaattatcaattataattatcataatgatcaataatggcaggtttctgtgaaatatccaacccccttgtgggtaatattgcagcatgcattgcatactggttgttactgcattctaataacctggaagaccgaaagcatttgggattttttcacagtgaaattatatgttaccataacatgctaaaatccctcttgctaattctgttgataaaattctagtccttgcattgaaattataacttcctatcaaggaaaactcgttttaccaccttcaaaaattcacattttcctgctgaggctttacctgtgtctaatattgttaaagacagctccgtttatcctgtagtgttggtgaatccaatacaaacttttccttgtaattatggggaagatgggc

SEQ ID NO: 230459 - DNA, 462 bp, Homo sapiens
agaatccaaatggcagaaatcagccaggccacaatattataattttaaagattatgctggcacagctctttgataacaaagataattattatgttagctttcacaatttctaattgttttaagtttgtgtaagtttaagcaataattcagaaaccttctcaagtagaatgcccacgtgtttcagtcatcagaagcatcattattagcttcactgtgtgcagaattgccaaatatatgcacgaagatagttgaataaaaacataattccatgtttagaagttatccatttaaaatagccagttccaaacaatgtgtcaacaacacatagtatgggcatgctgaccaccagctgtagtaacatcaggtatttatattgagaacaacgattggtacaaatttcttcccttcctctggttaaggaatcagcaggcatggtttaaaaagaaaagaaaacagtaaaaa

SEQ ID NO: 230460 - DNA, 478 bp, Homo sapiens
cttttatcttccatctcgtgcagtacctatcatgccatttattgatgatacaataattgtctatttctctcttcccaactgtttctcacatcaacttaactataatggcttcagttaaaacctgaatttatatttctttgtatctccagtatctctcgcctaatgtataacatacattagattcacaaaaagtgtttattacttaaattggttgaaaaaattgcaaacaaaaaatctctacttaaatgtcataaaggttttgtaaagtaatagtatagagagaacttctccagctatcaaaatatttagcaccaaattttttgcttatgaacataaaagaatcttttatttccatcaatattaagactatcatctgatcttctgaacatgttcaatattgctggcaaacagaattacctgcattttgtcaatgatgaatgttaagacaattataaatattttaaaatcattcttttat

SEQ ID NO: 230461 - DNA, 387 bp, Homo sapiens
gcctgggtgacagagtgagactctgtctcaaaaaataataataataaataaaaaattagctgggtatggtcatgcatgcctgtggtcccagatatttgggaggctgaggtgggaggatttcttgagcctgggaggttgaggctgcagtgagcggtgatcgtgctactgcactccagcctgggtgagaccctgtctcaagaagttagggagtcctaatacaacatctggatttgttatttatttatatggatagccatgctgtacttgctaagaccacaagaataggctcagagagaggggaaagtttgtgtaaattatacattgaattaggggtaaacaatctagtctgatgactccatattcagagccagggtttcccaattttag

SEQ ID NO: 230462 - DNA, 402 bp, Homo sapiens
ctgaggaaactaatacaggtgtcctaatggaaaggcccatgctctcatagctgcttggcagcctccagggtgagtaagatgtggctggaacgcaagcacgcattgtctgcaagtcctcagctgctgagggaaggctggaccttgtgcttggctgcagggtgtggcctctgacacggaagcacttttccagccctgggtgactcttggagtgagtattatcacagaccatgtctgcacaatttacatccaccaatgaattaacttctatttacaagacttgaagaaatgcaccaaggtcggctgaatgaaaactcaacgtcagtagcattttgtaattgatgatgatgatgatgaattaatttgtgtacaatgactatcaatacctattatcaatatccatta

SEQ ID NO: 230463 - DNA, 360 bp, Homo sapiens
cctcccgggttcatgccattctcctgcctcagcctaccaagtagctgggactacaggcgagtgccaccatgcccggctatttttttgtatttttagtagagatggggtttcgccgtgttagccaggatggtctcgatctcctgacctcgtgatccgcctgtctcggcctcccaaagtgctggaattacaggcgtgagccactgcgcccagccaacattgacattttaaagaaatattttcactcctcttcataacttcatgctcttactgagctagagtcctctgacagactctagcttagaaaaagtaaggtcattttctcttaagtatgtggcgttgactggtgatagctctttgctt

SEQ ID NO: 230464 - DNA, 567 bp, Homo sapiens
gtggcgccgggagcaaaagcagcatgatgcagctcatgcacctggagtccttttatgaaaaaacctcctcctgggcttatcaaggaagatgacactaagccagaagactgcataccagatgtaccaggcaatgaacatgccagggaatttctggctcacacaccaactaaaggactttggatgccactggagaaagaagtcaaagttaagcacttacttttcattggattgcttcataatttcttggtgatggaaaattcattcctaaagcaacaagattaaaggatgcttgggttggcgttgcaaacggtatggtcaccaaatgggcgacaaacaatgccctttctttatcaaaggtaactgaaagagcagttcagagtagcacatgaagatcccatatatggcagcatgtgaggcaataaaagacatgaaaaggatgtaaggatacagcagttaaaacagttattggaggattctatcttggatgaagatgggagcagctccagttcctctgaagtaaagagaaacacaagaaaaagaagaggaaagaaaaggaagaaagaaaag

SEQ ID NO: 230465 - DNA, 397 bp, Homo sapiens
ctagttttcacacacacacacacccacaaaaaggcataatacctgtaagaaggaaagcagtcctctagaattgaagtgtttgaaaaaaagctatgagctcaatgttttggaggaaatcccttctatagcagtggaaagaaggcagctcactttggactttgaatggtaggaccgtatctgctattcagtttttgaaatacagctgtgccatgtgcactgaaccttcacactgggactcagctgccatgcttcaccttgggtataatgatgacagaggttgagaaaggtgactccctccattgatgtatttcgccatgattacctcccaccaaatgatactaatactcctgaaaatacttaacatttataaaatgtttattttctgattcatgccaaa

SEQ ID NO: 230466 - DNA, 232 bp, Homo sapiens
cctaaaatgctggggcctctgggagcaataaagaaggcctcacttgtcaccttcatcttggggagaggtctgaaagctaaaagctgacttctcgggtagtgctgatggagggtggtgtattcggagggaggtctgaccccctcgagtccctaggtcagggcccctttgatggaacacgcttcaggcaggatcaattagtcacacgccagtggaattctaagttaaaataaaa

SEQ ID NO: 230467 - DNA, 386 bp, Homo sapiens
aaattcagtgacctcatcaactatcccctagtactcctacagtaagaaagggcaagtacaaatgtcaaaagagaaacccatccaacaaacagtaacattctcatagcggtactttgtcatttcctgattagaatcaaccaaactatgatgacactgaggttatagtcccaccttattttttaatacttcctctttgctttggatttttattagcttttcaaatcatttaccaatttagatatagccatatggttctaataatgtcactatgccttccaaattttaggatactatcccttccaaggaaataatagttgaagttgcaaatgggtacagatcaaccacaatctcagatttttgtttgttttaacctgagagagaaaagc

SEQ ID NO: 230468 - DNA, 434 bp, Homo sapiens
aatatctacagttccctttgctgtgatttgaaggggaaaaaagctgctagtataatgttccattctaaacatgggtctgacgtttttgtttccaaattatccacacatcatcaatggataaaaagttgtggtgagaggccaggctagcatcccgagcccattgatcaacgctagcaccgtcactaaggtaggacacctggacaccgtgggcctcccggtgcagtcaacaggaagcacacagccccgcctgcctcaaagcagaactggagtctactcaagcctttagggcagctgttttccactggggcacgtccgccccacccagaggacactgggcagtgtctacagacatctgtggctgccacacctgcaggtggggagtgctactggcatctcatgggagagcctggggtgctgctcaacaccctacagca

SEQ ID NO: 230469 - DNA, 223 bp, Homo sapiens
tcctaatttgtatgtatatgtaatattgatctctcccttgcactttcatggctttagttcctgctgctgtcatttcttattggactaatgcagtagttctctggccagtctactcttctccaattttgccgccatttcagttcatcttctacactcagaccaatcagtgatctttcttgaaaaatggttttaatcaaatagaaatgttcagacacacaggata

SEQ ID NO: 230470 - DNA, 183 bp, Homo sapiens
tttgtttcctgtaaatagaattattccttttgacttaacaagaattctgacacactgagggtcctccatacatgtgaagctatcattgtgattattcagtaattgccaagaaaaaggcatacctgatggaggaacccttatgtttgaaagaatagaataaagttttaattccttttttatgca

SEQ ID NO: 230471 - DNA, 1080 bp, Homo sapiens
acatataaatgattctaaggccttctgacctgtctttcaataggatggtattacccaacaattatgacgtctacacatacttttcattttcaatcacattgggacaaatttttatctttatctcatttctgctttctcctgtatgtataagtgctgatattttactgctctctacaaagagtaaagtctattatggtcttacaacttaaatttgattccaagacaaaggttaattggtaaagattatttcccaagcgttaatattgtacatgaatcagaaggtcagatggcatttctggatctgacagctcttatcataatgaaggtttgaaagaaatgtcatcttgcgtactaattaatggttttagccctagtgagagatcttttatttaacgccagtaagttaatcgcagttgatgtctgtgaactgtcaactctcaagctatgcatctatttgaggtcattgctgacaaaacccctattttacaggcaacatcactgaatatacatcacttgccaatgtatcatagacatttgaaaacttatagaattcagcaaatattgttcattttatttactcattttttaatagtaattacaaactatgaatggaaaaagctataatttaatcattggactacatacattcaatttttaaaaaagactctgctaaatagaaaagtgtttgaagtatttatttttccctaagtaaaaaagtaattttgtgagacagtcacaattataatcctgatttctaaaatttattaatttgagatcttcattagaagaattgagacattttttcttctgaaaacaagacacatacacaaatatatatatatatatgaaaaacttccaatatttaagaagtatttcctctgaacattcttagttacaaatgctattttaaattttttctgaagtgagtttatttagacgagattgagcgcattcagggtggtatggctgtagactgaaataagtttatttagaaatctagatcattttatactccaggcttcatgtatatgatatttcttatatttcttatgaaaaataaaatctttttttacaaaaatc

SEQ ID NO: 230472 - DNA, 190 bp, Homo sapiens
gtaataaccagaacaaaatagttctctatgaccacagacaaatcaatttaatacacaaaggtcatataatacatatttaataaattaaataagtatgcaaagaactaaagacattttaggtgatggtaaactgactaactgggggaaagatgttgataacaaaaacagtaatagctgctaacatttattg

SEQ ID NO: 230473 - DNA, 395 bp, Homo sapiens
cagacttgaatgagcctgtaagtgtattctcccccaaggaaatccacataagaccccaggtcagctgacaccttgacttagaccttttgagaccctaagcagagaattctggtgagttacattacactcaaacttctaacccgtagacactgtgagataataaaaggctgttattttaagctgctaagtttgtggaaatttgttaaggctacagttaaaaaataaataaaactttataaagcccctattattaaaatagtccaagaagtaaagctactcttgaaacagatggaaatatagaaagtcttggcaagaaaacagaagatataaagaagtgggaattttagtgaaaaatacaataactgaaataaaatggatgaaagagtgaattcata

SEQ ID NO: 230474 - DNA, 555 bp, Homo sapiens
atttgagaagccctgttgtttaccatcagcctgggaattaacattagctcaatcttgtctggacctgaaatacatatcagtttcgattattgagcatctgtgtacttttgagacccccacgctcaatttgcaaactaattctgactgctaagtttctgagcaattcccctggcctcagtccttgcatggtaacacccctgatgaggctcagaccatatcttgtgtttgcaaggttttttcttttttaactgaatggagttttgcctttgatcccttactctgtgcctgtggacctgctacctgccaaaggcttccctcttgctgacagtcaacctgcctggtattttaagtactgccttctagaagtctccatgtgtctcccatgctgacgatacttggatttctatctattgttactataacctcagatgttgtgctttacttgtcagatccgaccatgacttggaagtatccagaaataggacagcgtgtagaaatacttcccaatcaacagctcaacaaataggactggacttccaggagtcccagggttta

SEQ ID NO: 230475 - DNA, 528 bp, Homo sapiens
agattttgattgacctgtgatataaacttagattggatgccactaaagtttgcttatcacagagggcaagtagcacattatggccttgaagtacttattgttctcttccagcaacttatgatttgctccagtgattttgcttgcacactgactggaatataagaaatgccttctatttttgctattaattccctccttttttgttttgttttgtaacgaagttgtttaacttgaaggtgaatgaagaataggttggttgccccttagttccctgaggagaaatgttaatacttgaacaagtgtgtgtcagacaaattgctgttatgtttatttaattaagtttgatttctaagaaaatctcaaatggtctgcactgatggaagaacagtttctgtaacaaaaaagcttgaaatttttatatgacttataatactgctgtgagttttaaaagtaaagcaaaagtaaactgagttgcttgtccagtgggatggacaggaaagatgtgaaataaaaaccaatgaaaaatga

SEQ ID NO: 230476 - DNA, 511 bp, Homo sapiens
attttttatagagatgcggtctcacatgttgctctggttggccttgaacttctgggatcaagcagtcctcccacctcggcctcctaaatgcagtaacatttgatgacttgagatttgaatactttagcttcgaagggactgtgcttggttcttgggggcaatgccttccaaactgtccatcatgacccagtatgtctttttttagaaaattttcttggatgggcacggtggctcatacctgtaatcccagcactttgggaggcccaggtgggtggatcacctgaagtcataagttcaagaccagcctggcccaacctagtgaaaccctgtatctactaaaaatacgcacacacacacacaaattagctggatgtggtagcacacgccagtagtcccagctactcgggtgggtgagacaggagaattgcttgaacccaggaggcggaggctgcagtgagctgagatcgcaccactgcactccagcctgggcaacagagtgagactctgtgtt

SEQ ID NO: 230477 - DNA, 553 bp, Homo sapiens
gggctttgtgagtgaccagactccacccctgtcctcacccctagagagctctactgaggagcctacctcctgtttgctcattttaataagattgttctctctctcgagcctgagtgatgacaggtagccagctagaactaactacagtgttaactttgccttgaaatcctctgcgagctctgcagctggagacagcttgcgccatgagctcattaagcaacagaagcctgtctccccaccaccaagatgcaggcaagaaaacctgtaacagatccacttttacactgagtcgaaaagatctgtgctcacccaatccccaacaacttgcttggggttgtggtgtgaggggaggggattccatttcccacccccagtattcaattagctgccaattaggcactgaaaggtcccccatccccctgccagccctgacccagaagaggagaggaccgcagagctctcagccaggctcaaaggccttttgattgtgcacctgagtttattctgctcctttcactcagggcctggcttcctttgaaagtgaaatgtttta

SEQ ID NO: 230478 - DNA, 613 bp, Homo sapiens
aatacatgacacaatgtacttgtccaaactcatagaactgtacaacataaaaagtaaactctgatgcaaattatagaccttaattaattaaaaaatagaataaaatcaacaacaaaaacatttttccgaattatagagattactgttgataacatgttcatgtatctctttccaaatgtatatatgtaaatgtatcataattagttttttacatacatgaatgaatttgatatttctccctacactgccaaaaatcaggctttgactaaatacagagtaactttttgcagagatagtatttcttctagctgtaagaaggaaatatccttaatttctctaggaaattcaatatggatcccaagggatgtgtcaaattctaggcattagtggtgttaactggactctaaagatacataactttagcatttttaattatcaatattccttccaatgttcttaggcaacaacaaatttttcattctttcatacattcatgcattcattcatctatctaagaaaaagttacagagctcatataacacgtcagttaatgttttttggcaccaggaacttgtcttagtggagtctgtattcctatggagaaaaaaaaaaa

SEQ ID NO: 230479 - DNA, 442 bp, Homo sapiens
ggagctcgggcggctccaggcacttcttcccttgagtgggtggactactgaggtcccctgggcacggcgtcatggtgcggaacgtggatgacctggatttccacctgccctcgcatgcccaggacatgctggatggcctgcagcgcctgcgctctcagcccaagctggccgacgtcacactgctggtgggcggccgggagctgccatgccaccgcggcctcctggcgctcagcagcccctacttccatgccatgtttgcgggtgacttcgccgagagcttctctgcgcgcgtggagctgcgggacgtggagcccgccgtggtgggacaactggtggacttcgtgtacacaggccggctgaccatcacgcagggcaacgtggaggcgctgacacgcacggctgcgcgcctgcacttcccctcggtgcagaaggtctgcggccg

SEQ ID NO: 230480 - DNA, 564 bp, Homo sapiens
tgcggccgcggaaagaatgcgcgccgcccgtgcgctccgcctgccgcgtctggccacccgcagccgccgcgtccgcacctgaccatggagtgcgccctcctgctcgcgtgtgccttcccggctgcgggttcgggcccgccgaggggcctggcgggactggggcgcgtggccaaggcgctccagctgtgctgcctctgctgtgcgtcggtcgccgcggccttagccagtgacagcagcagcggcgccagcggattaaatgatgattacgtctttgtcacgccagtagaagtagactcagccgggtcatatatttcacacgacattttgcacaacggcaggaaaaagcgatcggcgcagaatgccagaagctccctgcactaccgattttcagcatttggacaggaactgcacttagaacttaagccctcggcgattttgagcagtcactttattgtccaggtacttggaaaagatggtgcttcagagactcagaaacccgaggtgcagcaatgcttctatcagggatttatcagaaatgacagctcctcctctgtcgctgtgtct

SEQ ID NO: 230481 - DNA, 449 bp, Homo sapiens
tcattcttcatttatttctgtctaggtcccaggttttcttgcattaggattagtttccctttttttctttcttcttctctcttcagtttccttgttttctgttggtctaaatttcccccacagtatttcactaagttattcgctccacctcctctctctttcttgatttgtgctcccccactctcttctgccctttctccttctcatcccttctctacttcttcctttcgccccttcatcttctcactcttttcttcacccttccttgtcacctttctcttcctccctcttttctcagttccctctccccccttctctgttccccctctccttccttttccccctcattctagcgtaggctttcccgagcattcctgtaattggagccctgaaggctatggcttttaatgtcttgccatgatatccgactgacatgttctttttcatat

SEQ ID NO: 230482 - DNA, 344 bp, Homo sapiens
catgggggctgatttgtgctgctgctgcagatgacaaggatgattctctccaactccctattgggaaatatgggaaatagcctcgtacttcatttgtgaactgtatgccagaaatatgttaacatttcaaaatagtttttaaaaatgtaaaataattgagaaattccatgtttctatcatgctaatgatggtgctttattttgtcattaactttttacctaactgtaatgcaccacaagtctgtttctgaagattatagagggtagaaatggaagtgcaactttatttagaaagagttattttcccttaaagctaactttttcttataagagcaggccaattac

SEQ ID NO: 230483 - DNA, 533 bp, Homo sapiens
caaaatagataagtatagaatttaataattatattatttaatgattcatgagattacatgtatgccatagagtgttgtccatagggagatgggttataattttgaacagagtggaagccctaaaagtgatatttgtgcatgagccaaggcttggcaccatgtagcttcaggataacagctccgccattatgcacacacagacatttccatatatcactgtacctcgtctcttaagcagaaacaagaatgcagggagatgtatgtatgagagagatggagtaagggaaagaagtaagaggtacagtccaatggcttgccatagacgcttttgacgtgcatagcagggagttgatgccgtggataatatgccacgtaaatcacgtctccacttagcatgtggcacaaagcagatctgtgagaacaacagtgatagaagccggtaactctgttgattactaattttgtctaccctaagcaaccaccccttattgaggacaacaatgaaaaataaacacatcttatttctgcatgaa

SEQ ID NO: 230484 - DNA, 403 bp, Homo sapiens
aagactacaggtttctccatggagcagcacagagggtgaacaaagaccaagaaaagctgttcaatacacaagaaaataacacacacactgtttccacggtatctcacggcagacataacttcctaagcccacccacatctgcacaggaacaaaattggagctgaagaagcaaaagagtaagctgcacccttcttatttctggtctctagagctgggattcttgactaacgatggaaggggaagcagtgagatatgaaatggatatgagattaaagtttccagcaggactgaattttaataactgaaaggactggaaagtgatgcagtctactcaagatattaagatatggaaaatagagatttaacagagcataattaaaagcagagtttggagaaaattaaa

SEQ ID NO: 230485 - DNA, 489 bp, Homo sapiens
atgtattcttcttcaggtgatcaagatatcaaaagcagaaactataaaataaaagcccatttgtttgatggcaatagagtcaagcaatcctagcaggcaaaaacccactacaaaaaaattaaatgacgaatgataaaccaagggaagcattttcaacacacgtgttgatcagttaatagtctttgtaatatacatgataaattgttaatctcatcactatacctaattcattatttacgttaccttgggcaagttactcaatccccctgcgccttggcagactcatttgtaaaatagacagtaatagcacttacctcacaggatgggattaaacataaaacacctaaatcagggcctggtgggtcatgctcaatacacattaaatgttagctgttgctgttactcctatcatcaaagaccaataataaaaggtaagcataatagaaaaatggacaaatgatataaatagttaataaacaaaagaagaaa

SEQ ID NO: 230486 - DNA, 351 bp, Homo sapiens
ctgactcaaaccagttcaaattcttcgtcacaagagtcaggtaagtcattttacctctcttgagtcctctctatgatcacctttaaaatgatggctcccaaggctttgttcaactttgaccacatgaagactgaaggtctttgactatgaaacaagggcaaaaatgactactgtgggattgttcccagccttcctcattacccagccctccaaagggagcactgcaactgccagcacagatttcatctctcctctttccaccccacttcgaaagaggaagaattcctccctgctggagaaagtctgtcaacctacatagtaaagattaaaatcaacatttttgattccaca

SEQ ID NO: 230487 - DNA, 383 bp, Homo sapiens
aactggttaactattctacttagtcattcaccagaattagacaattctatatactaacatggaagatatttaggacacattgctatttttattttttttaaataaggaagcagcccaggcacagttggcctgtaatgccagcagtttgggaggccaagtcaggcagattgctaagcccaggagtttgaggacagcctgggcgatatggtggaacccagtctctacaaaaaatacaaaaattatccaggcttggtggtgtgcacctgtagtcctagctacttaggaggtggaggtgggaggatcctttgaaccccgggaggttgcagtgagcctagattgtgccactgcactccagcctgggcaacagagtgagattatgtctg

SEQ ID NO: 230488 - DNA, 461 bp, Homo sapiens
  misc_feature (4)..(4): n is a, c, g, or t
  misc_feature (40)..(40): n is a, c, g, or t
tttnttcattattctccaacagatttctatttgagacaanattcgctgccccaactcaatagcttgttattccttcctaagggacttctgtgtgctactccagtgtccgaataattcagtctatcaacttccaccaatgcaagtcccttctaacttcaaaaccctgaagaaatcatttttccaggaaggctttcctaagagctttttgtttgtttgttttgtttttttgagatggagtctcactctgtcacccaggctggagtgcaatggtgtgatctcggctcactgccacctccgcctcctgggttcaagtgattctcctgcctcagataataataataataataacaataaatacaaatacaaaacccaactatatgctgtctaccagaaaactactttaaatatagaatataatacctagggacagtatagaatagaatagaatagaatgaaaataa

SEQ ID NO: 230489 - DNA, 369 bp, Homo sapiens
ctgtgctctgtcactggcaagaacaggaaaaacacttggggcaagcaagccagccccactttcacacatgactcacacgactgaaggaaagaaagggcatccttctcaggctgtcactgccttcttttattacaattcttactttttataatattttaaataatattaaaggagatgtaagatttgtaagtttatcaaagagacatgagtttttaaatgttgagaaacacatttttctaaagatgcaaatcagccaggcgcagtggttcacacctgtaaccatagtactttgggaggctgaggtgagagggctgcttgagcccaggagttcaagaccagcctgagtaacacagggagactctgtcacta

SEQ ID NO: 230490 - DNA, 809 bp, Homo sapiens
gtccaaaacgagattctcctgagatctcagatgggcattggtcaataatagttacccatttctatttcatgagagttccttatgtggtttggattaaaatttgtttagtgacacactggcaatgagaaaaaaagtcaagagtcactttgaaatgtccaaaattaaagtacaatttcttcaggaaggttcagaaaggctgacattttaataaaatatcctatctgggcaatgtgaaatgagataacataaggaagagcctagcacactgctccctgggcatgcaaaatctagagtctttgttcttctgtgtattattaactcttttaacaaactacaagtatccagaagagaggtcatccttaaaactagcaatttctagattctaaaagatatccctgaaattacagattttcagagttctgtttccaagggagtttatgctttatgcttcaatttaatccctattttctatgatgaaaatattttatacttctctataaaacccagaatattaaaactaaaaccttacaatgaatctctgttgagaagtcaaaacaagtaagaattattaactgcatgtgagggaattacattatctgggagagatcattttatgtcagaattacaaggtcagtgaagtgttaagttctttcaaaatatttttacattctttatgctttctaagcctactgcttaagagagcttagaagcatacctttgataacaaacaagacattcataattttaaaaaaaaagactagttccatgtttcttatcctgcttcaaaaaaaaggaaaagagaagagaga

SEQ ID NO: 230491 - DNA, 975 bp, Homo sapiens
cctcagcctcccgaagtgctgggattacagacgtgagccatcaggcccagcctataatggaattcttattatcagattagcctttctgccttaaacaaccatgaaactgccctaatccccaagatcactgatgagatgtttcccacaatttctctgtctctctgctggcgacagctttccaattgcagcatagcaagctggaattctggcagagtagggatgccctgctgtgttgagaagagatcagagtgaagggctgccgaaaccgctgcagtccataagtcgtggccctggagagaatggagctgcttatgtgggaggcagagatccacaccatggctttctcatgagttcttagctgaaaactgggctgtacatgtgtagggaagactacctgagggttaccagagagaggctgctacccagttgagagcaaagcagataatagaggtcaggcagataacagaatccagagcctctacaatgtatcatccagtgtccttgacacaatctacaattcctaaacatacaaggaaacagaaaaatatgacccatagcaaaaacaacaatcaatagaagctgaccacaaggtggtccagatgctggacttagcaaagactttaaggaaattattatatgttcaaaattctaaaggaaagtgtgtttaaagaattaaaggaaaatatgtttaaataattaggccaggcgcggtggctcaagcctctaatcccagcactttgggaggctgaggtgggtggatcacctgaggtcaggagttcgagaccagcctgaccaacatggtgaaaccccatctctactaaaaatacaaaaaattagccaggcttgttggtgcgtgcttgtaatcccagctactcgggaggctgaggcaggagaatctcttgaacctgggaggcggaggttgcagtgagccgagatcgcgccagtgtactccaacttgggcaacaagagtgaaat

SEQ ID NO: 230492 - DNA, 457 bp, Homo sapiens
ggtcactcagcccgaggagaaactggacctcccaactccccacctacctgcccttctcgctaggtcattcagctatttgtctcctagttcaccctcatacacctgtttgccacgatggttttgcctttaggcttttgcacacgctattccccacctggaagactcttggtctcttttccagatcaacttctatttgtcattttttcctcaatattggcatcacttttaggagcctttccgatcttccaagaaaggtttaactgcccctttgacgtatatcccctattaatgtacttaacacattgcattgtaatcccgtctactcatctggttcccccaccagattgtaaaccctgggcagggtctgggttctgttcactgttttatccccacttctggctcagcacataatagctcctctgtaaatatcagctctatattgttccgaactcaacaa

SEQ ID NO: 230493 - DNA, 300 bp, Homo sapiens
ctaatatagaatttatttttttaaaaaaattattgagtgaagtttcacttcactgcccaaggatttccagaatatacccttccaaaatggctaatgagacttttccagacattctcgtactttaactagaaatgtttttcaatgcagggtttccaaatgtgcctatgcaaaatactttttgactacacataggtactggtaaaaggaaagatttttgttcacttaaactatttcgaacacatacaaatatgtaattattttccaaaataaaacaaccaaaagtcagtttcagacagtagg

SEQ ID NO: 230494 - DNA, 443 bp, Homo sapiens
ctgcaccatgtcctgggaatagctgctaccacttctggggcacaattctctctagtcctcacaatgatctcagaggtgacattattaatcccttttcaaggtgaagaacattcagctcagagaggttgagtggttcccccttgactcccagccagtaagtggcagggcctcagatggaaacctcacctgccctctccaaagccccagccctttctcaaacaccacactgtgtccctgggtccagagtcagcagctgctcagccgtgtgcaagcagcctaagcccagacctctttccccatcgacccttccccagccatagccattcactcggtcattcctttacaactagttactgcacccctgtgggccaggcgtgctggagacaccgcacgtaagacagatacagtcccggccctcacagagctgaggagtttgtctaaaa

SEQ ID NO: 230495 - DNA, 508 bp, Homo sapiens
aggtgggctggggctgctcccccaaccctactttgcttctaccacttggccattttcctctcctcagatggggcaccaataacaaggagctcacccttcccactcccagccctcctgctcctgccacccccccaggttctggttccatttttcctttgttcacaaactacctctggacagttgttttgtttttggttcaatgttccattctttgacatctgtcattgctgctgctagcagcgccaaatgttcatccacattgcctcctgttctgcccatgatcccctcccccaggttactcttcgtggagaagaggggctggggcatggcaggctgggtgactgactactcccctaggatgctgcagcagagagagcaagggggcccaaatccaccataaagcatgtaggggccacctgctcccccgggtctgtcagggaggggtagccatgatttgtcccagcctggggctccccctctggtttcctatttgcaattacttgaatta

SEQ ID NO: 230496 - DNA, 465 bp, Homo sapiens
cacacacacacacatacagaataaaagacttgagatgatatacaccaaaattatgtctctgagggctggaattaacaatttttctttaaaaatcttattcgtatttcctatttctatactataaatatatactgtttgattatagaaagaacaatataatttttttcaattaaaagaaagcatgacatttctttgtataggcacaccatacttatttgaccattattttactcttaaggtggttccctgttttttgataatgtgaacagtgctgactcaggcattctcacatacagatcattaatttctagtaccattatttcggttactattttggaagattaataagttctcaaaaatgagattgctatgtctatttgcgctatgtctatttgcatctgtgcagtttgactgcaccacaaagtacacttttaaagtgtacaatttaatacaattttatctgtc

SEQ ID NO: 230497 - DNA, 388 bp, Homo sapiens
cggggtccctcttctgggaagcatgggctgggacaaggcaggcgccggttttctgcatcccaaatgtcctggggcatgtgtcccttccttgctgaccgtgggtccgggccagagcgcaaggtccaaagccggcggcttggctccaccgccaggggcaaataccagggcgggatgcgtgctgcggggcgcccgggggctcccccttgggacttctagggtccaggggtccccgcgggcgcgccccaagccttctccctcagctccgggggcccgggcgcgcgcccatcccccagccccgcgtccctgcgcgagggccgggctgggggtggggtcgccgcgagctcggcccccagagttcccgcgctcaggcccaggaagcggcggccgc

SEQ ID NO: 230498 - DNA, 501 bp, Homo sapiens
agacctaaatttaggcctcactgactcctaccttgggcatgtaagcaccagttggatcagatacaccagggaaactgaggcccagaaagggatgtgatctgcccgattgtgcagaattcagagcccagctggaacctgaatgtcctgaccccccatccagtgccccccttcctactctatgctgcctctcgggtgacacacacagcagcaagtgagccctgcagacagagacattctagaacccaggcctgggaccagtgctcaggagccatactctcagctagattgccttcagcctgccaggaggaggagcagcccagtccagactgaaagcctccaaggaggaagttctaccggcttctccatgcctccaaacccactgtaccttgtgcattccatctggaattttcttctgttgaaaggaaggtgctgggtgggaggaggagggagaggatcaggaaaaataactaataaatactaggcttaatatctgaaaaaagt

SEQ ID NO: 230499 - DNA, 415 bp, Homo sapiens
gacatagagtctattttatctgatgttaatatacctatttcgacttgtttttgtttctgtttacatgggatattttcttctatcccttcattttcagtctatatgtgtcttattaggtgaagtcagtttcttgtaagcagcatatagttaggatattttttaaaaattcactcagccagtctatgtctttcaagtggagaatttaatcaattttcaatcaagattattattcatatgtgagaaattacttcattttgttatttgtttttgtttgttttacatatactttgtttctttttctctcactttttattattgtggtttagtatttttctataatagtaaaatttaaatcatttcaagtcttcatttgtctgctgtactagggagtattttaaattttttgtgttttcat

SEQ ID NO: 230500 - DNA, 270 bp, Homo sapiens
gccagatcaacaaggctgctaagggcaacccagatgtgtagtcaacctgtttaagagatgttccaataattagcccctcccactctccaatccttgctgagagccgttcttccatcagctttctttcaattcctataatacactaagccttttcctatcacagagcttccgcacatactcatctgtctctttaaaaagctttgtcctcaaatccttgcctagctaacacttagtcatgtttctagttatgctataaatgtcactcttcaa

SEQ ID NO: 230501 - DNA, 488 bp, Homo sapiens
tggcttcctgccctgagtagcctggaggagccttcagcaggatccggctttccatgcccccggatgggactcacctggctgtagcacagctgcactgcagagccaggttcagcttacagctgcattgtcccctcgccctgcccagccttcctggccttcttgtggggctgggctgagcagcccaaggaggtctcctgttacaggtcagggagctaaatccttgtttgcaaaacacagcctgagcttcattcacttccttctggccctgcccctaggaatgtaggctcagggagcactccccaggcgacctgtggttacggagtggtcagctgggggagaggaggtggagggtgtctgaccctgggctgggaggcaggtgcatttcggtgtcagatggggcttctgccctgacggcatctcctgtgccggtggtgggacgcctagacacttcccaaagaagaggcccctatgaacccagagttgcaaat

SEQ ID NO: 230502 - DNA, 294 bp, Homo sapiens
gatcatgtcatatgtattctacagtcagaaaattgttgaaaattgctaatctaaggaggtctaaaaggagaataccatctgtttcttgtattcatactttcccatgcctctttaagggtatgaccaggttgtaatgaccctttcaagggcaaaatatatgtgtcattcaaaaggaacaataccaagatttgatatgtgaacaagcacatgaattaagcaccaggaatgatcctcccttcaacatcagtccctttgttggcttccttgttaatgagggagcctctaactcaccac

SEQ ID NO: 230503 - DNA, 706 bp, Homo sapiens
cttagtattctggggaatggtccagattccccaaaagggaatgagctctgttgcaggaggctcactgtttataaagttaataatactctttcctttttgttttttagcttttattttttcccctggaaaatataaaatatgggtttaaaagaaacatcaaccttgagcccattttttggggttctctatggaaaggaagaggagagattatggttcttgatatggccaggtacactaagaaaacttttttttttcattctttaaaaatctaagtaaatattaacactagaactcatcatttgcatatttatttgttattaaagccccagaaaatgtatcttactgacttatgatgatgatgtatttgatgaatatgagtcaaaaattttgctaagccttatctcctcttctgctctaagaaaagagattgttgaaagacctgtgctggaagtagttgaaagcatatttttattgcaattaaattctcagtttttataaacaagggataatgttcaaacacagtggacagtgcattatggactatttttttaagtctcagtatgatattcttttctttcagaacaggaatgtttcacttacccgtagacgtttctgagttggccatatttatttctaaaacacaaagggaccctgcagtagacttatgcagatggcagactattttctttttttttttttaatttaa

SEQ ID NO: 230504 - DNA, 652 bp, Homo sapiens
cttagtattctggggaatggtccagattccccaaaagggaatgagctctgttgcaggaggctcactgtttataaagttaataatactctttcctttttgttttttagcttttattttttcccctggaaaatataaaatatgggtttaaaagaaacatcaaccttgagcccattttttggggttctctatggaaaggaagaggagagattatggttcttgatatggccaggtacactaagaaaacttttttttttcattctttaaaaatctaagtaaatattaacactagaactcatcatttgcatatttatttgttattaaagccccagaaaatgtatcttactgacttatgatgatgatgtatttgatgaatatgagtcaaaaattttgctaagccttatctcctcttctgctctaagaaaagagattgttgaaagacctgtgctggaagtaaatgttcaaacacagtggacagtgcattatggactatttttttaagtctcagtatgatattcttttctttcagaacaggaatgtttcacttacccgtagacgtttctgagttggccatatttatttctaaaacacaaagggaccctgcagtagacttatgcagatggcagactattttctttttttttttttaatttaa

SEQ ID NO: 230505 - DNA, 407 bp, Homo sapiens
aaagccgcccactggcgctgattcacactgaagtgtgacatgggccggtgatgcaatgtgtagaattgtttccacaaccgcctgaaggcagggcccacagcctcctccttgccgaagcaagcctctgggttcaggctctgtaacttccaaggccatgagagtggtcaggccctgcttggtttcccggcccccgatcacagatcatgctggaactgctggccccaacgccctgaggtgactggccctttcttcatggattccggtcacatctggtccatctttgtcagctggcctctgggaagaatgtgggctcggccacctggagcagttgcctggggagatcagaggagccctgaggggttggcagagcgccctcgtggtatccatacccccatccctgtagctga

SEQ ID NO: 230506 - DNA, 450 bp, Homo sapiens
ggttaggcgtgatttgttccgttcctctatggcctagctggtctttaacccccgccttcgattctgagtcagacagactccccagtccggcagcactccttggacagggcagcaagtgacagcagtgggtatacagccggagtcgtttcgtgcaaaaatcaaaaagaggccgggcacggtggctcacgcctgtaatcccagtgctttgggaggccgaggcaggcggatcacttgaggttagtagttcgagaccaggctgggtaacatggtgaaaccccgcctctactaaaaatacaaaaattagccgggcgtggtggtgcgcgcctgtaatcccagcttctcgggaggctatggcaggagaaccgcttgagcctgggaggcagaggttgtagtgagccgagatctcgccactgtactccagcctgggcaacagagcgagactccgtctca

SEQ ID NO: 230507 - DNA, 489 bp, Homo sapiens
ctggtaccagatcaccagattgctgagcaactgatgctaattttataattcaatttactaatgaggtaatgtgacaaatgtttaaaagctagtcatctgtagctagaaccaagtcatccaaggaagttcgtacctgctgtgtatttggatacaaatctctttgttcttgaccaaaatgaatctgttcaatttccttaagtaaataaagctctttagaccaacacaaggtgaaagaagaggtgaaaatgaacttccattcttttgcaaagaatcaaaatactaaataagcagaaaaaactaatgaaaagcttctgaatcaacttatggagagttaaaataattctgattaatcttaacttaaaattataagtacgctaattaattttgtatatttaacactgttttaaaactttgtcagtttaaaactttcgttttataatgaaattctatttattctatttaaattaaacttaaatatttaaacttaaa

SEQ ID NO: 230508 - DNA, 302 bp, Homo sapiens
atcaaatactttaatggagacccagaatcccagtccctcttatacaaacatcattgcatagcctccctctaaccaagagacagatagagccattcctgtgccctgcacctggcaggaaagccctgctggagcctgtggggagctggcgaggatgagccttggtgattctgccccagagcagggattctcagggagctccggacaccttccagggactgagatggagagtggccatactccgtcttggaaaggagaatactgagggcctctgaccctcagtattctgacccttctgacctctc

SEQ ID NO: 230509 - DNA, 829 bp, Homo sapiens
ggttacatgggagatactcagggaaaaatgagtaaatctccaacaggtggctttcaattcaagcataaatactatcttcaacttaaagaaagaagatttgaggtgcagtagtggggagttaaccagcaaaagcacattagacaagagtaaggtacgttatacagacttaagtccatgcattctccattgataagactcttcagtgatttagttatccttctcttcttggtgtcgagagaggtagcttttaaatggtgatttcctttatagatgtaaattttccttacacaagtaacttctactctgttttcacaacttcctttgttagcattttttttttcaaaataattagcttggaataatttttaagccaaagggacatattttggggttgcatattctggtttcctaccattatattttggggtggcatagtttggtcttatacactgtgttctactggcaatgaaaagagttcttgtttttcctccagcaatttgtcatttgttaaagagcttagcagttctaagagatatagaccagctgtgctatctttttgtggttttcagttctctagtatgttgagcatctttttgtaagtgtacttgccatctgtagatcttctttggtgaggtgtctgttcagatctgtgtgcatttttaattgggctgtttaacttattgtttagttttaacaattttttatatattttgaatacaaattctcagatctgtattttgcaaatattttcttcaatatgtggcttgtctttttgttctcttaacaaggtctcttccagagtataaactgtaaatattaaaaaaaaaca

SEQ ID NO: 230510 - DNA, 297 bp, Homo sapiens
ataatttaatttaattctggtgtaggaggattttgagggaatggaactgacattcactgagtgctttccgttgattaggccctgtgctgtgtgcactttatgtagtttatctcatgaaatctttaccatagccatgtgaggtagaaggtgggatttgacccatttcacagagaggaggcaggctctggaacgaacttagcgtaaggtcatagaataaaatagtagagctacaactttaagacagttggttctgaagcccgtgcttgatacaagtcacatgacctgtatcatatttat

SEQ ID NO: 230511 - DNA, 578 bp, Homo sapiens
agctcatttaatttcaaatgtagggatgattttattttaagtggctttcatttacaaaataacaatgttttacacaactgagccattttcctcattcagttctctcttgttattgcttatgcagaaatatttgatcaaatttacttattttattgtattataaaatattatgtaccaaaactcaaagattcaaatagataatttagttgtaaccctatttttttttcctttaccctttaggaaatttaaacatgtttttatcggacacaaaacccaacatgttaacgtttcaattccacttatgaaatgccattatttcataagctgcctattcaccctccacttctttcatgcaaattcttcttcctttctctcaaaaacgttatttcctttgcacagtctgtcattttcgcaggccaacccctagccacgtgcagtatttattctgaccattagatgtcaccaatctctttgtaagagcagctgtagatagacttgattcccggagaaacggactgataaatacataatttattaaatctaaaagtcaacaatatctgtgaagaatcatttagatg

SEQ ID NO: 230512 - DNA, 446 bp, Homo sapiens
cacagagaagaggcaccgaactccacctgaggagtcagcgaaggaggggacatcttagttaggacctgaagaacaggagttcttagccaggcacagggaaggcaaagataacagcaagtttcagaggcaagagagaggacaggacctttgaaaaacaggcatttggccgggcgtggtggctcacgcctgtaatcccagcactttgggaggccgaggctggtggatcacctgaggtcaggagttcgagaccagcctggccaacatggtgaaaccccgtctctactaaaaatacaaaattagccgcgcatggtggtgtgcgcctgtaatcccagctactctggagcctaaggcaggagaatcccttagaacccgggaggcagaggttgcagtgagctgagatcgtgccactgcactccagcttggacaacagagcgaggctctgtctt

SEQ ID NO: 230513 - DNA, 461 bp, Homo sapiens
cagaggttgcagtgagccaagatccgccactgggctacagagggagattccatctcaaaacaaacaaacaaacaaaaaaacacctaacaggatattttctccagaggaggcaaggttgacttaagttctgaaagatgtgtaggactatatcaagtggacaagaagagcatatgaatgcagaagccaagtcagtaattctcaacctaatccttatagaatgtcctggaaacttgagaaatgtactaagggctgagtcctacctcagaccaattaaaacagcatttatggggatgtgtcatgggtatcagtgtttttaaaagtcctccagtgaatctaatgtgcagccactgttgaaaacactgcacccagctattcttatttttattgacaaaagtgtttaggaatatgaatgttcctttgaccactgcttaaaatgcgtcttgtattatccaaaaaagcca

SEQ ID NO: 230514 - DNA, 780 bp, Homo sapiens
  misc_feature (25)..(26): n is a, c, g, or t
ccaggaaagaaagctaggtcgaggnngggtgttgatgaaagttggagaacaggattaagactgggtgggaactaagaatgacaggtacttttaacaatacagctgggatgctgttgatgacatgaatgaaccccactcttactgtagtcatttgctcaagattcaaagtcatgaaaaagagtagaatggaccaaacttaggtactaagagtccccagcctggcagtgaaaacagtatagttcctttgactttaatatggggaaacaggttcctggattgacgatctcaccaaaactatacacaatttttttttattttttctcagacctttcagggatgaatatatacaatttctgagaaagaaacctgagtacctttaggaagggaaaaggaatgctgaatatccccaaataacatgtcttacatgtttggtaagacttactgtaccctgtcctagaagatagaagatgccctgcccttagaagacaaagagactgtagagctatgccttctaaatcttaagccactcttcagataatggatcccttcatggtcagcccaaacatctcaagaacttttaatttgtaccgtttgtctttttttccatttatttaataccacaaattcactttattattatgaagccaatatctacatcttctcacaaagattctcttaagaaatgcagaactggccgggtgcagtggctcattcctgtaatcccagcactttgggaggccgagggtgtacccgaggcgggtagaacgcggaaatgggaac

SEQ ID NO: 230515 - DNA, 726 bp, Homo sapiens
  misc_feature (25)..(26): n is a, c, g, or t
ccaggaaagaaagctaggtcgaggnngggtgttgatgaaagttggagaacaggattaagactgggtgggaactaagaatgacaggtacttttaacaatacagctgggatgctgttgatgacatgaatgaaccccactcttactgtagtcatttgctcaagattcaaagtcatgaaaaagagtagaatggaccaaacttaggtactaagagtccccagcctggcagtgaaaacagtatagttcctttgactttaatatggggaaacaggttcctggattgacgatctcaccaaaactatacacaatttttttttattttttctcagacctttcagggatgaatatatacaatttctgagaaagaaacctgagtacctttaggaagggaaaaggaatgctgaatatccccaaataacatgtcttacatgtttggtaagacttactgtaccctgtcctagaagatagaagatgccctgcccttagaagacaaagagactgtagagctatgccttctaaatcttaagccactcttcagataatggatcccttcatggtcagcccaaacatctcaagaacttttaatttgtaccgtttgtctttttttccatttatttaataccacaaattcactttattattatgaagccaatatctacatcttctcacaaagattctcttaagaaatgcagatattggcttcataataataaagtgaatttgtggtatt

SEQ ID NO: 230516 - DNA, 368 bp, Homo sapiens
atctcaagaacttttaatttgtaccgtttgtctttttttccatttatttaataccacaaattcactttattattatgaagccaatatctacatcttctcacaaagattctcttaagaaatgcagaactggccgggtgcagtggctcattcctgtaatcccagcactttgggaggccgaggcgggtggatcacctgaggtcgggagttcaagaccagcctgacaaacatggagaaaccctgtctctactaaaaatacaaaatcagctaggcgtggtggcacatgcctgtaatcccagctactagggaggctgaggcagaagaatcccttgaacctgggaggcggaggttgcggtgagccgagatcgcac

SEQ ID NO: 230517 - DNA, 501 bp, Homo sapiens
ccccaccctcccatcccctccctagcccctgctccatccaccggtcctcctcgggctggcctcacctggggcagctctctgaggcctgcagggtgctgggggtgctggcagtttctgcgtcctgctcatgttggagccactgtgtgcaagggccaggcacgggcaggggctgtgtaccctgagctgcacagcctacacggcacctccatgtctctgaagcaccttctgcccatggaggtgacgccagcctgtggacttgccctcctgagactgtttgcagcaaaagccccggtccctcctgccagatcagctgcccacagaccctgcccgagcccatagtttgacctcagtgtctctcacacgtgcctgcaccccagtctgcagccacagtcatcccatacatgcgccccaacctcccgtgtctcccacaccctgtcccggccacggcctcagccagtgtccctctgcctggaaccgctgccccccagccccgtctccctc

SEQ ID NO: 230518 - DNA, 184 bp, Homo sapiens
agttcagtggttttatgctgtaacagctttttcctcctcctttacgttgtcaagccactttctcatggtttcatcttttccttcttgctttgtttctggagcacacgttttttacttttttttgattgccttctatttggttttctttaaggtggtgcatttaaaaagcagccccctcttcttc

SEQ ID NO: 230519 - DNA, 522 bp, Homo sapiens
cagttgacctaagctgaatttgtgtgcccaacttcttgttgtgccctgaagttcaaagagaaaaatgaatgataaacattatcattcaatgggcaaatgaagatatttctcatgctcaaatttgtaattaattatgaaaatacattgaaagtcataatgatacttctctctacatgcttttatctaggtatacaatagccatatgatgtttttaattccccatagatgatgaaagaagttatgcatccccaaataaaggataaacatctcttacaaggtacttacagggaagtgctgctctctatggagtggttgctttgcttgtttataaaacactctttttagattcttcaacactagtgtttgttggcatttagtgtgaatgatttaaaatttttacagtctcagtctttcctacatttggagaatgtagtcaatgaatatttcctgtataatgtgtactacccattgcttatctgggaaaggcaactagtaataaagtaattaactcctcaaaaaaaa

SEQ ID NO: 230520 - DNA, 467 bp, Homo sapiens
tcttacatttaggagatcaatcaagcttccatttctttgagcgaaatgaacactgcttgcacacaaataatggaagaaaaatcctggtattcccaaaacagccaccccaagcaacccaagagcctaacagcggggaggtcaggaaaatccaagaagttggcatagcagcccaaaggcagcaccgtgcagctctgaccaggccccaaaggcagcaccgtgcagctctgaccaggccccaaaggcagcacggtgcagctctgaccaggccccaaaggcagcaccgtgcagctctgaccaggccccaaaggcagcaccgtgcagctctgaccaggccccaaaggcagcaccgtgcagctctgaccaggccccaaaggcagcaccgtgcagctctgaccaggccccaaaggcagcaccgtgcagctctgaccaggccccaaaggcagcaccgtgcagctctgaccaggccc

SEQ ID NO: 230521 - DNA, 360 bp, Homo sapiens
cactgcttccttccctccatcctcttaatacctctcacccatttcagcttctaattacagtcaaaagaaacacagagcatattaagggataggggttctgtattattgagcagcaggcattattactgaagctgaggtctcttttcaacaaagatggctagattctccgtctaggctgtaaaagttgaattaatcattactgtgattgatatgttatatacatgtttgtaatcaaaacaagcaaacaggctgggtataatggctcacacctgtaatcacagtactttgggaggctaaggtgggaagatcgcttgagctcagaagttggagaccagcctggcctcccgtttcggcctccca

SEQ ID NO: 230522 - DNA, 392 bp, Homo sapiens
gatgaggaaaagtaattcccttttctgcaactaactgctcatgagacctcctgtgacagctgtgagcttcaaaggccagtcttccgaccccatgattattcccactatacagaatggcacagtgttatcatttgatgctttggtgaaaattctaaacttctaatcagaaagcatgatttgagcttggcactacccaacaaaagttggagaatcactcaggaaggttaacattcagagggaagcaggtgatgcttacaaactctgaagcaccacatagtctgttcaaaggcttcatatcactgatataaagcagtgggtaggatggcatctgcccatttttaaatacagatgcttaaggtttctcttaggacatgggtatcagggcttactta

SEQ ID NO: 230523 - DNA, 443 bp, Homo sapiens
agtggtggttgtagctgaactattctccagtgacccaccgtgttgaaggtgtgctgtagaaaaaaaaggctatagtaacactgaaaatgtctctgacactcaaactgtaagcacctctattacgggatattctgaggagaatgaggccacctcacacttcaaagatgattgtcaaccatttattaaactgtgaaaattgagaaattaaactttagcagagaaaaaagccacccagtgccccaaggaagactgtgaaacctcaacatcagtggtggagtctctaagacatttgaagtgatggaaaaagaactaaattcttttaagtctaaaaagctaaatgtttattttgctgtttaatttatagtcacatactggtaagtttccgggacatttagggtgcatttgtaatttttttaactataaaaatatgagtggaaaattac

SEQ ID NO: 230524 - DNA, 467 bp, Homo sapiens
agcaatagtagagttcaatgaggaggccagtcataaactggtcttgaaaggatacaaggatctggatatatgaaggataggataaataaaatatataatccaagaagtggaaatgtgcatggacagtataaagtgcagtaaaaaaaacaaaactgagagcaatgaaaaataaggctgccaagggcttgcttccaaagagccttgtaaactgttgtgagtgggcagggaggagctgctgatcagattgggtgagatgccttgatctgtactggaccatttttacttatgtgtgccaaaaggtcacacacaaggatgaatgctctttgcttcttctcttctaccactgaaactagatctgcagcaggactgaggccttcttggttcagctagctctcctctgctgctgatgctattttttcacctatcaggcaaagggatacacttttttcaaggcaggcccttattcc

SEQ ID NO: 230525 - DNA, 221 bp, Homo sapiens
cccctgggtaagtctgcactgaagttaggctagattcttgactgtcctttccgaaatccatgctaatccaactcactgtctctgtccctctctcgtccccattttgaatgttctcccttttattttacttttcctaatgttttccaagctttgggctttggcttggaaagcctatctgactactcaagcacatgttaatcttccccttctgtagcattttt

SEQ ID NO: 230526 - DNA, 484 bp, Homo sapiens
agcattttaatataaagcaggcttttttcttcattttcttatggaaaggaaagcattttcagaataatggttaaaatctgtcctttgtagatctgaaaatgtgagcaagtttcataccgaagtcaagatctactgaaagtgttagatgaatatataaggaccagacgctgctgtcaaaaataaaacagatgctggtgtcttgaatgcctccatgtgccaaagctgagttctttgacttatttttgtcattgaattaattggtatatctggtttaattggccaaattgtttttgcttaaatgttcacattttcattgttatattgatatactcaatatttttgagggtacagaaaataccaatattggcaaatttggtatttttgccaattttgtgtgttcagaagaaaaattgttcatttccagatcccagatttatggaaatttaaaaatatatagtaaagtgttggtttctccttatggtta

SEQ ID NO: 230527 - DNA, 434 bp, Homo sapiens
ctttccatgctttgtggcttatcactgagctgtccatggagattctacatggatcaaagatgaggctgtctgcaaactgaggattaaagaaaccagtctgagtcccaaaaactgaagaacctggagtctgatgtctgagggcaggaagcatccagcacaggagaaagatgtaagctgggaggctaggccggcctcgtcttttcacatttctctgcctcctttttatattctagccatgctggcagctgatcagatggtgcccacccagattaagggtggttctgactttcccagcccagtgattcaaatgttaatcttggcaaaatcctcacagatgcacccaggatcaatactttgtatccctcaatccaataaagttgatactgagtattaaccatcatatctatgttactaataaaccagctacaaatgaa

SEQ ID NO: 230528 - DNA, 302 bp, Homo sapiens
ggcaaatacagagcatctttgtctgattctaggccctcatgaccagaaagcctggaattactttgcaggttgacaatggttgaaatttcaggatccattcacttcattggctatgtttttatgcagaacaaaacctgaattgtgggctggtcttcggttggaagactttttggagggcatatagtggaggtttttttttccctcctccagagagcatgtgtaaaataagggactcattcattatgcagcaaatgttgtttgttattggcttgctgtatattcacctttaacttccaaacatc

SEQ ID NO: 230529 - DNA, 416 bp, Homo sapiens
atatataaaatatgattttgaaataatgaacttttaaatttaaaattataaataatttttaaaatgccttctatttaggtaaagaatcttcaaaacaaacttctcatatgatatggtttgtctgtgtccccacccaaatctcatcttgaattgtagctcccataattcccacatgttgtgggagggacccagtgggagataattgaatcatggggggtggtttcctccctgttgttctcgtcgtagtgaataagtctcatgggatggttttattagggatttcccctcttgtttggctctcattctaccttgcctgttgccatgtaagatgtatgtttcacctgccatgattgtgaggcctccccagccatgtggaactgtgagtccattaaactttttatttataaattacccag

SEQ ID NO: 230530 - DNA, 385 bp, Homo sapiens
tttaaataggacttgtccttcagggtcacaagtgctgtgctctgatctctgccagcagaggtgatgggcttagcttatatcccagctgttccttcaaaccctggaggacgtgttgccatccccatcaaagactcctttctgttccaagtgctttttcatttagctggagcggtggtagccaggccagcagtggactctataccaataccttcactccggccaaagcccgagtctaggaggaaatctggagaaggaactgcttccaaccctgacgctctgggccctgtgaaatgaccttgaccatctctcataggtaataactgcctctcactgcaagtcaaccctgtatcaaaaaaaggaaaagagaaagaacttctgttcttca

SEQ ID NO: 230531 - DNA, 564 bp, Homo sapiens
gtgtgaggatttcatcaaatctgtaaaggtgtttaaacagtatctggtctgatactcaataaatgctgaccgttagtcattgtggtagcagcagaagtcacagtcatatcatgattgttgcagacgtgcttcaggtattgttgttgttataataattctatggcgagaaatatgccctggtcttgtctttcacaaaatccattctctggagactgaagatctgttgaatttctttatcattttctcacagagaacaggctttctgaatagggagtcttcacatggcagtactacattgagcaccttttcagtctgtgcagacacatatggaaaagtgcccatgacaagtagacacactgtgagtaaacgcagatcccacaatgtgccattgtgaattcttccagtgctctgtaagcaccatgattgttacccagcctcccagccacaccagcatgagcactggcgtctgctgtatcatagttccagataacagaggccttatttttaaaatttaaaaggattgtactttttgtttttccaccgactgttttttgaactttaaaa

SEQ ID NO: 230532 - DNA, 351 bp, Homo sapiens
catttaactcatttgtgagggaaccagctggattggaaaactggttcaaggagcattggaggaaatgagtacaggtgctgaaaaaacagtgttagaataagattgctagatttgggtacaaaactggtgaatgtccttgtgagaatgtaggaataactgacacagtttctcctgcttatgtggactctaacatgcttctaacacaagatgtgtgggagttttcctcttaccctctattttgccagaatttgtgaaagaacaaccatgcccccattagctccttaggaattctgacataggggttaaaaacagttgcagttaacttgcttaggaatcatccctgcttagtgc

SEQ ID NO: 230533 - DNA, 487 bp, Homo sapiens
cgcggtggctcacgcctgtaatcccagcactttgggaggccgaggtgggtggatcacgaggtcaggagatcgagaccatcctggctaacatggtgaaaccccgtctctactaaaaatacaaaaaattagccgggtgtggtggcaggcgcctgtagtcccagctacttgagaggctgaggcaggagaatggagtgaacccgggaggcgcagcttgcagtgagcagagaccgcgtcactgcactccagcctgggcgacagagcgagactccgtctcaaaaagaaaaaaaaaaaaaaagaaaaactccctttaagggttccatctagttaggagtgaaagaacacttatggagcacctcatgggaggcaggaacttctaagtacttctaggaatgatgtctcacaggaggagtcatctccattgcacggatgaaaccaaattgaggtcttcaaggacctgcccaaagtcataaagctaaaatggaagagc

SEQ ID NO: 230534 - DNA, 476 bp, Homo sapiens
aaacatcagccaacactgaccaaagctgggccagaaacagctaaaataagttttaaatgattgaaatcattcagaataggttttcttactataagatatttaagctgaaaactcataaccatcacaacaaaaataaaactggaacatatccaaatgtttggaaattaagtaataacacttcaaatgggtcaaagaagaaatgacaattaagttagaaaatattgtgaagtatatgataattttaaaaatgcaatattaaaacttatgggatgtggctaaagctatgctcacaggcaaatttatagccttaaaacagatgtataagaaaaacggcagaaaaatcaatcacgtaaggcactgtagtggatgctatgatgttctgcccaaatgtccactctaagactgaagtgcccatgttcccagctgctagccatgttgccaagctgagcacttctccaggaattgcctctcctgaa

SEQ ID NO: 230535 - DNA, 602 bp, Homo sapiens
cgagccgggaatggcgtctcaggggcaagtgagaactggcctgagaaggggacggtaggggcagaagacgccaggctgcctcttggaccagcagcgccggcccagagccacacgactctctgtggcactggcgacaaagcggggaaagtttctggctaagactttcacggagaggcagttcgctggcgtttagtgtgggggctccccggggaagccggtctttggaaagtggagggtggaggtgtggcgttctcggggtccccgccgagtcgtgccaccaccccgtcccgctccccgagcactgccagcagccccaggcgagccggggctctccgtggggcagggcacgcttctgcccccactccactccacagtgagagcccacgtccgtgggtgcaacgagctgcaggagcaccggacacacggccaagatgtgtttttgggagggcagagcggttttcattgcggcattcttcgtttcctttcatcctggagagaggagagggcgggcgccttcccacgccctgggcgcacaggcagatcacttacctccccgcatggccgcgccgggaggtttgccccgcgcggagctcggcggccgc

SEQ ID NO: 230536 - DNA, 468 bp, Homo sapiens
cagtagggtacagtaatgtcctaggccttcacattcactcactgactcacccagagcaacttccaatcctgcaaactccatgcatggtaagtgttctacacagctgcgccattttaaaaatctttttttacgctgtttttactgtaccttttctatgtttagatgtatttagatgcacaaataccattgtgttatagttgcctatggtattcagtacagtcacatgctatacaggtttgtagcctaggagcgaagcaataggctataccatatagcctaggtgtgtagtaggctaaaccatcaagatttgtgttgtttgcaccatgatgaaatcagcaagcaatgcatgactgtagtttgaaatcagcccgagataaggccttcagtcctcagccacagaaccctggactttgagagcagactgacatcctttcctatttttcttgtttttcttttccttttttttaa

SEQ ID NO: 230537 - DNA, 274 bp, Homo sapiens
aaaacgtgaatgtctaattttattgtcttctaaccaactcccacccttctccccaccaaacctactcctctcgtaaacctaatctcagtaaacaagtaccccatctttctacttgttcggaactaaattttggtgtcttttacatctctaccctcaatttatcctgaaatcaatgacctctcaccacctccaccaattccactctggtccaagctacattatctctggcctggattagggcaacagttccggattggtatcccagcttctgctc

SEQ ID NO: 230538 - DNA, 630 bp, Homo sapiens
agaaccccatggcagtgaattgaaccccatggcagtgaatgaatagaacctcatggcagtgaatagaaccccaaggcagtgagtgaatagaaccccaaggcagtgaatgaatagaaccccacggcagtgaacagaaccccacggcagtgactagaaccccatggcagtgaacagaaccccacggcagtgaatagaaccccacagcagtgaatgaatagaaccccatggcagtgaacagaaccccacgacagtgagtgaatagaaccccacggcagtgaacagaaccctgtggcagtgaacggaaccccacggcagtgaatagaaccccatggcagtgaatagaaccctatgggagtgaacagaactccatgggagtgaatgaatagaaccccacggcagtgaatagaaccccacagcagtgaacagaaccccacggcagtgaggagaaccccatggcagtgaatgaatagaacccccatggcagtgaatagaaccccatggcagtgatcagaaccccacggcagtgaatagaaggccatggcagtgatcagaaccccatgggagtgaacagaaccccacggcagtgatcagaaccccacggcagtgaatagaaccccatggcagtgatca

SEQ ID NO: 230539 - DNA, 529 bp, Homo sapiens
agaaccccatggcagtgaattgaaccccatggcagtgaatgaatagaacctcatggcagtgaatagaaccccaaggcagtgagtgaatagaaccccaaggcagtgaatgaatagaaccccacggcagtgaacagaaccccacggcagtgactagaaccccatggcagtgaacagaaccccacggcagtgaatagaaccccacagcagtgaatgaatagaaccccatggcagtgaacagaaccccacgacagtgagtgaatagaaccccacggcagtgaatgaacagaaccccacggcagtgatcagaaccccacggcagtgaatagaaccccatggcagtgaatagaaccccatggcagtgaatagaaccccatggcagtgaatagaaccctatgggagtgaacagaactccatgggagtgaatgaatagaaccccacggcagtgaacagaaccccacagcagtgaatagaaccccacggcagtgaggagaaccccatggcagtgaatgaatagaacccccatggcagt

SEQ ID NO: 230540 - DNA, 688 bp, Homo sapiens
tgtactactaaccttacattagcaacaagtaaatggctttcttaacagtattttcctgggtatgaggatgagtatcctttcagttttatatcccacaaactataactactgtacaactgatcagcaaaaatattatgattaatatgttaactgaggaagtatatcctacaatttagaaagattaacatttaaaatagttaaaattattgaaagttttaacttgcccgaaacagtccctaaccataagggacaattaatgatgctataaaattctatctaacattcctagtctacttgttgttttggagggcaggctgccattcctgcctattttaatctttcgaaggtggtctctgctcccatttaaaggtataagcaattaagagatacagaaccctcagaactaccttctataacttacctaatttctaagcttaaaatgtaatctaggctgggcatggtggatcacccgaggtcaggagttcgagaccatcctggccaacatggagaaaccccatctctactaaaaatacaaaaattagccagacgtagtggcagccacctgtaatcccagctactcgggaggctgaggcaggagaatcactcgaacccaggaggtggaggttgtagcagtgagccgagatcgtgccactgcactccagcctgggcaacagagaccctgtctcaa

SEQ ID NO: 230541 - DNA, 606 bp, Homo sapiens
tgtactactaaccttacattagcaacaagtaaatggctttcttaacagtattttcctgggtatgaggatgagtatcctttcagttttatatcccacaaactataactactgtacaactgatcagcaaaaatattatgattaatatgttaactgaggaagtatatcctacaatttagaaagattaacatttaaaatagttaaaattattgaaagttttaacttgcccgaaacagtccctaaccataagggacaattaatgatgctataaaattctatctaacattcctagtctacttgttgttttggagggcaggctgccattcctgcctattttaatctttcgaaggtggtctctgctcccatttaaaggtataagcaattaagagatacagaaccctcagaactaccttctataacttacctaatttctaagcttaaaatgtaatctaggctgggcatggtggatcacccgaggtcaggagttcgagaccatcctggccaacatggagaaaccccatctctactaaaaatacaaaatacaaattagctgggtgtgggtggtgcatgcctgtatccagctatctcagggaagtataaagcgttgag

SEQ ID NO: 230542 - DNA, 553 bp, Homo sapiens
caagacatgccagcaactgcacggctacttctccatttagccactatcccagagaattctgccaccttccagagccaactgttttcccctttctctgcgtttgatagtttcctccttttcaggacagagaataaagggtccctgtattcatgccttcctggaaatctcagtgcaaggccctatcaggaggtttcctggagcagctaagggaacagctagaccacccaggaagaaatgacagaagcctacctgacttccaatctgcttgcttcatggtgtaatgggggcctagacagaagcaccccaaggacacttacaacaactgttctgccagctctagtccattggagaagatgtgccaacataccttctcaccatccctagagcccaaccttgctatggaaaggtcaaacccttaccattggccctgccaaggatccccagacagagaagcacaatggaggccataaattatggcttcttatcatggcctccacataacttaaactctggatggtgaatgaaatctggggccaagtcttaaagggtcagg

SEQ ID NO: 230543 - DNA, 367 bp, Homo sapiens
gcctactactactaaattcgcggccgcgtcgacggtgactttgcacactgaaaccaataatttatttaaatttttaaaaattgggaccgtgcgtggtggttcacgcctatattcccagcactttgggaggccgaggcaggtggatcacaaggtcaagaatttgaggccaacctggccaacatggtggaacccctgtctctactaaaaatacaaaaattagttgggtgcagtggcaggtacctgtaatcccagctactcgagaggctgaggcaggagaatcacttgaagccagaaggcggaggttgcggtgaactgagttcgcgccactgcactccagcctgggtgacagaacaagactccatctcag

SEQ ID NO: 230544 - DNA, 159 bp, Homo sapiens
aaataacacgaatacatgacaatagttatactatcaagcctggcctactctaaatggaacaatccagatgcttcctggactaggtcttgctctgtcacccaggctggagtacagtggcgcggtcatggctcactgtagccttgacctcctgggcttaag

SEQ ID NO: 230545 - DNA, 403 bp, Homo sapiens
cagtttatcttgaaatggtttctcagaaaatatgcaaaaatagtataaagaatttctgtataatcttcatccagattcctcaaagcttaatgtattaggctatttgcttttcattctctcttcttctctctctatatgcaattgacctttgaacagtgtaggggttgtgggggagccgactcctgtgcagttgaaaacctgtgtataactcttttctttttttctgagacatagtttcactcctgttgcccaatctggagtgcagtggcatgatcttggcccactgcaacctctgcctcccaggagaatggcgtgaacccgggaagcggagcttgcagtgagccgagattgcgcccctgcagtccccagtccggcctgggcgacagagcaagactccgtctca

SEQ ID NO: 230546 - DNA, 170 bp, Homo sapiens
acatagcaggactgatcaggctgcaaccatccagacggcaaaagaataaaaagacaaatgctaaagaaatgtaagacggtgaccctccacataactcacttctgggagtcatttgttgcctctttatttgtatgtttcccccaataaaagttttaattaaaaaatatcca

SEQ ID NO: 230547 - DNA, 122 bp, Homo sapiens
gggcgggaggaagaggggcgggactggggcctgactagtcgtcgccgtcttcgcggctgctatgaccagcgggcgaggcgcccttcgcagctccgcgcaacgctagtcgcggccgtgcgccc

SEQ ID NO: 230548 - DNA, 529 bp, Homo sapiens
ccacaagctcttgtattttggggagagagctgctgcttctgtttcatttcagtcttattttcttagaatctgagtttaagaaaatatattaacttgaagcttgagtgtttttactgctgagatgctgcaatctttgtaactatagatgtcaatcattctcaattcaggttttttaagtgccccttttgactcttttctttggtttgttaacaagataaaagatgtttatgtttataaaaatggcttactcagaatttaggcaaactcatcagaggacataaatctagtgataaggctgctggctttttaataatggccttatgtcttttgcaaccatatatcattgaaaagtcactttagaaagtgttctgagtattatgaattttgatgccaatctgtgactagtaaaatgaccagtcaagcaaattagcagattgcagtatcttgctctgttttgtatggttgttttgacattgctttttaccagaataaaaagcattttagtagaatatactccatatatgacttc

SEQ ID NO: 230549 - DNA, 450 bp, Homo sapiens
ttgttcagattcagtctttactttaaacgtatcgtatccataaagcatatgacttatgggaaatgatctgtgcggtatggtaccctggagttgatcctgagcagaaaaagtggaaaaagtgaggaaatccaaataaaatctgtagtttagcttattgtttcaatgttaccatttaatttttgatggatgctttatagttatataaaagaaacatatcataaatgtaatatgttaactttagaagatgttatgttatataacatgttaactttagaaaatgttatgcaatatgttaactttagaagatggacaaatatattattgttaggttgttaagaaagatggatgaatggtataaagaaactatgttttattgttaaacttttctgtaaatctaaaatcactcccccaaaatgtgtattttataaaataaattacacttgggcctca

SEQ ID NO: 230550 - DNA, 435 bp, Homo sapiens
ccttttcccctgaagactgagcatggaagactatgaaatggagaagttactaaaataccaaagtaattaatcttggctaagttacttaactgatttcctcatccaaacagttgggactagggtttcccttttgtgtaatttattgtatattcgtaacggttagatgtaattgtacatgcaaaagttcttcaaaaagtggatgttttcttttttgctttgtttacggggttatctggataacctgtaagagatgccaaggattttattagggggaatacttaggagagaaaaagggatgggtgctggggaaggctatcagcccttggtgaaggtataacctaaatggagaggtaggaacaacaggtaggaaagttgggcgcaagagtcttcaatctgggacggtttggcaagaggtcacaaccctgaaccaaagtc

SEQ ID NO: 230551 - DNA, 441 bp, Homo sapiens
tatattacagaattggctatcacatatataatatttttctatatagaggcataatgtgtaattttgaagtgactgattcctaagtgaaatgatctaaataaatttgtcagaatttataatgtctaaggcaaccatcacaaaatggtattttggaaagattattattatgaagagaatatattttcctccattatctctttgtttttatctttttaaaggtaatcatagcctcctggtgtcgcacatccatgggaataatgaatttatttggactagaaactaagacctgctggaatgtcaccagaatagaacctcttaatgaagttcaaagctgtgaaggcatgtttcttccaaaaatgctgtcatttgtaaacattcataaacatttaataatattatgattcacttttaagaattattgtaaaatactgttgttgattt

SEQ ID NO: 230552 - DNA, 321 bp, Homo sapiens
ctttatgttggacacacagttcttgctcttcctccagtactatgctttcttatctcaggaacttccattttatagattttctttctctagaacaggagtcagtaaaattttttaggagagggccagatagtttgccaattcctgatctaatcccactgcttaccgattcaaatgtcatgttctcattgaagcttttcttaatcaatgttaagtgccctgctggggacagtggctcacacacctgtaatcccagagatttggaaggccgaggcgggaggatggtttgaggcgaggaattcaagaccagactggacaacatag

SEQ ID NO: 230553 - DNA, 391 bp, Homo sapiens
tagtacaagcttgttatgtaacatatttgcttgaagttattttacttctaatatatgctttggttgttaagtaaaggagtttcttgaaatgcaaaaatttcactatttatacttaaatgaggaaacagccatttaaaactagagtgctgatggatggtagttttttaagttggagaaaacaaatctgcatttagtgatccagtgaaacaagacagttcatggggatcaatactcagctgagaccaggtgcggtggcgtatgcctgtaatcccagcaatctgagaggccaaggcaggaggattgcttttgcctgggatatcgaggctgcagtgagctgtgatagcaccactgcactccagcctgggtgacagagtgagagcctgtctccaaa

SEQ ID NO: 230554 - DNA, 187 bp, Homo sapiens
agcaagactgctgtattctgctttgaatttccctcttggcaatggtgtctagaacatgtctctaggcagaaagccagggtggtcataggccttatctagtttgttttcttgtttcagggaacacagatctacactaattgttgttcactatctggaaactgtcatgtattttgtctggttttgcagt

SEQ ID NO: 230555 - DNA, 304 bp, Homo sapiens
ggtgaaaatgacatgagttaatatttgtaaagtatatagagctatgcctgggatgcatgaagggctgtgccagtgtttgttcaatgaataaagcagacaagagagtgaggcaaagggagagacaggcaatgagagggggaggtggagggactcaagacagagagaaagagacagcagtcagatggcacagatagggaggccaccaggtgcacagaccgacaggaacagacaagcaggaaggagggggcaaaagcaaaagcctttaaaaattagagaaagagacccagtgaaaaagaaaagggga

SEQ ID NO: 230556 - DNA, 1119 bp, Homo sapiens
ggggtctccctatgtcacccaggctggagtgcagagatgcaatcacggttcactgcagcctcaaattcctgagcttaagtggtcctccctcctcagcctcccaagttgttgggattacaagcatgactaattatgcccagcaatggtaggtttttgttgttgttgtttacaaagttaaatgtcatcattttttatactgaaatatcttttaatacttttttttgaaatattactgattatttagaacccaaagtctggaccattgaacaagttcattccaatagtctctttcactgttaatattctctgatcctatgatttattcttctcttgactttctacatcctaatggaaatatgaaaatcaaagagcttaaggaaatgttgtggctgtatcaatcaggacagaataggttattctgcagtaataaaagaaactaaaatttttcagtggcttacaataaccaagtttctcatgttcaactaggatcaacaaaggcactcttattagtccctttgtaatgtcacaaaaacttcattttgacacatgctttagcaatcgggaactccccaaagtaaaacaatctttctgctcacatttcacagccaaaacaaatcacatggacattcccaaattcaacaggatgggagtatttcatttgcagggcggatcactaatatttatgaacaatagtatattgcatatatgagatcagaaataaaaactaacaggaaaaataaaagaattttcattggagtgaacatttgaaaaataagaaatgcgagtttaaatatataaagaaaaatacaatatatagagcttctcacctccatcctttccttcgatagcaagacattcaatttcttccaagtttgtatgatcatttctatgcatgtttttatgacttacttcatctaatgttcccataaataacatataatggaattttatgtagttacctttttctaagctttgaaaagtttcataaaactgctcactcttcttaaattttgaatattcaaagatcacggtatacaaataccatattaagtgctattttataatttacaaaaaattaaaatttcttatgtaaaatactttttttttttttaatctaac

SEQ ID NO: 230557 - DNA, 350 bp, Homo sapiens
gccaccgcgcccggcctagttagatgtcattttaaaattcaggtgatattttatgttattctattggttatgttcattgaaagcatccaaagaaaaacatgaggcaattaaaattaatgaatttcaataagtaaaatttaaaataatataaatatgaaaggagattgtaaaatattaagcattttataaaaacccagaattttgagttaggagagctggccttggctgggcaaggtggttcacacctataatcccagcactttgggaagccaaggcaggaggatcacttgagcccagaagtttgtgccactgtactccagcctgagtgagagagcaagaccctgtctctt

SEQ ID NO: 230558 - DNA, 432 bp, Homo sapiens
agtgaaagagtatacaaacactacaagcccatatcagtcaacatgagaaaattatgttttccaattaagttattgaaaaaactgtgtgtatgtatacaggtacatttccatttataaagaatatctaggtttgatttcagtcctttttcctgttctcccaataaaagtggcccctggccattcattttaaggtcagaaactcctgctgccccagggcagctcatatgcttctgttaatcatcttgattcaaatggaggagggagttaaacaaaccagcttaggacccggggcccaaacatctcgaatgcagccagctctgttttctctgtcagctttgtcctaacagcgaatgaccacttaatgcattgaaagcaaaacatcattgaaagggggaatctgcttttgaggacagggaaagaaaatgaaaatat

SEQ ID NO: 230559 - DNA, 245 bp, Homo sapiens
accaataaatcaataaatcctcattgtaatgtgtaaactcccatctctgtgaagtagttaaaagcaaactgtgaatgaacacatgaatccaaaaaaagtatgttgtgattatattgactctgaaaacgtttgaatttcatagaatacatcatttatcgtgtagtataaattgtttgtactattgctcataattttttgaataatgaatccagtgaatagtaaaataataaaaatgtttgcatcct

SEQ ID NO: 230560 - DNA, 620 bp, Homo sapiens
aagtcactggtgacagtgtttcttatgtgagaatggtgttatggataggtacgaaaacgtactttttagaatatgcttctgaaacatttagcagggatgtgctgtgatatctgcaaatcgctttcaaatggcatagcaaaaattgtgtgtgagtatacacagagagggagaggagggaaacgtggcacatgttcatgattgatcagtctacatgaaggatatatagaggatcattctttcagtttttctgtagatttggaattttttgaaataaataaaacatttgaggcaaaaatgtcactggtacatggtaccaatggctcatttttagtcaccttactcttaaatgtgcttcgctctcccagttttctgagaatttatttcaaaaggctagaaattgtgcattatttcagtttttactcgtttcctctttcttcccttcaaagtattttaggattaaattgtgtagactgggcacagtggctcacacctgtagtttcagcagttttggaggctgaggcgggaagactgcttgagcccagagctttgagaccagctgggcaacacagggagaccccatctgtacaaataattagccgaatgtggtggcacatgcttgt

SEQ ID NO: 230561 - DNA, 401 bp, Homo sapiens
ttctagttcttacagaggcagagagcatgctgttcaggcgcagatgctggcgttggacacacccagatgtcagtgtgaaaagaaaataaaattccgggaccccaaactcaatacaccaaagggaaaaggaaagcttggaagctgagtcacacaaaaaatcggtcttttgtttctaaatagacagctacaagataaaaggacacatgtctctccaggtggcctccctcaccttgacagtgtgaattaacagcttatcttcatggacatgggacaagaggagactggaaatcatctcccacaccaccctctccaagacaaattcatatttaacttctacttctgctctgttgactttatcctatgtaaagtacagatttactgagcacgagacaaatgcataa

SEQ ID NO: 230562 - DNA, 356 bp, Homo sapiens
cagcctgattggaggaaatggaatatggagggagtagtatcaaagaaggttaaatataggccaagtgcagtggctcatgcttgtaaacccagcattttgggaggccgagataggtggatcacttgaggtcaggagttcgagaccagcctggcgaatatggtgaaacctcatctccaacaaaactacaaaaaattagccaggcatggtggcatgtgcctataatcccagctactcaggtggctgaagcaggagaatcacttgaacctgggaggtggaggttgcagtgagccgagagctgagatggcaccactgctctccagcctgggtgacaaagcaaggctctgtctcaaaaaaaa

SEQ ID NO: 230563 - DNA, 389 bp, Homo sapiens
ttgaacaagggaaccccttcagcttcgaatgaccattaccgttgatgatcccagaagttccctttccaagcagtgacccatggacttgtgtccctcgtgtgataacctgcactacacacatatcctacaagtgtccatagtggttataagctgccacagccatacagatctgagagccagaggccttcaaaccagctaaggctctgaaacacttcaactccacttaagaaaacaaatcggagcacatccgtgatcccacaaatgctaatttgcttgtcacacatcagaaacccaggaaggcacagaatagatgctctcttactggcttataggttgggtactttaaagttggagacgtttaaatcagagataaacctattgtaacaata

SEQ ID NO: 230564 - DNA, 178 bp, Homo sapiens
ggaccccaggaacaatccattttctgctgttgtaggtcttttctggagctgacttgaagaaaagagtacatctctttaccctgctgtttgtccaagagtgatacatttatttggggtaaacttaaaattaatttattgccatttaaatttctaacgatggaatattagggagccaaac

SEQ ID NO: 230565 - DNA, 397 bp, Homo sapiens
actttcagtctctgcttatccacccaaactttcttaagatcagttttgctccaaatgatgtggcaaagcctttgatcagttgtaacttgaacagccttttcaaaaaatctgatattggctgggcatggtggctcatgcctgtaatcccagcactttgggaggccaaggtgggcagatcacaaggtcaggagttcgagaccagcctggccaacatagtgaaacctcgtctctactaaaaatacaaaaattagctgggtgtggtggcagggacctgtaatcccagctacttgggaggctgaggcaggagaatcacttgaacccaagaggtggatgttacagtaagccgaaatcgtgccattgcactccagcctgggtgacaagagagagacttcgtctc

SEQ ID NO: 230566 - DNA, 379 bp, Homo sapiens
gctaagttcattaatcccaaaatggcaaattaggaagtaggctcttttagcaacgaattacaattaatcaatgttccctgtggcaaaataaccttactttattttataattcagttaaactaaaaattttaatctttacctgatcaatcatctttatgaaaagtcaactattgaaactgtatgtcctgaatttggttttttacttctgaagatttaaaacaatatcaatgacctctacagcaaatattttcttcacatctcagggattttcctatatttaaattgctccttcatttactaacttctaattcttttttgcaattacctttgttactcaaattctcagtttcaatgagacaatttttagatgcttcaaata

SEQ ID NO: 230567 - DNA, 385 bp, Homo sapiens
cacccctttacgcaggcatccctttacgtggcatgtctcacttaagcctcctaaccggaggacgattacgtagggacgattatcttccccttattacaggcaagaaatgacggttccgaggcggtaatccgcaggagccggcactgacggagaccgtccacgccctgcagccccgccccccgcccccagccccccgcccccagcctcccgcttgcatcccagtgtcttcagtgccagtccgccggccccatcccccgcggggttcctgcgcctcccggccctgccagagcccggggtcggagggcaagaagggccgggaggcccgggggtgcggagtgggatgggggtccgggccctcggtgccagcctgagctcgaggcggccg

SEQ ID NO: 230568 - DNA, 198 bp, Homo sapiens
agagccacccttttattccttctgtttcaaacactaaatcctaacttgacctgacaagtacctacttatccttcaggtctcagattttatcccttttgggaagtcttccaggaccattccaccattcccctaacactcacatatacacctccttcctgtgaactcccatgacatgctatacttcctctatcatagaac

SEQ ID NO: 230569 - DNA, 266 bp, Homo sapiens
gctgaatgatattccattctataaatacacctcagtttctttatccatttacttattgaaggacggttgctttcaagttttggcagttatgaataaacctactacatatttgtatagtttttctgtggagatgttttcaactcatttggatatgtgccaaggagtgcaattttctctgtcatatagcatgtttagtcttgtaagaaactgccaagctgtcttccaaagcggctgcaccatttattttatttatatatattttttga

SEQ ID NO: 230570 - DNA, 206 bp, Homo sapiens
ttcccccatctccaactactcccccgcccccgctcgccaccaaagcaccagctcagacacagacatcacagagctttggagctgggcacggtggcttgcacccctctcatcccagctatttgctagaccgaggtggcaggatcgctggagcccaggagtttgagaccagcctgggcaatatagcaagaccccatctcttaaaaaaa

SEQ ID NO: 230571 - DNA, 567 bp, Homo sapiens
tttgcatccccagggcctagcacagggctcggtacacaggaggtgcctggtagaagttatgggaccaaaatggcagagatggggctccaagcctgtgcttgagccatcaggtatgtacgtttcagctcatctgttttgagccaagcccctaggctgcactttactatagactccacctgaagttcacccaagtctgtgctaccgaaaaagtcagagcccggagggggagaattctccattattctcagagtgctgaccccatgtgcttcccaatggctcatcccatagatggggctccataccccaggctctcttcccttaggaaacctttcaaggaaggccgtttgattgtgtttctttctcccctaataattctccccagctctgccccagctgccactgccactgccacagctgccgtagaggtgggagctgtgccttcagcatcctccaagtggctgctccaggcctcattcagagcaggtgtccctgtgtcctctgcctccagctgtgggtttccaccaagcaaagtcacaggctttacacaccccttcctcccacagccca

SEQ ID NO: 230572 - DNA, 460 bp, Homo sapiens
tgctggattttgtcaaatgcattttctgtgtctattaatatgattatataattttgctttataaaatattttaatatgatatatatattcattttttgaattgatttaatgtttaaagcatgtgtttaatgagtctcttatcatgatagcttaagaggtcatgaaaagatctaactctactgtgacatctctgatgttactaatggattgtgatttgtgtttccaaaattaatgctaaaattggttctgtaaactcatacctttgatacaaatgaataatttaatctgtgaatatttttacccacattttaaaaataccacaattggcattttcaaagatagatgagatgcttttaaaaaacttttctttcaagttttcaatgtcagtctatgtccacacttattagattaatatatttttttctaacaatatattaaacaatatttatattaaacaata

SEQ ID NO: 230573 - DNA, 153 bp, Homo sapiens
atccccctgtccagacagcagccaccactgctctctagctctttatgctgctttgtatttcatcagcgctcttggcactatgtgatgcattaaatacccatatttgtgttgtgtatctgacatgtatcttcctattaaaatatcagcaccaca

SEQ ID NO: 230574 - DNA, 463 bp, Homo sapiens
aatatcaatattagaaaaacaacaaacatgaaactcgtcccctgatacttatcaggagagtttgcctcaatattattcctctccatgatctagtgttcaaaaaagaagtactggttgtttttatatttgtttactttgcaacgcaatgcatttgttcaaatccaagcagaatctacattttctcttttgtttcagtggctaaccagccaggtaaactaattgttctctgctattaaatcaaaattagagttaggaataaaagccaaagtagcatagttaacaaaaacccaccgacgtttacagtcattacatggcacagaagaacctatggtttattaggaaatgtcacctgccagaagctaacatttagaccaagtcttatatcactgtcctggccaaactataacaaagcgaagaaattgcttaagcaaaaacaaggacaataaaacaaaggttttctaaa

SEQ ID NO: 230575 - DNA, 611 bp, Homo sapiens
agttatttatagcaatgcaagcaaggactaatacaaatgtcaagaatattaacctctttcaatcaagtagaaaatcctattaattaatagatgtgtctgctgttatttaagatgttgctttttaacttatttttagttcctatattttcttgttaatcactaaggacattgtcaaaaccatggcaggtcttggttttggacctaacagaaaactggtaggtccatgacacaagttcatcttttccaaaagaatcaaattcaggtttcattgatttttctcaattgcatttcttactctattttatttatttccaccataatctttattatttccttccatctgctgtttggcatttagtttgctcttctttttccagttttgtaaagtggaaggctaggttattgatttgagacatttcttctgatttataaatttaatgctatcaatttccctcatctctttgctaaggcatttgaggctgtgaccttctcagaaagtcgtccttcagtgttgacagactctgtagactttgttgccatgaaaactgtacactttgtcaaagagctggtgtggtcttcctggagattaaagctgagattttagtcatgct

SEQ ID NO: 230576 - DNA, 397 bp, Homo sapiens
taggaaggggcagcctagccagtccaatcccttgctggttactcatggagtcagggtaccaaatggggataccagaatagatgatcaaaaaaatttcctgacatcaaagtctgcactattttgatgggttggatggaggagtagataataaaaaaacagtgagcctctgaatggaccaagaaaatatcaccacttaggaagggaaaggcaaagaaaagagcagcttaggaatgttgaagccaagtgagtgatgaacaatccttttctatttggtaagaagaaaagagagtagaagaacactggaagcttaaaggaagaaaaagaatgaaggaagaagggaagaaagggagggagagaggaaggaagacagaaggaaaagaaaacgaaaaagaaaaag

SEQ ID NO: 230577 - DNA, 186 bp, Homo sapiens
tgttggattttttttaagaacagtgcatttttgaatgcttttgaaaaattgtagtaaaatacataaaacaacatttaccttgtaagcattttaattggtacaattcagtgacattaagtacagtcccagtttagtgcaaccactgttactgtctagtttcagaacgtttttgccccagatggatac

SEQ ID NO: 230578 - DNA, 1634 bp, Homo sapiens
ccaaaacaacggagttaaaagttgtgaggaaaaaatgttattaaatttaaaaatgaaaaagcatgaaccaagagcaacgtttagagaaggaagaggaggcggcgaggccggggatttgagggggcgccgggaggccccgctcccgccggaggcaacagaaccgtagcgagccaacggagggagaagtggagttagtgtgaggaggaagccccggatcccacccctaaccccccttcgcctcctctgaggatccaataaatcaaaaggcgaaatgaaacaaaataaagagaagaaaaacgctaataatcagcacgagaacgccgaggactaggaaagactagggccagtgcctccccgggggcagggagcggagggtgggggggcgaataacgtgaaagttaccagaaacattatttagcagcggattccctgcgtccttgtcaatttcagagacaaaacaagcagcccaggctagtagtctaggcggcggcgcagcggctgcggcagcgcggccccagcggcggccccggcggcggctcctacgcagcccgtgcccgccccgagccgcgcgagccacggcggcagcggcgcagcagcggcagcaggagaaccgggggaatcgcgctgctggggtaaaagctggagcgaggcgaaagcgtgtaacgattgcacacgcacacacacacaccactcacacgcactcgccgcccgcccgctcgcacagcgctggaacacgcgcgcccagacacgcacacacgcacgcacacacactcgcacacacgcagaggcacgggagggaaagaagccgatgaataattttgctattttttaaaatactggccgccatcatcaagcagcgagcagcagcagaagcgttgaagggagaggaggcatcgggacaggcccctcttaggagaggatttatatctagttggaaaaaaaaagaaagaaaagaaaaagaagaaaaagaagaaaaaaattgtcaagcccccgaactgaaggttacgagcggcccgtcagcagcccacatgtaaccgaactgtcgtgtttcatggctttttgccactccagctgtcaatcaaagcccggaatgtcaaggtagtgaatgaatgatggttgatgatgatgaagaggaggaatctttcagacccgtttttttcttccagtaaaactccgcgaggggtttctgcttcttgaattttttcctcccccctccccccttttttagctttgcccccgcggtatctataatacgatcctctctctttaaagtattgttcaaagaaagcagtgagaaaaatcaagaaaaaaaaatgaatagtttgcaaaaattggacttcctccccccctttcctggtaggtattttgtctctccctctctctctttctcgctcgctcgctcgctctcactcgcgctcgctctctcgcgctcgctctctctcgctctctttctctctctgggagatgagtgagtgtcagtaggtgttggcaggttggctgctgcctggcttattgaagagcctcagtttggcggcgcgggtcggcggcgggagaacgaaatgacggaacccggaagtcgtggtggccatagcccgtcgtacggcggagacacatcccgggagtggggagcggga

SEQ ID NO: 230579 - DNA, 570 bp, Homo sapiens
aatcattctcattaaaagatactaatcttccttcccttcagtgtgttagctcttttagtttgttagttcacgtgtgaaattccatggaaatctataaaattggatggaatggctctgttaggaatagagagaatttgttccacgcataatagagcccgtgtgtcagaagtcctttaactttgtgacccgtcctaggtgtaactcaaagggacacagcaggctatgtcacctgggtgcgttttgtgccgtgacaaaaagctaatcaccttcagttataaacagtagctacctcagcatcagtcccctgttttgtgagcagtgggagatattgtcctacaggagcttacagagattggcaactcaaggatccatcactcaaaacagatttcgattgaaaacattgacggaaggatatattttttctatctgcccaggaaagtggctttctggaagggtgcacattgcaggagaggccaggtagattatatcagtaggctcctttccctagcagaccacacaaaatatggggaacaaatttgtttatctgcatatgcatacccgaaaagcaaa

SEQ ID NO: 230580 - DNA, 406 bp, Homo sapiens
agcccctttgatgtcaagttcctctaactcttttgaggccagaattgtgagaacaggaagcccagagtctatgagtggttttgggggggtaatggtatgtatggccactcttgctaccacccctagtatctcgaatgcaagtattctaatcacagcactttgggagtctgaggcgggcagatcacaaggtcaggagtttgagaccagcctgaccaacatggtcaaaccccgtctctactaaaaatacaaaaattagccaggcatggtggtgcgcaattgtaatcccagctactcaggaggctaagacaagagaattgcttgaacgcgggaggtggagattgcagtgagccgagattgcaccactgcactccaacctggtcaacagaacgagactctatctcaaaaa

SEQ ID NO: 230581 - DNA, 402 bp, Homo sapiens
tggaaacccagctttttggtcagccgtcttgtgatttggctgggcctggtttgtgggggtcgctctctgaggttgggtagctctttggagaagattatctgggaactcccatccttatcccaaacatacaccaaacctgcccccatccaccattatggaatttagtaccagagcatccttgcagattagttctcattttctctctttgtgagcacacacacatcaggtagaggttccagaaacccagctttaggacactgttcacatatcacaggaggagcaaggacatgaatacaagagagctctttcctgaccagcagtgggaggtggttgtactatctatttatttgtttatttatttatttattttttgagatggagtctccttctgtcacccaggct

SEQ ID NO: 230582 - DNA, 425 bp, Homo sapiens
tgataactttgtgtgagcatgaaaatcgaatggggaagggagagctccgtcttgtgatttggctgggcctggtttgtgggggtcgctctctgaggttgggtagctctttggagaagattatctgggaactcccatccttatcccaaacatacaccaaacctgcccccatccaccattatggaatttagtaccagagcatccttgcagattagttctcattttctctctttgtgagcacacacacatcaggtagaggttccagaaacccagctttaggacactgttcacatatcacaggaggagcaaggacatgaatacaagagagctctttcctgaccagcagtgggaggtggttgtactatctatttatttgtttatttatttatttattttttgagatggagtctccttctgtcacccaggct

SEQ ID NO: 230583 - DNA, 662 bp, Homo sapiens
aattaaatgaagacaaaggttgtgattattacagtaaatgaaaataggtttttatctttaaaatgtagactcaaactgcaaagctaatgatatgctatctgcaaaatattcctattttgtaaataaataaaaccatagatttaaagaagaaagggcacagatgtactggggagacaaaaataactgatccgttgggtgtataccatgtgccaagcaattttcatatactcatttaacatgacatatctataattatatgaggcagatattattaacctcagtctatagatgagaagactaaagctcagagggattgctaaaaactagtaaataaattatggaaccatgatttgaatttagatttaagtctgactgaggcatgttcaaagacactacactgcctctccagaaatcaggagtagcaatattaacactggacaaagaatttaaagcaagtaaaaaaaaattaagagaatttcatattaataacaagtataatgcacaataaaactgtaccaaatgacataaaaatgcataatgaaatttattagaaattaaaaattaaagggcatagttacaattattgaggaattctcatagctctgccttatagatcatgtaaacaaacaaggtcatagaggacttaaatagcaaagcagaaa

SEQ ID NO: 230584 - DNA, 477 bp, Homo sapiens
cttttgccccatgtccctaggactggcccacaattcagactggttaccaagtacctagtgtataaaatagtaccctttactctccctgtgagctgccttgcctgatctcggccacatctgaagaatcaacatacatataacctttaggttggcttacatttgccgtcatttaacccccaggtccctcaccccaagcttgtgagctgggtggggtccatactacaagcaaatattatctaaataaacagaacttggccaggctcagtggctcatgcctgtaagtaatcccaacactttgggaggctgaggcaggaggatcacttgaggccaggagttcaaggctagcctgggcaacatagtgagatcctatctctaccccccccaaaaaaacaggaaataataataaataagaaatttacaaaattaaaaaattagctgggcgtggtagtgtgcacctgagtcttagctactggggag

SEQ ID NO: 230585 - DNA, 154 bp, Homo sapiens
gatgatgggaccccaaggcttctgaacagatgctgcctaagctccaaacctcattttctagtctctgcttacctatatttctaagcttttatttatccctctttcttctattcctgatttcctggttcctaaaacccttggctttgggatcatg

SEQ ID NO: 230586 - DNA, 1924 bp, Homo sapiens
agcggggctggctgagcgcgggcgagtgtgagcgcgagtgtgcgcacgccgcgggagcctctctgccctctcctcgcaccctgctcagggcatctgaagagcctggaaacgtgaacaggcttgaagtatggcatgttgcaaagatggtttctgccaagaaggtacccgcgatcgctctgtccgccggggtcagtttcgccctcctgcgcttcctgtgcctggcggtttgtttaaacgaatccccaggacagaaccaaaaggaggagaaattgtgcacagaaaatttcacccgcatcctggacagtttgctcgatggttatgacaacaggctgcgtcctggatttgggggtcctgttacagaagtgaaaactgacatatatgtcaccagctttggacctgtttctgatgttgaaatggaatacacaatggatgtgttcttcaggcagacatggattgacaaaagattaaaatatgacggccccattgaaattttgagattgaacaatatgatggtaacgaaagtgtggacccctgatactttcttcaggaatggaaagaaatctgtctcacataatatgacagctccaaataagctttttagaattatgagaaatggtactattttatacacaatgagactcaccataagtgcggagtgtcccatgagattggtggattttcccatggatggtcatgcatgccctttgaaattcgggagttatgcctatccaaagagtgagatgatctatacctggacaaaaggtcctgagaaatcagttgaagttccgaaggagtcttccagcttagttcaatatgatttgattgggcaaaccgtatcaagtgaaaccatcaaatcaattacgggtgaatatattgttatgacggtttacttccacctcagacggaagatgggttattttatgattcagacctatattccgtgcattatgacagtgattctttctcaagtttcattttggataaataaagaatcagttcccgctaggactgtatttggaataacaactgtcctcaccatgaccacactaagcatcagtgcacgacattctttgcccaaagtgtcctatgctgaccgccatggactggttcatagctgtctgctttgcttttgtattttcggcccttatcgagtttgctgctgtcaactatttcaccaatattcaaatggaaaaagccaaaaggaagacatcaaagccccctcaggaagttcccgctgctccagtgcagagagagaagcatcctgaagcccctctgcaggatacaaatgccaatttgaacatgagaaaaagaacaaatgctttggttcactctgaatctgatgttggcaacagaactgaggtgggaaaccattcaagcaaatcttccacagttgttcaagaatcttctaaaggcacacctcggtcttacttagcttccagtccaaacccattcagccgtgcaaatgcagctgaaaccatatctgcagcaagagcacttccatctgcttctcctacttctatccgaactggatatatgcctcgaaaggcttcagttggatctgcttctactcgtcacgtgtttggatcaagactgcagaggataaagaccacagttaataccataggggctactgggaagttgtcagctactcctcctccatcggctccaccaccttctggatctggcacaagtaaaatagacaaatatgcccgtattctctttccagtcacatttggggcatttaacatggtttattgggttgtttatttatctaaggacactatggagaaatcagaaagtctaatgtaatttcgttgctatagtagtttgctaaaagatgatgaaaatgcagaatgtctttttaaatgtttttaaatataaacaaatattctttactaaaataaaaactctgtgtaatttttcc

SEQ ID NO: 230587 - DNA, 860 bp, Homo sapiens
agcggggctggctgagcgcgggcgagtgtgagcgcgagtgtgcgcacgccgcgggagcctctctgccctctcctcgcaccctgctcagggcatctgaagagcctggaaacgtgaacaggcttgaagtatggcatgttgcaaagatggtttctgccaagaaggtacccgcgatcgctctgtccgccggggtcagtttcgccctcctgcgcttcctgtgcctggcggtttgtttaaacgaatccccaggacagaaccaaaaggaggagaaattgtgcacagaaaatttcacccgcatcctggacagtttgctcgatggttatgacaacaggctgcgtcctggatttgggggtcctgttacagaagtgaaaactgacatatatgtcaccagctttggacctgtttctgatgttgaaatggaatacacaatggatgtgttcttcaggcagacatggattgacaaaagattaaaatatgacggccccattgaaattttgagattgaacaatatgatggtaacgaaagtgtggacccctgatactttcttcaggaatggaaagaaatctgtctcacataatatgacagctccaaataagctttttagaattatgagaaatggtactattttatacacaatgagactcaccataagtgcggagtgtcccatgagattggtggattttcccatggatggtcatgcatgccctttgaaattcgggagttgcctatccaagagtgagatgactatacttgacttgattggcaaaccgtttaagtgaaccatacatcaattacggtgaattatggtatgacggtacttcacttaaacggagatgggttttttatgataaaccttatccggc

SEQ ID NO: 230588 - DNA, 1746 bp, Homo sapiens
caggctcgtgagtcgtcctgtgactgtgggtatgctaaatgatgcgccgaatttaaacgaatccccaggacagaaccaaaaggaggagaaattgtgcacagaaaatttcacccgcatcctggacagtttgctcgatggttatgacaacaggctgcgtcctggatttgggggtcctgttacagaagtgaaaactgacatatatgtcaccagctttggacctgtttctgatgttgaaatggaatacacaatggatgtgttcttcaggcagacatggattgacaaaagattaaaatatgacggccccattgaaattttgagattgaacaatatgatggtaacgaaagtgtggacccctgatactttcttcaggaatggaaagaaatctgtctcacataatatgacagctccaaataagctttttagaattatgagaaatggtactattttatacacaatgagactcaccataagtgcggagtgtcccatgagattggtggattttcccatggatggtcatgcatgccctttgaaattcgggagttatgcctatccaaagagtgagatgatctatacctggacaaaaggtcctgagaaatcagttgaagttccgaaggagtcttccagcttagttcaatatgatttgattgggcaaaccgtatcaagtgaaaccatcaaatcaattacgggtgaatatattgttatgacggtttacttccacctcagacggaagatgggttattttatgattcagacctatattccgtgcattatgacagtgattctttctcaagtttcattttggataaataaagaatcagttcccgctaggactgtatttggaataacaactgtcctcaccatgaccacactaagcatcagtgcacgacattctttgcccaaagtgtcctatgctgaccgccatggactggttcatagctgtctgctttgcttttgtattttcggcccttatcgagtttgctgctgtcaactatttcaccaatattcaaatggaaaaagccaaaaggaagacatcaaagccccctcaggaagttcccgctgctccagtgcagagagagaagcatcctgaagcccctctgcaggatacaaatgccaatttgaacatgagaaaaagaacaaatgctttggttcactctgaatctgatgttggcaacagaactgaggtgggaaaccattcaagcaaatcttccacagttgttcaagaatcttctaaaggcacacctcggtcttacttagcttccagtccaaacccattcagccgtgcaaatgcagctgaaaccatatctgcagcaagagcacttccatctgcttctcctacttctatccgaactggatatatgcctcgaaaggcttcagttggatctgcttctactcgtcacgtgtttggatcaagactgcagaggataaagaccacagttaataccataggggctactgggaagttgtcagctactcctcctccatcggctccaccaccttctggatctggcacaagtaaaatagacaaatatgcccgtattctctttccagtcacatttggggcatttaacatggtttattgggttgtttatttatctaaggacactatggagaaatcagaaagtctaatgtaatttcgttgctatagtagtttgctaaaagatgatgaaaatgcagaatgtctttttaaatgtttttaaatataaacaaatattctttactaaaataaaaactctgtgtaatttttcc

SEQ ID NO: 230589 - DNA, 573 bp, Homo sapiens
tggaaatgactaattttaagaattttgatccctttaaattttgtacaaatctgcataaagttacataaccaatatattttttcatataccttttcaggatacaaatgccaatttgaacatgagaaaaagaacaaatgctttggttcactctgaatctgatgttggcaacagaactgaggtgggaaaccattcaagcaaatcttccacagttgttcaagaatcttctaaaggcacacctcggtcttacttagcttccagtccaaacccattcagccgtgcaaatgcagctgaaaccatatctgcagcaagagcacttccatctgcttctcctacttctatccgaactggatatatgcctcgaaaggcttcagttggatctgcttctactcgtcacgtgtttggatcaagactgcagaggataaagaccacagttaataccataggggctactgggaagttgtcagctactcctcctccatcggctccaccaccttctggatctggcacaagtaaaatagacaaatatgcccgtattctctttccagtcacatttggggcatttaacatggttta

SEQ ID NO: 230590 - DNA, 411 bp, Homo sapiens
cggcacgagggtgcttaatgatacctgtgcctgctccatctctctctttcttctcctgccttgatgtcttgaaggtcatttgttctagaagatgatatgcctataacaaggaggaaggtcacccagcctgcaccagatatttgcactgccagagcacctctcaagaatgcagatttaaagatgtcactggggccgggctcacacctgtcatccctggactttgtgcagccaagacggctggaccactcaagcccacccagcaagggcccggtcaacagctctcagatgaatagaggtgaacaccaaaatcagaggaaaaggtggctggtgttcttcctggaacatttcatttttgaaccagagaaggctcatcttgaagcgttaataaagaagcttttatttgttaaaatg

SEQ ID NO: 230591 - DNA, 312 bp, Homo sapiens
atcttattcttctgtctcatcagtatccttctctaaccgcacttcagtatccctgtcctctgaaaatatcaagtccacagggtaaaagaaagactgtgtggttagtacactttgtgagcaggacccggaaggccctggcagaagctggcactgttccacagcctccactgcactttcatgcctggctgctgaaggatttttttaaacttcttcggcattttgtttaatttatgactttatacctcagaagtagtgaactgacagggtttgaattttttaattacattgattaaacaattacttgaaattcca

SEQ ID NO: 230592 - DNA, 549 bp, Homo sapiens
ggaaattggggaaacatggatctctctgtattgcttcttacaatttgaggtgaaactaagtatctcaaaatttaaaagctttttagaaaagaaaaaattccacaatttccaatgtacttgaaagttggaagctgaaccaaagggcacttcagccccacagattccactccttgtctcaacccttcccccaccacaatgtgaccaaattgtttacagtccattctcccagaggctcctggcatctcttgtaaaccacaatctgttagactgtagcttcagcaaagatttctggaagacatcactgaaattctgagtgtccaatgtgggcatgaagccagttttctagcttccagcctgtccaaatctgaggctattacagtattcaaatggcagcctgtgaactcacatttcaaggagactgttcctcttgcatcctggacttccaccatggaaggttcacgtccttgagtctaatgacttggtcctcaccaggcttccttgctggaacataagcaccacgaggacagaaatactgggtgggttcccctg

SEQ ID NO: 230593 - DNA, 297 bp, Homo sapiens
gtcagagcccttcatatgtgttgtcctacttcagtcttgagtcctcaagagctgttttccaaaatggctttggcattttggaaaagtgctggattcaccttatgttaaattatgagaatgcaaaagatgagaatgacttgtagcttcaaagcttcaatgagctactaacaagtcttgagcactttcagatttattacctctgtggtctcatcaccaatcatgaattaactgttctaagacaaggtatgaaatagttctcggttttgtaattagagctaaaagtagatcagtatcttt

SEQ ID NO: 230594 - DNA, 381 bp, Homo sapiens
gcagcccagggcaaggagagcagcacatgcagccaggacacttcagaggaggcagtgtgtgtgctgcagaagaatctagggataaatgggagaggggcagccaggcaaagggaccagcctgtgcaaaggctcagaggctccaaagtgcatgtgcgatatcccctggccaagaaactcaccttccagaaaggcgtcctgaggcagtaactgcaggctgtttatagcagcccagaagtgaaagcaacctaaatgcccagccagaggggatccgttttttaaatcctgctatgtctggggagtttcaaatagccaagtcctgttgctgaaatgccacatgggaaaatgggctccatgctcaccacccatcccgcgaacgagcga

SEQ ID NO: 230595 - DNA, 192 bp, Homo sapiens
caccagaatgagagctgtaccgttttatgacatcagataattctgactcagaaatgtctgccttccctgtctgccagcagtcttacccttggtttctggtagatccatttccattcttttaactatttacttgatcctgtggagtctttcttaaaaatacagtctttagatattgtcagttctaagcattca

SEQ ID NO: 230596 - DNA, 1432 bp, Homo sapiens
cagcaatattttactgccactggatgtctgcacaaggaacctatgccagccagggaggttgagagtgaggctcagtggggactggcatactggctgagtggatgcagtcattgagcaacgcatgtcatgcatggcgtgggccatcactctgctgggtgaaagtttcaggagcgaatgagacccagccctagctctcaaggaacccatagtctcataggtagtggtcctgcaaagtggccagggaaaggatcggggtgcagggtgctgaagtcacatggaaagttgtgaacgttgccggtaccaaaatggagtcacttatgtcaaactaaaacagttggaggtgatgaagcagccctcacgcacacattcctgcaacaggacttaccacaagacatttctacaaacagaccaataacaggactcactgcaagaccatcctcaacggttgcagtattccagataagctgctattcccaaatccatttattttagagagtctatctctggatttcttcataggttgactgtgtcatgtaggattcagtatagtgaacaaagattggggaaaggcagaccccaggcagaagatcagaggcaagggggacagtcatgcatttgtaaggtctaaaaagttcagtctgcttttgtgatacctgacgaattttcatatgttgtgttttcattcagttcaaaatacttgctaatttccctttgatttattctttggctaatgagttatttaaaggtatgtcatttagtttccaaatatttgggaatttaccagagatctttctgttactgatttctagttgaatttcattgtggtcagagaacatactttgtataacttgagtccttggctggggcgtggtggctcacacctgtaatcccgatactgggaggctgaggcaggaggatcatttgagcccaggagattgaggtcagcctgggcaatgcagcgagaccctgtctctacaaaaaaatttaaaaaatcaccctggggcggttgcccacgcctatgcctatagtcccagctactcagaaagctgaggtgggaggatcacttgagcccaggaggttgaggctgcagtgagccatgttcctgccactgcactccagcctgggcaacagagtgagaccgtgtatcaaaaaacaacaaaaaaccacttgaatctttttgaagttaacagggtttgtttcatagcccagactgtggtctctcctggtaaatgttctgtgtgtgctcgagaagaatgttttctgctcttgttgagtcaagtgttttaatgtcaggtccagtggagttcaagttctgtatccttgccaattttcttttcttttttctttctttctttcttttttttttcttgagacagagttttgctcttgttgcccaggctggagtgcaatggcgcggtcttggctcactgca

SEQ ID NO: 230597 - DNA, 403 bp, Homo sapiens
gctgcagagaatgtgtcgcgtggctgtagtcttaggcaacttaggtggggctgagaacccagggccacttctgtctgcgaagtggctcaaattcagcatggaaagaacggagccttcatggaatgcaggcgaatacagtgaatgtttgtgcctaaatgactgcgtggggctctgcaggtgtaggatgagggaggagtccagtcttttctagtgtcatgaaattcccaccgcagctgcctgctgctccccggacgggatttcctctcgctgccagtgggaggggtggggagggctggatgtggcgagggagtctgtagacagaagacattgccagctcccagccccaccgccttccccgcacactcgtcgcgctgtgactcccggccccgccgccttccccgca

SEQ ID NO: 230598 - DNA, 2355 bp, Homo sapiens
  misc_feature (1401)..(1401): n is a, c, g, or t
  misc_feature (1407)..(1407): n is a, c, g, or t
  misc_feature (1417)..(1417): n is a, c, g, or t
  misc_feature (1422)..(1422): n is a, c, g, or t
  misc_feature (1425)..(1425): n is a, c, g, or t
  misc_feature (1427)..(1427): n is a, c, g, or t
  misc_feature (1434)..(1434): n is a, c, g, or t
  misc_feature (1438)..(1438): n is a, c, g, or t
  misc_feature (1444)..(1444): n is a, c, g, or t
  misc_feature (1449)..(1449): n is a, c, g, or t
  misc_feature (1457)..(1457): n is a, c, g, or t
  misc_feature (1459)..(1459): n is a, c, g, or t
  misc_feature (1469)..(1469): n is a, c, g, or t
  misc_feature (1473)..(1473): n is a, c, g, or t
  misc_feature (1479)..(1480): n is a, c, g, or t
  misc_feature (1487)..(1487): n is a, c, g, or t
  misc_feature (1496)..(1497): n is a, c, g, or t
  misc_feature (1513)..(1513): n is a, c, g, or t
  misc_feature (1521)..(1521): n is a, c, g, or t
  misc_feature (1528)..(1528): n is a, c, g, or t
  misc_feature (1536)..(1536): n is a, c, g, or t
  misc_feature (1538)..(1538): n is a, c, g, or t
  misc_feature (1541)..(1541): n is a, c, g, or t
  misc_feature (1544)..(1544): n is a, c, g, or t
  misc_feature (1550)..(1550): n is a, c, g, or t
  misc_feature (1552)..(1552): n is a, c, g, or t
  misc_feature (1556)..(1557): n is a, c, g, or t
  misc_feature (1559)..(1559): n is a, c, g, or t
  misc_feature (1563)..(1563): n is a, c, g, or t
  misc_feature (1664)..(1664): n is a, c, g, or t
  misc_feature (1711)..(1711): n is a, c, g, or t
  misc_feature (1725)..(1725): n is a, c, g, or t
  misc_feature (1745)..(1746): n is a, c, g, or t
  misc_feature (1797)..(1797): n is a, c, g, or t
  misc_feature (1806)..(1806): n is a, c, g, or t
  misc_feature (1831)..(1831): n is a, c, g, or t
gttcctattcggccatcttggctccacctccctgtatttttctttttaaaattgcatagttgcttaaacttatttttttctctttggatttttaaaggttcactgtatgtatagtcttatatctcagtcgatcttgttagtggcttattgttaaaacatgcagtttttggctgggcatggtggctgtattcctagcactttgggaggccaaggcaggtggatcacctaagcccaggagtttgagatcagcctgggcaacctggtgaaaccctgtctctactgaatatacaaaattagctgggcatggtggcacacgcctgtagtcccagctacccaggaggctgaggcaggagaatcacttgaacccaggaggcagatgttgcagtgagctgggatagagccactccagacttagtctccaaaaaaaaaaaaaaaatttaaagaaaaaaaatgtctacaacatgcactccccaaaaatcttatctaaaactgaacttattatgttctctcctaaatcagttactcgaagttcaccgctctcctggaacctcagaatacaaatcatagtatcttaattgactcatccttttatcttatcaaacccatcatcaaatccagatcattttcctttctctgtctctaattaattcattttgttcagagttgccatgatagtctccctaatatactgtttatgtctttgccctctgtcatccaggccgatgcctctcgacaaagaatgcacatcacaatcacctggggacctctttcaaatacttgtacctgggccccattccactcccattctcactattgagtcagcagatttggaaatgggccccttttgtacttggaagagtcttaggttattgaggtgaacctttagttaagatccactaatccagatccaccctgatcatctacttgtcactcactattcaacatacttcatccagctcaattagagctatcttccagtgattctccaaatactcatccccactctcctctaataagaatgtccttccagtttctctctgcttatataaatccataccatctttcaaagtgtaagtcaagtcccatcttctctattaagtttcatgaactggtcaggggcggtggctcatgccagcactttggaaggccaaggcaggcaggtcacttgagctcaggagttcgagaccagcctaggcaacatagtgaaaccctgtctctacaaaaaatacaaaaattagccaggtgtggtggagcatgcctataatctaactacttcggaggctgaagtacgagaatcgcttgggccaggaggtggtggttgcagtgagcccagatcgcgccactacgctccagcctaggcaacagaatgagaccctgtctcagaaaaaaaaaaaaaaaacnttgcanggaccacacnatacnagnancctcatnctcntccaantttcnataaaacngntatatgtaanaggngtcatnnggcctcngcactgtgnnactaccatttaatgtntaaagctngtattcncaataaancnatnctntttttncncttnntntctntttggaacaggctctggctctgtcacccacgctggtgtgcagtggcgccaatctgggctcactgcaacctcagcactcaagccatcttcccacctcagctncccgagtaaccgggactacaggtgcctgccaccacatccagctaatntttgggtttttgtngttgttgttttgctagaganngtgttttgccatgttgccaggctggtctcacatcccggctcaagcaatccncccacctcngcctcccaaagtgctgggattacangcatgagccaccacacctggccaccttctcaataaggattgtgtgttttcatgatctcttaacaatacccagcaatgttgtgcacatgggaagaatgcttatcttacaaataaaatattatgaaaaacattcttgaggtgacaggtatgctaagtaccctaatttgatcattacacattgtatacacgtatcaaaatatcacattgcatcccacacatgcataattattaaataaaattgaaggccgggcacagtggctcacgcctgtaatcccagcacttttggaggccgaggcgggcggatcacgaggtcaggagatcgagaccatcctggctaacacggtgaaaccccatctctactaaaaatacaaaaaaaaaattagccgggcgcggtggcgggcgcctgtagtcccagctactcgggaggctgaggcaggagaatggcgtgaacccaggaggcggcttgcactgagccgagatcatgccactgcactgcagcctggtgacagggcaagactccgtctc

SEQ ID NO: 230599 - DNA, 461 bp, Homo sapiens
gaaatcagggaaaaaatactaggaatacatattctcttaatggactgtaataattgagattgcctctatctgtaatattttatgcagttctacttatcagctcacaagtaccgaatcatataagaagaattcaagtgggaaattgcatttatcaaggagttggaacttttttcttatgaaaatattttgaaaaaattaaattttcaggtagtaaaggatgaagatgtaatctacaacagatgcaggaaaatagaaatttataaaaggtgtgaatggaggtaaatatgtacttactcaccctaacctaaaatattaagactaaaagtatttggaaaaagtaggctgggcatggtggctcatgcctgtagtcctagcactttgggaggctgaggtgggaggattgcttgaggccaggagttcgataccagcctgggcaacaaagtgaaacccccccatctgta

SEQ ID NO: 230600 - DNA, 809 bp, Homo sapiens
aggcgtgagccaccgcacccggttttattagcatatttcttgtttcatatttgactacccaattaggcactaaactttctgggaaccattcttttgggtgtttatttaaaaaccctgggcagctctatagcatttcctaaacacagggcaaagtaaaaatatttccaaatcatagattttatagataatcatcttcagaacacaaatgttggtatttggccataggaaagttgttgttgttaacgttttaattttgtgtattacaccataaggttttctccagtttttccccctttaaaccattataatatgtacatgttgaaataaatttattaagaagtagcaagttgaactctctgtaaactcaatcattattacacagtagtaagctagacatcagaagaatagttggcttttctgtataatcttgaacagcttttgggggaaatgagttttcttttcaagttaattggtactttgaaaatgccacaaagaggttcagtagatgatagtttatactcatggaatttttgctgctgggagtttttgtaaaaccatcaacatttttttgtactagatctttggggaactttcagttgctaataaattttgtaatttgcattgacattactttaaaaaaattctctaacaaagtctttttttcccagaagtctcagaatcgtaataaattctgaattctattttgtttgatttttcttggatgcctggaccatggattaattacagtaagagtaacttcaaggtcgggcatggtggctcacgcctgtaatctcaacacttggggaggg

SEQ ID NO: 230601 - DNA, 334 bp, Homo sapiens
catttttcagttgaatgtacatgggttttacattccaaattgtaattatgccttatagagtattgatcctgttttttatttgatattatgttctatcttattctttgaaagcatttgtattagattatattagttatgagattaatagttccgcatttgaatgtatactaatgtatttgattatattgttgggcatttaggctattttctgtgatttgttaatttagatgttataatccataatgcttcctttcaggctttttactagggtgtttatttacaaagcagtgaaattgatagagcattcacagcaaggaaaataggaaattaagca

SEQ ID NO: 230602 - DNA, 956 bp, Homo sapiens
tcataaagggtaacatcttgcaacttgattctttcacttcatggtatcacttatatgatattctttcacttcataatttctttccttcctaggacttagagggtcaccccattcatttaaactcctgcataatccatagtatggatgcatcatagtttatttaataatttccccattgatgaatgttgagcttatgcttagtgggcaagtattcctgtagcatagatatctagaaatggaagagttggggtgaagactatgtagatataaaattttaattgtcctcaaaaatgttgtgccaactgactatattgtcagcagaatatgacagcattcatttccccacaccttttcactgttgggaatttgccagctttttgttgaagttatggatgaataaaagggattccatccaaatttgaatttttctgatcactcatgaatttaattaaatatctttatatgtttattgaacatttgtgtttcttctctgagttctctgtcctttgttcattttcctgttgaattgttttatcgttttcttcctgatttatagaaggaattagttgagacacataaatgattttggaaaaaatgcttacattcaaagtaacatttttcacaacagtttgtgtcacatcattagtttgacttatatagacaagacatacatgagttctaaattaaaaatcaaacacatgcccagctaatttttctattttgagtagagacagagtttcaccatgttggacgggctggtctcgaactcatgatctcaggtgattcatgtgccttggctttccagaatgctgggattacaggcatgagccaccaggccaggccaggactacattttaaaagcaagaaaatcattacaaaagtcagggtagtggttacctattagggttagagagaggaatatgattggaaaggggcacactggggcttctgggatg

SEQ ID NO: 230603 - DNA, 361 bp, Homo sapiens
aatgagttatggctcatttatgattctaccccgcatgtctaacacagagcctgaaacagtatagggactcagttggtttgcttgaatggaattaattgaatcgataggatcaatgcgttaataccaagtagtgattttagtttaattctatgaaggaccaagattcttttcagttcacagaaagagtgtaaaagtattttgaataaatttcaaatgctaaattaaggtttattattaagtgtaaatctatcaaaattttaaaagaatttcatattgaccataaatataaaccttatagattttaagaaattaaagcaatgtaatcaatatttttgacaaaattcattaaaatagcagagat

SEQ ID NO: 230604 - DNA, 433 bp, Homo sapiens
taggagaaagattttcacttcaacaattttttttttttttttttactttcctctttcaaggtgctccatgtctgggcctgaagccaaattctgcagagtgagaggctacagtgtacagtctggggcattctgcattcctttgtagtgatcagctccagtggaacataaggcagaactgtggaaggctttggttagaatggagcttcttcagagtgctttcagagactcactccgaagcatgctttatagaacagtcattccttggtctatcaataggtgttatgttaaaaaaaaaaaaaaaaagcaaaaagttattgactaaaatttgtgaaaaccttggtcaacaaggttaaataggctacctaattactagatttcaccacatctttaatttacctgggtgaattgggaacatacgaggagagaagcagct

SEQ ID NO: 230605 - DNA, 612 bp, Homo sapiens
acggggtggggacttcagacacatgtgcaagcttctgaggatgcccgggtgctggccatgtggcaaggtggaaggcagtgcctatgactggacagctgggagggagcccactgtggtgatggggagggtagactagcaggtctgtttgggtatgctgacttgggggcactcaaggggagctgtcagggaggccattgggtggaagcaattccagagacaaaccgctgctccctaaaggaaaaggagagtgcctttgcctttcaacctgagctccatgtggtcctctggcccagcctgctaggcagcctcgccctgctccccacgtgatgtcacacaggtgtcacaaaatgaacatctgaaaccagagcttcattttcctaaatttcctagcctttctccttacagtgaacgtcaccaacacccacccagtatgctgaaacctggcagtcatcctagccacctcgctttccctcaccgtcacacccagtcccctcaaacatttgtgcctgctgtccctgcgttcgcttcccacccgggtgcttgcctttccacgtctccctgctgtccagcagctggcaagtcattcctgccctgtgcttgcaggctccacgg

SEQ ID NO: 230606 - DNA, 458 bp, Homo sapiens
tacgtcagaagcagggaaacctccattccccattcccctaccctagcccaaagacgagaggtttgctttccagaatagatgaaccagagggcctctgggggagcaccccagggataactggcaaggcgactggggtctggtcctcataccgaatcccccagcaccggggactatatcttggcctcatctgtgtttgggaagcctaaggctagagtccctatatgattaaatgaaacaaacttctcccatgaaacgcaaagaacaaaacaaacaggaaaaacagaaagaggaacctggaagaaaccaaaacagttcagggagaataaaactttaaaatactcagcatttccttctactcagaaagctaagagacctcgtgcatgtgatgagagggtgctttacaaaggaacttgccaaccacaaagaaagctctgggaaatttaagatacaatagcaaa

SEQ ID NO: 230607 - DNA, 431 bp, Homo sapiens
ctggcaggagatgaaaggctgctgccgcccggtcggaaggacatcggcgccccccaggcccggtccccgccccagttcctcgggcctttcctgctgcccctgcctgcgagggccgacgacacggagaacaggatcctgcgcccaacccaggagcagttgggtgaggagcaccagaaattcaatgctccctggcgctgcatccccagagccctcccagcctaagaagccccatctttctgtctccacgcatggagaactgcagctgtgaggcccaggacccttagcaggacatgcagagctgggcagggacccaggctcatgctcccagcgtggggtgagttgtctccagcctgtggagactgccatgaagttgatctgcctcccagagggcctggcccacttgaaataattgctccggctactgatgtggt

SEQ ID NO: 230608 - DNA, 616 bp, Homo sapiens
ctggcaggagatgaaaggctgctgccgcccggtcggaaggacatcggcgccccccaggcccggtccccgccccagttcctcgggcctttcctgctgcccctgcctgcgagggccgacgacacggagaacaggatcctgcgcccaacccaggagcagttgggtgaggagcaccagaaattcaatgctccctggcgctgcatccccagagccctcccagcctaagaagccccatctttctgtctccacgcatggagaactgcagctgtgaggcccaggacccttagcaggacatgcagagctgggcagggacccaggctcatgctcccagcgtgggtggggaacacagagccctgcccagaggcttgaacctggcaccacaggggtctggaattacacagaagacgggtgacagccaaggtggatcatgaacggtgagaagtccagcaggtgacaaggggaagggtctaaagggtggagggcacagcgcaagcaaagtcttggcaacaaaagagctaatgcatcccagaaatggggcaggtggagtactggaagctacaccaagcttcagagtggtcctgtggcctcggtgtggtagctcaggcctataattccaaca

SEQ ID NO: 230609 - DNA, 623 bp, Homo sapiens
ggccggggtcggcgccgcggaggcggggagggagggagggttggagggttgagccagagacccgggaccccgtccccgcacacctgccagtgccccgtagcttcggccgccggcactggcaggagatgaaaggctgctgccgcccggtcggaaggacatcggcgccccccaggcccggtccccgccccagttcctcgggcctttcctgctgcccctgcctgcgagggccgacgacacggagaacaggatcctgcgcccaacccaggtccccgccttctttcagaggcccaggcctggaccccgctgagccgcagatgtgcgagcaggagcgccagagccccgatgcccgcccagcaggaagcgggcgggagatggttccttccttctgtcctgagggggaaccctgcacagagggaccattgagggcctggcattgtctgcctaactcacccagtgcctccctccctgggtgggccatgcggggccttgacaggattgccctggtgccgtcttggcagtgggtctgggtgggatcctgggggcagggcttccctgagtgcagacagctaggcctccacctgccccggcctcccacccaggctcagatttccagggcataaggc

SEQ ID NO: 230610 - DNA, 522 bp, Homo sapiens
ctcatcccactgccttctgctttctgaccttactgaggtcagggtcatcaaggcctgggggactgggacagggttaaggggtgtcctttctccatccgtcttccaaccccgtggagactcagcatgcctaggaaggtggaagggcttcctgcgggcacaccatctcccgcctccctgtgcctgtcctctgctgggtcctgggttctccagtgattatagcccttgctgcttcccccacagtggggaacacagagccctgcccagaggcttgaacctggcaccacaggggtctggaattacacagaagacgggtgacagccaaggtggatcatgaacggtgagaagtccagcaggtgacaaggggaagggtctaaagggtggagggcacagcgcaagcaaagtcttggcaacaaaagagctaatgcatcccagaaatggggcaggtggagtactggaagctacaccaagcttcagagtggtcctgtggcctcggtgtggtagctcaggcctataattccaaca

SEQ ID NO: 230611 - DNA, 1185 bp, Homo sapiens
gaggccgggtgttccctcatccccaagactgtgcccagcatttgatgaatggagacactttgagtggggtttaccccatcttcctcaatggggagctgagccagaaattacaagtgtactgtgatatgaccaccgacgggggcggctggattgtattccagaggcggcagaatggccaaactgattttttccggaaatgggctgattaccgtgttggcttcgggaacgtggaggatgagttctggctggggctggacaatatacacaggatcacatcccagggccgctatgagctgcgcgtggacatgcgggatggccaagaggccgccttcgcctcctacgacaggttctctgtcgaggacagcagaaacctgtacaaactccgcataggaagctacaacggcactgcgggggactccctcagctatcatcaaggacgccctttctccacagaggatagagacaatgatgttgcagtgactaactgtgccatgtcgtacaagggagcatggtggtataagaactgccaccggaccaacctcaatgggaagtacggggagtccaggcacagtcagggcatcaactggtaccattggaaaggccatgagttctccatcccctttgtggaaatgaagatgcgcccctacaaccaccgtctcatggcagggagaaaacggcagtccttacagttctgagcagtgggcggctgcaagccaaccaatattttctgtcatttgtttgtattttataatatgaaacaaggggggagggtaatagcaatgtgttttgcaacatattaagagtatgtgaaggaagcagggatgtcgcaggaatccgctggctaacatctgctcttggtttctgctgccctggagcctgaccctcagtctccattctccctcctacccaggcctcctcaaccttcacctcctttcccaccaaggaggagaagtaggaagttttcttaaagggccaattcaaagccaagtcgtggggtgcagattgttatggtgacaggcacacacatttttctacccttcttctgagatgtcctctgccttccaggtatttgtgattttgtcacagcctgacatggccaggttctcacactggcccagagaaaagagcctcagcaagagagttttgccaacaattccccttaaaaggaaacagatcaactacacc

SEQ ID NO: 230612 - DNA, 422 bp, Homo sapiens
tctatttttctataaatataatggtaaatatatccttacactcattatggtatctttatttgttctcataaggatgttgtagtgggtataatgtatgtctctctgtatgttggtaataaaaatggtaatagtgagctgggtacggtggctcatgcctgtaatcccagcactttgggaggccgaggcgggtggatcacgaggtcaagagatagagaccatcctggttaacttggtgaaaccctgtctctactaaaaatacaaaaaattagccgggtgtggtggcatgtgcctgtagtcccagctacttgtgaggctgaggtaggaaaatcacttgaacctggatggcggaggttgcagtgagccgagattgcaccactgcactccagcctgggtgacagaacgagactccatcccgaaaaaag

SEQ ID NO: 230613 - DNA, 149 bp, Homo sapiens
actatatactgggacagtgaaaggccttccattgaccagaattacaaagagtgctttcatgctcagggtttagccatacccagtgtacagggcttttgttagggcttgcactagtcctttctctcttacctccttctgtcgtcttctca

SEQ ID NO: 230614 - DNA, 471 bp, Homo sapiens
tcagggagcttacaaactccgcttttgcataatttctctattactctgaatttggatatcatcctctgttatattggtcttttgtatcctgtctgtttatgagttttcccttttcaactaacttttttctaattgtgaaaatagagcatggtcaagagtaggaaatagagaaggatgcataagaactcaggctccgaggttgtgcgtggtggctcacacctgtaatcccagcactttgggatgctgaagcaggtggatcacttgagctcagaagtccaagaccagcctgggcaatgtagggagaccttgtctctacaaaaataaaaaaattagtcaggcatgatggaccactctggaggctgaggtgggaggatcacttgagcctgggaggttcaggttgcagtgagccatgattgtgccactgcactcctctagccttctagcctggaggacagagcaagaccttatctc

SEQ ID NO: 230615 - DNA, 326 bp, Homo sapiens
agcggtgttgaacttcctgcttgtgtattctctctgggcagagatgccacttgcctcccccaccctgccctgcgcccactgcagtgctccccttgcttcagctttgggctcacctcccgctaccctgtccacgttcccttctcaccagcagccaggcctctgccccactcgcttggtcctcaaaggtggactccttactggcattgtttccagacagcctcctatcacccgtgcccaagtggtctttctaagaaatccaaatttttatgtgtttttgagaccgcctctctctctgtcacccaagctggagtgcggtggtgcgatca

SEQ ID NO: 230616 - DNA, 468 bp, Homo sapiens
agcactttgggaggctgaggtgggtgaatcacttgagctcaggagttcgagaccagcttggccaacatggtgacaccccatctctactaaaaatacgaaaattagctgggtgtggtggtgcactcctgtagtcccagctacagctactcaggtggttgaggcaggagaattgcttgaacctgggaggcggaggttgcagtgagaccagatcatgccactgccctccagcctgggcaacagagtgaaaaaagaagaacagaatgtgaaaaggcagatttttttaagtcaaaaagaaattaagacaggaattttgttatctgacaggaatatctgtcaagagaaagtgacagatattcaagatagaagatgatccaagatagagataacaggaatccctgaagacaaaaagcaaaggaagaaaacaatgcattctaaaattataaattaaaaattatttttccctgaagt

SEQ ID NO: 230617 - DNA, 735 bp, Homo sapiens
ggctgaggcaggagaatcacttgaacccgggaggcggaggttgcagtgagctgagatggtgccgctgcactccagcctgggcaacagagcaagactccgtctaaaaaagaaaatctttagataattagaacatttgagtgtggattagatattagatgatataaatggtattttttaggtatgagaatggcacggtaatcatatttaaaagaagggttatcagaggtatatatagaagtatctactgataaaattattagtgtctagatcttgctttcaatgctgcagcaaaaataaacaaaaatgggaagactgataaagtaggtaaaattttgataattgttaaagcaggtgatggatgcatggggttcaatatattatatggagttcattatactcttctatctacttttgtatatatttaaaatgcccataataaaaagacagtggccgggcatggtggctcatgcttgtaatcgcagcactttaagaggccaaggtgggaggatcacttgagcccaggagttcaagaccagcccaggcaacaaagagagaccctgtctctacaaacaaacacaacaaaaattagctgagtgtggtggcacatgcctgtggtcccacctactcaggaggctggggtgaaaggatcgctggagcccaggaggcggaggttacagtgagccgaggccatgccactgcactctagcctgggcaacagaacaagaccctatctca

SEQ ID NO: 230618 - DNA, 416 bp, Homo sapiens
tgatggaaactggcttcgcgcccagaggaaaacccacaactaaggggccaagaaaaagcctccatggtcccgccctttcagtgaggatcctaatttataccccgagtgtggcccccatcaaagtctgcagtgacagccgagcgcggtggctcacgcctgtaatcccggcactttgggagaccatggcgggcggatcacttgaggtcaggagttcgagaccagcttggccaacatggtgaagccttctctactagaaatacaaaaattagccgggtgtggtggtaggcgcctgtagtcccagctactcggaggctgaggcagaaaaatggcttgaacgcgggaggcggagcttgcagggagccgagatcgcgccactgcactccagcctgggcgacagagactccatctcacacaca

SEQ ID NO: 230619 - DNA, 332 bp, Homo sapiens
atttgtgtttattgccactaatgatgttgtgatgaagcgtctcatttatctgtagaaaacctaggctggaatttaggtttttaaactattttctatagaaaccttgaagcacttgaagtttcaatattcttactgtatctcttcatagaaacatatttattaaagaacaatattttaaaccttttcctgttttagattttgttatactttcattttgtctatgtgatttggcaaacaaagtaacttttatacaatttgaaaatgatatccaatttgtggagatttggagaaaatacaacctaaagcaatttaataaagatcatatatgactt

SEQ ID NO: 230620 - DNA, 440 bp, Homo sapiens
tatcagtgaggacgaccagaggtcactcttgtcgccattttggttttggtgggttttagccgacttctttactgcgacctgttttatcagcaaggtctttatgacctgtatcttgtgcccacatcctatctcatcctgtaagttagaatgccttaaccttctgggaatgcagcccagtaggtctcactcagccttgttttacctggccccattcaagatggagttgctctggttcacatgcctcggacaaaatcactgtacttgggatatccatcacgttaaagatttgtcttttctctatgctagaccactggaattctagatattttgaaatatacaagaggttattgtaaaatatagttagtttaccaatctaacactaggtcttcttatatcaaatggtatatttgtaaccattaatcaacttctcttccccccta

SEQ ID NO: 230621 - DNA, 469 bp, Homo sapiens
aagtggagacaacttatctccgagggctacgcggggcaagataaataggtacaaaaatacataaatatgtacctggcccacagttaaaacgcttaaaacactccagctctgtcgtcttctcttagattctagaaatgccacaactttctcttatttctagatgctctgtaggttcagggccgtagaggctgtccacgggcctcacaggaacgcaccaaaaccaggacatcgcaagcacaggcgcacagacccagaccccggccccggcccggcccggctgcagggccgggctccccacatcgacaaggacaccggagctgccccgagacgccaagagggctgcgaagagctgcctttgtactcagagccagacgcggcctacgggacgggaccgccacgtctggggcttgcgggctgcagggcggcgcggcacgcgtgggtacaccctgcgggggcgggctgcggccgc

SEQ ID NO: 230622 - DNA, 461 bp, Homo sapiens
tatacaagaagcattcaatgtggaagtcggacctatatattttaatgtaacagcatgtgaaatagttattgatagtttcatgttccacattacaaataacctttaagaagctaacacttctatcattttagtgtagtatcaaggatgaacatccagttttctaaaaatgttattaaaaacattcctggcctagcgaggtgacttatacctgtaatcccagcattttgggaggccaaggcaggagaatcatttgagcctaggagttccacccaggagttcgaatgagacccccatctctacaaaaaataaacaaaattagctgcggtggtgtttcgtgcctgtggtcacagctgctcatgaggctgaattgggaggatcacttgagcccaggaattcgaggctgccgtgtgctatgatcacaccactacactcaagcctgggtgatagcatgagaccaaaag

SEQ ID NO: 230623 - DNA, 349 bp, Homo sapiens
cactgcactccagcctgagtgacagaaagagactctgtctcaaataaataaataaataaatacataaataaataaaaggaagtaaaaaccttatcaccatatagattccccttttctataatagttatcttatatattactcctctatacattgaaaagaaaccactaacagatgatgctgtaatttttgcttacaaccctgagatatattgcaaagaattcaagaagtggccgggcgtggtggctcatgcctgtaatcccaacactttgggaggacgaggtgggtggatcacttgaggccaggagtttgagaccagcgtggccaaaatggtgaaaccccatctctacc

SEQ ID NO: 230624 - DNA, 313 bp, Homo sapiens
gaggaaatataatctatactatagactatagatctaatctactataataatttataatttaatatatataatttaatcttatctaagattaaattagaaacccagaggactgttctaggaaaaaaatatttcagctactacttaccactaaagacctttgctttctttctacatcttgagcagatggtttcccagtccttgaactagatatatttttaagccaatagttgtcattaaaatgcagaaaatgtatatgtttccaagaaaatgacccattgcaattaataaccatatgtctgttatttatttcagg

SEQ ID NO: 230625 - DNA, 574 bp, Homo sapiens
cccataggcatcagtaacaagtgtggactgagctgactgcagcctcggtggacagagaagacttgtcctccagcagtgttacaggctgaccacctgctggcaccctgatgttgacattagtgatgctggaattcagataagggagagagctgctagcaggattccacagagaggcaggacttaaaggataagaaggattagatggtgccgggaaggggaggagcagggaagccagggtcaggtgtgaggaaaggggaaggtgctagaaagaggagtttggacttaatactgtagcctaggaaggtggcccatgccttggctgttccacacgtctcttagattctatgggagcaaaggagaagccactgtgtttaccccagacttgccttcttcccaccctccccgctcatcttggtgtactcatcaccatgtgctcaatctgcgaaactggaaatggcattgtcatcctcaggcccccactttttgtcacctgctgtgatccagcagtcactgagttgggaggcctcctcgtttgtttaatcgtattctactattaaattttctgccccttgta

SEQ ID NO: 230626 - DNA, 355 bp, Homo sapiens
cagattgattggggacaaacgggaactcagccctctcaaccaatcatccaaggcagtcagctgtaactaggtgtacacttaaacagccggcatgtgaaatagcacacttgtgctctgctgattaaaaaaaaaatccaaatcattattccccaccttcacaggcttggaggcctaggagcaggtggggtggggtgggtggcagatgaggctgcctcagtagccctaaccatttcatcattaatatccacccacccactatgcattgtccacagtaaaatgtgctttgtcttccacactgtattggtgaacaaataaatcactcagttccttggttttagtaaaacaataagagcaa

SEQ ID NO: 230627 - DNA, 179 bp, Homo sapiens
  misc_feature (107)..(107): n is a, c, g, or t
  misc_feature (115)..(115): n is a, c, g, or t
tacccagtgttaacatatccagctgtctcacaattgccccctttttttttttaagaacttgtttgtttgaataaggattaaaataaagtccacacagtagagttganttgatttngtctcctcaaggcttgggctaaagtttcccctgcatctctctttttatttgttgaagaaactgt

SEQ ID NO: 230628 - DNA, 491 bp, Homo sapiens
acttacattaccactcctttgtttgcctataacaacaatatgactatttttcccttttttacaatgtctactaggaagcttagatccaaatatgaggcttaattgtagtaatgttgatgaattgcatgtttaatctttcttagtcttggtatcttactcacttatttgtattttgcccaggcttgatttttaattctatccttgaattttcattttatcatttgttttaatgcctccttcaagtcacacagtcagatcctttgtggaagacgatgaatgggtgaataagtatttaaagcatgtgttcatagcgtcatcaattttacaacagggtggattaaacatacgataattatgaattaaaagtgacctatgcttctggttgtttccacaagtcatcaagtccccaaaaatcaagtgataaatatatattttttgagagtcaatattgtgaattattatctggaataaacatctttaagagtgaaaaa

SEQ ID NO: 230629 - DNA, 509 bp, Homo sapiens
gaggccccagggaccctcacagggtaccaagaggccagctccaaatctcctggctcgttctttccaccctcacactcaagggaacaagaagactttcccagagaggaaggaagtgcttaggtgtcccagggccaaagaagatgcctaggagggcagcagtagcccagctgaccccatggagagcctgctcccccacccctgccccctgcgctgcatatattttctccccctaaaatagcatctctggagggaggagtgggggagttctcagttcactgttctctccttcccacagtgcgttcacagctctctcactgtctctcacgacctggtttccctgccaggcccttctgctctgcctccacctcgccctgccaggtgccaggacctcttggccagagagggggcctgctctccatggcccatcatttcccacttccaagccgtgactgtcacaccattccctcccctctttgggacagaagtaaattcaatccacacagtttgag

SEQ ID NO: 230630 - DNA, 452 bp, Homo sapiens
gctagtttataaaattagattttgtatttatggacttactcatctactatgttacagtagtctttgttttgtgaaactccaaggaaatattttctacacatttcaggttaagaaagaaaaacatgcgtttattttgtcttaaacatgaaataatgttttaagcattctaaaaagtacttacaaatggattaaacacattggcgttctttatagttttactctggttcttttttttgtgacttgttattcatagtctttgcaatgccgccctctagtgatcgatttccaaaaatgcattaattaacttgtaagcctgttacagtctttctcttttgactctactgatcctttgccacagcctttgtttggtgttctcttttattgctcttccattagttattcttattctcctttaatggcattagggaaagatcagaagtttcaggagcaaa

SEQ ID NO: 230631 - DNA, 418 bp, Homo sapiens
gttaaccaggatggccttgatctcctgatctcatgatccgcccagctcggcctcccaaagtgctgggattacaggtgtgagccgccacgcctggccattccttgtgttaattttaccatactaaaaataattaagattatatctataactataggttgcatcctgttaatttttccaaaaaatgactgaacctgaaattgttttggggacacttccaaactagtggtcaagcagtgatttttctgggactgcagaagttcctgctgtgcccaacctttattactaactgggaaagacccagggagactgggatgggctcatgattctacatacagaactcatccaagaaaggaggaaaagctgatttttgtgaacgtcgctacttgtgcctgaactaactctcaggcacattagtcag

SEQ ID NO: 230632 - DNA, 326 bp, Homo sapiens
aacttcttccattagaaaggactcctcaggacacctgggagcatgggctcttacacagggggtcctggtcataccactgagggagctctgggctagacttggatggtgaacactgtgtaaccctggcattgtcactgtatctctttgcccctcagttttctcttctcggaaatgagaaaacatatccaacaaaattttgaggattaaaaaccagaggatgtgtagggacacagtgacaaatatgaagtctaaggtcttactgttattatatcacttatggttaacagtaaagatttctgagtcagaccgttcaagttcaaatcttg

SEQ ID NO: 230633 - DNA, 183 bp, Homo sapiens
tggtcgttagtgagggacaacattcaaaagcaggccctgggtaggtaagaactccgcatggacagacgaggtgtgtctgtatggggctgtgtgggcaggactgcttatgcagtctgcagaagggcagtcctagcaggtggaaagcaagagcaaggccagcggctcatcccggtttgtctggag

SEQ ID NO: 230634 - DNA, 455 bp, Homo sapiens
cagtgcatagctttgcttcaaagcaaaaggaaaatcacgtttgaagaagcagcctgaaaaaaatgtcacataaactagtaagaatttatccagaaattccattgagcaagaccttcaatgtaggatgccaggtcttcaggccaagtctgtgtcagtacataaataaattatcacaccagttctgttccatgcgtgagagacggaagatcatacaggcagagatttttagaaagcgtggcgccctttgatatactttgaaattcaaatataaaatattgatagaatggaaaggttggacttgcatgcagaaatgactaatttgaaaaaaaaactgcaggttgaaaatgcatacttaggactgagtttgtgataattaacagaaaaaaaaaagccttcccagtgacagctctaattaatagtatctgtaattaaaatcatgcccttccagcaggaaa

SEQ ID NO: 230635 - DNA, 426 bp, Homo sapiens
cggaagaccggcaggaatgacagaagcagcagcgagagcccttcagaggaccgcgaaacgcgaactcccgccccctcaaacccaggacattcagtgtaaatgactgtgagcctcaggctggaaagatcgtttcccttcccagctagaaagactcatccatcaggctgtgtcagacgcacctgagccctccagggtggtcaaagaatctgcatcacagaagatatccagttgggcaagaccccgcctccctgacaggtggcacaggagggtggttggagcaggagggtgggaagtgatacgtggatcttggaagaacagcctggctctaccactcgccgtgtgtctgtgggtatgtgagtccccactctgtgctgtggcctcctcatgcagagaaaggagctgataaaagtcaccgagttaaactta

SEQ ID NO: 230636 - DNA, 406 bp, Homo sapiens
gtaacgaagcttgtgtcccaagtgcagcatttagggcttcccaaggcaaagtgcccaatcaggctctctactctccaagttcgtggtgcatggtagccacagctcacctctcccaatacacaggatctccaagggccaccctgccatccctcaagttcctcagcccatgttttccctccttccttcagtttgacaataggggtggagcaaccactttgcaggatgtctctgcttaggggctatggagaagcatgggacctgaactctgcactctttgggaagaaggatcagataggattcaaatctgtttcaccaaccactaggctccaggcttgagcctaacaagcagttgctcaaaataacttggtagatgtgtgtaacccagatagataccctaaccccacgt

SEQ ID NO: 230637 - DNA, 372 bp, Homo sapiens
ctgaagactctacttgcaagacttttactttacttgacttggagcttgctcaattcaaaaagccttttctctaagggtgtttgttgaaagtaatgagaggcatttgactagctttgcagctgtctgaggtggcggataacagttggggcaaatgatacgccaaccaaaaagcaacaacaacaagctacaagatatatttacattgaacagaatgaaaatagaaaatggtcctggtgttacttcacattttggggtctcagtttctttacacataaattgcctgtcttttgggctctgccagagttaacacttctcagccttgtcagagtggtcacctttctggctgtaatcatttataagaaataaaggctc

SEQ ID NO: 230638 - DNA, 527 bp, Homo sapiens
gaacactgatgtacagattatgtttgcatttctgctttcagttcttttgggtgtatcttagaagtggaattgctgggtcataaaataattctgtgtttaatattttgaggaactgcctgactgtcttcaacagtagctatactatttttgtttccaccatcaatgtgtaagggttccattttcttcatgtccttgccaacactgtcttttttaataatagtcatcctaatgggtataaagtggtatcttcttatgcatctcactaatgaaaacatttttttcatattttgcattagtttacatttgaaagtattgctttaaatttgtgaactatatatgagcaatgtagagaaatatttcgctttaagcaatggttgactggccaggtacaatgactcacacctgtaattccagcactttgggatgccgagttgagaggatcacttgaagccgggaatttgaggctgcagtgagctatgatcatgccggtgtacttcagtctgggcaacagagagagaccctgtctc

SEQ ID NO: 230639 - DNA, 175 bp, Homo sapiens
agatgctcagaatgaataaattagcaggactttgaaaaacacacagatgcatggcaaaccaggtagtgcataaaattaataatcatagaaagcaatgtgctatcattcactgaaggtgctaggcactttgaaacactcattttctcaatacctaacttggaaaaaaagtccccat

SEQ ID NO: 230640 - DNA, 542 bp, Homo sapiens
taaaagtcatggtcttaccctcactttaagactgtttattacagtccctgtaatgtactctggttattttccaattcatgcaatacctgactttatattctaggcatctgtaagtgcaccaatagtggcagttagggactgaaaacagtgtctaatggtgatgttcagacaaaatatttatttgtgaaggtggctattttagtgggaatgttgtgacaattctccccggatctctatatgtctgaaatcgagtttttctgagcaaagataattacagacaaattaggaaagtttgtatattgagacattcgctgagagtaaagtttagaaatatctcactgttttgagctgttctagagcaataaagataaacgtatctctatccaattcctggagaaaatatgcttacattccagagtaaagatatagtctccctgtcttttttctccctagaaagaggtgtgtgactgggccaccagcagccctacataagggcgaagcttcttaattgcattgcgcccctctgcatatttggatactac

SEQ ID NO: 230641 - DNA, 440 bp, Homo sapiens
ttccagtagccttagttgataaatatggttttgaataagattgcagtcatttaccttaatgaacatagtaatagttattattttgttgaatgttatgaaaagctcttaaatacctgagttaaaaccaatttgccattatttttatttttaaagaaaaattgttggccgtgtgggtggctcattcctgtaatcccagtgctttaggaggccgaggcaagaggatcacttgaacccatgagttagagaccagtgtgagtaacatagtaagacctggtctctacaaaaaaaaaataaaaataaaaattagtcaggggtagtggcacacatctgtagtcctagttgcctgggaggtttaggtgggaggattgcttgagcccagcagtttgaggctgcagtgagttatgatcgtgctgctgtgacagaatgagtccctgtctctg

SEQ ID NO: 230642 - DNA, 414 bp, Homo sapiens
aacaaatttctcgtttcctcctgtagttttctggttcctatgaacagaagcagaattttttcacaacagaaagtgaagcaacgaagttttgagggttgctcctcatttaatgatgtgggatcttgttatgttacccaggctggagagcagtggctattcacaggtgtgatcggcacactatgacctggaactcctggcctcaagtgaccctcctgcctcagcctctcaagcagctgggactacaggctcctgacaccatatccagctgaacctgattttatattccagtggctgacaaactatttaactcctctgaactacagattctacccacctaatttttgccagtttgtatgcaaaagaacaacttatcactttttattttcaagccacttccctccagccatgtacatt

SEQ ID NO: 230643 - DNA, 461 bp, Homo sapiens
ccaggaactatttacagtaaaaagctttgattcactttgggaagcgggaagaggagttggagccacccagcgggagcagtagtaagagatgtgccattggagaaccagcttctgtcagaaccaccagactctgaagtacagaggagtggagggggtcagaccctggacttacctcctctagctcggatcttctactggtgcctcctgttagaggaactcaacaagaagccagagggcagggaatggaccatactgttcccgggcacagagaggggagagaaaggtggagaactgatctagaggctaggtctagggaggagatgaagtgacaataaccagaatttgttttaaagtagaatgcagaagagatagcctggctagttaactgtgcctggattaaaacttgtgctctgtttattaatttatagctactatgttattaggggcccattgcttacttt

SEQ ID NO: 230644 - DNA, 688 bp, Homo sapiens
aatttccatttgtaacaattttaatgggcaaatatctgagaacagtttttatatgggattatccataaaatgactttacatatccctgcagagttggccttttgcccgtggtgtgctagtagctttggctgatgctaagctttcctggtatgcgccctatttttaagaagtaattgcttttgaattaagttatagcattactaattcatgttaatgactaggaaaccctctgtaatttacaagatttttcaaattggtggggagtgaataaatacaatttaaaagagtcagaaatcagtttggcaaagtgtactttcttaatttctatttatgatgaagtatagtcataatttatttgtaatactactttatggtataccagtgaaagaactgtagtataaaaaagaggtattaatgttttatgaaatctcatgcatcagttcatagcataaaatctagctggacaactaagaagctatggtagcaaacagtgatgttgatggaatgagaatcatgaactttcatattacctcaaaggatttttttatcagtttttttcacacatcagaaaaaactgactgtataaacacttatcactgacctttttctatgtgtagttttgccttttatcttttcccaaatttttataaagagaaattaataaatattttattacaacattgtaaaa

SEQ ID NO: 230645 - DNA, 476 bp, Homo sapiens
tccccagatatcagccatctctccctctgcgaccagccaacatggagaggagagaggacgagaagctgtttctctggaccacctgcctcagggcacgtcggggacacctgggcaccagtagatctcagtgaactgctcggagaggatttgaacggggagaatgaaacacaggcttcagccccaaactcatacacacgaggagcagaagcaatgcctctcgcctagatgagctctcatattcctaaaagctgtgtgtgaggaagagctgctcctccccaaaaccccctgcacgcctgcttcctatcctcaggcctggccgcccctgggtgagaaaagctcttcttagaggacagaaggtgttccagggcggaaggtgtgtgcgaagttctccccagtctcaagacggctggtccgggcagctttaagctacttcacggcacgactgtacaagcttggaaactgaaattcatgctcag

SEQ ID NO: 230646 - DNA, 475 bp, Homo sapiens
agataaacttacaatttttttctatacacttaaaatatttatgatgcaaaatacacacttcaaaagattcatagttgtgaaataattcacattggaatgtaactttgatattatcaatacaaatttatgggaagtaattggaataataatttaaaaattagatgattatctatctaaatgtaatgttttggctgggcatggtgactcatggctgtaatcccagcacttttggaggccaagttgggtggatcacctgaggtcgggagttccagaccagcctggccaacatggtgaaaccccatccctattaaaaatacaaaaatcagccaggcaaggtggcagacgcctataatcccagctactcggaaggctgaggcacaagaatcacttgaacccaggaagcagaggaagctgtgagctaagatcataccactttactctagccggaagacagagtgagactctgtctcaaaga

SEQ ID NO: 230647 - DNA, 438 bp, Homo sapiens
tgatctcaaactcctgggctcaagcaatctacaagcctcggccttccaaaatgctgggattacaggggtcagccacagagcccagcctccccagggcctttgcactggctcctccctctgcaaggagccacttcccccgatattgtagataccatcccccaggtgtcggctggaatgtgtgtctcattcatgcctctgactgtcccttctaaagctgcagccccatctctcttccctgtcttcactcttctttgccttgtagtcaccattcgtcatactctgtatgaaatggatttatctacgtgttaaaatagatcagtgttactgtccttccgcctatgagaatgtcctccacgggtaagaaggaactgggggtgggggcattgggaggggctgtctctcttctcactgctctagccccgcctccagacagcgccg

SEQ ID NO: 230648 - DNA, 256 bp, Homo sapiens
tgatctcaaactcctgggctcaagcaatctacaagcctcggccttccaaaatgctgggattacaggggtcagccacagagcccagcctccccagggcctttgcactggctcctccctctgcaaggagccacttcccccgatattgtagataccatcccccaggtgtcggctggaatgtgtgtctcattcatgcctctgactgtccggtgtgtcgtcttctttactgccgtacaagtagtagtaggcggccgctgta

SEQ ID NO: 230649 - DNA, 467 bp, Homo sapiens
tcttgtgaattaggttaatgttttgcttgtttatcagcactggcatgcagagttggagacatgagtagatgtttgggaggaatcagaggtcaagggaggcagaaggaagggaaacaccatgacagtccctcttggccccttttcctgttgacaggtctggcctgaaagccatccagtgtaacgagagccttcttactgagctctggtaatttatccatgcacccagccttgaagaggaatatggctcactttgtaatcttcttaattgctctcctctcattatgccacattgaattggcactaaatgactttttctgccattttccgatttggatccaaagaacatagaaatactgtggattgtatcttaaagtccctgtccaaagtggccttgcctagatgaaatctaaaatggacagtcaagtgacattggcagagctgggggcttccctccatggccacttctc

SEQ ID NO: 230650 - DNA, 226 bp, Homo sapiens
ccctttgccactctttctgaactgccagcttccttctcacagctggatctttttggctcttttactttcaccattgttcttttctttcactagaaactccctctgctaccactgttcacccctgtgcaaagaatttccaaacctagttcctatcttctgtctatagccttcttgtgtatcttatctctgtatctctcaggtcaataaaacatctgagaaataaatg

SEQ ID NO: 230651 - DNA, 439 bp, Homo sapiens
aacttgcctctcataatcctcaatacctctcataatccacagtacctctgtgagtaaccaacctgccagtacacagcccatctcctgttttaccctccccctgcacacatggttgtcactcagatgaggtcttcctctctccctccacctcagccaggcctaggctgagcaaggccttctcccaaccctctggattttcattttaatacatttcttttctagtggtaagagtgaaacaaatgaccagcatggagaagccccgtctctactaaaaatacagaattagccgggcatgatggcgcatgtctgtagtcccagctgcttgggaggctgaggcaggagaatggtgtgaacctggcaggcagagcttgcagtaagctgagatcgggccacagcactccagcctgggcgacagagcgaggctctatctcaagaaaaa

SEQ ID NO: 230652 - DNA, 331 bp, Homo sapiens
tttttttttttccagtatggcccagggaagccaaaagattggacatccccgatttatgtgatggataaatgtattcactgtaaaattcttttcactttgctttatgcttgaaagcttttataacaagatgtttggggaggaggagagaactgggacagagagtatagacaactgttccagaaagttttgatttaaaggggaacagagagatgaggcagtagagtcaaaagaagtctgctttcaccccactcccagagatgagagaaatgacagcatttttatttgttgattagaaaaatccagtagagattttaattaaaattgatgatgc

SEQ ID NO: 230653 - DNA, 595 bp, Homo sapiens
attctgaaggaggggcttcagggcgcatgcccgggcagctgcgcgagtgaggggtggaaagaggtggctttttactccggggaacggtggcgagtgggggcttttgcctctcaaaatacgagcccctcacaactacccatgcacctgccaaacccggcaattaagcttcttacacatccagccccgacaggggtctacactacagataatgcccgggttcaaattccgactccggattccccactcactggatgcgtgaccttggaaaaatgatcaacctcttcaagctacacaaagttaaatggggatcgtcttgcctacctcttgacaggatactttaagtaggatcgtatctataagaacacaataccacactcaagcaatgctggacagttggacttaattgtggttaaaggcgggagtgaggtgggagtgcgataccaacggaatcacatcccgggctccattccctaagcagctgtgtgacctgcggcaagtgttttaatcccttctggtctgtttctcctttaaaatgagagaaaatagcgcctagtttacaggattgtttttaaggattaaataaattcaaaaaatc

SEQ ID NO: 230654 - DNA, 246 bp, Homo sapiens
taatcagacgtctaccaaatacccaacactgaataactagcttccccagcgctcttgcaagtgaaaagggcgttctgtgaaaacagcggctatttcagctcgcagcaccgagcgctccccgtgtgctttccctgagccagctgtcattctgcagcagagacccagagaatgtcaagaacacaagcactcaagaatggaaataactcaaacgtccttcagctcgagagcggttaaactggcacatct

SEQ ID NO: 230655 - DNA, 394 bp, Homo sapiens
aaggaccaggaagtgggggttggcctgggccaagggtggggcacccgggagagatgccactgttagagatctgagctgacctgagctgcgccaggccctacttgccccttagtggctggggctggtccttcccttaccaccaggcttcaggactggcagcagctatggcctctcccgtgtcctgagggtagcgaggaatcgggcctgggctagtcctggctctgctgtggagtcaccaagtgccagcctgtgcccctctggggcctgattttctcatccagacagtaggggtttgaacttccctctcagagctcccatggggttgtgaagggtccacggaggggtgagatctagagggttggcagtaggggtctgatgttgctgatctccgtgg

SEQ ID NO: 230656 - DNA, 437 bp, Homo sapiens
aacagatgaatggataaagaaaatatagcatatatacataatgaaatactattcagtttttaaaaagaaataccgtcatttgtgacaacatggatgaacctaggtgatattatgcaaagtgaagtgaaacaaggcacaaaaggacagataccatataatctcacttatatgtagaatctaaaaaagttgaactcatggaagcagagagtagaatggtagataccagaggctggaggagatgtgattggggagatgttggtcacagaatgcaaaggttagttagacaggagaaataagttcaagagatctattgtgcaacatgatgactatagataattaacaacctacagttggccctttgtatctatggattcaaccaaccacaaatagaaaatatttgaaaaaaaaaaccacaataaaaaataacaattcagcaa

SEQ ID NO: 230657 - DNA, 263 bp, Homo sapiens
agggcagccctgggctcttcctcctgacagggcagcacatcagagccacatggggtgcctttcaaaatgaaaccgaggtgcctgggctgcggcaccacatctgcctcggtgggtgtgggtggggcctgtaacctactccgtcctggggccaggtgtcagggaccttcccagcatgtgcaggggaagacagtccacacaaagtgggtgtgtctgccggaggctacacacgggctgtggtctgtgcctgggcaggcgagcagccg

SEQ ID NO: 230658 - DNA, 321 bp, Homo sapiens
tagccgttctaataggtgtgtagaagtatcttgttttaattttcagtgctttaatggcatataatattgagcatgttttcataggcttattttcctattttagatcttatttgctatttgcatatcttctttggtgaatttgccatctatacagctattttgtccattttaaagttgggttggttgtttacttattgtgagtttgaagagttttttgtatattttggatacatgtcatttatcagatatgtattctgcaaatagttccatccagtctgtggctgtgttcgttttaaacaaataaagcttaataacatgtgt

SEQ ID NO: 230659 - DNA, 348 bp, Homo sapiens
atagggttggcaaaaacaaaaagatcgttgatttgtatagaaaacaggaaatcactcaccatgatataagccaggtaaaaaaggaaccaggatgtgtgaaagataaaatctagagaacattgagctaaagaataaaatgtcatcagtcaaaaccaaccctaacgcgatattattttaaagccacgaggctcctactccccatatttgtacttctgatattcaagattaaattgccgtgttattagagggtagggatggtttactgcctctagagcccctagtgagatggaggagaaacagaatagaccagacgagatcacatgagcagggtaacgaaggatgtgggga

SEQ ID NO: 230660 - DNA, 410 bp, Homo sapiens
ctcacataaaaggtgtgttttaaaacactagtttgtgatttagttgtcattgccctcaatttcatttctaatgatacctacactggcccataagatcatgaatataaaaatattttaatactagtagtgtcggctgggcatggtggctcatgcctgtaatcccagcactttgggaggccaaggtgggcgaatcacgaggtcaggagttcgagaccagcctggccaacatggtgaaacccgtctctactaaaaatacaaaaattagcctgacttggtggcaggcgcctgtaatcccagctacttgggaggctgaggcaggagaatcgcttgaaactagaaggcagaggttgtagcaagctgagattgtgccactgcactccagcatgggcaaaagagcaaactccatctca

SEQ ID NO: 230661 - DNA, 475 bp, Homo sapiens
tcttaactctactgtgacttttgcttcctgcaatgaggtccctccctctcatgctgaagttacctagtctgctttctatcactgcagctgatttagagggaagtctgaaagtcttttctcttggccaggctggaagcaaagttaaaatggagaggacttcatttctttctgctgaaggtaccaatggtgagcgaatgaggctggtgaaaatatcccatgtcttcctgggggactgtgggaggtcatctgtagagggggtaccctaacaatgccaaccatcttgatcccaagctggagtccagagaagaggaaggcaaggcaggaatcataacccaagggtgtttagtggtgccagttaaagttaaatgtcccaggtcagagacaatataaatccaggccacactcatggaagtggtatcaaccttttgaagggaaggtcaaacatttggtcttctaaaaggattttgaaattaga

SEQ ID NO: 230662 - DNA, 464 bp, Homo sapiens
ccatttcttacttaccagactggcaaaagttcaaaagcttgaacctatactggcaaagctgtaggaaacaggctgtctctctaatacatgactggtagaaatacaaactgcttcaaatctatggagggaaatttgacaatatttaataaaagttatctctgcatttacccttaaccaagtaattatgcttttagaacttatcctgaagatacatcaccaatgatacaaaaatacatatgtacaaggttatttgttgcctcattattgggaattacaaaatattggcagctacttaaatgtacaagcataggaaattagttgaatatgatataatacatacaatgaatactatatgctgtaaaaaagaacggcgaagatctctgtaaactgatatgaagtaaattccaaaagatattaagtgaaaaaagcaaagtgcaaatgagagtatgtgacattttgtgtaa

SEQ ID NO: 230663 - DNA, 487 bp, Homo sapiens
caagcgaataactgtgactatttagacagcattttattttgtatttctttgtattgtttatataaatttttcactacttcaatgcattgataatataataaaattttattagtaaaaaccattgatatcctagatgatttggttggcaagatatcttacttaatttaatttactctgaactcccaatattcaggtaagaagctacgtgggtacaggaattctctgtgccttgctcacttctctaatctctgcctccaggccaggttaacccctatacccattataaaatctctgcaaatagttctgtagtgagttaatgaatgtcagaaatcaccttaatataataggtggtatatagtagttgtgctaaaatatgttaaagctttgttttgttaaatagtctatgtgaaccagtaagaattaatagcattgaataataacatttgaaaactgttcagagatagcaatgtgagcgatggctgataaa

SEQ ID NO: 230664 - DNA, 492 bp, Homo sapiens
taagtcaatcacacctgaggataaatctacccttcaatgtcccagcttgctgagcctctatatcctatttacctaagcaggtttaagtagggttttgtcatatgcaactagaaaatttcttccaggcataagccaccacacccggcctactggaagaattttttaggaagggataaagctaagtaactcaactggttaatttacatagactgttatattaaaatagcagatatgagttgtaataattaaaacacttggtagaggcaaatcaatagaccaatgaaacagaccagaaagcccagaggttaaatagaatgtagaggagtttagcctataataaaataggatttcaaattggtaggaaaaatgatagattttcaaaaactggtgctaggataactaggttgatgtttgtgaaaagaaaaattagcatagatccctcttccacaccttactttaaaataagttccagatggataaaggatataaaca

SEQ ID NO: 230665 - DNA, 227 bp, Homo sapiens
aattcgcggccgcgtcgacggctgcacagcaggaggttggggagccctgccacagcagacactaaaaatagaaacttttcttcatatatatgtatatatctctattattggctctggctcatattcttatgtatttatttattttagacacagggtctcactgttgtccgggctggagtgcagtggtgtgatcatggctcactgcaatcttgagctcctgggctcaa

SEQ ID NO: 230666 - DNA, 376 bp, Homo sapiens
tgagcttctgtctgttgtgacaggtaaaattacctatgaaatttgaaaatgatagctctaaaccaggaaaattggctacctcattcccctggcagtttctggccatgctgactaaagtgaagagagaaaaaacagagtctggatgatgtctctgtttttgtttttttttttcttgcctccaggtgggaagaggcccaaaagttcccaaaggtgagttttgggtggaccaaaaatgttaaaagtttgtatgctctctcctctaaataggaaaaaataatagcaagatcagagcccagggctggagcaaagctttagataaactaggggagaaacaggagtggggagagtgaaccactccagctgtttcttcagacta

SEQ ID NO: 230667 - DNA, 799 bp, Homo sapiens
ctcttcaaaggggatgtaaatacgttgatgctgagcaatctctaccactagcagcagagaataaacgctaatcatgttttaagttatagaataaaagctgccacggtgacacctgcttttatatcttaaactttaatatcaacttttcagtaacctccaaaatctgcacttttataagataatataaaataatagaaaaatgtgttcatggccagggaaagtggctcacgcctataatcccagcactttgggaggccaaggctggaggattgcttgaagccaagagttcaaaaccaacctgggtaacatagatcccacatctctattaaaaaagaaaagaaaatgtattcaccccaaccccatagatatactttgcaatcctgtgatttcaagtacccacagcatgcccatgagtaagtggatgtgctttccccaatttgagacttacaaaatagagaaggaaatatctaaagctcatctgtagcatcggcctgggatcagcagctttagaggtgggaactgcccttccagctcttactgtttcttggtgcttcattcctagccccactcacctttccctgtaggaacttggaaaagctgggcaagtcccgtggcaccagcctgcacaggagaggaagattgaaagaactggtttgctggtaatttttttaccataaaataccaaatgcacctgggaaaggtcatttatcatcacttttcctattttcttatgctctttggctctccaaacatgactgaaaacctaaaagggaactgaacatttttatttccctgaaga

SEQ ID NO: 230668 - DNA, 441 bp, Homo sapiens
agtggagaggcatctggttaggaccctgtgtaacaccctccagaggcctcctgttgaataccttccttggcctgtagagctctctccgagtttctccagcccctttagtgtgatgctgccaacctcagggcctttgcacgtgctgttccctctgccgaatcactctcacccctgctcttcacaaggctggctcccctacctccagccttcagccaaatgtcacctcccgtgagagtccttccctgaccatcctaggtaaagaatctccctcaaccttacttttctaccatcttgtttatttcctgcataatgtttttcacaattgtttcttgggttcccctgttttgctaaaacacatgctggtcttatttaattacacttgaatctccagagccgggtgcacagtaggagctcaacgaatgcttattgaatgaataaatg

SEQ ID NO: 230669 - DNA, 506 bp, Homo sapiens
accctacccagctcccatacaggatttaatttcttagtttagtcctctagtgtctatagcaatttgtatacctgtttgtatcacttatgtacacacatatctccccagttacactgtgatttccttcagggttagaagctttattttattcatcctgattcctcagtcccaacatagtacctgatacataaaaggtgcttaataaatgcaagtatgaagtatgtaacaggccgggcacagtggttcacacctgtaatctttgcactttgggaggccgaggtgggtggatcctgaggtcaagagtttgagaccaacctggacaacatgatgaaacccatctctactaaaaatacaaaaaattagccacgcgtgatggcgggcaactgtaatcccagctacttaggaggctgaggcagagaattgcttgaacccaagaggcagaggttgcaatgagctgagatcgcaccactgcacccagcttgggcaacgagtgaaactctgtctca

SEQ ID NO: 230670 - DNA, 334 bp, Homo sapiens
tgtggagttctttgcggtaatatggggcaaatgggcaagggagatagggcatattcttactttacatgatcaattatggagtctaaacagggtagggaggaaagtaagacaagaggtatactgaggagagggaaggaccaagggatttgcgatttgtggtcaaaaatcaaagtatcctgagtgaagcactgaaacactgaaaccagatgagcttgtggttagagtttaggaatttttttttttttgagacggagtttcactcttgttgcagtgagctgagattgtgccactgcactccaacctgggcaacagagtgagattccacctcaaaaaa

SEQ ID NO: 230671 - DNA, 362 bp, Homo sapiens
gagagaaggctttactagcatgctgttctggtctctgccctatttttctggatatttctgtgtgcaagccactgtcccatttggccctttatgttgtggtcctttggcagatgaaaaagaaagtgaacaagcaggtaaattccagctcaagaagtctactgcacaatccagaagttgagctgaatgattaagaggtaaactgatgtcagctgactccaactcagattcggctaagacccaaaggaaatctgtctgccttgactctgtattttcactaacagagtccacgtgtttttccttccacccggagcgtgttgcatttaaagctaacattaaaatcacacatcttgaagagaatagga

SEQ ID NO: 230672 - DNA, 628 bp, Homo sapiens
  misc_feature (628)..(628): n is a, c, g, or t
ccctcccttccttccttccttcctcccttcctccttccttccctccctccattctttcctttcttcctttcttcttttctttttctttgtctctcatgctctctctttttctttcctttttgttctacttttttaaatagaccacactgcactgaaatctacattacttaccaaaacctctggagctgcttctgtcttgtaggcagggagctcgtcctgtagcccttaggtcctcccagcctcctcctcctctgatttgtgggtgccactggggcagctgctgagtctcagtggttcctagtcatcaccaagttctgcccacctagatggtttgcacctgtccttaccagaaccctgcactgtctagatgactgaggctgcttctgcctaactgatctgctatctgtgttctgggggcaccccagggttagaggtaaatggcacaggcattgaaatctccaactgctctgactccaggttggtgcacttcaatgccaagtactaaccacacaataacaggatgccaccaaaaccttggtatggggctgctgcatcctaattaaaaagtaatagatgttattttttaggttctaggtttacagaacagtttccccttagtatgttgctn

SEQ ID NO: 230673 - DNA, 574 bp, Homo sapiens
  misc_feature (574)..(574): n is a, c, g, or t
ccctcccttccttccttccttcctcccttcctccttccttccctccctccattctttcctttcttcctttcttcttttctttttctttgtctctcatgctctctctttttctttcctttttgttctacttttttaaatagaccacactgcactgaaatctacattacttacctaggtcctcccagcctcctcctcctctgatttgtgggtgccactggggcagctgctgagtctcagtggttcctagtcatcaccaagttctgcccacctagatggtttgcacctgtccttaccagaaccctgcactgtctagatgactgaggctgcttctgcctaactgatctgctatctgtgttctgggggcaccccagggttagaggtaaatggcacaggcattgaaatctccaactgctctgactccaggttggtgcacttcaatgccaagtactaaccacacaataacaggatgccaccaaaaccttggtatggggctgctgcatcctaattaaaaagtaatagatgttattttttaggttctaggtttacagaacagtttccccttagtatgttgctn

SEQ ID NO: 230674 - DNA, 611 bp, Homo sapiens
gagggacagggtgaggatgagctgaggaagccaggtacaggcaggagtgaaatggagagattaagaacgagacaggttcatgtctcacctggagctgagttctgcagaaatggccttggaggaggagacaggagctttcacccctgctgggtgctcagctggaggcaggaaagccgattccatagctcagtgggaggtctcctctgattacactgtttgactttctgtcttgctttcttcttgtctttctttttcctaacaatcagtagtagaattatagcgttctcagctcccacacagtggcacacccctgagaaggttgagtcacgacctgtcatccgctgatcctagttaatgcatggtccccgcacagccaggctcaccttctgagcagcctccatcctgagccagtctgcagacccctcacctcccagtccctccagcatcagaggccagaaagtactctttctattaaaatgaaaacaatgtacaaatgtcaaggtctgtcatttacacaaagtgcttaatttctttttaatgcatcaaattttattatttctgacatcttactgtgttcatgcagctgtaagaaaagcacagagcaggctggg

SEQ ID NO: 230675 - DNA, 158 bp, Homo sapiens
tctctgcctctttttttctctgcattgattatgatggtttcaagcctttcctttagccattctatttttggacttgtatgttgtttctaactagtttattagctgtgtaattgcatctagttcccaattgttttcctaaccctgcaatctcttcatct

SEQ ID NO: 230676 - DNA, 495 bp, Homo sapiens
cagaggtactgagtggcagattactctgaatacaaagacatcatttgaagagggtgggtaaacctgttgatttttggaagcttagtgccattttctatctaagagccaagtatctttttgaactaaaatatgtttagactttagagcattatcagatataatttggggaataggagctgctggaatagagtcccagcctcaacctgattgagtaacctctaactctggccatgtttttctaatttgctgtctcaaaaacaacttaacaagaagtctagttctgtatggtaaataacctttattttcttagcctttgaaataagaacggttctttctttttttcttttattttttttaagattttcaagtcagcttgatatgctccttctgtaaacatagaagcacaaaatcctaattttgttcagttttacaaggtttgccgaattcccaggaaaatactgtaaggattaagaaataaagagaagcacatttttg

SEQ ID NO: 230677 - DNA, 397 bp, Homo sapiens
taataccttttttaaaaacttcctgtaatctttagtgtccactcaaatatatttatacactgtcctgtggtttcttttatattgtaatttaatgtttacagtgcttttatttttgggcagtgctcttgttcctctaactacattgtaagccactcaaaggccaaaatactgtgttacatatttttaacattctcccagtgtttgcagtttgtagggactcagtaaatatttgtagaataaaggaatggatagcagtagatattgaagaaaaaaataacgtggcatgatccttaatgtccagcagtttacaaccaatctgtggtagaaaatacatgtggaaaaaaactttgatttatgtgactttttttttttaatttaaaggccctctgtggatctg

SEQ ID NO: 230678 - DNA, 511 bp, Homo sapiens
caggagctgtgagaaatgcagaatctcaggccccagcccagacctactggatttgagtctgcattttggcacagtccccaggtgatccacgtgcacattagtgcttgagaagcactgtttccagaaattgactgataacacaggacttctttacttccaccaaagttctcacagctttcagctcttgggcgaccaactcatcctggtttgcccaggactatcccagagatagtgctgacagtcccatgtcctgggagactccccagtcctgggcagaccaccctatcactcttatctgtgggggtcctaccctcctcctcccaccaaactaaggcagagcctataaccaagaggcagaaagcctagaaaacttcctttgaggagtcaggaaagatagatagtggtctttcctttggggtatggaattgaacaaggcctgagccaggactcacaagaataagaacatggcaaggccctgccctcccagtgggaggtgtggagagctggcaat

SEQ ID NO: 230679 - DNA, 197 bp, Homo sapiens
accatcaactatgagaaacgttaagattctttcaattttttgctgtgtagtacagttatacattaaaattggaaagctatagctataaacagtttaaaaagatgtgtcagtttacatttctatggacaatatataatgcctatttttttctgtccctgcctgtaatggaacttactcattttaacttctgcctctac

SEQ ID NO: 230680 - DNA, 453 bp, Homo sapiens
aggcatcctggactagtttttctgtcccgactcctattccagctcatttcctccatcctgggaagattctctgcatacttaactcatgtcagtctttaatcttgtgtccatgtgtgttagtgcagacaagggcttgaatatttgtacagacatttctaatagagggtatccagcattaagaagtacatttgcatagtaaaatgaactaatgtggatcaaaaattaatccatgttgaagatggatctttctagaatttctaaaaacagatattgaaaaatggacttatctttccagaaagtcagttaagtagactaagtcttttaagtgcgaagaaatcttgtgcttccaccgaaatgttaataaactcagactccagagtttgcctgactagcttcatcagcctctgaggggctagacttattaaagaccttaaaaatcatataaaagtttaa

SEQ ID NO: 230681 - DNA, 366 bp, Homo sapiens
gtacatacacagttagggatcttacccccagaatttctaagaagtattcctaagggtcagaggttttccttgataattcagatctatttttgacttggtaaagcaagttcttatttactaactagacggtaactttaaaaggatagcttctcctctcagaatcttcatattttccttcatactataacagggttgatagtttccaaaggccctgccagttctatgattctatgtgtatattcatttgcttggaattagtcacctttgaaagctctttagtggcatctggagccactctaatttgtagtgagccaaagtgaatatatagattaatggtcacttctgcttctctctttgaaagcaatt

SEQ ID NO: 230682 - DNA, 380 bp, Homo sapiens
gaatcttgaaatgaattcgaaagaggagaaacatatactgtgcccagagcataataaacctggagagttgtgctccttagtcctgggaactttctcagtactgtcgccagttgtaaaccgaaactctgcttctttgtttctgctccttttggagcagtgattgctctgtagttttcctgaggctagattgaaccttatcacctcagctgtgttttttttaaatgtctgtgacttgcaatgtggctctttttctaaaaaatatattaaatttgatgttaaattagggagaaaggtagttacttattgatatggttaggctttgtgtccccgcccaaatctcatcttaaattgtaatccccataatccccacgtgtcaaggg

SEQ ID NO: 230683 - DNA, 394 bp, Homo sapiens
ttttcgctacctgacattgcaactgcctccctttccaacttgaatgcagggacttcagtagttttcttcattgttatattctcagagcttagagcaattcctggcatacagcaggcactcaacaaatacttgttgactaaatgaataaactagctcaactatcaaacggatctatgcagccaaagagaccctaaacattcaaaggtaaagtccttacagttaaagaaacatttggacacagcctattgggagctctaaaatattggtgccattgattcttctttattatctatatgtaattatctcaaaggatgttcatacatttctccattctgtcccacttacaggcaagcagaggaacaagaggtcatgaggaaatcatgatgaattcata

SEQ ID NO: 230684 - DNA, 384 bp, Homo sapiens
cattattgaattattataatgtaattacaactagatttctcttgcgggtgactaacatttgtattgttgaattattatgatataatttgaattttttagttaaaatgttaaataacataagtgaagtttttttaaaaaattatacattttacagaagacaaaataatgtaatttcctttacattctacatttactattagaaaaatgtttccaggctggttgactgatattcttcagcacacagctctgacttaaatgagtaagcaagggatgaattacaaattagatttgcaatgaaggtgcaataaaacattttttgtgggggaaagaggctcataatgttacagaaaaaaacatcaaattttccagtaaatgtcaaaggtg

SEQ ID NO: 230685 - DNA, 375 bp, Homo sapiens
tggccctcactgtgtgactgctatagcaccaacacacctttgttgagtttatgttttggggaaggttgatctcaagtgtatttgtttaaagactccacccaacgttcactcttggtggtgaaggcaggggacacaactctctggatgttggatttacagcattagtaagtctgttcaatataatttaaagcctgattataaatgattttaggatgtcttaatgtttctgttcctaaagcctttaagaaaagtccatagatttcatctgcattttccatacagggtgcaggtgataggtgatttgaatacttgctattttgtagcctttcccattctgaaattcactttcagttcactcagagatgtaggtgaaag

SEQ ID NO: 230686 - DNA, 469 bp, Homo sapiens
gtagaaaagatagactttagaagataaattgttagtgaattttcaatgtagttctagggcactgatatatcctgactgattcctaggaggcaaggttctatgtatgttagaaccagtgttctctttaagctgagcaatgcagtaaaaaaaaatatttttgttccaagaatatcactggccatcctggtgtctccagctaccaccagaacatacaatgaaaagatgaagtggaaaatgacgtggtgggtgatgtataatgtctcagttgtgaccagcctggccaacgtggtgaaaccccatctctactaaaaacacaaaaattagcagggcgtggtggtgggtgcttataatcctagctactcaggaggctgaggcaggagaattccttgaacccaggaggcagaggttgcaatgagccaagatcacaccactgcacaccagcctgggcaacaaagcaagactccatctc

SEQ ID NO: 230687 - DNA, 811 bp, Homo sapiens
ctgctcaggtaaactgggccccttctgattagctgctgtgcatctcctatttttctgaaaagctgccctttttaaagttccgttggacagcctggcacctagcaggagtgactccattctggtttggtctggtccgttgggcctagtgtaagagttcagtcctcccataaattttatttaagattattcttgaactactattctccttgctattcatgggctttcccaattaccaatataacagagcctgttctgaatcatccataatccaatccttcgcatagcatatattctgcactctgaaaatatgtggtgagtgggtgggtgagagagtgagttcaccgacccgaccgataaatcccaagcatggagggtagaaagggccctctgacatcagacggaaccaagtttacatgcaggctcctttatgcccagtttgtgtgaatttaaggaagttatctgagtctcttcaacctgtagttccatcctctgtcaaagatggatactgaaaggctgttgcattattttgggggagggttacacacaatgctgtgtgtgcgtgtgtgtgtgtgtgtgtatgtgtgtgtgtgtgtgtgtgtgaatagcaagtccagaacatcccagtttgcatgggactgtccaggttttagccctgattgtatgggactgtccaggttttagccctgattgtcccgcattctgggaaacttcagtcgcaggtgaactgcaattgttgttaccttgtccccttccctaagcccataaaactgttttgggttgttactatccattaaaaaggaagtgctgactt

SEQ ID NO: 230688 - DNA, 425 bp, Homo sapiens
ggcttcactgttggttgggattgaataatgagtattgtgatttagtaagtgtaacccatcttgaacttcagtttagatgtaaatatctttgtgaggtatctttctcaaatgtgacatgtaataacaccaagtacttaaatcagctgaatttagaaatcaccatgactcgtaaataaaccaaaaatttaaaaaataataaaatctatccaaccatgtttttctcaccaaatatattgcaagggctaataagttttatactattaataaatgttaatgtatttaaatatttactttctctacatcagcatgtcctcatatttgtttttgtgtataatttataatgcttgctgttataacttacaatatgtcaccttattttagcaaatataagttgtaatcaattgaaataggtaatataattgtat

SEQ ID NO: 230689 - DNA, 552 bp, Homo sapiens
tgggggaaactgctcccatgatttaattacctacacctggtgccacccttgacacgtgtggattatagagattataattcaaggtaagattagatggggacacagagccaaaccatatcagttgggtactgagaaggacatactgtattaatcatgccttcttattgtctgtattttctaatgttttgacatccatattttctgatgttttgacatctggggacttgctgatcttggagggactgaccctctcagggttaactcattcctaggggtagcaaactgctttccctagagcatgcctttcatatcaaatcaaccaatccaaacctctactccaaaccaccttctttattgggctctcatactctgagcccctattctcctaccctaattaccacagggccaggtactaaacaacttgagataatccctacactttgtagcctgctcaaaaatttaaactagccaatgctaaacctatttagcctgtgtaccctgcctcactcatttgttcagtgaaaaccacaataaagtttcttgccaatgttt

SEQ ID NO: 230690 - DNA, 545 bp, Homo sapiens
cttcctgtcactctcctatgtctattcttgtctccaacaattcccaacctcttgtgctgtggtccatggctctccatgcctcatgcctgtgctgtcctggagcacttccttcaactgatacacaaaaaaagtcttgcttattcttccctgatctacctgggtttcaccttcacctgtatgcagagttaatgccttcccgctgtccgttcccatatcaggctgtgtactattgaaatattcatcactcccttcaggctgtggcttaatgtgcccatctccttatcagccttggcaatttaaggacagaggttttgttttgttttttgttttttaatctctctcatttttgtgtgttctcaggagcaggagagaagggatgttaatatgttgaattaatgttaatcattaaaaccatcacaaccccaaatttctttaatccctacttaatccaaattgattgaatttgtacaattttcatgaatgttgaataatcttgaggtgaaataatcttatttcacaaaataaaaatttgttgaaatatcatt

SEQ ID NO: 230691 - DNA, 750 bp, Homo sapiens
  misc_feature (702)..(702): n is a, c, g, or t
  misc_feature (708)..(708): n is a, c, g, or t
  misc_feature (747)..(747): n is a, c, g, or t
acctgggaggcggaggttgcagtgagccgaaatggcgccactgcactccagcctgggcaacaagagcgagactctgtctcaaaaaaacaaacaacaacaacaacaaaaacaggaaactgaagcatagtagaggtgaaatgcttttccaaaggttaataaacataacgtctacagtagagtcttcagttaacctcttacattcgttttatgagcaagcaggctttctccattaataccacattttcatggtattgaataactcaggttgaacagtctttcctgaagcctttctattcttcccactcctaatacgatggcctacttttttggggtttttgtggggaagggactggtgtatcattgtcagagaaaagagaaaccatatttaaccagggccttagcagggcatgagcacagtcacagccacttgctcttgaccttgtgctttgatttcagtttaacacttctaaatttttgtactgcttcctcattctcctcttttgccaggctctggggaagatatagttcatcgacctttttaagagtatctcgttttctttgtagcatcatttccctttctaatgtgcaggagaaaagaagtacctgctttcagacttgccctctagccaggaaaagcactaagcctttggtgcaaaggagaggaaactatttggtatagtacagagaatcgctggagcctgngaggcngaggttgcagtgagcagtcttgccactgacaccagcctngcg

SEQ ID NO: 230692 - DNA, 391 bp, Homo sapiens
cctcaaatggtttgttgactaatccatatttttccccattgatttgaaatgctgaaatgtcgtttttcttgtttagtaaattttcttatgtacttaggtctatttccagactttctgttggtttgtaccttcccccatatcatacccttgcatgcatatctgtgagggaggaaaatagggtagtgttccagaagagaaaaaacttagagacaggcagctatcttaaaaatagctcctgatcacatcactgcactccaacccgggcgacagagcagaccctgtctctcacacgcacaaaaaaaatacctcatgttggaagttctctgaacctttattggttcagggcgcatctccataaaaaaatttaaaacaaaaacaccttgtgttatca

SEQ ID NO: 230693 - DNA, 455 bp, Homo sapiens
agctatgaggtcgtggggtaggtgcacacgtttccagccctgctttggtgctggtagccactggcccaggagcattttcctggcatccaggtgagtgcgcagccacacgtgcatgaagccaagcctgagtgtctcctgagggaggtgggctgaggaaggaggatgacctcacaggctgggtagagggatgaggttccttactggtccacagcgatggagactgcctcagggctccaccagctccacaacaccccctcactgaaatgacattcattcagcactgactgttggtccactgggcgcacacccttggcctgcctttgggacagagatcccttcccttttatcttgtgcaggcccagaattgaggaggtgccccacaattgtgtgctgatgaatatatgaatgataaatacatgaatgatgaataaatacatgaatgacaagtaaacgaa

SEQ ID NO: 230694 - DNA, 572 bp, Homo sapiens
cgctgatgggaaggaggggacacccggagttagggacaaagtcacgaggccactcgcagagccctcgcgcgcgtgttcatcgactgccccctgggcggtgaccttattcagcaagacctgagctcaggggcggggtgacatctaactggagtcatcatgatggagccacgtggtccaacagtgcccggtccttgtaaccaggagggcccgcagtgtcaccacttcctcgaagtgaggccactgccctcagcttcttggagacagcagatatgagcagaaacccccaaaagtcaggagcaaatttgtttcagaatctctccaaatctgtggcttaaaacaagttcagagggattttggtgcacagctacagactgagctggtttactgcacatttataaatggaaatctttatttcttttcctctctatgtttttaagaaatcctgttgcaaggtcattaatcacgttatccattataccacaaacaaatggatttgtcacttgtgcgcagaagccgaggttgattctgaaagcaaattgtaccaaaataaatgaaattattatgataatata

SEQ ID NO: 230695 - DNA, 606 bp, Homo sapiens
ttcagaacacatttttccatagatgagattttatggtcttcagagattttttttttactctggtccacaaaaattgatttaattctaatatccatttctgcaactctcattgtaactatgtttctatggaaaatgcatttatcattctgccttgggatattaggaatatatttagttttacttctgaatgttctccagaatttctttggttacatccatggtgttaaatccattcagataccttacatggacaaaaatcatggattggctcacataattgtaaagcccaggagtagttttggcttttttcttttgttatgctggatctaggtgcttgaacagtgttctcaacatccatctgtctatggaccctcaggaatgttggctttcttctcgggcagagtctcgtgtgctcatcttcaaccctactccttatggggtgggagataagaaagctgtgattggtgacaccctgggatatgtgagtgcccacttttaaactgttgggtaaagaaaattggagtcctctaaggaagttagtgtgtttttaccagaaggaggaggaattgatgcactgaaagcaggcagatgatggagtttgtttcc

SEQ ID NO: 230696 - DNA, 753 bp, Homo sapiens
ggctcatggggtagtcaagagtgaatatggggtatgacttttccccattaatggccacaaacaaaaattagtccagttggggtgcaaatagaggctccacaacatctgatatctatccattgctgccaaattgggtctgtagagatattcttgccctgttccaatggagatacccaaccaatctttgtttcacagagtgggtcagtactcctaccttcccagattaggcagttgttttgtttgtttgttttatttttttcctgtatgttgttatctgagagaagtcaccatatatggtttgtttccttgctcacaagtagaatcctgtatacactgttacagccttggggactcggcagcttagagttggatcaaagcattgaagggaaacctccacttttgtgtcattaatacacagtgggtgcaaaatatagaatcattaatgcactacagatatagatactcagatttccaggttcagttaatagcagttgagggtgaggggttcaggtagaatctattaagtgctggagagataaagtagcatggcaccagtggtgggcatatcttacggaaatgtacttccactctgtccctgttctaggtagtctttgatttgatctggtgtccgagccctgcctcctcagtcaaatcctgcctcctccttaagttatgtctaggtgttcaccttatttggtcatggtctgatcagttggcagcctgtgattggctgaagctcagctgctgttacaa

SEQ ID NO: 230697 - DNA, 728 bp, Homo sapiens
aagacagacgtttaaaacattagccttctctccccatctggagtatggtttggaagtcattgctttgtagtaaggcattattttcctggtacattgccaaggaccaacaactgttaaatcaacaaactaagattttcttctagatttgtatcggattgtgactttgctttctccctttcatcacccattaatgcttagtaaagccactatggacctcacgtatctaaacccttccctgaaatgcatctctcttttcataccactccaatgggaactcctgttgatttgtttctgggccctgacagattagcaggaaaagaaagcgctttagaaaagtgagaggggagttcagaggttagaggggaatcagaaaattaatgtcatgattatcaagaatgtttccagaaggcagggctcatcagtccttgacaaaaaggctgatgaaaaaaatggagttgagtgcagccgatcacctcaataatcctagcagtttggcaagctgaggcaggaggatcacttaagtcccggattttgaggttgtagtgcgctgtgatcacaacactgcactcggcctgggtgacagagctaggctgtctcttaaaaaaaaaaaaaaaaaagagagagaatgagaaatgccatttaattttgagcctggcaggtctttggtgacttttgagactagtttactgtggaatgttgaggtaaagtaggactgaatcacatgtaga

SEQ ID NO: 230698 - DNA, 497 bp, Homo sapiens
aagacagacgtttaaaacattagccttctctccccatctggagtatggtttggaagtcattgctttgtagtaaggcattattttcctggtacctttctctttggcttctttctttttctgatcattttccttcacacgtttcaggaagctatctcggctcttagagtgcttaatgtgctcaatacgcacattaattctcttggcaagaatcttgcccttaacttgtttgtttacaacaatgccaacagcatgctgggtaacattgtagactcttccagttttgccatggtaacacttgtggggcattcctttttgaacagtccccattcccttgatgtctacaatatcacctttcttatagattcgcatatatgtggccaaaggaacaactccatgttttctaaaaggcctagagaacatatatcgggtgcctctcctctttccctttgtgttcgtcattttggcgaattactggaagatggcggttccccccgcgt

SEQ ID NO: 230699 - DNA, 228 bp, Homo sapiens
gccggtcgactcatgaggagatcccccgagattgagggtgtgctgccccgggatccccaccccgccctcggcctgggtgacagagctaggctgtctcttaaaaaaaaaaaaaaaaaagagagagaatgagaaatgccatttaattttgagcctggcaggtctttggtgacttttgagactagtttactgtggaatgttgaggtaaagtaggactgaatcacatgtaga

SEQ ID NO: 230700 - DNA, 635 bp, Homo sapiens
gtgaagtttcctttattgagaagcagtggtatagatggaaaccttattgcctcaatttgtcattttattattcatattaaaaatcagaattttattcttttgctttgaaaaggaatcttcgggtcagaggcagtttgtttgtttgtttgtttgtttagctactttatgttcacagaagagagagctaaagtcccttccagctacatgtggctgggttctggaggtctagtctagtgtttgcccagggttaactgagaggctggagggcaggcagcctatcctgcgtcacccaggtcagcagcacagtcaaggcttccagatctctgccaaggacttttcctataatttactgtatttcccacaaccatgtgacattcatctcatatgaaaaattaggttaaactttgaactctccccttttgcaagaccagatgaagtcctaaccttgaagtgacccttttcagatgtacgaaaacacagcagaggtgaatcaatctatgacagacactctgagttccctctgaaaggctggccaaggagatggggcaggagagctgagtttctcaaaccgggcaccacagatccctggacttctcattagcagctgccctagtttaagataggattgcatttct

SEQ ID NO: 230701 - DNA, 516 bp, Homo sapiens
cgaattagtatataaaacgtacaatgtattttccttataattttttacttcttccatcctgagcatgttttctgtattttttggctatgtgcatatccactttggaagtgctgttcaatattgggttgtcttttcctgattgatttgtaggcgttgctagcatcttcggctgcatatcctcttccaggtatatggattgtgaagatcctccccagctgtagcttgctgtttccaccttaatcatgttttagcaggacagaagtttatcacgatgacgttcaattttaatgaatttcgattttaatgtagttcagtttgtcagtcttttatagtcattgctttttgtgtccttttagagaaatctttgcctacttcatcacttgtatgtatttttaaaataataataaatattatttattatacataatatataaaataaataatataaataaaatataataaataataaatattttcttatttaataataaaataataaaagtaattattaatatt

SEQ ID NO: 230702 - DNA, 754 bp, Homo sapiens
tggcacgtggctggcccagctcagcctccccgcctctgcccttgcaggtgccctgtacccaggcctctgtccatgcagccagagattcaccccggtttccttcaactccttccccagcttcacagtctcggcgcttctgctcttggcttccagcccatgcctgggtcccctcctctgctacgtccctccaaggccctatgccttgcgccttgcctgttcctgtgtgctgtggggccaccactccgatagctgtgaactccaagggcagccccagggaacctggtgccagagatggaatcttgctatgttgtccgggctggtctcgaacttctgggctcaagagatccttctgtctcagtctcctaaattgttgggactacaggtgtgagcccccacaccccgccaggtttctgatttttaataaagactccctctggctgtgtgaagaaaaggtacctgtactaaacggggggaggctggggcctcctaggcaagagatggtagccgcggtggccatgctgggtgcacaggccgggacagggcggaattccagaggaaccccaggtttggggctggagtaatggcgccctcacccgtgggcgaccctggagtggggactggagggaagtggttccacgagtgagactgagtctattaggcctcccagtttcctggagtggcagctggatatgcggtcctgagagccaggaggtgcacaggtcacgactcgaaaagtgaacaggcctcctcctct

SEQ ID NO: 230703 - DNA, 451 bp, Homo sapiens
gttaaccaaactatgtcttcattgttttaattagtgacgctgcagccagaagagcaaaactttgcaaaacaacctagttctattactgaacactgttgtgtggcctcttaaggttaaggcccgagagtcacatttagagtcctaccccgtcttcatagtcccccaatacatatttaatgactaaagtaataaatgaatattgggcaggaaaggcaagaaatatgcctaacactagcaagaagagacttaaggggaaaatggtaaacactcttagcacttcatgtacatcttgcctctgaaataagattcaagagctgattcaactgatttttactagtagaagcaataagtataagtagatgagaaggaaataatagatgtaaaaggcatggaatatgcatacaaaataatattactgcttaattatgacaaataaatatatttgaatcct

SEQ ID NO: 230704 - DNA, 352 bp, Homo sapiens
acagggtttcaccagggccaggttggtctcgaactcctgacctcaagtgatctgaatgcctcggcctctcaaggctcatccatgttgcagcatgtgtcagctcattcctctggattgctaaagtgttccactgtatggaaatacctcagttaatcctttcaccagctgttgtacccttgggtcctctcccctttttggccagtgtgaataatcctgctgtgaacactgatgtacacgggagtcattccttgcttctgctctgaccttttcctttctgctggtccacttaccctcaggacttctatccctgggtctcctcctacctggtttgctccatcctgtgtctcttcat

SEQ ID NO: 230705 - DNA, 610 bp, Homo sapiens
tgcctccttgcccaactggcatttgggagaccaggaattgagaagttgggaaattggcattccgtccagtgtacaagatgtatgtgttctctggaccactctgcacgtagttctggagactgagctaggaatagacccacaagatgacttcctgtgctacaatgagcaaaataaagtttgaaataaatgtgagcattgacagatcttgtcccctgctctcatgtccaaaatctaagtagcggtggtttcttctccccaacctcgggacttatcccataccgggtcatgggagcaggaccatcagttcctctgtctcataggtgccctggccagttgccttcctgggtgaaattacagcttccaggctcagaggctgctggtccagctagtttaagtgatatcatcttttttttttttttttccttttttgagacaggatcttactctgttgcccaggctggagtgcaggggtgtgatcttggctcactgcaacctctgcctcctggctgaagtgattcttgtgcctcagcctccccagtagctgggaccacaggcacgcactaccactcctggctaattttttgtatttttggtggagatgggttttcac

SEQ ID NO: 230706 - DNA, 1954 bp, Homo sapiens
gagagtagaggggatgtaaaatcattatgtggagagctggagaacaacctgatgaaggaaatcaagtgagctgggcaaggtgtggagtccatttgagattgaagatcaataaattatcgtggtattggtctgtcctgttgtgtgaattattttttaaatgtttcccggcagctcaggtccaagtgtcaggaaagcaggtagttgtatttgtcctggatggggctttcttggatgtgacagaaagacaatgaggcaagggaatttggggaaaaaatgttcagtttttaacaaatgatggacagttaggagaactaagctggactaggaagtgaaaataggtgagtctgatagagtagaatgaactgtgcttggaagacaggtgccatgggagtaatcgggtaattaagcagcgagagtctcattagggtgagagcggaggcatctgagtgagtggatctggaggtgacggtggaggtcagcgtatggttttggcagtcgtggcactcacctctctgagggcttccctgtaggagggacataaattcaggaatcatggccaaggaaacatgctgttttactggaaacttgcagttattaataaatacattacataaaagcagtgctggagcctctatggcttagggtcagggcttaagtaagacagcctatcatctgccttctaaacttgaggtggcccagtttggaaagccgatttcctgaggtagagcagaggtgtgtgtcattgactgttacggcccccctcctgagtagggaattgggaccagtgagtattctcaggatgggtggggctgaaaagaaggggatgagtgtttgctccccagtggagacaagcagaaatctgggagggggagagtattttcatgtatgacaagatccggggtgtgacagtttgtgcacggttacccagctgcctttccctaaagacacggcctcagggcaggagccccccaagctgtggatgagctgctcagagttctgagctggggaggaaaggggcttctgggcgggcaccagcttggtctggaaggatcagaagatgaagacttgctcctctcccaccaccccacagatgccagttgccatgacaacaggtgtctttgatatgaaaaggacattttggggtcaattggcaaaacttaaatgggatctgaggaatagaaggtaaaaattggtcagtgttaatctcctgatattgattgtaggagaacataggaaatactcactgatgtcttcccaggagttagccattacactaggtatttatggtttaggaaaaaagtatgaattgcattcctttttaaggctgaatcataggtaattggatgtgtacaccatattttgtttatctgttcatccattgatgggttttgagtttacaccttgtggctattgtgaataactgctatgaacactgatgtacagattatgtttgcatttccgctttcagttcttttgggtgtatcttagaagtggaattgctgggtcataaaataattctgtgtttaatattttgaggaaccgcctgactgtcttcaacagtagctatactatttttgtttccaccatcaatgtgtaagggttccattttcttcatgtccttgccaacactgtcttttttaataatagtcatcctaatgggtataaagtggtatcttcttatgcatctcactaatgaaaacatttttttcatattttgcattagtttacatttgaaagtattgctttaaatttgtgaactatatatgagcaatgtagagaaatatttcgctttaagcaatggttgactggccaggtacaatgactcacacctgtaattccagcactttgggatgccgagttgagaggatcacttgaagccgggaatttgaggctgcagtgagctatgatcatgccggtgtacttcagtctgggcaacagagagagaccctgtctc

SEQ ID NO: 230707 - DNA, 1691 bp, Homo sapiens
gagagtagaggggatgtaaaatcattatgtggagagctggagaacaacctgatgaaggaaatcaagtgagctgggcaaggtgtggagtccatttgagattgaagatcaataaattatcgtggtattggtctgtcctgttgtgtgaattattttttaaatgtttcccggcagctcaggtccaagtgtcaggaaagcaggtagttgtatttgtcctggatggggctttcttggatgtgacagaaagacaatgaggcaagggaatttggggaaaaaatgttcagtttttaacaaatgatggacagttaggagaactaagctggactaggaagtgaaaataggtgagtctgatagagtagaatgaactgtgcttggaagacaggtgccatgggagtaatcgggtaattaagcagcgagagtctcattagggtgagagcggaggcatctgagtgagtggatctggaggtgacggtggaggtcagcgtatggttttggcagtcgtggcactcacctctctgagggcttccctgtaggagggacataaattcaggaatcatggccaaggaaacatgctgttttactggaaacttgcagttattaataaatacattacataaaagcagtgctggagcctctatggcttagggtcagggcttaagtaagacagcctatcatctgccttctaaacttgaggtggcccagtttggaaagccgatttcctgaggtagagcagaggtgtgtgtcattgactgttacggcccccctcctgagtagggaattgggaccagtgagtattctcaggatgggtggggctgaaaagaaggggatgagtgtttgctccccagtggagacaagcagaaatctgggagggggagagtattttcatgtatgacaagatccggggtgtgacagtttgtgcacggttacccagctgcctttccctaaagacacggcctcagggcaggagccccccaagctgtggatgagctgctcagagttctgagctggggaggaaaggggcttctgggcgggcaccagcttggtctggaaggatcagaagatgaagacttgctcctctcccaccaccccacagatgccagttgccatgacaacaggtgtctttgatatgaaaaggacattttggggtcaattggcaaaacttaaatgggatctgaggaatagaaggtaaaaattggtcagtgttaatctcctgatattgattgtaggagaacataggaaatactcactgatgtcttcccaggagttagccattacactaggtatttatggtttaggaaaaaagtatttgtactgtatttgtaagtttgagattttcagaaggaaaaaattaactatttctggaaggagccattttcaaaaaatggctctcagctaggaccccaattaaaaagtaagtggctgggcatggtgggtcatgcctgtagtcacagccctttgcgaggccaagacaggaggatcatttgaggccaacagcctgggcaacatagtgaaaccccatctctacaaaaaaaattttttaattagctgggtgtggtggtgcacacctgtagtcccagctactccagaggctgaggtgggaagatcgcttcagcccaggagcttgaggccgcagtgagctatgattgcacctctgaactccagcctgggcaacagagtaagaccctgtctcttaa

SEQ ID NO: 230708 - DNA, 646 bp, Homo sapiens
cttgattttatgtcttctcttgatttcttctttagctctctgttgctccaagccgagtttttctaatattttgtcacacatttaaaaaataaagccaagaattggtacatttctttaagttaggatgagttaagagaattgcagctgttgtgtggacaaagttcatatgtgttctgtgacgtggtgtgaactctgttctatgtctggtatctaatgtcaccaggttgctcagacaggatctctggtcaccattatctgaattctgcctggtgacatcagtatacttgagcatttatctgaacacctaggctagcatagtgctgtcttggtcctgaaggcagagcaagtgagaattctgactttcttttgatctagaagttaagtaactctgtagaccttttatattactttcaccccagaagaaaattccatttttcccctttttggatgctttaaggatcaactactgataaaaataaaagttgcaagacaacttcaagaacacaagaaccgcagttacttttgcatgaacctaatagataacatttgtgtaagaagggatatttcgatatacttggtaactgtgagctgagatttaatctttaggcctgcttttaaaaaccaaaccagcagctgtctactcctt
